United States Patent Application Publication US 2018/0126003 A1 - sequence listing, part 148

SEQ ID NO: 259747 - DNA, 6870 bp, Artificial Sequence
  derived and/or modified sequence
atggacgaggaggaggatggagcgggcgccgaggagtcgggacagccccggagcttcatgcggctcaacgacctgtcgggggccgggggccggccggggccggggtcagcagaaaaggacccgggcagcgcggactccgaggcggaggggctgccgtacccggcgctggccccggtggttttcttctacttgagccaggacagccgcccgcggagctggtgtctccgcacggtctgtaacccctggtttgagcgcatcagcatgttggtcatccttctcaactgcgtgaccctgggcatgttccggccatgcgaggacatcgcctgtgactcccagcgctgccggatcctgcaggcctttgatgacttcatctttgccttctttgccgtggagatggtggtgaagatggtggccttgggcatctttgggaaaaagtgttacctgggagacacttggaaccggcttgactttttcatcgtcatcgcagggatgctggagtactcgctggacctgcagaacgtcagcttctcagctgtcaggacagtccgtgtgctgcgaccgctcagggccattaaccgggtgcccagcatgcgcatccttgtcacgttgctgctggatacgctgcccatgctgggcaacgtcctgctgctctgcttcttcgtcttcttcatcttcggcatcgtcggcgtccagctgtgggcagggctgcttcggaaccgatgcttcctacctgagaatttcagcctccccctgagcgtggacctggagcgctattaccagacagagaacgaggatgagagccccttcatctgctcccagccacgcgagaacggcatgcggtcctgcagaagcgtgcccacgctgcgcggggacgggggcggtggcccaccttgcggtctggactatgaggcctacaacagctccagcaacaccacctgtgtcaactggaaccagtactacaccaactgctcagcgggggagcacaaccccttcaagggcgccatcaactttgacaacattggctatgcctggatcgccatcttccaggtcatcacgctggagggctgggtcgacatcatgtactttgtgatggatgctcattccttctacaatttcatctacttcatcctcctcatcatcgtgggctccttcttcatgatcaacctgtgcctggtggtgattgccacgcagttctcagagaccaagcagcgggaaagccagctgatgcgggagcagcgtgtgcggttcctgtccaacgccagcaccctggctagcttctctgagcccggcagctgctatgaggagctgctcaagtacctggtgtacatccttcgtaaggcagcccgcaggctggctcaggtctctcgggcagcaggtgtgcgggttgggctgctcagcagcccagcacccctcgggggccaggagacccagcccagcagcagctgctctcgctcccaccgccgcctatccgtccaccacctggtgcaccaccaccaccaccatcaccaccactaccacctgggcaatgggacgctcagggccccccgggccagcccggagatccaggacagggatgccaatgggtcccgccggctcatgctgccaccaccctcgacgcctgccctctccggggccccccctggtggcgcagagtctgtgcacagcttctaccatgccgactgccacttagagccagtccgctgccaggcgccccctcccaggtccccatctgaggcatccggcaggactgtgggcagcgggaaggtgtatcccaccgtgcacaccagccctccaccggagacgctgaaggagaaggcactagtagaggtggctgccagctctgggcccccaaccctcaccagcctcaacatcccacccgggccctacagctccatgcacaagctgctggagacacagagtacaggtgcctgccaaagctcttgcaagatctccagcccttgcttgaaagcagacagtggagcctgtggtccagacagctgcccctactgtgcccgggccggggcaggggaggtggagctcgccgaccgtgaaatgcctgactcagacagcgaggcagtttatgagttcacacaggatgcccagcacagcgacctccgggacccccacagccggcggcaacggagcctgggcccagatgcagagcccagctctgtgctggccttctggaggctaatctgtgacaccttccgaaagattgtggacagcaagtactttggccggggaatcatgatcgccatcctggtcaacacactcagcatgggcatcgaataccacgagcagcccgaggagcttaccaacgccctagaaatcagcaacatcgtcttcaccagcctctttgccctggagatgctgctgaagctgcttgtgtatggtccctttggctacatcaagaatccctacaacatcttcgatggtgtcattgtggtcatcagcgtgtgggagatcgtgggccagcaggggggcggcctgtcggtgctgcggaccttccgcctgatgcgtgtgctgaagctggtgcgcttcctgccggcgctgcagcggcagctggtggtgctcatgaagaccatggacaacgtggccaccttctgcatgctgcttatgctcttcatcttcatcttcagcatcctgggcatgcatctcttcggctgcaagtttgcctctgagcgggatggggacaccctgccagaccggaagaattttgactccttgctctgggccatcgtcactgtctttcagatcctgacccaggaggactggaacaaagtcctctacaatggtatggcctccacgtcgtcctgggcggccctttatttcattgccctcatgaccttcggcaactacgtgctcttcaatttgctggtcgccattctggtggagggcttccaggcggaggaaatcagcaaacgggaagatgcgagtggacagttaagctgtattcagctgcctgtcgactcccaggggggagatgccaacaagtccgaatcagagcccgatttcttctcacccagcctggatggtgatggggacaggaagaagtgcttggccttggtgtccctgggagagcacccggagctgcggaagagcctgctgccgcctctcatcatccacacggccgccacacccatgtcgctgcccaagagcaccagcacgggcctgggcgaggcgctgggccctgcgtcgcgccgcaccagcagcagcgggtcggcagagcctggggcggcccacgagatgaagtcaccgcccagcgcccgcagctctccgcacagcccctggagcgctgcaagcagctggaccagcaggcgctccagccggaacagcctcggccgtgcacccagcctgaagcggagaagcccaagtggagagcggcggtccctgttgtcgggagaaggccaggagagccaggatgaagaggagagctcagaagaggagcgggccagccctgcgggcagtgaccatcgccacagggggtccctggagcgggaggccaagagttcctttgacctgccagacacactgcaggtgccagggctgcatcgcactgccagtggccgagggtctgcttctgagcaccaggactgcaatggcaagtcggcttcagggcgcctggcccgggccctgcggcctgatgaccccccactggatggggatgacgccgatgacgagggcaacctgagcaaaggggaacgggtccgcgcgtggatccgagcccgactccctgcctgctgcctcgagcgagactcctggtcagcctacatcttccctcctcagtccaggttccgcctcctgtgtcaccggatcatcacccacaagatgttcgaccacgtggtccttgtcatcatcttccttaactgcatcaccatcgccatggagcgccccaaaattgacccccacagcgctgaacgcatcttcctgaccctctccaattacatcttcaccgcagtctttctggctgaaatgacagtgaaggtggtggcactgggctggtgcttcggggagcaggcgtacctgcggagcagttggaacgtgctggacgggctgttggtgctcatctccgtcatcgacattctggtgtccatggtctctgacagcggcaccaagatcctgggcatgctgagggtgctgcggctgctgcggaccctgcgcccgctcagggtgatcagccgggcgcaggggctgaagctggtggtggagacgctgatgtcctcactgaaacccatcggcaacattgtagtcatctgctgtgccttcttcatcattttcggcatcttgggggtgcagctcttcaaagggaagtttttcgtgtgccagggcgaggataccaggaacatcaccaataaatcggactgtgccgaggccagttaccggtgggtccggcacaagtacaactttgacaaccttggccaggccctgatgtccctgttcgttttggcctccaaggatggttgggtggacatcatgtacgatgggctggatgctgtgggcgtggaccagcagcccatcatgaaccacaacccctggatgctgctgtacttcatctcgttcctgctcattgtggccttctttgtcctgaacatgtttgtgggtgtggtggtggagaacttccacaagtgtcggcagcaccaggaggaagaggaggcccggcggcgggaggagaagcgcctacgaagactggagaaaaagagaaggaatctaatgctggacgatgtaattgcttccggcagctcagccagcgctgcgtcagaagcccagtgcaaaccttactactccgactactcccgcttccggctcctcgtccaccacttgtgcaccagccactacctggacctcttcatcacaggtgtcatcgggctgaacgtggtcaccatggccatggagcactaccagcagccccagattctggatgaggctctgaagatctgcaactacatcttcactgtcatctttgtcttggagtcagttttcaaacttgtggcctttggtttccgtcggttcttccaggacaggtggaaccagctggacctggccattgtgctgctgtccatcatgggcatcacgctggaggaaatcgaggtcaacgcctcgctgcccatcaaccccaccatcatccgcatcatgagggtgctgcgcattgcccgagtgctgaagctgctgaagatggctgtgggcatgcgggcgctgctggacacggtgatgcaggccctgccccaggtggggaacctgggacttctcttcatgttgttgtttttcatctttgcagctctgggcgtggagctctttggagacctggagtgtgacgagacacacccctgtgagggcctgggccgtcatgccacctttcggaactttggcatggccttcctaaccctcttccgagtctccacaggtgacaattggaatggcattatgaaggacaccctccgggactgtgaccaggagtccacctgctacaacacggtcatctcgcctatctactttgtgtccttcgtgctgacggcccagttcgtgctagtcaacgtggtgatcgccgtgctgatgaagcacctggaggagagcaacaaggaggccaaggaggaggccgagctagaggctgagctggagctggagatgaagaccctcagcccccagccccactcgccactgggcagccccttcctctggcctggggtcgagggccccgacagccccgacagccccaagcctggggctctgcacccagcggcccacgcgagatcagcctcccacttttccctggagcaccccacgatgcagccccaccccacggagctgccaggaccagacttactgactgtgcggaagtctggggtcagccgaacgcactctctgcccaatgacagctacatgtgtcggcatgggagcactgccgaggggcccctgggacacaggggctgggggctccccaaagctcagtcaggctccgtcttgtccgttcactcccagccagcagataccagctacatcctgcagcttcccaaagatgcacctcatctgctccagccccacagcgccccaacctggggcaccatccccaaactgcccccaccaggacgctcccctttggctcagaggccactcaggcgccaggcagcaataaggactgactccttggacgttcagggtctgggcagccgggaagacctgctggcagaggtgagtgggccctccccgcccctggcccgggcctactctttctggggccagtcaagtacccaggcacagcagcactcccgcagccacagcaagatctccaagcacatgaccccgccagccccttgcccaggcccagaacccaactggggcaagggccctccagagaccagaagcagcttagagttggacacggagctgagctggatttcaggagacctcctgccccctggcggccaggaggagcccccatccccacgggacctgaagaagtgctacagcgtggaggcccagagctgccagcgccggcctacgtcctggctggatgagcagaggagacactctatcgccgtcagctgcctggacagcggctcccaaccccacctgggcacagacccctctaaccttgggggccagcctcttggggggcctgggagccggcccaagaaaaaactcagcccgcctagtatcaccatagacccccccgagagccaaggtcctcggaccccgcccagccctggtatctgcctccggaggagggctccgtccagcgactccaaggatcccttggcctctggcccccctgacagcatggctgcctcgccctccccaaagaaagatgtgctgagtctctccggtttatcctctgacccagcagacctggacccctgagtcctgccccacttt

SEQ ID NO: 259748 - protein, 2332 aa, Artificial Sequence
  derived and/or modified sequence
MDEEEDGAGAEESGQPRSFMRLNDLSGAGGRPGPGSAEKDPGSADSEAEGLPYPALAPVVFFYLSQDSRPRSWCLRTVCNPWFERISMLVILLNCVTLGMFRPCEDIACDSQRCRILQAFDDFIFAFFAVEMVVKMVALGIFGKKCYLGDTWNRLDFFIVIAGMLEYSLDLQNVSFSAVRTVRVLRPLRAINRVPSMRILVTLLLDTLPMLGNVLLLCFFVFFIFGIVGVQLWAGLLRNRCFLPENFSLPLSVDLERYYQTENEDESPFICSQPRENGMRSCRSVPTLRGDGGGGPPCGLDYEAYNSSSNTTCVNWNQYYTNCSAGEHNPFKGAINFDNIGYAWIAIFQVITLEGWVDIMYFVMDAHSFYNFIYFILLIIVGSFFMINLCLVVIATQFSETKQRESQLMREQRVRFLSNASTLASFSEPGSCYEELLKYLVYILRKAARRLAQVSRAAGVRVGLLSSPAPLGGQETQPSSSCSRSHRRLSVHHLVHHHHHHHHHYHLGNGTLRAPRASPEIQDRDANGSRRLMLPPPSTPALSGAPPGGAESVHSFYHADCHLEPVRCQAPPPRSPSEASGRTVGSGKVYPTVHTSPPPETLKEKALVEVAASSGPPTLTSLNIPPGPYSSMHKLLETQSTGACQSSCKISSPCLKADSGACGPDSCPYCARAGAGEVELADREMPDSDSEAVYEFTQDAQHSDLRDPHSRRQRSLGPDAEPSSVLAFWRLICDTFRKIVDSKYFGRGIMIAILVNTLSMGIEYHEQPEELTNALEISNIVFTSLFALEMLLKLLVYGPFGYIKNPYNIFDGVIVVISVWEIVGQQGGGLSVLRTFRLMRVLKLVRFLPALQRQLVVLMKTMDNVATFCMLLMLFIFIFSILGMHLFGCKFASERDGDTLPDRKNFDSLLWAIVTVFQILTQEDWNKVLYNGMASTSSWAALYFIALMTFGNYVLFNLLVAILVEGFQAEEISKREDASGQLSCIQLPVDSQGGDANKSESEPDFFSPSLDGDGDRKKCLALVSLGEHPELRKSLLPPLIIHTAATPMSLPKSTSTGLGEALGPASRRTSSSGSAEPGAAHEMKSPPSARSSPHSPWSAASSWTSRRSSRNSLGRAPSLKRRSPSGERRSLLSGEGQESQDEEESSEEERASPAGSDHRHRGSLEREAKSSFDLPDTLQVPGLHRTASGRGSASEHQDCNGKSASGRLARALRPDDPPLDGDDADDEGNLSKGERVRAWIRARLPACCLERDSWSAYIFPPQSRFRLLCHRIITHKMFDHVVLVIIFLNCITIAMERPKIDPHSAERIFLTLSNYIFTAVFLAEMTVKVVALGWCFGEQAYLRSSWNVLDGLLVLISVIDILVSMVSDSGTKILGMLRVLRLLRTLRPLRVISRAQGLKLVVETLMSSLKPIGNIVVICCAFFIIFGILGVQLFKGKFFVCQGEDTRNITNKSDCAEASYRWVRHKYNFDNLGQALMSLFVLASKDGWVDIMYDGLDAVGVDQQPIMNHNPWMLLYFISFLLIVAFFVLNMFVGVVVENFHKCRQHQEEEEARRREEKRLRRLEKKRRNLMLDDVIASGSSASAASEAQCKPYYSDYSRFRLLVHHLCTSHYLDLFITGVIGLNVVTMAMEHYQQPQILDEALKICNYIFTVIFVLESVFKLVAFGFRRFFQDRWNQLDLAIVLLSIMGITLEEIEVNASLPINPTIIRIMRVLRIARVLKLLKMAVGMRALLDTVMQALPQVGNLGLLFMLLFFIFAALGVELFGDLECDETHPCEGLGRHATFRNFGMAFLTLFRVSTGDNWNGIMKDTLRDCDQESTCYNTVISPIYFVSFVLTAQFVLVNVVIAVLMKHLEESNKEAKEEAELEAELELEMKTLSPQPHSPLGSPFLWPGVEGPDSPDSPKPGALHPAAHARSASHFSLEHPTDRQLFDTISLLIQGSLEWELKLMDELAGPGGQPSAFPSAPSLGGSDPQMQPHPTELPGPDLLTVRKSGVSRTHSLPNDSYMCRHGSTAEGPLGHRGWGLPKAQSGSVLSVHSQPADTSYILQLPKDAPHLLQPHSAPTWGTIPKLPPPGRSPLAQRPLRRQAAIRTDSLDVQGLGSREDLLAEVSGPSPPLARAYSFWGQSSTQAQQHSRSHSKISKHMTPPAPCPGPEPNWGKGPPETRSSLELDTELSWISGDLLPPGGQEEPPSPRDLKKCYSVEAQSCQRRPTSWLDEQRRHSIAVSCLDSGSQPHLGTDPSNLGGQPLGGPGSRPKKKLSPPSITIDPPESQGPRTPPSPGICLRRRAPSSDSKDPLASGPPDSMAASPSPKKDVLSLSGLSSDPADLDP

SEQ ID NO: 259749 - DNA, 6999 bp, Artificial Sequence
  derived and/or modified sequence
atggacgaggaggaggacggcgccggcgccgaggagagcggccagcccagaagcttcatgagactgaacgacctgagcggcgccggcggcagacccggccccggcagcgccgagaaggaccccggcagcgccgacagcgaggccgagggcctgccctaccccgccctggcccccgtggtgttcttctacctgagccaggacagcagacccagaagctggtgcctgagaaccgtgtgcaacccctggttcgagagaatcagcatgctggtgatcctgctgaactgcgtgaccctgggcatgttcagaccctgcgaggacatcgcctgcgacagccagagatgcagaatcctgcaggccttcgacgacttcatcttcgccttcttcgccgtggagatggtggtgaagatggtggccctgggcatcttcggcaagaagtgctacctgggcgacacctggaacagactggacttcttcatcgtgatcgccggcatgctggagtacagcctggacctgcagaacgtgagcttcagcgccgtgagaaccgtgagagtgctgagacccctgagagccatcaacagagtgcccagcatgagaatcctggtgaccctgctgctggacaccctgcccatgctgggcaacgtgctgctgctgtgcttcttcgtgttcttcatcttcggcatcgtgggcgtgcagctgtgggccggcctgctgagaaacagatgcttcctgcccgagaacttcagcctgcccctgagcgtggacctggagagatactaccagaccgagaacgaggacgagagccccttcatctgcagccagcccagagagaacggcatgagaagctgcagaagcgtgcccaccctgagaggcgacggcggcggcggccccccctgcggcctggactacgaggcctacaacagcagcagcaacaccacctgcgtgaactggaaccagtactacaccaactgcagcgccggcgagcacaaccccttcaagggcgccatcaacttcgacaacatcggctacgcctggatcgccatcttccaggtgatcaccctggagggctgggtggacatcatgtacttcgtgatggacgcccacagcttctacaacttcatctacttcatcctgctgatcatcgtgggcagcttcttcatgatcaacctgtgcctggtggtgatcgccacccagttcagcgagaccaagcagagagagagccagctgatgagagagcagagagtgagattcctgagcaacgccagcaccctggccagcttcagcgagcccggcagctgctacgaggagctgctgaagtacctggtgtacatcctgagaaaggccgccagaagactggcccaggtgagcagagccgccggcgtgagagtgggcctgctgagcagccccgcccccctgggcggccaggagacccagcccagcagcagctgcagcagaagccacagaagactgagcgtgcaccacctggtgcaccaccaccaccaccaccaccaccactaccacctgggcaacggcaccctgagagcccccagagccagccccgagatccaggacagagacgccaacggcagcagaagactgatgctgcccccccccagcacccccgccctgagcggcgccccccccggcggcgccgagagcgtgcacagcttctaccacgccgactgccacctggagcccgtgagatgccaggcccccccccccagaagccccagcgaggccagcggcagaaccgtgggcagcggcaaggtgtaccccaccgtgcacaccagccccccccccgagaccctgaaggagaaggccctggtggaggtggccgccagcagcggcccccccaccctgaccagcctgaacatcccccccggcccctacagcagcatgcacaagctgctggagacccagagcaccggcgcctgccagagcagctgcaagatcagcagcccctgcctgaaggccgacagcggcgcctgcggccccgacagctgcccctactgcgccagagccggcgccggcgaggtggagctggccgacagagagatgcccgacagcgacagcgaggccgtgtacgagttcacccaggacgcccagcacagcgacctgagagacccccacagcagaagacagagaagcctgggccccgacgccgagcccagcagcgtgctggccttctggagactgatctgcgacaccttcagaaagatcgtggacagcaagtacttcggcagaggcatcatgatcgccatcctggtgaacaccctgagcatgggcatcgagtaccacgagcagcccgaggagctgaccaacgccctggagatcagcaacatcgtgttcaccagcctgttcgccctggagatgctgctgaagctgctggtgtacggccccttcggctacatcaagaacccctacaacatcttcgacggcgtgatcgtggtgatcagcgtgtgggagatcgtgggccagcagggcggcggcctgagcgtgctgagaaccttcagactgatgagagtgctgaagctggtgagattcctgcccgccctgcagagacagctggtggtgctgatgaagaccatggacaacgtggccaccttctgcatgctgctgatgctgttcatcttcatcttcagcatcctgggcatgcacctgttcggctgcaagttcgccagcgagagagacggcgacaccctgcccgacagaaagaacttcgacagcctgctgtgggccatcgtgaccgtgttccagatcctgacccaggaggactggaacaaggtgctgtacaacggcatggccagcaccagcagctgggccgccctgtacttcatcgccctgatgaccttcggcaactacgtgctgttcaacctgctggtggccatcctggtggagggcttccaggccgaggagatcagcaagagagaggacgccagcggccagctgagctgcatccagctgcccgtggacagccagggcggcgacgccaacaagagcgagagcgagcccgacttcttcagccccagcctggacggcgacggcgacagaaagaagtgcctggccctggtgagcctgggcgagcaccccgagctgagaaagagcctgctgccccccctgatcatccacaccgccgccacccccatgagcctgcccaagagcaccagcaccggcctgggcgaggccctgggccccgccagcagaagaaccagcagcagcggcagcgccgagcccggcgccgcccacgagatgaagagcccccccagcgccagaagcagcccccacagcccctggagcgccgccagcagctggaccagcagaagaagcagcagaaacagcctgggcagagcccccagcctgaagagaagaagccccagcggcgagagaagaagcctgctgagcggcgagggccaggagagccaggacgaggaggagagcagcgaggaggagagagccagccccgccggcagcgaccacagacacagaggcagcctggagagagaggccaagagcagcttcgacctgcccgacaccctgcaggtgcccggcctgcacagaaccgccagcggcagaggcagcgccagcgagcaccaggactgcaacggcaagagcgccagcggcagactggccagagccctgagacccgacgacccccccctggacggcgacgacgccgacgacgagggcaacctgagcaagggcgagagagtgagagcctggatcagagccagactgcccgcctgctgcctggagagagacagctggagcgcctacatcttccccccccagagcagattcagactgctgtgccacagaatcatcacccacaagatgttcgaccacgtggtgctggtgatcatcttcctgaactgcatcaccatcgccatggagagacccaagatcgacccccacagcgccgagagaatcttcctgaccctgagcaactacatcttcaccgccgtgttcctggccgagatgaccgtgaaggtggtggccctgggctggtgcttcggcgagcaggcctacctgagaagcagctggaacgtgctggacggcctgctggtgctgatcagcgtgatcgacatcctggtgagcatggtgagcgacagcggcaccaagatcctgggcatgctgagagtgctgagactgctgagaaccctgagacccctgagagtgatcagcagagcccagggcctgaagctggtggtggagaccctgatgagcagcctgaagcccatcggcaacatcgtggtgatctgctgcgccttcttcatcatcttcggcatcctgggcgtgcagctgttcaagggcaagttcttcgtgtgccagggcgaggacaccagaaacatcaccaacaagagcgactgcgccgaggccagctacagatgggtgagacacaagtacaacttcgacaacctgggccaggccctgatgagcctgttcgtgctggccagcaaggacggctgggtggacatcatgtacgacggcctggacgccgtgggcgtggaccagcagcccatcatgaaccacaacccctggatgctgctgtacttcatcagcttcctgctgatcgtggccttcttcgtgctgaacatgttcgtgggcgtggtggtggagaacttccacaagtgcagacagcaccaggaggaggaggaggccagaagaagagaggagaagagactgagaagactggagaagaagagaagaaacctgatgctggacgacgtgatcgccagcggcagcagcgccagcgccgccagcgaggcccagtgcaagccctactacagcgactacagcagattcagactgctggtgcaccacctgtgcaccagccactacctggacctgttcatcaccggcgtgatcggcctgaacgtggtgaccatggccatggagcactaccagcagccccagatcctggacgaggccctgaagatctgcaactacatcttcaccgtgatcttcgtgctggagagcgtgttcaagctggtggccttcggcttcagaagattcttccaggacagatggaaccagctggacctggccatcgtgctgctgagcatcatgggcatcaccctggaggagatcgaggtgaacgccagcctgcccatcaaccccaccatcatcagaatcatgagagtgctgagaatcgccagagtgctgaagctgctgaagatggccgtgggcatgagagccctgctggacaccgtgatgcaggccctgccccaggtgggcaacctgggcctgctgttcatgctgctgttcttcatcttcgccgccctgggcgtggagctgttcggcgacctggagtgcgacgagacccacccctgcgagggcctgggcagacacgccaccttcagaaacttcggcatggccttcctgaccctgttcagagtgagcaccggcgacaactggaacggcatcatgaaggacaccctgagagactgcgaccaggagagcacctgctacaacaccgtgatcagccccatctacttcgtgagcttcgtgctgaccgcccagttcgtgctggtgaacgtggtgatcgccgtgctgatgaagcacctggaggagagcaacaaggaggccaaggaggaggccgagctggaggccgagctggagctggagatgaagaccctgagcccccagccccacagccccctgggcagccccttcctgtggcccggcgtggagggccccgacagccccgacagccccaagcccggcgccctgcaccccgccgcccacgccagaagcgccagccacttcagcctggagcaccccaccgacagacagctgttcgacaccatcagcctgctgatccagggcagcctggagtgggagctgaagctgatggacgagctggccggccccggcggccagcccagcgccttccccagcgcccccagcctgggcggcagcgacccccagatgcagccccaccccaccgagctgcccggccccgacctgctgaccgtgagaaagagcggcgtgagcagaacccacagcctgcccaacgacagctacatgtgcagacacggcagcaccgccgagggccccctgggccacagaggctggggcctgcccaaggcccagagcggcagcgtgctgagcgtgcacagccagcccgccgacaccagctacatcctgcagctgcccaaggacgccccccacctgctgcagccccacagcgcccccacctggggcaccatccccaagctgcccccccccggcagaagccccctggcccagagacccctgagaagacaggccgccatcagaaccgacagcctggacgtgcagggcctgggcagcagagaggacctgctggccgaggtgagcggccccagcccccccctggccagagcctacagcttctggggccagagcagcacccaggcccagcagcacagcagaagccacagcaagatcagcaagcacatgaccccccccgccccctgccccggccccgagcccaactggggcaagggcccccccgagaccagaagcagcctggagctggacaccgagctgagctggatcagcggcgacctgctgccccccggcggccaggaggagccccccagccccagagacctgaagaagtgctacagcgtggaggcccagagctgccagagaagacccaccagctggctggacgagcagagaagacacagcatcgccgtgagctgcctggacagcggcagccagccccacctgggcaccgaccccagcaacctgggcggccagcccctgggcggccccggcagcagacccaagaagaagctgagcccccccagcatcaccatcgacccccccgagagccagggccccagaaccccccccagccccggcatctgcctgagaagaagagcccccagcagcgacagcaaggaccccctggccagcggcccccccgacagcatggccgccagccccagccccaagaaggacgtgctgagcctgagcggcctgagcagcgaccccgccgacctggacccctag

SEQ ID NO: 259750 - DNA, 6999 bp, Artificial Sequence
  derived and/or modified sequence
atggatgaggaggaagacggggctggagccgaggagtccggccagccgcgaagcttcatgcgattgaatgacctgtcgggagccggcggccgccccggacctggttctgcagagaaggacccaggctcagcagacagtgaagctgaaggcctgccctatccagccctggcacctgtggtgttcttttacttgagccaagattctcgcccaaggtcttggtgtctccgtacagtgtgcaacccatggttcgagcgcatctccatgctcgtcattctacttaactgcgtcacattaggaatgttccggccctgcgaagacattgcttgcgatagtcagaggtgtagaatcctccaggctttcgatgacttcatatttgctttctttgcagtagagatggtggttaagatggtcgccctgggcattttcggcaaaaagtgttacctgggagatacctggaatcgtctggactttttcattgtgatcgccggcatgctggaatacagcctcgatttacaaaacgtgagcttctccgctgtgcgcaccgtccgggtcttgagaccactgcgtgctatcaatagggttccttccatgcggatcctcgtaaccctattgttggacaccctcccgatgctagggaacgtgttgctactgtgctttttcgttttttttatatttggcatagtcggggtgcagctatgggcgggcctgcttcgtaatagatgttttctgcctgagaacttcagcctcccgctgtctgtggacctggagaggtactatcagacagagaacgaagacgagtccccatttatttgctcacaacctcgagagaatggcatgagatcctgtcgatcagtgcctactctcagaggtgatggcggagggggaccaccatgtggactagattacgaagcttacaattccagttccaacacgacatgtgtgaactggaatcaatactacaccaactgcagcgccggcgaacataacccattcaagggagcgatcaattttgacaatatcgggtatgcttggattgccatctttcaggtgatcactctcgagggatgggtcgacataatgtactttgtgatggacgcccacagtttctacaatttcatttacttcatccttctgatcattgtcggctccttcttcatgatcaacctctgtctcgtggtgatcgctacacaattctccgaaactaagcaacgcgagtcgcagctgatgcgggagcagcgggtgcgatttctgagtaatgcatctaccctagctagcttttcagaaccaggatcctgctacgaagagctgctcaaatatcttgtatatattttgaggaaagccgccagacgactcgcccaggtctctcgagccgccggcgtgcgggttggcttgctctcctctccagccccattaggcggtcaggaaacccagccaagtagcagctgcagcaggagccaccggcggctgtccgtccaccatctggtgcatcatcatcatcaccaccaccatcactatcacctagggaacggcactctcagggcgcctagagcttctcccgagatccaagacagagatgctaacggctcaaggcggctgatgctgccacctccatcaacacctgctctctcaggggctccaccaggcggtgcggaatccgtgcattctttttatcatgcagactgtcacctggaacccgtgagatgccaggcccctcctccaagaagtccctctgaggcttctggacgaactgtgggcagcggtaaggtgtatcctacagtgcatacctcccccccaccagaaactttgaaagagaaagccctagtagaggtggcagcatcgagtggcccccccactctgacctctctgaatatcccaccaggcccatacagctccatgcacaagctgctggagacacaatccaccggagcatgtcagtcatcgtgtaagattagcagtccctgcctgaaagcggactctggggcctgtggtccggacagctgtccttattgtgcgcgggcaggcgccggagaggtagaactggcagaccgtgagatgcccgacagcgactccgaagccgtctatgaatttacccaggacgctcaacattctgaccttcgagaccctcattcgcggaggcaacgaagcctcggcccagatgccgaaccatcctcagtgctcgcattctggcggctgatctgtgacaccttcagaaaaatcgtagactccaagtattttggcagagggattatgatagcgatactggtgaatacactatccatgggcatagaatatcacgagcagcccgaggagttaaccaacgccctcgagatctctaatatcgtttttaccagtctgtttgcgttggagatgttgctaaaactgctcgtttacggccccttcggatacatcaaaaacccatacaacatcttcgacggagtgatcgtggttatcagtgtgtgggagatagtgggccaacagggggggggtctcagcgtcctgcggacattccgtctgatgagagtgttaaaactggtacgttttttacctgccctccaacggcagttggttgtactcatgaaaacaatggataacgtcgcgacattttgtatgctcctcatgctgtttatatttatatttagcatcctgggtatgcatttattcggctgtaaattcgcttccgaacgcgacggagatacattaccggaccgaaagaattttgattcgctgctttgggccatagtgaccgtgttccagatacttactcaggaagactggaataaagtcctttacaatgggatggcctctacatccagctgggctgcactctactttattgcattgatgacattcggtaactacgtactgttcaacctattggtggcgattctcgttgaggggttccaggcagaggaaattagcaagagggaggatgcctcgggacaactcagttgtatccagctgccagtggatagtcagggcggagacgctaacaagtctgagagtgagcctgacttttttagcccatctttggatggtgatggcgataggaaaaaatgtctagctctggtaagtctgggcgaacacccagaactaagaaaaagcctcctgccacctttaattatacacacagcagccacacccatgtcactgccgaagtcaacgtcaacaggcttaggggaagctctgggtccagccagcagacggaccagtagtagcggaagcgctgagcctggcgctgcccacgagatgaagtctcctccgtccgcgcgctctagcccccacagcccttggtctgccgccagctcatggactagccgaagaagctcgcggaactccctcggtcgcgctccttcattaaagcgcagaagccccagcggggagcgaagaagtctcttgagcggtgaagggcaggagtcccaggacgaggaggagtcatctgaagaggagcgcgcctcacccgctggatcggaccaccgtcaccgcggttcactggagcgagaggcaaaaagtagctttgatcttcccgacactcttcaggtccctggcctgcacagaacagcctccgggcggggatctgcttctgaacaccaagactgtaatggaaagtctgcgtctggacgactggcaagggccctgcggccggatgacccgccgcttgatggcgacgatgccgacgatgaggggaatctgtccaagggggaacgcgtgcgagcatggatacgagccaggctgccagcttgctgcttggagcgggactcctggagcgcctatattttccccccgcagtctcgctttcgcttgttatgtcaccgtattataacacacaagatgttcgaccacgtagtgctcgtgattatctttttaaattgtattacgatcgccatggagcggcccaagattgacccgcatagcgcagaacgaattttcctcacgctgagcaattacatattcacagctgtatttctggccgaaatgaccgttaaggtcgtcgctcttgggtggtgtttcggggagcaggcatatttgcgttcttcatggaacgtgctcgacggactgcttgtgctgatttccgtgatcgacatcctggttagcatggtcagcgacagcgggaccaagattctgggcatgctcagagtgctgcggctgcttcggaccctgcgcccgcttcgcgttatctcacgagcacagggcctgaagctggtggtggagaccctcatgagttccctcaaacccatcggtaacatcgtggtgatctgctgcgcattctttatcatttttggaatcctcggcgtgcaactgttcaaaggcaagttcttcgtctgtcaaggggaagatacaaggaacatcacaaacaagagcgactgcgcagaagccagctaccgatgggttcgccataagtacaatttcgacaacctcggacaagcactaatgagcttattcgtgttagcctccaaggacggttgggttgacataatgtatgatgggctcgacgctgtaggcgtcgaccaacagcctatcatgaatcacaacccttggatgctgctttactttatttcatttctgttaatagtcgccttttttgtattgaatatgtttgtaggagtggtggttgaaaactttcacaaatgtaggcagcaccaagaggaggaggaagcccgccgcagggaagagaaacgcctgaggagactggaaaagaaacgacgtaacctgatgcttgacgacgtcattgccagtggaagttcagcctctgcggcctccgaagcccaatgcaagccgtactacagtgactactctcggttccgccttctcgtccatcatctttgtaccagtcactatctggacctctttatcacgggagtcatcggacttaatgtggtgacgatggcaatggaacactaccagcagccacaaattctggatgaggctctgaaaatctgcaattatatattcacagtgatattcgttctcgagtccgtgtttaagctggttgcattcggctttcgaagattttttcaggacaggtggaatcagctggaccttgccattgtgcttctttctatcatgggaatcaccctggaggagatagaggtgaacgccagcctgccgatcaaccctaccataatacggattatgcgcgtactgcgcatcgcccgcgtcctaaagttgcttaaaatggccgtggggatgcgggcccttctcgacacagtgatgcaagctctgccccaggtgggaaatcttggcttgctgtttatgctgcttttttttatcttcgcggccttaggcgttgagctgtttggtgaccttgagtgtgacgaaacccatccttgtgaaggtctcggtagacacgcgacattccgaaactttggcatggccttccttactctgttccgggtgtccaccggtgataattggaacggaattatgaaggatacattgagagattgtgaccaagagagtacctgttataacactgttatctctccaatctattttgttagtttcgtgttgactgcgcagtttgtactggtgaatgtggttatagcagtgctaatgaagcatctagaagagtctaacaaggaagccaaggaggaagctgaactggaggctgagcttgaactggagatgaagacattgagtcctcagccccactccccacttggatctccctttctctggcctggggtggagggccctgactctcccgattcacctaaacccggagcgctccatcctgcagcccacgcgaggagcgcctcgcatttctccctcgaacacccaactgacagacaattatttgatacaatttcactgctgattcaaggcagcctcgaatgggagctcaagctgatggatgaacttgccggcccgggcggccaacctagtgcttttccgtctgccccctccctgggcggttctgacccccagatgcagcctcacccaacggagctcccaggccccgaccttttaacggtgagaaagagtggtgttagtcggacccacagcctccctaacgattcctacatgtgtaggcatggttcaaccgccgaaggccctctggggcaccgaggctggggcctccctaaagcgcagagcggctcagtacttagcgtccactcccagccagctgatacatcctacatattacagctgcctaaggatgcaccccatctgctacagccccattcggccccgacctggggaacaattcctaaattacctccgcccggcaggtcaccgctcgcccaaaggccattgcgtcgacaagccgcaattcgcacagacagcctggatgtgcagggattgggtagcagagaggacctcttggccgaggttagcggaccctctcctcccctggcccgtgcatacagcttttgggggcaaagctcgactcaggcccagcaacattccagatcacacagtaagattagcaagcacatgacacccccagctccatgtccagggcccgagcccaactggggcaagggccctcctgagacacggtcctctcttgagctcgatactgaactgtcttggatctctggggatctcctgccccctggtggacaggaagagcctccctccccccgtgatctcaaaaagtgttacagcgtcgaagctcaaagctgccagagacggcctacatcttggctggatgagcagcgtcgacacagcattgccgtgtcctgcttagattctggcagtcaaccacatctggggaccgacccatccaatctgggagggcagccactgggggggcctgggtcaagacctaaaaagaagctatcccctccttccattacaatcgatcctcccgagtctcagggacctcgtacaccaccatcgccagggatctgtttgagacgtcgggcaccctcgagtgactcaaaagaccccctggccagtggcccgcccgattcaatggctgctagtccatcccccaagaaggatgtcctgtcgttatcagggctgtctagtgatccagccgacttggatccttag

SEQ ID NO: 259751 - DNA, 6999 bp, Artificial Sequence
  derived and/or modified sequence
atggatgaggaggaggatggagctggagctgaggagagcggccagcccaggagcttcatgaggctgaatgacctgagcggggccggcggccggcccggccctggcagcgctgagaaggaccccggcagcgctgacagcgaggccgagggcctgccctacccagccctggcccctgtggtgttcttctacctgagccaggacagccggcccaggtcctggtgcctgaggacagtgtgcaacccctggtttgagcgcatctccatgctggtgatcctgctgaactgtgtgaccctgggcatgttccggccctgtgaagatattgcctgtgacagccagcgctgccgcatcctgcaggcctttgatgacttcatctttgccttctttgctgtggagatggtggtgaagatggtggccctgggcatctttgggaagaagtgctacctgggggacacctggaaccggctggacttcttcatcgtgattgctggcatgctggagtacagcctggacctgcagaatgtgtccttctctgctgtgaggacagtgcgggtgctgcggcccctgcgggccatcaacagagtgcccagcatgaggatcctggtgaccctgctgctggacaccctgcccatgctgggcaatgtgctgctgctgtgcttctttgtgttcttcatctttggaattgtgggcgtgcagctgtgggccggcctgctgaggaaccgctgcttcctgcctgagaacttcagcctgcccctgtctgtggacctggagcgctactaccagacagaaaatgaagatgagagccccttcatctgcagccagccccgggagaatggcatgaggagctgccgctctgtgcccaccctgcggggagatggcggcggcggccccccctgtggcctggactatgaggcctacaacagcagcagcaacaccacctgtgtgaactggaaccagtactacaccaactgcagcgctggggagcacaaccccttcaagggggccatcaactttgacaacatcggctacgcctggatcgccatcttccaggtgatcaccctggagggctgggtggacatcatgtactttgtgatggatgcccacagcttctacaacttcatctacttcatcctgctgatcatcgtgggcagcttcttcatgatcaacctgtgcctggtggtgattgccacccagttcagcgagaccaagcagcgggagagccagctgatgagggagcagagggtgcgcttcctgagcaatgccagcaccctggccagcttcagcgagcccggcagctgctatgaggagctgctgaagtacctggtgtacatcctgaggaaggccgcccggcggctggcccaggtgtccagagctgctggggtgcgggtgggcctgctgagcagccctgcccccctgggcggccaggagacccagcccagcagcagctgcagccgcagccaccggcggctgtctgtgcaccacctggtgcaccaccaccaccaccaccaccaccactaccacctgggcaatggcaccctgcgggccccccgggccagccctgagatccaggacagagatgccaacggcagccggcggctgatgctgcccccacccagcaccccagccctgagcggggcccctcctggaggagctgagagcgtgcacagcttctaccacgccgactgccacctggagcctgtgcgctgccaggcccccccacccaggagccccagcgaggccagcggccgcacagtgggcagcggcaaggtgtaccccaccgtgcacaccagccccccacctgagaccctgaaggagaaggccctggtggaggtggccgccagcagcggcccccccaccctgaccagcctgaacatccccccaggcccctacagctccatgcacaagctgctggagacccagagcactggagcctgccagagcagctgcaagatcagcagcccctgcctgaaggctgacagcggggcctgtggccctgacagctgcccctactgtgcccgggccggggccggggaggtggagctggccgaccgggagatgccagacagcgacagcgaggccgtgtatgagttcacccaggatgcccagcacagcgacctgcgggacccccacagccggcggcagaggagcctgggcccagatgctgagcccagctctgtgctggccttctggaggctcatctgtgacaccttcaggaagatcgtggacagcaagtacttcggccggggcatcatgattgccatcctggtgaacaccctgtccatgggcatcgagtaccacgagcagcctgaggagctgaccaatgccctggagatcagcaacatcgtgttcaccagcctgtttgccctggagatgctgctgaagctgctggtgtatggccccttcggctacatcaagaacccctacaacatctttgatggagtcatcgtggtgatctctgtgtgggagatcgtgggccagcagggcggcggcctgtctgtgctgcggaccttccggctgatgagggtgctgaagctggtgcgcttcctgcctgccctgcagaggcagctggtggtgctgatgaagaccatggacaacgtggccaccttctgcatgctgctgatgctgttcatcttcatcttcagcatcctgggcatgcacctgtttggctgcaagtttgccagcgagagagatggagacaccctgcctgacaggaagaactttgacagcctgctgtgggccatcgtgacagtgttccagatcctgacccaggaggactggaacaaggtgctgtacaacggcatggccagcaccagctcctgggccgccctgtacttcatcgccctgatgaccttcggcaactacgtgctcttcaacctgctggtggccatcctggtggagggcttccaggccgaggagatcagcaagcgggaggatgccagcggccagctgagctgcatccagctgcctgtggacagccagggcggagatgccaacaagtctgagagcgagccagacttcttcagccccagcctggatggagatggagacaggaagaagtgcctggccctggtgtccctgggggagcaccctgagctgaggaagagcctgctgcccccactcatcatccacacagctgccacccccatgagcctgcccaagagcaccagcacaggcctgggggaggccctgggccctgccagcaggaggaccagcagcagcggcagcgctgagcctggagctgcccacgagatgaagagcccccccagcgcccggagcagcccccacagcccctggagcgctgccagctcctggaccagccgccgcagcagcaggaacagcctgggccgggcccccagcctgaagagaagaagccccagcggggagcggcgcagcctgctgtctggagagggccaggagagccaggatgaggaggagagcagcgaggaggagcgggccagccctgctggcagtgaccaccgccaccggggcagcctggagcgggaggccaagagcagctttgacctgcctgacaccctgcaggtgcccggcctgcacaggacagccagcggccggggcagcgccagcgagcaccaggactgcaatggcaagagcgccagcggccgcctggcccgggccctgcggccagatgatcctcccctggatggagatgatgctgatgatgagggcaacctgagcaagggggagcgggtgcgggcctggatccgggcccggctgcctgcctgctgcctggagcgggacagctggagcgcctacatcttccccccccagagccgcttccggctgctgtgccaccgcatcatcacccacaagatgtttgaccacgtggtgctggtgatcatcttcctgaactgcatcaccatcgccatggagcggcccaagattgacccccacagcgctgagcgcatcttcctgaccctgagcaactacatcttcaccgctgtgttcctggccgagatgacagtgaaggtggtggccctgggctggtgcttcggggagcaggcctacctgcggagctcctggaatgtgctggatggcctgctggtgctgatctctgtgattgacatcctggtgtccatggtgtctgattctggcaccaagatcctgggcatgctgcgggtgctgcggctgctgcggaccctgcggcccctgcgggtcatcagccgggcccagggcctgaagctggtggtggagaccctgatgagcagcctgaagcccatcggcaacatcgtggtgatctgctgtgccttcttcatcatcttcggcatcctgggcgtgcagctgttcaagggcaagttctttgtgtgccagggcgaggacaccaggaacatcaccaacaagagtgactgtgccgaggccagctaccgctgggtgcgccacaagtacaactttgacaacctgggccaggccctgatgagcctgtttgtgctggccagcaaggatggctgggtggacatcatgtatgatggcctggatgctgtgggcgtggaccagcagcccatcatgaaccacaacccctggatgctgctgtacttcatctccttcctgctgattgtggccttctttgtgctgaacatgtttgtgggcgtggtggtggagaacttccacaagtgccggcagcaccaggaggaggaggaggcccggcggcgggaggagaagaggctgcggcggctggagaagaagagaagaaacctgatgctggatgatgtgattgccagcggcagcagcgccagcgctgccagcgaggcccagtgcaagccctactacagcgactacagccgcttccggctgctggtgcaccacctgtgcaccagccactacctggacctcttcatcaccggggtgattggcctgaatgtggtgaccatggccatggagcactaccagcagccccagatcctggatgaggccctgaagatctgcaactacatcttcaccgtcatctttgtgctggagagcgtcttcaagctggtggccttcggcttccgccgcttcttccaggaccgctggaaccagctggacctggccatcgtgctgctgagcatcatgggcatcaccctggaggagattgaggtgaatgccagcctgcccatcaaccccaccatcatccgcatcatgagggtgctgcgcatcgcccgggtgctgaagctgctgaagatggctgtgggcatgagggccctgctggacacagtgatgcaggccctgccccaggtgggcaacctgggcctgctcttcatgctgctcttcttcatctttgctgccctgggcgtggagctgtttggagacctggagtgtgatgagacccacccctgtgagggcctgggcagacatgccaccttcaggaactttggcatggccttcctgaccctcttccgggtgtccactggagacaactggaatggcatcatgaaggacaccctgcgggactgtgaccaggagagcacctgctacaacacagtcatcagccccatctactttgtgtcctttgtgctgacagcccagtttgtgctggtgaatgtggtgattgctgtgctgatgaagcacctggaggagagcaacaaggaggccaaggaggaggccgagctggaggccgagctggagctggagatgaagaccctgagcccccagccccacagccccctgggcagccccttcctgtggccaggagtggagggccctgacagcccagacagccccaagccaggggccctgcaccctgctgcccacgcccggagcgccagccacttcagcctggagcaccccacagaccggcagctgtttgacaccatcagcctgctgatccagggcagcctggagtgggagctgaagctgatggatgagctggccggccctgggggccagcccagcgccttccccagcgcccccagcctgggcggcagtgacccccagatgcagccccaccccacagagctgcccggccctgacctgctgactgtgaggaagagcggcgtgtccaggacccacagcctgcccaatgacagctacatgtgcagacatggcagcacagctgagggccccctgggccaccggggctggggcctgcccaaggcccagagcggctctgtgctgtctgtgcacagccagcctgctgacaccagctacatcctgcagctgcccaaggatgccccccacctgctgcagccccacagcgcccccacctggggcaccatccccaagctgcccccacctggccgcagccccctggcccagaggcccctgcggcggcaggccgccatcagaacagacagcctggatgtgcagggcctgggcagccgggaggacctgctggccgaggtgtctggccccagcccccccctggcccgggcctacagcttctggggccagagcagcacccaggcccagcagcacagccgcagccacagcaagatcagcaagcacatgaccccaccagccccctgccccggccctgagcccaactggggcaaaggacctcctgagaccaggagcagcctggagctggacacagagctgtcctggatcagcggggacctgctgcccccaggcggccaggaggagccccccagcccccgggacctgaagaagtgctacagcgtggaggcccagagctgccagaggcggcccacctcctggctggatgagcagaggaggcacagcattgctgtgtcctgcctggacagcggcagccagccccacctgggcacagaccccagcaacctgggcggccagcccctgggcggccctggcagccggcccaagaagaagctgagccccccatccatcaccatcgaccccccagagagccagggccccaggaccccacccagccctggcatctgcctgcggcggcgggcccccagcagtgacagcaaggaccccctggccagcggccccccagacagcatggccgccagccccagccccaagaaggatgtgctgagcctgagcggcctgagcagtgaccctgctgacctggacccctag

SEQ ID NO: 259752 - DNA, 6999 bp, Artificial Sequence
  derived and/or modified sequence
atggacgaggaggaggacggcgccggcgccgaggagagcggccagccacgctcttttatgcgcctgaacgatctatctggcgcaggagggcgaccaggaccgggaagtgctgaaaaggatccaggaagcgcagacagtgaagccgagggcctcccatacccagccctcgctccagtggtttttttttatctgtcccaagacagcaggccccgcagttggtgtctgcgcacagtgtgcaacccatggttcgagcggatctccatgttggtaatcctcctcaactgtgtgacactgggtatgttccgcccctgtgaggatatcgcttgtgatagtcagcgatgtcgtattctgcaggcttttgacgattttattttcgccttcttcgctgtggagatggtcgtgaagatggtggctctggggatctttggaaagaaatgttacctgggagatacgtggaatcgactcgatttttttattgtgatcgccggtatgctggagtacagccttgatttacagaacgtgtctttctcggctgtccgcacagtgcgagtgctacggcctctgagagcaatcaaccgcgtccccagcatgagaatcctggttaccctcctgctggatacccttccaatgctggggaatgtcctactcctgtgcttcttcgtgttcttcatatttggaatcgtgggtgtccagctctgggcagggctgctgcggaataggtgctttctgcccgaaaacttcagcctgccgctatccgtcgacctagagaggtattatcagaccgaaaatgaggacgagtcaccattcatctgttctcagccacgtgagaacgggatgcggtcctgtcgatcagtcccaacccttcgaggggacggcggcggaggacctccatgcggtctagactacgaagcgtataattccagcagcaatacaacctgtgtcaattggaaccagtactacacaaactgctcggccggagaacacaacccattcaaaggagcaataaacttcgataatatcgggtacgcgtggattgccattttccaggtgattaccctggagggatgggttgatattatgtattttgtcatggacgcccactcattctacaatttcatctactttatcctgcttatcattgttgggtccttctttatgattaatttgtgcctggtcgtcatcgctacccagttttctgagaccaagcagcgcgaatctcagctgatgcgagagcaacgtgtgcggtttttgagcaatgctagcacgctggcctccttctcggagcctggaagttgttatgaggaactgttgaaatacctggtctacatcttgagaaaggccgcccgacgcctcgcacaagtctccagagctgcgggggtccgggtgggccttttatcctcccccgcacctctgggcgggcaagagacccagccttcttctagctgcagccggtctcacagacggctcagcgttcaccacctggtgcatcaccaccatcatcatcatcaccattaccacctgggaaatgggacactacgggccccccgtgccagcccggagatccaagacagagatgcgaatgggtctaggcgcttgatgctcccgccaccttctactcctgccctcagcggcgcgccacccggcggggcagagtctgtgcactcattctatcacgctgactgccacctggagcccgtgcgctgtcaggcgccgcctccccggtctcctagtgaagcatccgggcgcacagtgggctctggcaaggtttaccctaccgtgcacacctctccaccaccagaaaccctcaaagaaaaggccttggtggaggtggcagcttctagcggaccccccacactgactagcctcaatatccccccaggtccttacagctccatgcataaactcctcgaaacacagagcacaggtgcctgccagtcttcttgtaagatttcttccccctgtcttaaagccgactccggagcgtgcgggcccgattcgtgtccgtactgcgcccgcgcaggcgctggcgaagttgagctggcagaccgcgagatgccggattccgatagcgaagccgtgtacgagtttacacaggatgcacaacacagcgaccttcgcgacccgcactcccggcgtcagcgttccctagggccggatgctgaaccctcttctgtgctggctttttggaggctcatttgtgatacttttaggaaaattgttgactccaaatacttcggaagaggtatcatgatcgctatcctggtaaatactctgtcaatgggcatagagtaccatgagcagccggaggagctgaccaatgcccttgagatttctaacatcgtcttcacgagtctgttcgcgctggaaatgcttctgaagcttcttgtctacggcccgttcggatacatcaagaacccttataacatctttgacggcgtcattgtagtcatcagtgtgtgggagatcgtcggccagcagggtgggggactgtccgtcctgcgaacattccgcctgatgagggtcctcaagctggtcaggttcctccctgccctccaaagacagctggtggtcttaatgaaaaccatggacaatgtggcaaccttttgtatgctcctgatgctcttcatcttcatcttctccatcctgggcatgcacctattcggatgcaagtttgcttctgagcgtgacggagatactcttccagatagaaagaactttgatagcctgctgtgggctattgtcaccgtcttccagattctcacccaggaggattggaataaggtgctttacaacgggatggcttctacctctagctgggccgccctatattttatcgctctgatgacctttggaaattacgtactgttcaatctgcttgtcgccatactggtggagggatttcaggctgaggagatcagcaagcgggaggacgcttccggccaactctcctgtatccaacttccagttgactcacaaggtggtgatgcaaataagtcagagagcgaacccgacttcttttcccctagcctggatggcgacggagataggaagaaatgtttggccttagtcagtctgggggaacaccctgaactccggaagagcctactcccccccttaattatccataccgcggccactcctatgagtctgccaaagtcaacatcaactggactaggggaagcactgggccccgcttcacggcggacttcatctagtggctctgcggagcccggcgccgcccatgaaatgaagtcaccacctagcgccagaagttccccacattcaccgtggagtgcagcttcctcctggaccagtcggagaagctcccgaaactcgctcggacgggcaccgagcctgaaaagacgaagcccttctggagagagacggtcacttctctctggagaaggtcaagagtctcaggacgaggaggagtccagtgaagaagagcgggccagcccggcgggatctgaccacagacaccgtggcagcttggagcgggaggccaaaagcagttttgaccttcccgacaccctgcaagtgccgggactccatcgaactgctagcggccgcggtagtgcttccgagcatcaggactgcaatggaaagtctgcatcaggaaggctcgctagggccctcaggccagacgacccacctttagacggcgatgacgctgatgacgagggcaacctatcaaaaggggagagagttcgagcatggataagagcgcggctgccggcctgttgcctcgagcgcgactcctggtcagcatatatatttccaccacaatctagatttcggctgctgtgccatcggatcatcacacataagatgtttgatcatgttgtcctggtaatcattttcttgaattgcattaccatcgccatggagcggcctaaaatcgatccccacagcgctgagcgaatctttctgaccctatctaactatatattcacagcagtgtttctggcggaaatgacggtgaaggtcgtcgctctggggtggtgcttcggcgaacaggcttacctgcggtcgtcatggaatgtgcttgatggactcctggtgttaatatccgtgatagacattctggtgagtatggtctcggattccgggacgaagatcctgggtatgctccgcgtgctccgcctcctccggactcttcggcctctgcgcgttatcagccgagcacagggtttaaagctggttgtggagaccctgatgagctccctaaagccgatcggcaacattgtagtcatttgttgcgcctttttcataatctttggtatcctgggcgttcaattattcaaggggaaatttttcgtctgccagggtgaggatacccggaatatcacaaataagtcggattgtgctgaggcctcctaccgctgggtgcgccacaagtacaatttcgacaatcttggccaggctctcatgagcttattcgtgcttgcgtccaaggatggatgggtggatattatgtatgatggactggacgccgtgggcgtggatcagcagccaattatgaatcataacccttggatgttgctgtattttatcagcttcctgctcattgtagccttcttcgtgttgaacatgttcgtcggcgttgtggtcgaaaatttccacaaatgtaggcagcaccaagaagaagaggaagcccgacgacgtgaggagaaaagactgagaagactagaaaaaaagcgcagaaatttgatgctggacgacgtgatcgcttccgggtctagtgcaagcgccgcttccgaggcccagtgtaaaccatattattccgattactctaggtttcgcctcctggttcatcatctgtgtaccagtcactatctggacctgttcattactggggtaattggcctgaacgtcgtgaccatggcaatggaacactatcaacagcctcagattctggacgaggcattaaagatctgcaattacatattcaccgtcatcttcgtgctcgagtccgtgttcaagttggtagcttttggatttaggcggttttttcaggaccggtggaatcagctggatctggctatagtcctgctgagcatcatgggcattacactcgaggaaattgaggtaaatgccagcctcccgatcaaccctaccattattcgtattatgagggtcctgcggattgcacgagtactgaagttgctgaagatggccgtgggaatgagggcgcttctggacacagtgatgcaagcgcttccccaggtggggaacttggggctcctgttcatgttactgttttttatctttgccgcgttgggggtcgaacttttcggcgatctggagtgtgacgagacccatccatgcgagggcctgggtcgccatgccacgtttagaaattttgggatggcctttctgaccctgttccgagtttccactggcgacaactggaacggaattatgaaagacaccctgagggactgtgaccaggaatctacatgctataataccgttatttcccctatttactttgtgtcctttgtgttgacagcccagtttgtcctggtgaacgtcgtgattgctgtgctgatgaaacacttggaggagtccaataaggaagcaaaagaggaggccgagcttgaggcagagctggaactggaaatgaagaccctgtctcctcaaccccactccccactcgggtctccttttttgtggcctggagtcgaaggtcccgatagtccagactcccctaagccgggagccctgcacccagctgcccacgctcggtcagcgagtcattttagcctggaacaccccacggatcgtcagctgttcgatactatatccttgctcattcaaggttcactggagtgggaattgaaactgatggacgagcttgctggcccagggggacaaccaagtgccttcccttcagccccaagcttgggagggtctgacccacagatgcagcctcacccgacagaactccctggtcctgatctgttaaccgtccggaagagtggcgtgtctaggacacacagcctccctaatgactcctacatgtgccgacacggctccacggctgaaggtccactggggcatagggggtggggcttacctaaggcccagtctggatcagtcctgtccgtacatagccaacctgccgatacttcttacattttacaactgcctaaagacgcgcctcatttgctgcagccacattccgcccctacttggggtacaattcccaaactcccaccacccggtcgcagcccactggcccaacggcctctgcggcgacaggccgcaatacgcaccgattctcttgatgtccaggggctgggaagccgggaagatttgctggccgaagtgagcggaccaagcccaccacttgcacgcgcttacagcttctgggggcaatcctcgactcaggcccaacagcactcccgctctcatagcaagattagcaaacacatgacaccaccggcaccatgccccggtcctgaaccaaactgggggaaggggcctccggaaacccgttctagcttggagttggatactgagctgagttggattagcggggatcttctgccccccggagggcaagaggagccaccatcacctcgcgaccttaaaaagtgttattctgtggaagctcagtcctgccagagaagacccacaagctggctggatgagcagcggcgccatagtatcgctgttagctgccttgacagcgggtctcagcctcatttaggtacagacccttctaacctgggtggtcagcctctcggtgggcctggctctagaccaaagaagaagcttagtcccccctcaatcaccatcgacccccccgagagccagggaccaaggacacctccctctccggggatctgtctgcgcaggcgagcaccgtcatctgacagtaaggatccactagctagcggaccaccggactcgatggcagcgagcccctctcccaagaaggacgtgctgtctctgtccggtctatccagcgaccctgctgatttggatccttag

SEQ ID NO: 259753 - DNA, 6998 bp, Artificial Sequence
  derived and/or modified sequence
atggatgaagaagaagacggagccggtgccgaagaatcaggccagccccgaagtttcatgcgtctgaacgatctctcgggggctgggggacgccctggacccggaagcgcagagaaagaccccggatcagctgatagtgaggccgaaggcctgccctacccagcactcgcacccgtagtcttcttctatctttcacaagattcccgcccacggtcttggtgtttgaggaccgtatgcaatccgtggttcgaacgaattagcatgcttgtgattttgcttaattgtgtcaccttggggatgttccgcccttgcgaggacattgcatgtgattcccagcgctgtcgaatactgcaggcgttcgacgacttcatcttcgctttctttgcggtagagatggttgtgaaaatggttgccctgggcatctttggaaaaaaatgctacctgggcgatacatggaacaggttggactttttcatcgtgattgctggtatgctggaatactcactggatcttcagaacgtgtccttttctgcagtgcgcaccgtccgcgtccttcgacccttaagggccatcaatcgcgttccttccatgcggatcctcgtgacactgctgttagacactctgcccatgctcggcaacgtcctcctgctgtgcttttttgtgttttttatatttgggatcgtaggtgtgcaattgtgggcagggctgctccggaacagatgctttttgcctgaaaacttcagcctccccctgagcgtggatctggagcggtattaccagactgaaaacgaggacgagagcccatttatttgctcccagcccagggaaaacggcatgcgatcttgccgctctgttcctaccctgaggggcgatgggggtggaggacctccatgtggattagattacgaagcttacaactcttcctcgaacacaacatgcgttaattggaatcagtactataccaattgcagtgcaggagagcataacccttttaagggagccattaatttcgataatattggctacgcttggatcgcaatcttccaggtgattactttggaaggttgggtcgacatcatgtatttcgtgatggacgcacattctttttacaattttatctacttcattctgctgatcattgttgggagttttttcatgatcaatctgtgtctcgtggtgattgctactcagttttcagaaactaagcaaagagagtcccagcttatgcgcgagcagagagtgcggtttctctcaaatgcctctacactggccagtttttcagagcccggaagctgttatgaggagttactcaaatacttggtatacatcctcagaaaggccgctagaaggttggcccaggttagccgcgctgcaggggtaagggtcgggttgctctcctcacccgctcccctcggaggacaggagacccagccatcatctagctgttctaggtcgcaccgtaggctctctgtgcaccacctcgtacaccaccaccaccatcaccaccatcattatcacctcggaaatggaacactccgggcacctcgggcttctcctgagatccaggatagggacgccaatggttcgcgaagactgatgctcccccctcccagtaccccagcactatctggcgcaccaccgggaggtgccgagagcgtccatagtttctatcatgctgattgccacctggagcctgtaaggtgccaggcccctcccccacggtcgccctcagaggcaagtggcagaactgttgggtccggaaaagtgtatcccaccgtgcatactagccctcctcccgaaacactgaaagagaaagctttggtagaggtggccgcttcgagcggcccacccactctgacctctctgaatataccccctggaccgtatagttctatgcacaagctcctggagacgcaatccacaggagcttgtcaaagctcttgtaaaattagctcaccctgtctcaaggctgatagcggcgcatgtgggccagattcgtgcccctactgcgctcgagccggtgcaggcgaagttgaactggccgatagggaaatgcctgacagtgactctgaagccgtgtatgagttcacgcaggatgcacagcattctgatctgagagacccacattcccgccgtcagcgtagtctgggccctgacgcggaaccgagttccgttcttgcattctggaggctgatttgtgatacatttaggaagatcgtcgactccaaatactttggtcgtggtattatgatagcaatcctcgttaataccctgtccatggggattgaatatcacgagcagcctgaggaactgacaaatgccttggagatctctaacatcgtcttcacatctctcttcgccctggaaatgttgctcaagctcctggtgtacggcccatttggctacatcaaaaacccctacaatatcttcgacggagtgatagtggtgatttccgtctgggagatcgtcgggcaacaagggggaggcctgagtgtgcttagaactttcaggcttatgagggtgcttaagctcgtgcgattcctgcctgcacttcagcgtcagcttgttgtcctgatgaagaccatggacaacgtcgcaacattctgtatgttattaatgctcttcatcttcatttttagcatactcgggatgcacctgttcgggtgtaaatttgctagtgagcgtgacggcgatactttgcccgatagaaagaactttgactctctgctctgggcaattgtcacagtctttcaaatactcacccaggaggactggaacaaagtgttgtataacggcatggccagcacttcgtcatgggccgctctgtacttcattgcgctgatgaccttcgggaactacgtcctgtttaacctgcttgtcgcaattctggtggaaggctttcaggcggaggaaattagtaaaagagaagatgcttcaggtcaactgtcttgcatccaactccccgtagactcccaaggaggcgatgcaaacaaatcagagtcggaaccagattttttcagcccttcactcgacggggatggcgaccgtaagaagtgcttggcactggtctcccttggggagcaccctgaacttagaaagtccttgcttccacctttaattatccacaccgcggctacacctatgtcgctgcctaagtctacctcgaccggcctcggcgaagctctgggcccagcatctagacgcacatcctcctctggatccgctgaacctggcgctgcccacgagatgaaatcccccccatcagccagatccagccctcactccccctggagtgctgccagtagctggacctctaggaggtcttctagaaattccctgggcagagcccctagtttgaagagacggtcaccaagtggtgaacgtagatcgttgttgtccggcgagggccaagagtcacaagacgaagaggagagttccgaagaggaaagggcctctccagccggttcggatcatcggcatcggggatccctggagcgggaggcaaaatcttctttcgatctgcccgatacccttcaggtcccgggattgcaccggactgcgtctggcaggggttcagcatccgagcaccaggactgtaatgggaagtcagcaagtgggagactggcacgggcactccgccctgacgacccacctttggacggggatgatgccgacgatgagggcaatctatcaaaaggtgagcgggtaagggcgtggatccgggctcggctgcccgcatgctgcctggagagggattcatggtcagcatatatttttccaccccagtctcggtttcggctgttatgccatcgcatcatcacccacaagatgttcgaccacgtcgtcctggtcattatattcctgaattgcattactatcgctatggagcggcctaaaatcgatcctcacagcgctgagaggatcttcctaacactgagcaactacattttcaccgcagtctttttggccgagatgacagtcaaagtagtcgcccttggatggtgtttcggcgagcaagcttatcttcggtcctcctggaatgtgttggacggattgctggtgttgatctcagtcatagatatcctggtctctatggtaagcgacagcggcaccaaaatcctgggaatgctgagagtgctgcgccttctgcgaactctgcgcccactcagagtaatctccagggcacagggattaaaactcgtcgtggaaacactgatgagcagtctgaaacccatcggcaacattgtcgtgatctgctgcgcattctttatcatcttcgggatccttggagtccagttgttcaaggggaaattttttgtgtgtcagggggaagacactcgaaacattactaacaagagtgactgtgccgaagcctcctaccgctgggtacgccacaagtataactttgacaatttggggcaggccctcatgtccctgttcgttctggcctctaaagatgggtgggtggatatcatgtatgacgggctcgatgccgtgggggttgatcaacaaccaatcatgaatcacaatccctggatgctactgtatttcatatcattcctcctgatagtcgctttttttgtactaaacatgtttgtgggggtggtggtcgaaaattttcataagtgccgccagcaccaggaagaagaggaagcacggaggcgcgaggagaagcgactgcgtcgcctggagaagaagcggaggaatttgatgctcgatgacgtgatcgccagcggctcttctgcttcagccgcttccgaagcacagtgtaaaccatactatagtgattactcaagattccggctcctagtacaccatctgtgcacctcacattatctcgacctctttatcactggcgtcattgggctcaacgtggtaacaatggcaatggagcactaccagcaacctcagatcctggatgaggctcttaagatctgcaactatatcttcaccgtgatctttgtgctggaatccgtgttcaagttagtcgctttcgggtttcgtaggttcttccaggatagatggaatcagttggatctggcgattgtgctgttgtcaataatggggattacattggaagaaatcgaggttaatgcatcattgccaattaaccccacgatcatcaggattatgcgggtgctccggatagccagggtgctcaagcttcttaaaatggccgtgggaatgagagcccttctggacacggtaatgcaggccctcccgcaggttggcaacttagggcttctttttatgctactgttctttatcttcgcagccctcggagtcgagctattcggcgacctcgagtgtgatgagacccacccatgcgaaggtttgggacgccatgccacattccgtaacttcgggatggcatttctcactctcttcagagtaagcacgggagacaattggaacggaatcatgaaagacacattacgggactgcgaccaggagagtacttgttataatacagtcatctcacccatttacttcgtgagctttgtgctcaccgcacaattcgtcctggttaatgtggtgattgctgtacttatgaagcacttggaagaaagtaacaaagaagcaaaggaggaggccgagctcgaagccgaattggaactcgagatgaaaaccctgagtccccagccgcacagtcctctgggttcccctttcctgtggcccggagtcgagggacctgacagccccgactcgcctaagcccggagcacttcacccagccgctcacgccaggagcgcttctcactttagtctcgagcatcccactgatagacagctgttcgatacaatttctctgctgatccaggggtccctcgaatgggaactcaaattgatggatgagctggccggacctggtggacagccttccgccttcccatccgcgccttcgctcggtggatccgatccccagatgcagccacaccccacggagttacctgggcctgacctgctgacagtgcgcaagagcggtgtgtctcgaacacattccctaccaaacgattcctatatgtgtcggcacggcagtaccgccgaaggacccctgggccatcgtgggtgggggctacctaaggcgcagagtggttctgttctctccgtgcacagtcaaccagctgacacgtcttatatcctccaactaccaaaagacgccccacaccttctgcaacctcatagcgcaccaacttggggaacgatccctaaactgccgccaccgggacgctctcccctggcccagcgacccctacggagacaggctgctatcaggacggattcccttgatgtccaaggcctgggaagccgcgaggatctcctggccgaagtttctggcccatcacctcccctggccagagcctacagcttttggggacaatccagtactcaggcacagcagcactccaggagtcacagcaaaatctcgaaacacatgactccgcctgccccttgcccaggacccgagcctaattgggggaaggggcctcccgagacgcgttcttctttggagctggacaccgaactcagctggatttccggcgacctgctcccaccaggagggcaggaggaacctcctagcccgcgagatctaaagaagtgctattcagttgaggcccagtcttgccagcggcgtccgaccagctggctggatgagcagaggagacactcaatcgccgtgtcctgtctggacagcggctcccagccccatctgggtactgatccgtcaaacctgggaggccagcctctcggaggcccagggtcccggccaaagaaaaaactatcgcctcctagtataactatcgatcccccagaatcccaggggcctcgtacccctccgagcccagggatctgcctgaggaggcgcgctccaagttcagattcaaaggaccctttagcctctggcccaccagacagtatggccgcatctccctcaccaaagaaagatgtgctaagcctgtccggtttatcttccgacccggcagacttggatcccta

SEQ ID NO: 259754 - DNA, 7014 bp, Artificial Sequence
  derived and/or modified sequence
atggacgaggaggaggatggagcgggcgccgaggagtcgggacagccccggagcttcatgcggctcaacgacctgtcgggggccgggggccggccggggccggggtcagcagaaaaggacccgggcagcgcggactccgaggcggaggggctgccgtacccggcgctggccccggtggttttcttctacttgagccaggacagccgcccgcggagctggtgtctccgcacggtctgtaacccctggtttgagcgcatcagcatgttggtcatccttctcaactgcgtgaccctgggcatgttccggccatgcgaggacatcgcctgtgactcccagcgctgccggatcctgcaggcctttgatgacttcatctttgccttctttgccgtggagatggtggtgaagatggtggccttgggcatctttgggaaaaagtgttacctgggagacacttggaaccggcttgactttttcatcgtcatcgcagggatgctggagtactcgctggacctgcagaacgtcagcttctcagctgtcaggacagtccgtgtgctgcgaccgctcagggccattaaccgggtgcccagcatgcgcatccttgtcacgttgctgctggatacgctgcccatgctgggcaacgtcctgctgctctgcttcttcgtcttcttcatcttcggcatcgtcggcgtccagctgtgggcagggctgcttcggaaccgatgcttcctacctgagaatttcagcctccccctgagcgtggacctggagcgctattaccagacagagaacgaggatgagagccccttcatctgctcccagccacgcgagaacggcatgcggtcctgcagaagcgtgcccacgctgcgcggggacgggggcggtggcccaccttgcggtctggactatgaggcctacaacagctccagcaacaccacctgtgtcaactggaaccagtactacaccaactgctcagcgggggagcacaaccccttcaagggcgccatcaactttgacaacattggctatgcctggatcgccatcttccaggtcatcacgctggagggctgggtcgacatcatgtactttgtgatggatgctcattccttctacaatttcatctacttcatcctcctcatcatcgtgggctccttcttcatgatcaacctgtgcctggtggtgattgccacgcagttctcagagaccaagcagcgggaaagccagctgatgcgggagcagcgtgtgcggttcctgtccaacgccagcaccctggctagcttctctgagcccggcagctgctatgaggagctgctcaagtacctggtgtacatccttcgtaaggcagcccgcaggctggctcaggtctctcgggcagcaggtgtgcgggttgggctgctcagcagcccagcacccctcgggggccaggagacccagcccagcagcagctgctctcgctcccaccgccgcctatccgtccaccacctggtgcaccaccaccaccaccatcaccaccactaccacctgggcaatgggacgctcagggccccccgggccagcccggagatccaggacagggatgccaatgggtcccgccggctcatgctgccaccaccctcgacgcctgccctctccggggccccccctggtggcgcagagtctgtgcacagcttctaccatgccgactgccacttagagccagtccgctgccaggcgccccctcccaggtccccatctgaggcatccggcaggactgtgggcagcgggaaggtgtatcccaccgtgcacaccagccctccaccggagacgctgaaggagaaggcactagtagaggtggctgccagctctgggcccccaaccctcaccagcctcaacatcccacccgggccctacagctccatgcacaagctgctggagacacagagtacaggtgcctgccaaagctcttgcaagatctccagcccttgcttgaaagcagacagtggagcctgtggtccagacagctgcccctactgtgcccgggccggggcaggggaggtggagctcgccgaccgtgaaatgcctgactcagacagcgaggcagtttatgagttcacacaggatgcccagcacagcgacctccgggacccccacagccggcggcaacggagcctgggcccagatgcagagcccagctctgtgctggccttctggaggctaatctgtgacaccttccgaaagattgtggacagcaagtactttggccggggaatcatgatcgccatcctggtcaacacactcagcatgggcatcgaataccacgagcagcccgaggagcttaccaacgccctagaaatcagcaacatcgtcttcaccagcctctttgccctggagatgctgctgaagctgcttgtgtatggtccctttggctacatcaagaatccctacaacatcttcgatggtgtcattgtggtcatcagcgtgtgggagatcgtgggccagcaggggggcggcctgtcggtgctgcggaccttccgcctgatgcgtgtgctgaagctggtgcgcttcctgccggcgctgcagcggcagctggtggtgctcatgaagaccatggacaacgtggccaccttctgcatgctgcttatgctcttcatcttcatcttcagcatcctgggcatgcatctcttcggctgcaagtttgcctctgagcgggatggggacaccctgccagaccggaagaattttgactccttgctctgggccatcgtcactgtctttcagatcctgacccaggaggactggaacaaagtcctctacaatggtatggcctccacgtcgtcctgggcggccctttatttcattgccctcatgaccttcggcaactacgtgctcttcaatttgctggtcgccattctggtggagggcttccaggcggaggaaatcagcaaacgggaagatgcgagtggacagttaagctgtattcagctgcctgtcgactcccaggggggagatgccaacaagtccgaatcagagcccgatttcttctcacccagcctggatggtgatggggacaggaagaagtgcttggccttggtgtccctgggagagcacccggagctgcggaagagcctgctgccgcctctcatcatccacacggccgccacacccatgtcgctgcccaagagcaccagcacgggcctgggcgaggcgctgggccctgcgtcgcgccgcaccagcagcagcgggtcggcagagcctggggcggcccacgagatgaagtcaccgcccagcgcccgcagctctccgcacagcccctggagcgctgcaagcagctggaccagcaggcgctccagccggaacagcctcggccgtgcacccagcctgaagcggagaagcccaagtggagagcggcggtccctgttgtcgggagaaggccaggagagccaggatgaagaggagagctcagaagaggagcgggccagccctgcgggcagtgaccatcgccacagggggtccctggagcgggaggccaagagttcctttgacctgccagacacactgcaggtgccagggctgcatcgcactgccagtggccgagggtctgcttctgagcaccaggactgcaatggcaagtcggcttcagggcgcctggcccgggccctgcggcctgatgaccccccactggatggggatgacgccgatgacgagggcaacctgagcaaaggggaacgggtccgcgcgtggatccgagcccgactccctgcctgctgcctcgagcgagactcctggtcagcctacatcttccctcctcagtccaggttccgcctcctgtgtcaccggatcatcacccacaagatgttcgaccacgtggtccttgtcatcatcttccttaactgcatcaccatcgccatggagcgccccaaaattgacccccacagcgctgaacgcatcttcctgaccctctccaattacatcttcaccgcagtctttctggctgaaatgacagtgaaggtggtggcactgggctggtgcttcggggagcaggcgtacctgcggagcagttggaacgtgctggacgggctgttggtgctcatctccgtcatcgacattctggtgtccatggtctctgacagcggcaccaagatcctgggcatgctgagggtgctgcggctgctgcggaccctgcgcccgctcagggtgatcagccgggcgcaggggctgaagctggtggtggagacgctgatgtcctcactgaaacccatcggcaacattgtagtcatctgctgtgccttcttcatcattttcggcatcttgggggtgcagctcttcaaagggaagtttttcgtgtgccagggcgaggataccaggaacatcaccaataaatcggactgtgccgaggccagttaccggtgggtccggcacaagtacaactttgacaaccttggccaggccctgatgtccctgttcgttttggcctccaaggatggttgggtggacatcatgtacgatgggctggatgctgtgggcgtggaccagcagcccatcatgaaccacaacccctggatgctgctgtacttcatctcgttcctgctcattgtggccttctttgtcctgaacatgtttgtgggtgtggtggtggagaacttccacaagtgtcggcagcaccaggaggaagaggaggcccggcggcgggaggagaagcgcctacgaagactggagaaaaagagaaggaatctaatgctggacgatgtaattgcttccggcagctcagccagcgctgcgtcagaagcccagtgcaaaccttactactccgactactcccgcttccggctcctcgtccaccacttgtgcaccagccactacctggacctcttcatcacaggtgtcatcgggctgaacgtggtcaccatggccatggagcactaccagcagccccagattctggatgaggctctgaagatctgcaactacatcttcactgtcatctttgtcttggagtcagttttcaaacttgtggcctttggtttccgtcggttcttccaggacaggtggaaccagctggacctggccattgtgctgctgtccatcatgggcatcacgctggaggaaatcgaggtcaacgcctcgctgcccatcaaccccaccatcatccgcatcatgagggtgctgcgcattgcccgagtgctgaagctgctgaagatggctgtgggcatgcgggcgctgctggacacggtgatgcaggccctgccccaggtggggaacctgggacttctcttcatgttgttgtttttcatctttgcagctctgggcgtggagctctttggagacctggagtgtgacgagacacacccctgtgagggcctgggccgtcatgccacctttcggaactttggcatggccttcctaaccctcttccgagtctccacaggtgacaattggaatggcattatgaaggacaccctccgggactgtgaccaggagtccacctgctacaacacggtcatctcgcctatctactttgtgtccttcgtgctgacggcccagttcgtgctagtcaacgtggtgatcgccgtgctgatgaagcacctggaggagagcaacaaggaggccaaggaggaggccgagctagaggctgagctggagctggagatgaagaccctcagcccccagccccactcgccactgggcagccccttcctctggcctggggtcgagggccccgacagccccgacagccccaagcctggggctctgcacccagcggcccacgcgagatcagcctcccacttttccctggagcaccccacggacaggcagctgtttgacaccatatccctgctgatccagggctccctggagtgggagctgaagctgatggacgagctggcaggcccagggggccagccctctgccttcccttctgcccccagcctgggaggctccgacccacagatgcagccccaccccacggagctgccaggaccagacttactgactgtgcggaagtctggggtcagccgaacgcactctctgcccaatgacagctacatgtgtcggcatgggagcactgccgaggggcccctgggacacaggggctgggggctccccaaagctcagtcaggctccgtcttgtccgttcactcccagccagcagataccagctacatcctgcagcttcccaaagatgcacctcatctgctccagccccacagcgccccaacctggggcaccatccccaaactgcccccaccaggacgctcccctttggctcagaggccactcaggcgccaggcagcaataaggactgactccttggacgttcagggtctgggcagccgggaagacctgctggcagaggtgagtgggccctccccgcccctggcccgggcctactctttctggggccagtcaagtacccaggcacagcagcactcccgcagccacagcaagatctccaagcacatgaccccgccagccccttgcccaggcccagaacccaactggggcaagggccctccagagaccagaagcagcttagagttggacacggagctgagctggatttcaggagacctcctgccccctggcggccaggaggagcccccatccccacgggacctgaagaagtgctacagcgtggaggcccagagctgccagcgccggcctacgtcctggctggatgagcagaggagacactctatcgccgtcagctgcctggacagcggctcccaaccccacctgggcacagacccctctaaccttgggggccagcctcttggggggcctgggagccggcccaagaaaaaactcagcccgcctagtatcaccatagacccccccgagagccaaggtcctcggaccccgcccagccctggtatctgcctccggaggagggctccgtccagcgactccaaggatcccttggcctctggcccccctgacagcatggctgcctcgccctccccaaagaaagatgtgctgagtctctccggtttatcctctgacccagcagacctggacccctgagtcctgccccacttt

SEQ ID NO: 259755 - protein, 2266 aa, Artificial Sequence
  derived and/or modified sequence
MDEEEDGAGAEESGQPRSFMRLNDLSGAGGRPGPGSAEKDPGSADSEAEGLPYPALAPVVFFYLSQDSRPRSWCLRTVCNPWFERISMLVILLNCVTLGMFRPCEDIACDSQRCRILQAFDDFIFAFFAVEMVVKMVALGIFGKKCYLGDTWNRLDFFIVIAGMLEYSLDLQNVSFSAVRTVRVLRPLRAINRVPSMRILVTLLLDTLPMLGNVLLLCFFVFFIFGIVGVQLWAGLLRNRCFLPENFSLPLSVDLERYYQTENEDESPFICSQPRENGMRSCRSVPTLRGDGGGGPPCGLDYEAYNSSSNTTCVNWNQYYTNCSAGEHNPFKGAINFDNIGYAWIAIFQVITLEGWVDIMYFVMDAHSFYNFIYFILLIIVGSFFMINLCLVVIATQFSETKQRESQLMREQRVRFLSNASTLASFSEPGSCYEELLKYLVYILRKAARRLAQVSRAAGVRVGLLSSPAPLGGQETQPSSSCSRSHRRLSVHHLVHHHHHHHHHYHLGNGTLRAPRASPEIQDRDANGSRRLMLPPPSTPALSGAPPGGAESVHSFYHADCHLEPVRCQAPPPRSPSEASGRTVGSGKVYPTVHTSPPPETLKEKALVEVAASSGPPTLTSLNIPPGPYSSMHKLLETQSTGACQSSCKISSPCLKADSGACGPDSCPYCARAGAGEVELADREMPDSDSEAVYEFTQDAQHSDLRDPHSRRQRSLGPDAEPSSVLAFWRLICDTFRKIVDSKYFGRGIMIAILVNTLSMGIEYHEQPEELTNALEISNIVFTSLFALEMLLKLLVYGPFGYIKNPYNIFDGVIVVISVWEIVGQQGGGLSVLRTFRLMRVLKLVRFLPALQRQLVVLMKTMDNVATFCMLLMLFIFIFSILGMHLFGCKFASERDGDTLPDRKNFDSLLWAIVTVFQILTQEDWNKVLYNGMASTSSWAALYFIALMTFGNYVLFNLLVAILVEGFQAEEISKREDASGQLSCIQLPVDSQGGDANKSESEPDFFSPSLDGDGDRKKCLALVSLGEHPELRKSLLPPLIIHTAATPMSLPKSTSTGLGEALGPASRRTSSSGSAEPGAAHEMKSPPSARSSPHSPWSAASSWTSRRSSRNSLGRAPSLKRRSPSGERRSLLSGEGQESQDEEESSEEERASPAGSDHRHRGSLEREAKSSFDLPDTLQVPGLHRTASGRGSASEHQDCNGKSASGRLARALRPDDPPLDGDDADDEGNLSKGERVRAWIRARLPACCLERDSWSAYIFPPQSRFRLLCHRIITHKMFDHVVLVIIFLNCITIAMERPKIDPHSAERIFLTLSNYIFTAVFLAEMTVKVVALGWCFGEQAYLRSSWNVLDGLLVLISVIDILVSMVSDSGTKILGMLRVLRLLRTLRPLRVISRAQGLKLVVETLMSSLKPIGNIVVICCAFFIIFGILGVQLFKGKFFVCQGEDTRNITNKSDCAEASYRWVRHKYNFDNLGQALMSLFVLASKDGWVDIMYDGLDAVGVDQQPIMNHNPWMLLYFISFLLIVAFFVLNMFVGVVVENFHKCRQHQEEEEARRREEKRLRRLEKKRRKAQCKPYYSDYSRFRLLVHHLCTSHYLDLFITGVIGLNVVTMAMEHYQQPQILDEALKICNYIFTVIFVLESVFKLVAFGFRRFFQDRWNQLDLAIVLLSIMGITLEEIEVNASLPINPTIIRIMRVLRIARVLKLLKMAVGMRALLDTVMQALPQVGNLGLLFMLLFFIFAALGVELFGDLECDETHPCEGLGRHATFRNFGMAFLTLFRVSTGDNWNGIMKDTLRDCDQESTCYNTVISPIYFVSFVLTAQFVLVNVVIAVLMKHLEESNKEAKEEAELEAELELEMKTLSPQPHSPLGSPFLWPGVEGPDSPDSPKPGALHPAAHARSASHFSLEHPTMQPHPTELPGPDLLTVRKSGVSRTHSLPNDSYMCRHGSTAEGPLGHRGWGLPKAQSGSVLSVHSQPADTSYILQLPKDAPHLLQPHSAPTWGTIPKLPPPGRSPLAQRPLRRQAAIRTDSLDVQGLGSREDLLAEVSGPSPPLARAYSFWGQSSTQAQQHSRSHSKISKHMTPPAPCPGPEPNWGKGPPETRSSLELDTELSWISGDLLPPGGQEEPPSPRDLKKCYSVEAQSCQRRPTSWLDEQRRHSIAVSCLDSGSQPHLGTDPSNLGGQPLGGPGSRPKKKLSPPSITIDPPESQGPRTPPSPGICLRRRAPSSDSKDPLASGPPDSMAASPSPKKDVLSLSGLSSDPADLDP

SEQ ID NO: 259756 - DNA, 6801 bp, Artificial Sequence
  derived and/or modified sequence
atggacgaggaggaggacggcgccggcgccgaggagagcggccagcccagaagcttcatgagactgaacgacctgagcggcgccggcggcagacccggccccggcagcgccgagaaggaccccggcagcgccgacagcgaggccgagggcctgccctaccccgccctggcccccgtggtgttcttctacctgagccaggacagcagacccagaagctggtgcctgagaaccgtgtgcaacccctggttcgagagaatcagcatgctggtgatcctgctgaactgcgtgaccctgggcatgttcagaccctgcgaggacatcgcctgcgacagccagagatgcagaatcctgcaggccttcgacgacttcatcttcgccttcttcgccgtggagatggtggtgaagatggtggccctgggcatcttcggcaagaagtgctacctgggcgacacctggaacagactggacttcttcatcgtgatcgccggcatgctggagtacagcctggacctgcagaacgtgagcttcagcgccgtgagaaccgtgagagtgctgagacccctgagagccatcaacagagtgcccagcatgagaatcctggtgaccctgctgctggacaccctgcccatgctgggcaacgtgctgctgctgtgcttcttcgtgttcttcatcttcggcatcgtgggcgtgcagctgtgggccggcctgctgagaaacagatgcttcctgcccgagaacttcagcctgcccctgagcgtggacctggagagatactaccagaccgagaacgaggacgagagccccttcatctgcagccagcccagagagaacggcatgagaagctgcagaagcgtgcccaccctgagaggcgacggcggcggcggccccccctgcggcctggactacgaggcctacaacagcagcagcaacaccacctgcgtgaactggaaccagtactacaccaactgcagcgccggcgagcacaaccccttcaagggcgccatcaacttcgacaacatcggctacgcctggatcgccatcttccaggtgatcaccctggagggctgggtggacatcatgtacttcgtgatggacgcccacagcttctacaacttcatctacttcatcctgctgatcatcgtgggcagcttcttcatgatcaacctgtgcctggtggtgatcgccacccagttcagcgagaccaagcagagagagagccagctgatgagagagcagagagtgagattcctgagcaacgccagcaccctggccagcttcagcgagcccggcagctgctacgaggagctgctgaagtacctggtgtacatcctgagaaaggccgccagaagactggcccaggtgagcagagccgccggcgtgagagtgggcctgctgagcagccccgcccccctgggcggccaggagacccagcccagcagcagctgcagcagaagccacagaagactgagcgtgcaccacctggtgcaccaccaccaccaccaccaccaccactaccacctgggcaacggcaccctgagagcccccagagccagccccgagatccaggacagagacgccaacggcagcagaagactgatgctgcccccccccagcacccccgccctgagcggcgccccccccggcggcgccgagagcgtgcacagcttctaccacgccgactgccacctggagcccgtgagatgccaggcccccccccccagaagccccagcgaggccagcggcagaaccgtgggcagcggcaaggtgtaccccaccgtgcacaccagccccccccccgagaccctgaaggagaaggccctggtggaggtggccgccagcagcggcccccccaccctgaccagcctgaacatcccccccggcccctacagcagcatgcacaagctgctggagacccagagcaccggcgcctgccagagcagctgcaagatcagcagcccctgcctgaaggccgacagcggcgcctgcggccccgacagctgcccctactgcgccagagccggcgccggcgaggtggagctggccgacagagagatgcccgacagcgacagcgaggccgtgtacgagttcacccaggacgcccagcacagcgacctgagagacccccacagcagaagacagagaagcctgggccccgacgccgagcccagcagcgtgctggccttctggagactgatctgcgacaccttcagaaagatcgtggacagcaagtacttcggcagaggcatcatgatcgccatcctggtgaacaccctgagcatgggcatcgagtaccacgagcagcccgaggagctgaccaacgccctggagatcagcaacatcgtgttcaccagcctgttcgccctggagatgctgctgaagctgctggtgtacggccccttcggctacatcaagaacccctacaacatcttcgacggcgtgatcgtggtgatcagcgtgtgggagatcgtgggccagcagggcggcggcctgagcgtgctgagaaccttcagactgatgagagtgctgaagctggtgagattcctgcccgccctgcagagacagctggtggtgctgatgaagaccatggacaacgtggccaccttctgcatgctgctgatgctgttcatcttcatcttcagcatcctgggcatgcacctgttcggctgcaagttcgccagcgagagagacggcgacaccctgcccgacagaaagaacttcgacagcctgctgtgggccatcgtgaccgtgttccagatcctgacccaggaggactggaacaaggtgctgtacaacggcatggccagcaccagcagctgggccgccctgtacttcatcgccctgatgaccttcggcaactacgtgctgttcaacctgctggtggccatcctggtggagggcttccaggccgaggagatcagcaagagagaggacgccagcggccagctgagctgcatccagctgcccgtggacagccagggcggcgacgccaacaagagcgagagcgagcccgacttcttcagccccagcctggacggcgacggcgacagaaagaagtgcctggccctggtgagcctgggcgagcaccccgagctgagaaagagcctgctgccccccctgatcatccacaccgccgccacccccatgagcctgcccaagagcaccagcaccggcctgggcgaggccctgggccccgccagcagaagaaccagcagcagcggcagcgccgagcccggcgccgcccacgagatgaagagcccccccagcgccagaagcagcccccacagcccctggagcgccgccagcagctggaccagcagaagaagcagcagaaacagcctgggcagagcccccagcctgaagagaagaagccccagcggcgagagaagaagcctgctgagcggcgagggccaggagagccaggacgaggaggagagcagcgaggaggagagagccagccccgccggcagcgaccacagacacagaggcagcctggagagagaggccaagagcagcttcgacctgcccgacaccctgcaggtgcccggcctgcacagaaccgccagcggcagaggcagcgccagcgagcaccaggactgcaacggcaagagcgccagcggcagactggccagagccctgagacccgacgacccccccctggacggcgacgacgccgacgacgagggcaacctgagcaagggcgagagagtgagagcctggatcagagccagactgcccgcctgctgcctggagagagacagctggagcgcctacatcttccccccccagagcagattcagactgctgtgccacagaatcatcacccacaagatgttcgaccacgtggtgctggtgatcatcttcctgaactgcatcaccatcgccatggagagacccaagatcgacccccacagcgccgagagaatcttcctgaccctgagcaactacatcttcaccgccgtgttcctggccgagatgaccgtgaaggtggtggccctgggctggtgcttcggcgagcaggcctacctgagaagcagctggaacgtgctggacggcctgctggtgctgatcagcgtgatcgacatcctggtgagcatggtgagcgacagcggcaccaagatcctgggcatgctgagagtgctgagactgctgagaaccctgagacccctgagagtgatcagcagagcccagggcctgaagctggtggtggagaccctgatgagcagcctgaagcccatcggcaacatcgtggtgatctgctgcgccttcttcatcatcttcggcatcctgggcgtgcagctgttcaagggcaagttcttcgtgtgccagggcgaggacaccagaaacatcaccaacaagagcgactgcgccgaggccagctacagatgggtgagacacaagtacaacttcgacaacctgggccaggccctgatgagcctgttcgtgctggccagcaaggacggctgggtggacatcatgtacgacggcctggacgccgtgggcgtggaccagcagcccatcatgaaccacaacccctggatgctgctgtacttcatcagcttcctgctgatcgtggccttcttcgtgctgaacatgttcgtgggcgtggtggtggagaacttccacaagtgcagacagcaccaggaggaggaggaggccagaagaagagaggagaagagactgagaagactggagaagaagagaagaaaggcccagtgcaagccctactacagcgactacagcagattcagactgctggtgcaccacctgtgcaccagccactacctggacctgttcatcaccggcgtgatcggcctgaacgtggtgaccatggccatggagcactaccagcagccccagatcctggacgaggccctgaagatctgcaactacatcttcaccgtgatcttcgtgctggagagcgtgttcaagctggtggccttcggcttcagaagattcttccaggacagatggaaccagctggacctggccatcgtgctgctgagcatcatgggcatcaccctggaggagatcgaggtgaacgccagcctgcccatcaaccccaccatcatcagaatcatgagagtgctgagaatcgccagagtgctgaagctgctgaagatggccgtgggcatgagagccctgctggacaccgtgatgcaggccctgccccaggtgggcaacctgggcctgctgttcatgctgctgttcttcatcttcgccgccctgggcgtggagctgttcggcgacctggagtgcgacgagacccacccctgcgagggcctgggcagacacgccaccttcagaaacttcggcatggccttcctgaccctgttcagagtgagcaccggcgacaactggaacggcatcatgaaggacaccctgagagactgcgaccaggagagcacctgctacaacaccgtgatcagccccatctacttcgtgagcttcgtgctgaccgcccagttcgtgctggtgaacgtggtgatcgccgtgctgatgaagcacctggaggagagcaacaaggaggccaaggaggaggccgagctggaggccgagctggagctggagatgaagaccctgagcccccagccccacagccccctgggcagccccttcctgtggcccggcgtggagggccccgacagccccgacagccccaagcccggcgccctgcaccccgccgcccacgccagaagcgccagccacttcagcctggagcaccccaccatgcagccccaccccaccgagctgcccggccccgacctgctgaccgtgagaaagagcggcgtgagcagaacccacagcctgcccaacgacagctacatgtgcagacacggcagcaccgccgagggccccctgggccacagaggctggggcctgcccaaggcccagagcggcagcgtgctgagcgtgcacagccagcccgccgacaccagctacatcctgcagctgcccaaggacgccccccacctgctgcagccccacagcgcccccacctggggcaccatccccaagctgcccccccccggcagaagccccctggcccagagacccctgagaagacaggccgccatcagaaccgacagcctggacgtgcagggcctgggcagcagagaggacctgctggccgaggtgagcggccccagcccccccctggccagagcctacagcttctggggccagagcagcacccaggcccagcagcacagcagaagccacagcaagatcagcaagcacatgaccccccccgccccctgccccggccccgagcccaactggggcaagggcccccccgagaccagaagcagcctggagctggacaccgagctgagctggatcagcggcgacctgctgccccccggcggccaggaggagccccccagccccagagacctgaagaagtgctacagcgtggaggcccagagctgccagagaagacccaccagctggctggacgagcagagaagacacagcatcgccgtgagctgcctggacagcggcagccagccccacctgggcaccgaccccagcaacctgggcggccagcccctgggcggccccggcagcagacccaagaagaagctgagcccccccagcatcaccatcgacccccccgagagccagggccccagaaccccccccagccccggcatctgcctgagaagaagagcccccagcagcgacagcaaggaccccctggccagcggcccccccgacagcatggccgccagccccagccccaagaaggacgtgctgagcctgagcggcctgagcagcgaccccgccgacctggacccctag

SEQ ID NO: 259757 - DNA, 6801 bp, Artificial Sequence
  derived and/or modified sequence
atggatgaggaggaggacggcgccggcgcagaggaatctggacagccacgtagctttatgcgcctcaacgacctgagtggcgctggaggcaggccaggtcctggctcggccgagaaggaccccggctcagcggactccgaggctgaaggcttaccctatcctgctctggctccagtagtgtttttttatttatcacaagattcccggccaaggagttggtgtctgagaaccgtgtgcaatccttggttcgagcgtatttcgatgctcgtcattctactcaattgtgttacattgggaatgtttcggccgtgcgaagatattgcctgtgactctcagaggtgcagaattttgcaggccttcgacgattttatatttgctttcttcgccgtggagatggtcgttaagatggtggctctcggaatctttgggaagaagtgttacctcggggatacctggaatcggctggatttcttcatagtgatagccggcatgctcgagtatagtctagatttgcagaacgtttccttctcagcagtgaggacagtgcgagtgctcagaccgctgagagccattaaccgggtcccttcaatgcggatcctggtcacactgctcttggacaccctgcctatgctcggcaacgtacttctgttatgtttttttgtgtttttcatattcggcatcgtgggtgttcagctgtgggccggtcttcttaggaatcgctgtttcttgccagagaatttctcccttccgttaagtgtagatctcgagagatactaccagaccgagaatgaggatgaatctccgtttatttgtagtcagcctagggagaacggtatgcgctcttgcagatccgttcccaccctaaggggagatggtgggggaggaccaccctgtggactagactatgaggcatacaatagctctagcaataccacatgtgtgaattggaaccagtactacaccaactgctctgccggagaacacaacccattcaaaggggctattaacttcgacaatatagggtacgcttggattgcaattttccaggtgataacactggaggggtgggtggatatcatgtatttcgtcatggatgcccactccttttataatttcatttactttatattgctcattattgtgggctccttctttatgataaacctgtgcctggtcgttatcgcgactcagttcagcgagactaagcagagagagagccagctgatgcgcgagcagcgggtcagatttctctccaatgcctctactctggccagtttcagtgagccgggctcctgttatgaggagctactcaagtacctagtgtatatattgagaaaagcagcccgacggctggcacaagtctcgcgcgcggccggtgtgcgcgtgggcctgctgtccagtcccgccccattgggtggacaggagacgcagccaagctcatcatgttcacggagtcaccgtcggcttagcgttcaccatctggttcaccaccatcaccatcaccatcaccattatcatttgggcaacggtactcttcgggcccctcgagcctcacctgaaatccaggacagagatgcaaatggatcccgaaggttgatgctgccaccgccctctactcccgccctgtccggcgcacccccaggaggcgccgagagcgtgcacagcttctaccacgcagattgccacttggaacctgtgcgttgtcaggcccccccccccagaagtccaagcgaggcatccggtcggaccgtagggtcgggcaaagtgtacccaactgtgcatacctctcctcccccagaaaccctcaaagaaaaagcactggtcgaggtagccgcttcaagtggtcctcccactcttacctctctgaatatcccccccggtccatacagttcaatgcacaagctcttggagactcagagtacgggcgcatgtcagagcagttgtaagatatcaagcccttgtttgaaagccgattctggcgcctgtggacctgacagctgtccatattgcgccagagccggcgcaggagaagtggagctggcagacagagagatgcctgattccgatagtgaggccgtgtacgaatttacacaggatgcgcaacattccgatcttcgagacccacattcgcgccgacagaggagcctggggcctgacgcggaaccctctagtgtgctcgcgttctggagactgatctgtgacactttccgtaagatagtcgactctaaatattttggtcgagggatcatgatagcgatactggtgaatacactctccatgggaattgaatatcatgagcagccagaggagctgaccaacgccctggagatctccaacatagtgttcaccagtctgtttgcactcgagatgctcctgaaactgctggtgtacgggccgttcggctacattaaaaacccatataacatcttcgatggtgtcattgtggtgatcagcgtgtgggagatcgtggggcagcaggggggaggactctctgtgctccgaaccttcaggctcatgcgggttttaaagctggtgcgttttttaccagccctacaacgccagttagtggtgcttatgaaaaccatggataacgtggccacattctgtatgctcctcatgctttttattttcattttttctatcctgggcatgcatcttttcgggtgtaagttcgcttcagagagggacggcgatacgctgcctgacagaaaaaattttgacagtctgctgtgggctatcgttaccgtgttccagatcctcacccaggaggactggaataaggtattatacaacggcatggcttctacttcctcctgggccgccctgtatttcatcgcccttatgacgtttggcaactacgtgctgttcaatcttctggtggcaattctagtggaggggtttcaggccgaggagatcagtaagagagaagacgcctcaggccagctgtcatgcatacagctgcccgttgacagccagggcggagacgctaataaatctgagagcgagccggatttcttctctccgagtctggatggcgatggggatagaaagaaatgcctggcactagtttctcttggtgaacacccagaactcaggaagagcctgctgcctcccctgatcatccacacagcggcaacccccatgagcctaccaaaatccacaagcacaggactcggcgaagcactgggccctgcctcccggcgaacatcctcctcaggatccgccgagcctggcgccgcgcacgagatgaagagccccccatccgctagaagttcacctcatagtccgtggagcgcagctagttcgtggacttctcgccgtagctcacggaacagccttggccgtgcccccagtcttaaaagaaggtctccaagtggggagcggaggagcctgcttagtggagaaggacaagagagtcaagatgaggaagagtccagtgaggaggagagggcgtcgcctgccggttccgaccatcggcatcgggggtcgctagagcgcgaggccaaaagttcctttgacctgccggacactctgcaagtgccggggcttcatcggactgcaagtggtcgaggatctgcctcggaacaccaggattgtaatggcaaatcggcaagcggcagactggcccgcgcgttacgtcccgatgatcccccgttggacggggacgacgcggatgatgagggtaacctgtcgaaaggagagcgcgtccgcgcttggataagagcacgcctccctgcctgctgccttgagcgagattcgtggagcgcttacatcttccctccccagagtagatttaggcttctctgccatcgcatcattacccataaaatgtttgaccacgtggtcctagtaatcattttcctcaattgtattactatcgctatggagcgccccaagatcgatcctcacagtgccgaacggatttttttgaccttatccaactacatttttacggcagtcttcttggcagaaatgacagtgaaggtggtcgcgctgggctggtgtttcggcgaacaagcatacctgaggtcttcgtggaacgtcttggacgggctgctggtgttgattagcgttatagacatcctggtgtctatggtgagtgattcaggcacaaaaattctcggaatgctgcgcgtcctccggcttctaaggacactgcgccccctacgggtcatttcccgcgcccagggccttaagctggttgtggagaccctgatgagctcactgaagccgattggaaacattgtggttatctgctgtgcctttttcattattttcgggatcttgggtgtccagctgttcaaagggaagttcttcgtgtgtcaaggcgaggacacccggaatatcacaaacaaatccgactgcgcagaggcctcctaccggtgggtgaggcataagtataacttcgataacttgggccaggctttaatgtctctttttgtactggcttccaaagatgggtgggtcgatataatgtatgacggtctcgatgctgtgggcgtcgaccagcagccaattatgaaccacaatccttggatgctactgtactttatcagtttcctcttaatcgtggcattctttgtcctcaacatgtttgtgggcgtggtcgtggaaaatttccacaagtgcaggcagcatcaggaggaggaggaagcccgcagaagggaggaaaaacgcttgaggcgcctggagaagaagcgccgtaaagcccagtgtaaaccctactactcagattatagccgcttcaggctcctggttcatcacctctgtactagtcattacttggatctcttcatcacaggagtaataggactaaacgttgtgacaatggctatggagcactaccagcagccccaaatcctggacgaagcccttaagatctgtaactatatcttcactgtgatcttcgtactggagtcggtgttcaaattggtggcctttggtttcagacgatttttccaggacaggtggaatcaactggacctggctattgtactcctgtctataatgggcattactctcgaagaaatcgaagtgaatgcgtccctgccaatcaaccccactattatccgaattatgcgcgtgctgaggatcgcccgggtactgaagctgctgaagatggccgttggtatgcgagcacttctagataccgtgatgcaggcgctgccgcaagtggggaacctgggcttgctctttatgctgctgttcttcatctttgccgccctcggcgttgagttattcggtgatctcgaatgcgacgagacacatccttgcgaaggactgggaagacacgcaacattccgcaactttggtatggcattcctcaccctttttagggtgagcacaggagacaactggaacggaattatgaaagatacactgcgggactgcgaccaggaatccacctgttataacactgtcatttcccccatttacttcgttagcttcgtcctgacagcgcagttcgtcctggtaaacgtggtgatagctgttctcatgaagcacctggaggagagtaataaagaagctaaggaagaagctgagctcgaggccgagctggagttagagatgaagactctgagcccgcagcctcatagtcccctcggctctcccttcctgtggcctggcgtggaagggccagattctcctgacagccctaaacccggagccctccaccctgcggcacacgcccggagtgcctctcatttttcactggagcacccaactatgcagccccatccgactgaacttcccggcccagacctgctgactgtgcgcaaatcaggggtgtcacggacccactccctccccaacgacagctatatgtgtcgccatgggagcacggcagagggaccactgggacataggggttggggcctccctaaggcacagtcgggaagcgtgctgagtgtgcattctcagcctgcggacacttcatatatcctgcaattaccaaaagacgcacctcatctcctgcaacctcactccgctcccacctgggggaccattcccaagctcccacctcccggcaggtctccgctagcccaaaggccactgaggcggcaggccgctataaggacagactctctcgatgtccaagggcttggaagtcgtgaggatcttctggcagaggtatccggtcccagtcctcccctggcgagagcctattccttctggggacagtcttccacccaggctcagcagcactccagaagccactcaaagatctccaagcacatgacccctcctgcaccttgccctgggcccgagccaaactgggggaagggtcctcctgagactcgaagcagtctggagctcgataccgaactttcatggatttccggggatctgttgcctccaggcgggcaggaggaaccacctagtccccgggatttgaaaaaatgttacagtgttgaggcgcagtcgtgtcagcggaggccaactagctggttggacgaacagcgcagacattccattgccgtctcctgcctggattccggctctcaaccccacctcggtacagacccgtcgaatctgggagggcaaccgctgggggggccaggatctagacccaaaaaaaagctgagccccccgagcattaccattgatcctcctgaaagccagggccctcggacacctccttcacctggcatctgcctgcggcggcgggctccttctagcgatagcaaagaccccctcgcctccggaccgcccgattccatggctgccagcccctctcccaagaaagacgtcctgtctctttccggccttagtagtgatccagctgatctagacccttag

SEQ ID NO: 259758 - DNA, 6801 bp, Artificial Sequence
  derived and/or modified sequence
atggatgaggaggaggatggagctggagctgaggagagcggccagcccaggagcttcatgaggctgaatgacctgagcggggccggcggccggcccggccctggcagcgctgagaaggaccccggcagcgctgacagcgaggccgagggcctgccctacccagccctggcccctgtggtgttcttctacctgagccaggacagccggcccaggtcctggtgcctgaggacagtgtgcaacccctggtttgagcgcatctccatgctggtgatcctgctgaactgtgtgaccctgggcatgttccggccctgtgaagatattgcctgtgacagccagcgctgccgcatcctgcaggcctttgatgacttcatctttgccttctttgctgtggagatggtggtgaagatggtggccctgggcatctttgggaagaagtgctacctgggggacacctggaaccggctggacttcttcatcgtgattgctggcatgctggagtacagcctggacctgcagaatgtgtccttctctgctgtgaggacagtgcgggtgctgcggcccctgcgggccatcaacagagtgcccagcatgaggatcctggtgaccctgctgctggacaccctgcccatgctgggcaatgtgctgctgctgtgcttctttgtgttcttcatctttggaattgtgggcgtgcagctgtgggccggcctgctgaggaaccgctgcttcctgcctgagaacttcagcctgcccctgtctgtggacctggagcgctactaccagacagaaaatgaagatgagagccccttcatctgcagccagccccgggagaatggcatgaggagctgccgctctgtgcccaccctgcggggagatggcggcggcggccccccctgtggcctggactatgaggcctacaacagcagcagcaacaccacctgtgtgaactggaaccagtactacaccaactgcagcgctggggagcacaaccccttcaagggggccatcaactttgacaacatcggctacgcctggatcgccatcttccaggtgatcaccctggagggctgggtggacatcatgtactttgtgatggatgcccacagcttctacaacttcatctacttcatcctgctgatcatcgtgggcagcttcttcatgatcaacctgtgcctggtggtgattgccacccagttcagcgagaccaagcagcgggagagccagctgatgagggagcagagggtgcgcttcctgagcaatgccagcaccctggccagcttcagcgagcccggcagctgctatgaggagctgctgaagtacctggtgtacatcctgaggaaggccgcccggcggctggcccaggtgtccagagctgctggggtgcgggtgggcctgctgagcagccctgcccccctgggcggccaggagacccagcccagcagcagctgcagccgcagccaccggcggctgtctgtgcaccacctggtgcaccaccaccaccaccaccaccaccactaccacctgggcaatggcaccctgcgggccccccgggccagccctgagatccaggacagagatgccaacggcagccggcggctgatgctgcccccacccagcaccccagccctgagcggggcccctcctggaggagctgagagcgtgcacagcttctaccacgccgactgccacctggagcctgtgcgctgccaggcccccccacccaggagccccagcgaggccagcggccgcacagtgggcagcggcaaggtgtaccccaccgtgcacaccagccccccacctgagaccctgaaggagaaggccctggtggaggtggccgccagcagcggcccccccaccctgaccagcctgaacatccccccaggcccctacagctccatgcacaagctgctggagacccagagcactggagcctgccagagcagctgcaagatcagcagcccctgcctgaaggctgacagcggggcctgtggccctgacagctgcccctactgtgcccgggccggggccggggaggtggagctggccgaccgggagatgccagacagcgacagcgaggccgtgtatgagttcacccaggatgcccagcacagcgacctgcgggacccccacagccggcggcagaggagcctgggcccagatgctgagcccagctctgtgctggccttctggaggctcatctgtgacaccttcaggaagatcgtggacagcaagtacttcggccggggcatcatgattgccatcctggtgaacaccctgtccatgggcatcgagtaccacgagcagcctgaggagctgaccaatgccctggagatcagcaacatcgtgttcaccagcctgtttgccctggagatgctgctgaagctgctggtgtatggccccttcggctacatcaagaacccctacaacatctttgatggagtcatcgtggtgatctctgtgtgggagatcgtgggccagcagggcggcggcctgtctgtgctgcggaccttccggctgatgagggtgctgaagctggtgcgcttcctgcctgccctgcagaggcagctggtggtgctgatgaagaccatggacaacgtggccaccttctgcatgctgctgatgctgttcatcttcatcttcagcatcctgggcatgcacctgtttggctgcaagtttgccagcgagagagatggagacaccctgcctgacaggaagaactttgacagcctgctgtgggccatcgtgacagtgttccagatcctgacccaggaggactggaacaaggtgctgtacaacggcatggccagcaccagctcctgggccgccctgtacttcatcgccctgatgaccttcggcaactacgtgctcttcaacctgctggtggccatcctggtggagggcttccaggccgaggagatcagcaagcgggaggatgccagcggccagctgagctgcatccagctgcctgtggacagccagggcggagatgccaacaagtctgagagcgagccagacttcttcagccccagcctggatggagatggagacaggaagaagtgcctggccctggtgtccctgggggagcaccctgagctgaggaagagcctgctgcccccactcatcatccacacagctgccacccccatgagcctgcccaagagcaccagcacaggcctgggggaggccctgggccctgccagcaggaggaccagcagcagcggcagcgctgagcctggagctgcccacgagatgaagagcccccccagcgcccggagcagcccccacagcccctggagcgctgccagctcctggaccagccgccgcagcagcaggaacagcctgggccgggcccccagcctgaagagaagaagccccagcggggagcggcgcagcctgctgtctggagagggccaggagagccaggatgaggaggagagcagcgaggaggagcgggccagccctgctggcagtgaccaccgccaccggggcagcctggagcgggaggccaagagcagctttgacctgcctgacaccctgcaggtgcccggcctgcacaggacagccagcggccggggcagcgccagcgagcaccaggactgcaatggcaagagcgccagcggccgcctggcccgggccctgcggccagatgatcctcccctggatggagatgatgctgatgatgagggcaacctgagcaagggggagcgggtgcgggcctggatccgggcccggctgcctgcctgctgcctggagcgggacagctggagcgcctacatcttccccccccagagccgcttccggctgctgtgccaccgcatcatcacccacaagatgtttgaccacgtggtgctggtgatcatcttcctgaactgcatcaccatcgccatggagcggcccaagattgacccccacagcgctgagcgcatcttcctgaccctgagcaactacatcttcaccgctgtgttcctggccgagatgacagtgaaggtggtggccctgggctggtgcttcggggagcaggcctacctgcggagctcctggaatgtgctggatggcctgctggtgctgatctctgtgattgacatcctggtgtccatggtgtctgattctggcaccaagatcctgggcatgctgcgggtgctgcggctgctgcggaccctgcggcccctgcgggtcatcagccgggcccagggcctgaagctggtggtggagaccctgatgagcagcctgaagcccatcggcaacatcgtggtgatctgctgtgccttcttcatcatcttcggcatcctgggcgtgcagctgttcaagggcaagttctttgtgtgccagggcgaggacaccaggaacatcaccaacaagagtgactgtgccgaggccagctaccgctgggtgcgccacaagtacaactttgacaacctgggccaggccctgatgagcctgtttgtgctggccagcaaggatggctgggtggacatcatgtatgatggcctggatgctgtgggcgtggaccagcagcccatcatgaaccacaacccctggatgctgctgtacttcatctccttcctgctgattgtggccttctttgtgctgaacatgtttgtgggcgtggtggtggagaacttccacaagtgccggcagcaccaggaggaggaggaggcccggcggcgggaggagaagaggctgcggcggctggagaagaagaggaggaaggcccagtgcaagccctactacagcgactacagccgcttccggctgctggtgcaccacctgtgcaccagccactacctggacctcttcatcaccggggtgattggcctgaatgtggtgaccatggccatggagcactaccagcagccccagatcctggatgaggccctgaagatctgcaactacatcttcaccgtcatctttgtgctggagagcgtcttcaagctggtggccttcggcttccgccgcttcttccaggaccgctggaaccagctggacctggccatcgtgctgctgagcatcatgggcatcaccctggaggagattgaggtgaatgccagcctgcccatcaaccccaccatcatccgcatcatgagggtgctgcgcatcgcccgggtgctgaagctgctgaagatggctgtgggcatgagggccctgctggacacagtgatgcaggccctgccccaggtgggcaacctgggcctgctcttcatgctgctcttcttcatctttgctgccctgggcgtggagctgtttggagacctggagtgtgatgagacccacccctgtgagggcctgggcagacatgccaccttcaggaactttggcatggccttcctgaccctcttccgggtgtccactggagacaactggaatggcatcatgaaggacaccctgcgggactgtgaccaggagagcacctgctacaacacagtcatcagccccatctactttgtgtcctttgtgctgacagcccagtttgtgctggtgaatgtggtgattgctgtgctgatgaagcacctggaggagagcaacaaggaggccaaggaggaggccgagctggaggccgagctggagctggagatgaagaccctgagcccccagccccacagccccctgggcagccccttcctgtggccaggagtggagggccctgacagcccagacagccccaagccaggggccctgcaccctgctgcccacgcccggagcgccagccacttcagcctggagcaccccaccatgcagccccaccccacagagctgcccggccctgacctgctgactgtgaggaagagcggcgtgtccaggacccacagcctgcccaatgacagctacatgtgcagacatggcagcacagctgagggccccctgggccaccggggctggggcctgcccaaggcccagagcggctctgtgctgtctgtgcacagccagcctgctgacaccagctacatcctgcagctgcccaaggatgccccccacctgctgcagccccacagcgcccccacctggggcaccatccccaagctgcccccacctggccgcagccccctggcccagaggcccctgcggcggcaggccgccatcagaacagacagcctggatgtgcagggcctgggcagccgggaggacctgctggccgaggtgtctggccccagcccccccctggcccgggcctacagcttctggggccagagcagcacccaggcccagcagcacagccgcagccacagcaagatcagcaagcacatgaccccaccagccccctgccccggccctgagcccaactggggcaaaggacctcctgagaccaggagcagcctggagctggacacagagctgtcctggatcagcggggacctgctgcccccaggcggccaggaggagccccccagcccccgggacctgaagaagtgctacagcgtggaggcccagagctgccagaggcggcccacctcctggctggatgagcagaggaggcacagcattgctgtgtcctgcctggacagcggcagccagccccacctgggcacagaccccagcaacctgggcggccagcccctgggcggccctggcagccggcccaagaagaagctgagccccccatccatcaccatcgaccccccagagagccagggccccaggaccccacccagccctggcatctgcctgcggcggcgggcccccagcagtgacagcaaggaccccctggccagcggccccccagacagcatggccgccagccccagccccaagaaggatgtgctgagcctgagcggcctgagcagtgaccctgctgacctggacccctag

SEQ ID NO: 259759 - DNA, 6801 bp, Artificial Sequence
  derived and/or modified sequence
atggacgaggaggaggacggcgccggcgccgaggagagcggccagcctaggagcttcatgcggctgaatgatttgagtggtgccgggggcaggccaggccctggatctgccgaaaaagaccccggttctgcggactccgaggcggaaggcctgccctaccccgcattagcaccagtggtattcttctatctaagtcaagattctcggccccgatcttggtgcctgagaaccgtgtgtaatccctggtttgaaagaatctcgatgctggtgattctcctgaactgtgtgaccctgggcatgtttaggccctgcgaagacatcgcctgcgatagccagagatgcagaattctgcaggcttttgatgactttatattcgccttctttgcggtggagatggtggtgaagatggtagcattgggcatcttcggcaagaaatgttacctgggagacacatggaacaggctggacttcttcatcgtcatagctggcatgcttgaatactctttagacttgcagaacgtgtctttttcagcagtgcgcacagtgcgagtcctccgcccactgcgtgccattaatagggttcccagcatgcgcatcttggtaacactcctgttagacactctgcctatgctgggaaatgtgctgttattatgctttttcgtgttcttcattttcggtattgtgggcgtgcagctgtgggcaggactacttagaaaccgttgctttctgccagaaaatttcagcctgccgctctcagtcgatctcgagagatattaccagactgagaatgaggacgagagcccttttatatgcagccagccacgggaaaatgggatgcgatcttgtcggagcgtccctacactccgcggcgacggtggtggcggcccaccatgcggccttgattatgaagcctacaactctagttctaacaccacatgtgtcaactggaatcagtattacacgaattgtagcgcaggggagcacaatccctttaagggtgctatcaatttcgacaacataggatacgcctggatagcaattttccaggtaattacccttgaaggatgggtggatatcatgtacttcgttatggatgcccactctttctacaatttcatttacttcatccttctgatcattgtgggttcctttttcatgattaacttgtgcttggtagtaattgccactcagttctctgagactaagcagcgcgagtcacagcttatgcgagaacaaagggttcgttttctttctaacgccagcaccctggcctctttttccgagcctgggtcctgttacgaggagctgctcaagtaccttgtatacattttgaggaaagccgccagacgactggcccaggtgagcagagctgccggtgtgcgagtcgggctcttaagcagccccgcacccctgggaggacaggagacacagcctagctcctcgtgtagtaggtcccacaggcgcctgtctgtgcatcacctggtacaccaccatcaccaccatcaccatcactatcacctgggcaacggaacgttgagagcccctcgagcatctcccgagatccaagaccgagacgccaacggttctaggcgcctgatgctaccaccgccatcaacacctgctctgagcggcgccccacccggtggagcagagtccgtccacagtttttatcacgccgactgccatctggagcctgtgcggtgtcaggctcccccaccacgcagcccaagtgaagcatcagggaggacggtgggcagcggtaaagtgtatcctacagtacacacatcaccacccccagaaactcttaaggagaaagcgctggtggaggtggcagcttctagcggaccacctactctgaccagccttaacatccctccaggtccctactccagtatgcataaattactcgagacccagagcactggcgcatgccagtcctcttgtaaaatctcttcgccctgtctgaaggcagactccggtgcttgcggcccagacagctgcccatactgtgcacgcgctggcgccggcgaagttgaactcgccgatcgcgagatgcccgattccgattctgaagcggtttacgagttcacccaagacgcccagcatagtgacctgagagatccccattctaggaggcagcgcagcttgggcccagatgcggagccgtcctccgttctagctttttggcgcctgatctgcgacaccttccgtaaaatcgttgattccaagtatttcggaagaggtatcatgatcgctattctggtgaacacgctgagtatgggcattgagtatcatgaacagcctgaggagcttacaaatgccctggaaatttccaatatcgtctttacctccttatttgccctggaaatgctcctcaagctgctcgtgtacggtcccttcggatacataaaaaatccttataatattttcgatggcgttattgtggttatttcagtgtgggaaatcgttggccagcagggcggtggactgagtgtgcttcggacatttcggctcatgcgggtactgaagctggttagattcttgcctgcccttcagcgccaacttgttgtgttgatgaaaactatggacaatgtggcgacattctgtatgctattgatgctgttcatctttattttctcaatcctgggcatgcacctgtttgggtgcaaattcgcaagtgaaagggatggagataccctgcctgaccgtaaaaactttgatagtctcctctgggctatcgtgaccgttttccagattcttacccaggaagattggaacaaggtcctgtataacggaatggcaagtacttcttcatgggccgctctgtacttcatagctctcatgacctttgggaattatgtgttgtttaacctgctcgtcgccatcctggtggaaggatttcaggcagaggagatcagcaagcgtgaggatgcctcaggccaattgtcctgtatccagctgcctgtggactcacaggggggtgatgctaataaaagcgaaagcgagccagattttttctcaccctctctcgacggagacggcgacagaaaaaagtgcctggccctggtatctctgggggaacaccctgagctccggaagagccttctgcctcccttgataatacacaccgccgccacaccgatgtcattgcctaaaagcacaagtaccgggttgggtgaggcactcggtcccgcgagcagacgaacaagctctagcgggtccgccgagcccggcgccgcccatgaaatgaagtccccgccatctgccagaagttccccccattccccctggagcgcagcgtctagttggactagccgccggagctcccgaaacagtcttggccgcgcaccatcattgaagcgcaggtcaccctcaggagaacgacggagccttctgagtggggagggacaggagagccaggacgaggaagagagcagtgaggaagagagagctagccccgctggaagcgatcatcgccaccgcggcagtttagagcgtgaagccaaaagctcttttgacctgcctgatactctgcaagtacccggattacacagaacggcttcaggcagggggtccgccagcgagcatcaggactgcaatggaaaatccgcgtccggaagattggctagggctttaagacccgacgaccccccactcgatggggatgacgctgatgatgaaggaaatctgtctaaaggtgaacgggtgagagcctggatccgtgcccggctgcctgcttgttgcctggaacgggacagctggagcgcctacatattccctcctcagtcgcgattcaggttgctgtgccatagaatcattacgcataagatgtttgatcatgtggtgctcgttatcatcttcctgaactgcattacaattgctatggaacgaccaaagatagaccctcacagcgctgaacgcattttcttgaccctctctaattatatatttactgccgtcttcctggcagagatgactgtcaaggtagtggctctagggtggtgtttcggggagcaggcctaccttcgctcctcttggaacgtcctggatgggctcctggtgcttatcagtgtgattgatattctggtgagtatggtgagtgattccggaacaaagattctaggaatgcttcgagttctgagactgctgcggaccctgaggcccctacgtgtgatatcacgggcccagggccttaagctggtcgtggagacactcatgagctcactcaagcccatagggaacattgtcgttatctgctgcgcgttcttcattattttcggaatactgggcgtgcagttgtttaagggcaagttttttgtgtgtcagggggaggatactaggaacatcaccaacaaatccgactgtgccgaagcctcttacagatgggttagacataaatacaatttcgacaatctcggtcaggctctcatgagtctgttcgtcttggccagtaaagacggctgggtggatatcatgtatgacggactagacgctgtcggcgttgatcaacagccaataatgaaccataatccttggatgctactatattttatttccttcttgctgatcgtagccttcttcgtcctcaacatgttcgtgggagtggtcgtggagaactttcataaatgtagacagcatcaggaggaagaggaggcgagaagacgtgaagagaaacggttgagacgtctggagaaaaagcgacgcaaggcacagtgcaagccatactatagcgattacagtagattcagactgctggtgcatcacttgtgtacaagccactacctggatctgtttatcactggggtgatcggcctgaatgtggttacaatggctatggagcactaccagcagccccaaattcttgacgaggccctgaagatttgtaactacatcttcaccgtaatattcgtcttggagagcgtatttaaattggtggctttcggtttcaggcgcttttttcaggatcgatggaatcagctggacctggcaattgtcctcctgtccattatgggaattacactagaggagattgaggtgaacgcctcactgccaatcaatccgacaataatccgcatcatgagagtgctgcgaatcgcccgtgttctcaaattgctgaaaatggctgtgggtatgagggctctcctggataccgttatgcaggctcttcctcaggtgggcaatctgggccttctctttatgttgcttttttttatttttgccgccctgggagtcgaactgtttggagacctggaatgtgacgagacacatccctgcgaagggctgggcagacacgctacctttcggaactttggtatggccttcctcaccctgtttcgggtcagtactggcgacaactggaatgggatcatgaaggataccttacgagattgtgatcaggagtctacttgttataacacagtcatttctcccatctattttgtgagcttcgtgttaacagcgcagttcgtcctcgtaaatgtggtaattgctgtattgatgaagcatctggaggagtcgaacaaggaggctaaggaggaagcggagctcgaggctgagctggaactggagatgaaaaccttgtcgcctcaaccccattcccccttaggaagccccttcctgtggcccggagttgaagggcccgatagcccagattccccaaaacccggagccctgcatcccgccgcccatgcaaggtcagccagtcacttttctctggagcaccctacgatgcagccgcatcccacagagctcccagggcccgatctgctcactgtccggaaatccggtgtaagcagaacccactcactgcccaacgattcatacatgtgtcgtcatggcagtaccgcggaaggcccattgggacatagggggtgggggctgcctaaagctcaatccggcagcgtgcttagcgtacattcccagcccgcggacacttcttatatcctacagctccctaaagacgctccgcatcttcttcagccccatagcgcccctacatggggcacaattcctaagcttccgccgcctgggagatcacctctggcccagcgtcctctccgccgacaggccgcgatacgcacagacagtctcgacgtgcagggactggggtcaagggaagaccttcttgccgaggtgtcggggccgtctccccctctcgccagagcctacagcttctggggacagagttccacacaggcacagcagcactcgcgttcccactctaaaatcagcaaacatatgaccccgcccgcaccttgtccagggccagaacctaattgggggaagggaccgccggagacacggagcagcctcgagttggatacagagctgtcttggatctcgggggacctcctgccacctggcggccaggaagagcctccatccccgcgtgatctcaagaaatgttatagtgtggaggcgcagtcttgtcaaagacgtccaacatcctggctggatgaacaacgtagacattctatcgccgtttcctgcctggactccggctcgcagccccacctgggcaccgaccccagcaacctgggaggccagcctttgggcggacccgggagcagacccaagaagaagctgtcaccccccagcatcacaatcgatccccctgagtcccaaggaccaagaactcctccgtccccgggcatatgcctccgccgccgagcaccgtcgtcagacagcaaggaccctctcgcaagtggccctcccgattcaatggccgctagcccgtccccaaagaaggacgtgctctccctgtctggcttgagttccgaccccgccgacctcgatccatag

SEQ ID NO: 259760 - DNA, 6800 bp, Artificial Sequence
  derived and/or modified sequence
atggacgaagaggaggacggagctggcgctgaggagagtggccagcccagatcctttatgagactgaacgacctttccggtgctgggggtcgccctgggcctgggtccgcagaaaaggatcctgggtctgctgattctgaagctgagggcctcccttatccggctctggccccagtggtctttttctacttgtctcaggattctcgtccccgaagttggtgtctgaggactgtctgtaatccatggtttgagcggatctcaatgctagttatccttctgaactgtgttacactggggatgtttagaccatgcgaagatatcgcctgtgatagtcagaggtgtaggatcctccaggcatttgacgatttcatcttcgctttcttcgctgtggaaatggtggtgaagatggtagccctaggtatttttggaaaaaagtgctatctcggcgatacatggaaccgactcgatttctttatcgtgattgctggcatgttggaatactcccttgatcttcagaacgtctctttctccgcagtgcggactgtgcgagtgctcaggcctttgagagctattaacagagtgccttcaatgaggattctcgtcacccttttactggacacgttgcccatgttgggcaatgtgctgctgctctgtttcttcgtgtttttcatttttgggattgtaggcgtgcagctgtgggctggcctactgaggaatagatgttttcttcctgagaacttctccctgccgctgagtgtcgatctcgagcgttattaccaaacagaaaacgaggacgagagcccattcatctgctctcagccccgagagaacggcatgcggagttgtcgatcagttccaacattgagaggagacgggggtggaggacctccttgcggactagactatgaggcctataactcgtctagcaacaccacgtgtgtaaactggaatcagtattatacaaattgctcagccggagagcataatccatttaaaggagcaatcaacttcgataatatcggatatgcatggattgccatcttccaggtgattacactggagggctgggtggatatcatgtatttcgtgatggatgctcacagtttctataatttcatttatttcatactgctaattatagtgggatcattctttatgattaacctgtgccttgtggttattgctacgcagttctccgagaccaaacaaagggaaagccagctgatgcgcgaacaacgcgtgcgattcctgagtaacgccagtaccctggcatcttttagcgaacccggtagttgttacgaagaactgctcaaatacctcgtgtatatcctccggaaggccgcaaggcgactggcccaggtatcaagagcagccggtgttcgggtgggtctactgagctcccctgcccctctgggagggcaggaaactcagccaagcagctcttgttcgagaagccatcgaaggctgagcgtgcatcacctcgtgcaccatcaccaccaccatcatcaccactatcacctgggaaacgggactctgagagctccaagagcatccccagagatccaagacagggacgccaacggaagcaggaggttaatgttacctcctcctagcacccccgctctttctggcgcaccaccgggaggcgctgaatccgtgcacagtttttaccacgccgactgtcacctcgaacctgtacgctgccaggctccccctccaaggtcaccctccgaggcatcagggcgaaccgttgggtcggggaaagtgtacccaacggtgcacacctcaccacccccagagacactgaaagaaaaagcgcttgtggaggtggccgctagtagcgggcctcccacactcacctctcttaatatcccacccggtccctactcaagtatgcacaagctgctggaaactcaatcaactggtgcatgtcagtcaagctgtaagatatcttccccttgcttaaaagccgacagcggagcttgcgggccagactcctgcccttactgtgctcgggctggcgctggtgaggttgagctcgccgatagagagatgcccgattctgattcagaagccgtgtatgagtttacacaggacgctcaacattccgacctgcgtgacccccactcaaggagacagaggagtctgggcccagatgccgaacccagctccgtgctggctttctggcgcctcatttgtgatactttccggaagattgtggatagcaaatacttcgggagaggcatcatgatcgctatactggtcaacacgctgtcaatgggaattgaatatcacgagcagcccgaagagctcacaaacgccctggagataagcaacattgtcttcacaagtttatttgctctggaaatgttgctgaagcttctggtctacggcccttttggctatattaagaacccttataacatatttgatggagtgattgtggtcatttccgtgtgggaaatcgtgggccagcagggaggcggactgtcagtgctccggactttccgattgatgcgggtgctcaagctggtgcgtttcctgcctgctctgcaacgacagctggtggttttaatgaagactatggacaacgtggctactttctgcatgcttttaatgctgtttatttttatcttttcaatcttaggaatgcatctctttggatgtaagttcgccagcgagcgggatggtgacacgctgcctgataggaaaaactttgacagcttgctatgggcaatcgtgactgtgttccaaattttaacgcaagaggactggaacaaagttttatataatggtatggcctctacctcaagctgggcagcactctatttcatcgcccttatgactttcggtaactacgtgctattcaatctcctggtagcgatcctggtcgagggctttcaggccgaggagattagtaaacgagaggatgcttctggtcaactgagctgcatccagcttcccgtagacagccaaggaggggacgcaaacaagtccgagagcgagcctgattttttctcccccagcctggatggggatggggaccgtaaaaagtgtctggccctggtttcactcggggaacatcctgagctaaggaaatcactgctcccaccactaatcatacacaccgccgctaccccaatgtcattgccaaagagcacatcgacaggtctgggcgaagctctcggacctgccagccggaggacgtcttcgtcagggagtgcagaacctggagccgcacatgagatgaagtcaccaccttctgccaggtcctctcctcattctccatggtcagcagcgtcttcgtggacttcccggcgtagcagtcgaaacagtctgggcagagctccttcccttaagcggcgatccccatccggcgaacgacgctccttgctgagtggggaagggcaagagagccaggatgaagaagaaagctctgaggaagaaagggcttctccagccggatcagatcaccgacacagaggtagcctagaaagggaagcaaaatcttctttcgacctcccagacaccctccaggtgcccggacttcaccgtaccgccagtggccgaggtagcgcctcagagcatcaggactgcaatggaaagagcgcctcaggccgtcttgcccgagcgctccgcccagacgatccgccactggacggagacgatgctgatgacgagggaaatttgtctaagggcgagcgagtgagagcctggatacgcgcaagactgccagcatgttgtctcgaacgggatagttggtccgcctacatctttccccctcagagtcgatttagactactgtgtcatcgcataatcacccacaaaatgtttgaccacgtggttctggtgatcattttcctgaactgcattactattgcaatggagcgcccaaagatcgatccacactcagctgagcgcatcttcctcactttgtcaaactatattttcacggcagtttttctggctgagatgacagtgaaagtggtggccctgggctggtgctttggtgaacaagcatacctccggtctagctggaatgtgctggacgggctactcgtcctcatctccgttattgacatcttggtgagtatggtttccgatagcggaactaaaatacttgggatgctacgtgtcctccggcttctgcgaacacttagacctctccgcgtgatcagccgcgctcagggcctgaagctcgtagtggagacgctgatgtcgtcactaaaacccatcgggaatatcgtggtgatttgttgcgccttctttatcatctttggtatcttgggagtgcagctctttaagggaaaatttttcgtctgtcagggagaggacacacgtaatatcaccaacaaaagcgattgcgctgaagcgagttatcgctgggtgaggcataagtacaattttgacaacctggggcaggccttaatgtctctgttcgtgctcgcttccaaagatgggtgggttgatataatgtacgacgggctagacgccgttggcgttgatcagcagcccatcatgaaccacaatccctggatgctgctctacttcatatcctttttattaattgtggcttttttcgttttaaacatgttcgtcggggtggtggtggagaactttcacaagtgccgccagcatcaagaggaggaagaagcaaggcgcagggaggaaaagcggctgcgccgtctggagaagaagaggagaaaggcacaatgtaaaccttattatagcgattacagcagattcaggctgctcgttcaccacctatgcacttctcattacttggacctcttcattactggggtaatcgggctgaacgtagtgaccatggcgatggaacactaccagcagcctcagatcctggatgaagcactgaagatctgcaactatatattcactgtgatattcgtgctggagagcgtcttcaaactggtcgcctttggcttcagacgcttttttcaagatcgttggaaccagttagacctggctatagttctgctatctattatgggcattactctggaggaaatagaagtgaacgctagcctccctataaatcccactatcatacggatcatgcgggtacttcgaatcgctagggtgttaaagttgctcaaaatggccgtcggcatgagagctttgcttgacaccgtgatgcaggcactaccccaggtgggcaacctgggtctcctgtttatgttgctgttcttcattttcgccgctctcggggtggaactgttcggagatctggagtgtgatgaaacacacccttgcgagggtctcggcaggcatgctaccttccgtaattttgggatggccttcttaacactatttagggtctctactggagataattggaatggcatcatgaaagatacactgcgtgactgcgaccaggaatcgacttgctataacacggtcatctcaccaatctattttgtgagttttgtcttaacagctcaattcgtgctcgtgaatgtggttattgcagtccttatgaagcacctggaggagtccaataaggaggctaaggaggaagcggagctggaagctgaattggaactggaaatgaagaccctctcaccgcagcctcatagccctctgggatccccctttctttggccgggtgtggaaggacctgacagcccagattcccctaagccaggagccctgcaccccgcagcccatgccaggtcggcaagtcacttttccctggaacatcctaccatgcaaccccaccccaccgagctgcccggaccggacctgctaactgtaaggaaaagcggtgttagtaggacgcactccctgccgaacgattcatacatgtgtcgccatggcagtactgcggagggaccattaggacatagggggtggggcttgccgaaggctcagagcggatccgtattatctgttcactctcagccagcggataccagttacatcttgcaactgccaaaggatgcccctcatctgctgcaaccccattcggcgccaacgtggggaactattccgaagctaccccctccaggtcggagtccactggcgcagcgcccactgcggagacaggcagctataaggactgacagcctggacgttcagggactggggtcccgtgaagaccttttagccgaggtgtccggaccatctcccccactggcacgtgcctattcattttggggccagtctagcacacaggcacagcagcattctaggagccactcgaaaatcagtaagcacatgacaccacccgctccttgtcccggtcccgagcctaactggggcaaggggccacctgagactagaagcagcctggagctggatacagagttgagttggatatccggagacctgttgcctcctggcggacaggaagagcccccatcccccagagaccttaaaaagtgctattcagtggaggcccagtcttgtcagaggcgcccaacttcatggctcgacgagcaacggagacacagtattgccgtttcctgccttgactccggatcgcagccccatcttgggacagatcctagcaacctcggtggacagccactgggcggaccaggctcacgaccaaagaaaaagctctcaccgccatcaattaccatcgaccccccagagtcccaggggcctcggacccctccatccccgggaatatgtctgcggagacgcgcaccctcgagcgacagcaaggacccgctcgccagcggccctcccgacagcatggctgcctctcctagtcccaaaaaagacgtcctcagcttgagcggcctgagctcagatccagccgatcttgacccata

SEQ ID NO: 259761 - DNA, 7120 bp, Artificial Sequence
  derived and/or modified sequence
atggacgaggaggaggatggagcgggcgccgaggagtcgggacagccccggagcttcatgcggctcaacgacctgtcgggggccgggggccggccggggccggggtcagcagaaaaggacccgggcagcgcggactccgaggcggaggggctgccgtacccggcgctggccccggtggttttcttctacttgagccaggacagccgcccgcggagctggtgtctccgcacggtctgtaacccctggtttgagcgcatcagcatgttggtcatccttctcaactgcgtgaccctgggcatgttccggccatgcgaggacatcgcctgtgactcccagcgctgccggatcctgcaggcctttgatgacttcatctttgccttctttgccgtggagatggtggtgaagatggtggccttgggcatctttgggaaaaagtgttacctgggagacacttggaaccggcttgactttttcatcgtcatcgcagggatgctggagtactcgctggacctgcagaacgtcagcttctcagctgtcaggacagtccgtgtgctgcgaccgctcagggccattaaccgggtgcccagcatgcgcatccttgtcacgttgctgctggatacgctgcccatgctgggcaacgtcctgctgctctgcttcttcgtcttcttcatcttcggcatcgtcggcgtccagctgtgggcagggctgcttcggaaccgatgcttcctacctgagaatttcagcctccccctgagcgtggacctggagcgctattaccagacagagaacgaggatgagagccccttcatctgctcccagccacgcgagaacggcatgcggtcctgcagaagcgtgcccacgctgcgcggggacgggggcggtggcccaccttgcggtctggactatgaggcctacaacagctccagcaacaccacctgtgtcaactggaaccagtactacaccaactgctcagcgggggagcacaaccccttcaagggcgccatcaactttgacaacattggctatgcctggatcgccatcttccaggtcatcacgctggagggctgggtcgacatcatgtactttgtgatggatgctcattccttctacaatttcatctacttcatcctcctcatcatcgtgggctccttcttcatgatcaacctgtgcctggtggtgattgccacgcagttctcagagaccaagcagcgggaaagccagctgatgcgggagcagcgtgtgcggttcctgtccaacgccagcaccctggctagcttctctgagcccggcagctgctatgaggagctgctcaagtacctggtgtacatccttcgtaaggcagcccgcaggctggctcaggtctctcgggcagcaggtgtgcgggttgggctgctcagcagcccagcacccctcgggggccaggagacccagcccagcagcagctgctctcgctcccaccgccgcctatccgtccaccacctggtgcaccaccaccaccaccatcaccaccactaccacctgggcaatgggacgctcagggccccccgggccagcccggagatccaggacagggatgccaatgggtcccgccggctcatgctgccaccaccctcgacgcctgccctctccggggccccccctggtggcgcagagtctgtgcacagcttctaccatgccgactgccacttagagccagtccgctgccaggcgccccctcccaggtccccatctgaggcatccggcaggactgtgggcagcgggaaggtgtatcccaccgtgcacaccagccctccaccggagacgctgaaggagaaggcactagtagaggtggctgccagctctgggcccccaaccctcaccagcctcaacatcccacccgggccctacagctccatgcacaagctgctggagacacagagtacaggtgcctgccaaagctcttgcaagatctccagcccttgcttgaaagcagacagtggagcctgtggtccagacagctgcccctactgtgcccgggccggggcaggggaggtggagctcgccgaccgtgaaatgcctgactcagacagcgaggcagtttatgagttcacacaggatgcccagcacagcgacctccgggacccccacagccggcggcaacggagcctgggcccagatgcagagcccagctctgtgctggccttctggaggctaatctgtgacaccttccgaaagattgtggacagcaagtactttggccggggaatcatgatcgccatcctggtcaacacactcagcatgggcatcgaataccacgagcagcccgaggagcttaccaacgccctagaaatcagcaacatcgtcttcaccagcctctttgccctggagatgctgctgaagctgcttgtgtatggtccctttggctacatcaagaatccctacaacatcttcgatggtgtcattgtggtcatcagcgtgtgggagatcgtgggccagcaggggggcggcctgtcggtgctgcggaccttccgcctgatgcgtgtgctgaagctggtgcgcttcctgccggcgctgcagcggcagctggtggtgctcatgaagaccatggacaacgtggccaccttctgcatgctgcttatgctcttcatcttcatcttcagcatcctgggcatgcatctcttcggctgcaagtttgcctctgagcgggatggggacaccctgccagaccggaagaattttgactccttgctctgggccatcgtcactgtctttcagatcctgacccaggaggactggaacaaagtcctctacaatggtatggcctccacgtcgtcctgggcggccctttatttcattgccctcatgaccttcggcaactacgtgctcttcaatttgctggtcgccattctggtggagggcttccaggcggaggaaatcagcaaacgggaagatgcgagtggacagttaagctgtattcagctgcctgtcgactcccaggggggagatgccaacaagtccgaatcagagcccgatttcttctcacccagcctggatggtgatggggacaggaagaagtgcttggccttggtgtccctgggagagcacccggagctgcggaagagcctgctgccgcctctcatcatccacacggccgccacacccatgtcgctgcccaagagcaccagcacgggcctgggcgaggcgctgggccctgcgtcgcgccgcaccagcagcagcgggtcggcagagcctggggcggcccacgagatgaagtcaccgcccagcgcccgcagctctccgcacagcccctggagcgctgcaagcagctggaccagcaggcgctccagccggaacagcctcggccgtgcacccagcctgaagcggagaagcccaagtggagagcggcggtccctgttgtcgggagaaggccaggagagccaggatgaagaggagagctcagaagaggagcgggccagccctgcgggcagtgaccatcgccacagggggtccctggagcgggaggccaagagttcctttgacctgccagacacactgcaggtgccagggctgcatcgcactgccagtggccgagggtctgcttctgagcaccaggactgcaatggcaagtcggcttcagggcgcctggcccgggccctgcggcctgatgaccccccactggatggggatgacgccgatgacgagggcaacctgagcaaaggggaacgggtccgcgcgtggatccgagcccgactccctgcctgctgcctcgagcgagactcctggtcagcctacatcttccctcctcagtccaggttccgcctcctgtgtcaccggatcatcacccacaagatgttcgaccacgtggtccttgtcatcatcttccttaactgcatcaccatcgccatggagcgccccaaaattgacccccacagcgctgaacgcatcttcctgaccctctccaattacatcttcaccgcagtctttctggctgaaatgacagtgaaggtggtggcactgggctggtgcttcggggagcaggcgtacctgcggagcagttggaacgtgctggacgggctgttggtgctcatctccgtcatcgacattctggtgtccatggtctctgacagcggcaccaagatcctgggcatgctgagggtgctgcggctgctgcggaccctgcgcccgctcagggtgatcagccgggcgcaggggctgaagctggtggtggagacgctgatgtcctcactgaaacccatcggcaacattgtagtcatctgctgtgccttcttcatcattttcggcatcttgggggtgcagctcttcaaagggaagtttttcgtgtgccagggcgaggataccaggaacatcaccaataaatcggactgtgccgaggccagttaccggtgggtccggcacaagtacaactttgacaaccttggccaggccctgatgtccctgttcgttttggcctccaaggatggttgggtggacatcatgtacgatgggctggatgctgtgggcgtggaccagcagcccatcatgaaccacaacccctggatgctgctgtacttcatctcgttcctgctcattgtggccttctttgtcctgaacatgtttgtgggtgtggtggtggagaacttccacaagtgtcggcagcaccaggaggaagaggaggcccggcggcgggaggagaagcgcctacgaagactggagaaaaagagaaggaaagcccagtgcaaaccttactactccgactactcccgcttccggctcctcgtccaccacttgtgcaccagccactacctggacctcttcatcacaggtgtcatcgggctgaacgtggtcaccatggccatggagcactaccagcagccccagattctggatgaggctctgaagatctgcaactacatcttcactgtcatctttgtcttggagtcagttttcaaacttgtggcctttggtttccgtcggttcttccaggacaggtggaaccagctggacctggccattgtgctgctgtccatcatgggcatcacgctggaggaaatcgaggtcaacgcctcgctgcccatcaaccccaccatcatccgcatcatgagggtgctgcgcattgcccgagtgctgaagctgctgaagatggctgtgggcatgcgggcgctgctggacacggtgatgcaggccctgccccaggtggggaacctgggacttctcttcatgttgttgtttttcatctttgcagctctgggcgtggagctctttggagacctggagtgtgacgagacacacccctgtgagggcctgggccgtcatgccacctttcggaactttggcatggccttcctaaccctcttccgagtctccacaggtgacaattggaatggcattatgaaggacaccctccgggactgtgaccaggagtccacctgctacaacacggtcatctcgcctatctactttgtgtccttcgtgctgacggcccagttcgtgctagtcaacgtggtgatcgccgtgctgatgaagcacctggaggagagcaacaaggaggccaaggaggaggccgagctagaggctgagctggagctggagatgaagaccctcagcccccagccccactcgccactgggcagccccttcctctggcctggggtcgagggccccgacagccccgacagccccaagcctggggctctgcacccagcggcccacgcgagatcagcctcccacttttccctggagcaccccacgatgcagccccaccccacggagctgccaggaccagacttactgactgtgcggaagtctggggtcagccgaacgcactctctgcccaatgacagctacatgtgtcggcatgggagcactgccgaggggcccctgggacacaggggctgggggctccccaaagctcagtcaggctccgtcttgtccgttcactcccagccagcagataccagctacatcctgcagcttcccaaagatgcacctcatctgctccagccccacagcgccccaacctggggcaccatccccaaactgcccccaccaggacgctcccctttggctcagaggccactcaggcgccaggcagcaataaggactgactccttggacgttcagggtctgggcagccgggaagacctgctggcagaggtgagtgggccctccccgcccctggcccgggcctactctttctggggccagtcaagtacccaggcacagcagcactcccgcagccacagcaagatctccaagcacatgaccccgccagccccttgcccaggcccagaacccaactggggcaagggccctccagagaccagaagcagcttagagttggacacggagctgagctggatttcaggagacctcctgccccctggcggccaggaggagcccccatccccacgggacctgaagaagtgctacagcgtggaggcccagagctgccagcgccggcctacgtcctggctggatgagcagaggagacactctatcgccgtcagctgcctggacagcggctcccaaccccacctgggcacagacccctctaaccttgggggccagcctcttggggggcctgggagccggcccaagaaaaaactcagcccgcctagtatcaccatagacccccccgagagccaaggtcctcggaccccgcccagccctggtatctgcctccggaggagggctccgtccagcgactccaaggatcccttggcctctggcccccctgacagcatggctgcctcgccctccccaaagaaagatgtgctgagtctctccggtttatcctctgacccagcagacctggacccctgagtcctgccccactttcccactcacctttctccactgggtgccaagtcctagctcctcctcctgggctatattcctgacaaaagttccatatagacaccaaggaggcggaggcgctcctccctgcctcagtggctctgggtacctgcaagcagaacttccaaagagagttaaaagcagcagccccggcaactctggctccaggcagaaggagaggcccggtgcagctgaggttcccgacaccagaagctgttgggagaaagcaatacgtttgtgcagaatctctatgtatattctattttattaaattaattgaatctag

SEQ ID NO: 259762 - protein, 2250 aa, Artificial Sequence
  derived and/or modified sequence
MDEEEDGAGAEESGQPRSFMRLNDLSGAGGRPGPGSAEKDPGSADSEAEGLPYPALAPVVFFYLSQDSRPRSWCLRTVCNPWFERISMLVILLNCVTLGMFRPCEDIACDSQRCRILQAFDDFIFAFFAVEMVVKMVALGIFGKKCYLGDTWNRLDFFIVIAGMLEYSLDLQNVSFSAVRTVRVLRPLRAINRVPSMRILVTLLLDTLPMLGNVLLLCFFVFFIFGIVGVQLWAGLLRNRCFLPENFSLPLSVDLERYYQTENEDESPFICSQPRENGMRSCRSVPTLRGDGGGGPPCGLDYEAYNSSSNTTCVNWNQYYTNCSAGEHNPFKGAINFDNIGYAWIAIFQVITLEGWVDIMYFVMDAHSFYNFIYFILLIIVGSFFMINLCLVVIATQFSETKQRESQLMREQRVRFLSNASTLASFSEPGSCYEELLKYLVYILRKAARRLAQVSRAAGVRVGLLSSPAPLGGQETQPSSSCSRSHRRLSVHHLVHHHHHHHHHYHLGNGTLRAPRASPEIQDRDANGSRRLMLPPPSTPALSGAPPGGAESVHSFYHADCHLEPVRCQAPPPRSPSEASGRTVGSGKVYPTVHTSPPPETLKEKALVEVAASSGPPTLTSLNIPPGPYSSMHKLLETQSTGACQSSCKISSPCLKADSGACGPDSCPYCARAGAGEVELADREMPDSDSEAVYEFTQDAQHSDLRDPHSRRQRSLGPDAEPSSVLAFWRLICDTFRKIVDSKYFGRGIMIAILVNTLSMGIEYHEQPEELTNALEISNIVFTSLFALEMLLKLLVYGPFGYIKNPYNIFDGVIVVISVWEIVGQQGGGLSVLRTFRLMRVLKLVRFLPALQRQLVVLMKTMDNVATFCMLLMLFIFIFSILGMHLFGCKFASERDGDTLPDRKNFDSLLWAIVTVFQILTQEDWNKVLYNGMASTSSWAALYFIALMTFGNYVLFNLLVAILVEGFQAEGDANKSESEPDFFSPSLDGDGDRKKCLALVSLGEHPELRKSLLPPLIIHTAATPMSLPKSTSTGLGEALGPASRRTSSSGSAEPGAAHEMKSPPSARSSPHSPWSAASSWTSRRSSRNSLGRAPSLKRRSPSGERRSLLSGEGQESQDEEESSEEERASPAGSDHRHRGSLEREAKSSFDLPDTLQVPGLHRTASGRGSASEHQDCNGKSASGRLARALRPDDPPLDGDDADDEGNLSKGERVRAWIRARLPACCLERDSWSAYIFPPQSRFRLLCHRIITHKMFDHVVLVIIFLNCITIAMERPKIDPHSAERIFLTLSNYIFTAVFLAEMTVKVVALGWCFGEQAYLRSSWNVLDGLLVLISVIDILVSMVSDSGTKILGMLRVLRLLRTLRPLRVISRAQGLKLVVETLMSSLKPIGNIVVICCAFFIIFGILGVQLFKGKFFVCQGEDTRNITNKSDCAEASYRWVRHKYNFDNLGQALMSLFVLASKDGWVDIMYDGLDAVGVDQQPIMNHNPWMLLYFISFLLIVAFFVLNMFVGVVVENFHKCRQHQEEEEARRREEKRLRRLEKKRRSKEKQMAEAQCKPYYSDYSRFRLLVHHLCTSHYLDLFITGVIGLNVVTMAMEHYQQPQILDEALKICNYIFTVIFVLESVFKLVAFGFRRFFQDRWNQLDLAIVLLSIMGITLEEIEVNASLPINPTIIRIMRVLRIARVLKLLKMAVGMRALLDTVMQALPQVGNLGLLFMLLFFIFAALGVELFGDLECDETHPCEGLGRHATFRNFGMAFLTLFRVSTGDNWNGIMKDTLRDCDQESTCYNTVISPIYFVSFVLTAQFVLVNVVIAVLMKHLEESNKEAKEEAELEAELELEMKTLSPQPHSPLGSPFLWPGVEGPDSPDSPKPGALHPAAHARSASHFSLEHPTMQPHPTELPGPDLLTVRKSGVSRTHSLPNDSYMCRHGSTAEGPLGHRGWGLPKAQSGSVLSVHSQPADTSYILQLPKDAPHLLQPHSAPTWGTIPKLPPPGRSPLAQRPLRRQAAIRTDSLDVQGLGSREDLLAEVSGPSPPLARAYSFWGQSSTQAQQHSRSHSKISKHMTPPAPCPGPEPNWGKGPPETRSSLELDTELSWISGDLLPPGGQEEPPSPRDLKKCYSVEAQSCQRRPTSWLDEQRRHSIAVSCLDSGSQPHLGTDPSNLGGQPLGGPGSRPKKKLSPPSITIDPPESQGPRTPPSPGICLRRRAPSSDSKDPLASGPPDSMAASPSPKKDVLSLSGLSSDPADLDP

SEQ ID NO: 259763 - protein, 1735 aa, Artificial Sequence
  derived and/or modified sequence
MDEEEDGAGAEESGQPRSFMRLNDLSGAGGRPGPGSAEKDPGSADSEAEGLPYPALAPVVFFYLSQDSRPRSWCLRTVCNPWFERISMLVILLNCVTLGMFRPCEDIACDSQRCRILQAFDDFIFAFFAVEMVVKMVALGIFGKKCYLGDTWNRLDFFIVIAGMLEYSLDLQNVSFSAVRTVRVLRPLRAINRVPSMRILVTLLLDTLPMLGNVLLLCFFVFFIFGIVGVQLWAGLLRNRCFLPENFSLPLSVDLERYYQTENEDESPFICSQPRENGMRSCRSVPTLRGDGGGGPPCGLDYEAYNSSSNTTCVNWNQYYTNCSAGEHNPFKGAINFDNIGYAWIAIFQVITLEGWVDIMYFVMDAHSFYNFIYFILLIIVGSFFMINLCLVVIATQFSETKQRESQLMREQRVRFLSNASTLASFSEPGSCYEELLKYLVYILRKAARRLAQVSRAAGVRVGLLSSPAPLGGQETQPSSSCSRSHRRLSVHHLVHHHHHHHHHYHLGNGTLRAPRASPEIQDRDANGSRRLMLPPPSTPALSGAPPGGAESVHSFYHADCHLEPVRCQAPPPRSPSEASGRTVGSGKVYPTVHTSPPPETLKEKALVEVAASSGPPTLTSLNIPPGPYSSMHKLLETQSTGACQSSCKISSPCLKADSGACGPDSCPYCARAGAGEVELADREMPDSDSEAVYEFTQDAQHSDLRDPHSRRQRSLGPDAEPSSVLAFWRLICDTFRKIVDSKYFGRGIMIAILVNTLSMGIEYHEQPEELTNALEISNIVFTSLFALEMLLKLLVYGPFGYIKNPYNIFDGVIVVISVWEIVGQQGGGLSVLRTFRLMRVLKLVRFLPALQRQLVVLMKTMDNVATFCMLLMLFIFIFSILGMHLFGCKFASERDGDTLPDRKNFDSLLWAIVTVFQILTQEDWNKVLYNGMASTSSWAALYFIALMTFGNYVLFNLLVAILVEGFQAEGDANKSESEPDFFSPSLDGDGDRKKCLALVSLGEHPELRKSLLPPLIIHTAATPMSLPKSTSTGLGEALGPASRRTSSSGSAEPGAAHEMKSPPSARSSPHSPWSAASSWTSRRSSRNSLGRAPSLKRRSPSGERRSLLSGEGQESQDEEESSEEERASPAGSDHRHRGSLEREAKSSFDLPDTLQVPGLHRTASGRGSASEHQDCNGKSASGRLARALRPDDPPLDGDDADDEGNLSKGERVRAWIRARLPACCLERDSWSAYIFPPQSRFRLLCHRIITHKMFDHVVLVIIFLNCITIAMERPKIDPHSAERIFLTLSNYIFTAVFLAEMTVKVVALGWCFGEQAYLRSSWNVLDGLLVLISVIDILVSMVSDSGTKILGMLRVLRLLRTLRPLRVISRAQGLKLVVETLMSSLKPIGNIVVICCAFFIIFGILGVQLFKGKFFVCQGEDTRNITNKSDCAEASYRWVRHKYNFDNLGQALMSLFVLASKDGWVDIMYDGLDAVGVDQQPIMNHNPWMLLYFISFLLIVAFFVLNMFVGVVVENFHKCRQHQEEEEARRREEKRLRRLEKKRRKAQCKPYYSDYSRFRLLVHHLCTSHYLDLFITGVIGLNVVTMAMEHYQQPQILDEALKICNYIFTVIFVLESVFKLVAFGFRRFFQDRWNQLDLAIVLLSIMGITLEEIEVNASLPINPTIIRIMRVLRIARVLKLLKMAVGMRALLDTVMQALPQLWAWSSLETWSVTRHTPVRAWAVMPPFGTLAWPS

SEQ ID NO: 259764 - DNA, 6753 bp, Artificial Sequence
  derived and/or modified sequence
atggacgaggaggaggacggcgccggcgccgaggagagcggccagcccagaagcttcatgagactgaacgacctgagcggcgccggcggcagacccggccccggcagcgccgagaaggaccccggcagcgccgacagcgaggccgagggcctgccctaccccgccctggcccccgtggtgttcttctacctgagccaggacagcagacccagaagctggtgcctgagaaccgtgtgcaacccctggttcgagagaatcagcatgctggtgatcctgctgaactgcgtgaccctgggcatgttcagaccctgcgaggacatcgcctgcgacagccagagatgcagaatcctgcaggccttcgacgacttcatcttcgccttcttcgccgtggagatggtggtgaagatggtggccctgggcatcttcggcaagaagtgctacctgggcgacacctggaacagactggacttcttcatcgtgatcgccggcatgctggagtacagcctggacctgcagaacgtgagcttcagcgccgtgagaaccgtgagagtgctgagacccctgagagccatcaacagagtgcccagcatgagaatcctggtgaccctgctgctggacaccctgcccatgctgggcaacgtgctgctgctgtgcttcttcgtgttcttcatcttcggcatcgtgggcgtgcagctgtgggccggcctgctgagaaacagatgcttcctgcccgagaacttcagcctgcccctgagcgtggacctggagagatactaccagaccgagaacgaggacgagagccccttcatctgcagccagcccagagagaacggcatgagaagctgcagaagcgtgcccaccctgagaggcgacggcggcggcggccccccctgcggcctggactacgaggcctacaacagcagcagcaacaccacctgcgtgaactggaaccagtactacaccaactgcagcgccggcgagcacaaccccttcaagggcgccatcaacttcgacaacatcggctacgcctggatcgccatcttccaggtgatcaccctggagggctgggtggacatcatgtacttcgtgatggacgcccacagcttctacaacttcatctacttcatcctgctgatcatcgtgggcagcttcttcatgatcaacctgtgcctggtggtgatcgccacccagttcagcgagaccaagcagagagagagccagctgatgagagagcagagagtgagattcctgagcaacgccagcaccctggccagcttcagcgagcccggcagctgctacgaggagctgctgaagtacctggtgtacatcctgagaaaggccgccagaagactggcccaggtgagcagagccgccggcgtgagagtgggcctgctgagcagccccgcccccctgggcggccaggagacccagcccagcagcagctgcagcagaagccacagaagactgagcgtgcaccacctggtgcaccaccaccaccaccaccaccaccactaccacctgggcaacggcaccctgagagcccccagagccagccccgagatccaggacagagacgccaacggcagcagaagactgatgctgcccccccccagcacccccgccctgagcggcgccccccccggcggcgccgagagcgtgcacagcttctaccacgccgactgccacctggagcccgtgagatgccaggcccccccccccagaagccccagcgaggccagcggcagaaccgtgggcagcggcaaggtgtaccccaccgtgcacaccagccccccccccgagaccctgaaggagaaggccctggtggaggtggccgccagcagcggcccccccaccctgaccagcctgaacatcccccccggcccctacagcagcatgcacaagctgctggagacccagagcaccggcgcctgccagagcagctgcaagatcagcagcccctgcctgaaggccgacagcggcgcctgcggccccgacagctgcccctactgcgccagagccggcgccggcgaggtggagctggccgacagagagatgcccgacagcgacagcgaggccgtgtacgagttcacccaggacgcccagcacagcgacctgagagacccccacagcagaagacagagaagcctgggccccgacgccgagcccagcagcgtgctggccttctggagactgatctgcgacaccttcagaaagatcgtggacagcaagtacttcggcagaggcatcatgatcgccatcctggtgaacaccctgagcatgggcatcgagtaccacgagcagcccgaggagctgaccaacgccctggagatcagcaacatcgtgttcaccagcctgttcgccctggagatgctgctgaagctgctggtgtacggccccttcggctacatcaagaacccctacaacatcttcgacggcgtgatcgtggtgatcagcgtgtgggagatcgtgggccagcagggcggcggcctgagcgtgctgagaaccttcagactgatgagagtgctgaagctggtgagattcctgcccgccctgcagagacagctggtggtgctgatgaagaccatggacaacgtggccaccttctgcatgctgctgatgctgttcatcttcatcttcagcatcctgggcatgcacctgttcggctgcaagttcgccagcgagagagacggcgacaccctgcccgacagaaagaacttcgacagcctgctgtgggccatcgtgaccgtgttccagatcctgacccaggaggactggaacaaggtgctgtacaacggcatggccagcaccagcagctgggccgccctgtacttcatcgccctgatgaccttcggcaactacgtgctgttcaacctgctggtggccatcctggtggagggcttccaggccgagggcgacgccaacaagagcgagagcgagcccgacttcttcagccccagcctggacggcgacggcgacagaaagaagtgcctggccctggtgagcctgggcgagcaccccgagctgagaaagagcctgctgccccccctgatcatccacaccgccgccacccccatgagcctgcccaagagcaccagcaccggcctgggcgaggccctgggccccgccagcagaagaaccagcagcagcggcagcgccgagcccggcgccgcccacgagatgaagagcccccccagcgccagaagcagcccccacagcccctggagcgccgccagcagctggaccagcagaagaagcagcagaaacagcctgggcagagcccccagcctgaagagaagaagccccagcggcgagagaagaagcctgctgagcggcgagggccaggagagccaggacgaggaggagagcagcgaggaggagagagccagccccgccggcagcgaccacagacacagaggcagcctggagagagaggccaagagcagcttcgacctgcccgacaccctgcaggtgcccggcctgcacagaaccgccagcggcagaggcagcgccagcgagcaccaggactgcaacggcaagagcgccagcggcagactggccagagccctgagacccgacgacccccccctggacggcgacgacgccgacgacgagggcaacctgagcaagggcgagagagtgagagcctggatcagagccagactgcccgcctgctgcctggagagagacagctggagcgcctacatcttccccccccagagcagattcagactgctgtgccacagaatcatcacccacaagatgttcgaccacgtggtgctggtgatcatcttcctgaactgcatcaccatcgccatggagagacccaagatcgacccccacagcgccgagagaatcttcctgaccctgagcaactacatcttcaccgccgtgttcctggccgagatgaccgtgaaggtggtggccctgggctggtgcttcggcgagcaggcctacctgagaagcagctggaacgtgctggacggcctgctggtgctgatcagcgtgatcgacatcctggtgagcatggtgagcgacagcggcaccaagatcctgggcatgctgagagtgctgagactgctgagaaccctgagacccctgagagtgatcagcagagcccagggcctgaagctggtggtggagaccctgatgagcagcctgaagcccatcggcaacatcgtggtgatctgctgcgccttcttcatcatcttcggcatcctgggcgtgcagctgttcaagggcaagttcttcgtgtgccagggcgaggacaccagaaacatcaccaacaagagcgactgcgccgaggccagctacagatgggtgagacacaagtacaacttcgacaacctgggccaggccctgatgagcctgttcgtgctggccagcaaggacggctgggtggacatcatgtacgacggcctggacgccgtgggcgtggaccagcagcccatcatgaaccacaacccctggatgctgctgtacttcatcagcttcctgctgatcgtggccttcttcgtgctgaacatgttcgtgggcgtggtggtggagaacttccacaagtgcagacagcaccaggaggaggaggaggccagaagaagagaggagaagagactgagaagactggagaagaagagaagaagcaaggagaagcagatggccgaggcccagtgcaagccctactacagcgactacagcagattcagactgctggtgcaccacctgtgcaccagccactacctggacctgttcatcaccggcgtgatcggcctgaacgtggtgaccatggccatggagcactaccagcagccccagatcctggacgaggccctgaagatctgcaactacatcttcaccgtgatcttcgtgctggagagcgtgttcaagctggtggccttcggcttcagaagattcttccaggacagatggaaccagctggacctggccatcgtgctgctgagcatcatgggcatcaccctggaggagatcgaggtgaacgccagcctgcccatcaaccccaccatcatcagaatcatgagagtgctgagaatcgccagagtgctgaagctgctgaagatggccgtgggcatgagagccctgctggacaccgtgatgcaggccctgccccaggtgggcaacctgggcctgctgttcatgctgctgttcttcatcttcgccgccctgggcgtggagctgttcggcgacctggagtgcgacgagacccacccctgcgagggcctgggcagacacgccaccttcagaaacttcggcatggccttcctgaccctgttcagagtgagcaccggcgacaactggaacggcatcatgaaggacaccctgagagactgcgaccaggagagcacctgctacaacaccgtgatcagccccatctacttcgtgagcttcgtgctgaccgcccagttcgtgctggtgaacgtggtgatcgccgtgctgatgaagcacctggaggagagcaacaaggaggccaaggaggaggccgagctggaggccgagctggagctggagatgaagaccctgagcccccagccccacagccccctgggcagccccttcctgtggcccggcgtggagggccccgacagccccgacagccccaagcccggcgccctgcaccccgccgcccacgccagaagcgccagccacttcagcctggagcaccccaccatgcagccccaccccaccgagctgcccggccccgacctgctgaccgtgagaaagagcggcgtgagcagaacccacagcctgcccaacgacagctacatgtgcagacacggcagcaccgccgagggccccctgggccacagaggctggggcctgcccaaggcccagagcggcagcgtgctgagcgtgcacagccagcccgccgacaccagctacatcctgcagctgcccaaggacgccccccacctgctgcagccccacagcgcccccacctggggcaccatccccaagctgcccccccccggcagaagccccctggcccagagacccctgagaagacaggccgccatcagaaccgacagcctggacgtgcagggcctgggcagcagagaggacctgctggccgaggtgagcggccccagcccccccctggccagagcctacagcttctggggccagagcagcacccaggcccagcagcacagcagaagccacagcaagatcagcaagcacatgaccccccccgccccctgccccggccccgagcccaactggggcaagggcccccccgagaccagaagcagcctggagctggacaccgagctgagctggatcagcggcgacctgctgccccccggcggccaggaggagccccccagccccagagacctgaagaagtgctacagcgtggaggcccagagctgccagagaagacccaccagctggctggacgagcagagaagacacagcatcgccgtgagctgcctggacagcggcagccagccccacctgggcaccgaccccagcaacctgggcggccagcccctgggcggccccggcagcagacccaagaagaagctgagcccccccagcatcaccatcgacccccccgagagccagggccccagaaccccccccagccccggcatctgcctgagaagaagagcccccagcagcgacagcaaggaccccctggccagcggcccccccgacagcatggccgccagccccagccccaagaaggacgtgctgagcctgagcggcctgagcagcgaccccgccgacctggacccctag

SEQ ID NO: 259765 - DNA, 6753 bp, Artificial Sequence
  derived and/or modified sequence
atggacgaagaggaagatggggcaggcgctgaggaatctggtcaacctcgcagtttcatgcggctgaacgatctatccggagcaggaggacgccctggtcccggcagtgccgaaaaggacccaggctccgccgatagtgaagcggaaggcctgccttaccctgccctcgctcccgtggtcttcttctacttgtcccaagattctcgtcctcggtcttggtgtctcaggactgtgtgtaatccatggtttgagagaatttccatgcttgtcatcttgctcaactgcgtgacactgggcatgtttaggccttgcgaagacatcgcctgcgatagccagcggtgcaggattcttcaggcctttgatgattttatattcgcgttttttgctgtggaaatggtggtgaagatggtggccttggggatatttgggaagaaatgctacctgggcgacacatggaacagattagacttcttcatcgtaattgccggcatgctggagtacagccttgacttacagaatgtgtcttttagcgctgtgagaacagtgagagtgctgcgcccactcagggctatcaatagagttccttccatgaggatcttggtcaccctgctgcttgacaccttaccaatgctggggaacgttctactgttgtgcttctttgtattctttatttttggcattgtgggtgtccagttgtgggctgggttgctgcgtaataggtgtttccttcccgaaaacttctctcttccactgtcggtggatctggaaagatactaccagactgagaacgaggatgaaagcccctttatctgcagccagcctagagagaacggtatgcgcagctgcagatccgtgccgacccttcgaggggatgggggaggaggacctccatgcggtctcgactatgaagcatataattcttcctcaaatactacatgtgtcaactggaatcagtattataccaactgcagcgctggagaacacaacccctttaaaggggccataaacttcgacaatatcggatacgcctggatcgctattttccaagtcataaccttggagggatgggtggacattatgtacttcgtcatggatgcccactccttttacaatttcatatacttcatccttttgattatcgtcggtagtttctttatgattaatctgtgccttgtggtgatcgctactcagtttagcgagactaaacagcgcgaaagccagctgatgcgagagcagcgtgttcgctttctgagcaatgcttctacactggcctccttcagcgaacctgggagctgttatgaggaactgctgaaatatttggtgtacatcctgcgaaaggcagcccggagactggcccaggtttccagggctgctggggtccgagtgggcttactgtccagccctgcccccctcgggggccaggaaacccagccttcttccagttgctcccggtcacatcggagactgtcggtacaccacctagtccatcaccatcaccaccatcaccatcattatcaccttggtaacggaaccctgcgtgcccccagggccagccccgagattcaggacagggacgcaaacggcagtcgtaggctgatgctaccaccaccctccacccctgccttatcaggggctccgccaggcggcgcggaatcagtccatagtttctatcacgctgattgtcacctcgagcctgttcgctgccaagcccccccacctcggagtccaagcgaagccagtgggcgcaccgtcggctccggaaaggtctatcccacggtccacacctccccccctccagagaccctcaaggagaaggctctcgtcgaagtggctgcctcctccggaccccctactctgacatcactgaacataccaccgggtccgtacagctccatgcacaaacttctagaaacacagtccacgggtgcctgtcagagttcttgcaaaatatcctctccatgcttaaaggccgacagcggggcatgcggccctgacagttgtccttattgtgccagagccggagcaggggaggtggagctcgccgatcgtgagatgcctgactctgactcagaagcagtttatgaattcactcaggacgcccagcactccgacctgcgggatccccactctagaagacagcgcagcctgggacccgacgcggaaccctccagcgtgctggccttttggcgcttgatctgtgatacttttcgtaagatcgtggactctaagtattttggtcggggcatcatgatcgccatcttggtgaatacacttagtatgggaatcgagtatcacgaacagcctgaggaactgaccaacgcactggagatctcaaatatcgtctttacgagcctgtttgccctcgaaatgctgctaaaacttctggtttatgggccatttggctatataaagaacccctataatatcttcgacggtgtcattgtcgtcatctcggtttgggagatcgtaggtcagcaaggcggaggcttaagcgtcctgcggacctttcgccttatgagagttcttaaactagtcaggtttctgcccgcgcttcagcggcagctagtggtgctaatgaaaaccatggacaacgtcgcgaccttttgcatgttgctgatgctgtttatattcatcttcagcatcctaggcatgcacctgttcggatgcaaattcgcatcagagcgggatggcgacaccctaccggataggaagaacttcgacagcctgctgtgggctatcgtgaccgtgttccagatcctcacacaggaagattggaataaagtgctttataacggaatggcctcaactagttcttgggcggcactgtacttcatcgctcttatgactttcggcaactacgtactgttcaatctgcttgtggccatcctggtcgagggattccaggccgagggtgatgctaataagagcgagtccgagcccgatttcttcagtccttccctggacggcgatggagaccgtaaaaagtgcctcgccctggtgagtctcggtgagcacccagagttgcgcaagagcctgctcccaccgctgatcatacatactgctgctaccccgatgtccctgcccaagagcacctccaccggccttggcgaagccctgggcccggccagtcggcgcacatcctcttctggttcggccgagccaggcgccgcacatgaaatgaagagcccaccctccgcacgaagtagcccacactccccttggtctgccgcctctagctggaccagccgtcgcagctccaggaactccctaggacgggcgccatccctgaaaaggagatcgccctctggtgagcgtaggagcctgctttccggagaaggacaggagtcccaggacgaagaggaaagttcggaagaggaacgagcatcgccagccggaagcgatcaccgccaccgagggtccctggaaagggaagctaagtcttcatttgacctgccagacacactccaggtgccaggccttcatagaaccgcatctggcaggggctctgcttctgagcatcaggattgtaacggtaaatccgcctcaggtcggctggcccgtgccctacgcccggatgaccccccgcttgacggggatgacgccgatgatgaggggaatctctcaaaaggcgaaagagtgagagcctggattcgcgcaagactgcctgcctgctgcctcgagcgcgattcgtggagcgcctatatattcccaccccagtcccgcttcagattactatgtcacaggatcatcacccacaagatgttcgaccacgtggtcctcgttataatctttcttaactgtattacaatagccatggaaagacctaagatagacccccatagcgccgagcgcatcttcctgacactatccaattatatcttcaccgccgtttttttggctgagatgacagtaaaggtggttgccctcggatggtgcttcggagagcaagcctatcttcggagttcttggaatgtcctagatggtctgttggtgttgatttccgtgattgatatcctcgtctctatggtttcggactcaggcacaaagatccttggcatgctgagggtcctgcgcttactgaggacactcagaccgctaagagtgattagtagggctcagggactgaagctcgtggttgagactttgatgtcatctctgaagccaatcggaaatatagtcgtgatatgttgcgccttcttcattatctttgggattttaggcgtgcagctgtttaaaggcaagttcttcgtatgccaaggagaggacaccaggaacattacaaataagagtgactgcgctgaggcctcttaccgctgggtgagacataagtacaatttcgacaatctcggccaagctttgatgtctctgtttgtattggccagtaaggacggatgggtggatattatgtatgatggtctggacgctgttggagtggaccagcagcctatcatgaatcacaacccttggatgctgctttacttcatttcgtttctacttatagtcgctttctttgtgttaaatatgtttgtgggcgtggtcgtggagaattttcataagtgcaggcaacatcaggaggaggaagaggcccggcggagagaagagaagcgattgagacgcctcgaaaagaaacggaggtccaaggaaaaacagatggctgaagcccagtgcaaaccgtattattctgactacagtcggtttcggctcttggtacatcacctgtgcacatcccactatcttgatctgttcattactggtgtcatagggttgaacgtggttacgatggctatggagcactatcagcagccacagatcctggatgaggctctgaaaatctgtaactacatttttacagtgattttcgttctggagtctgtgttcaagctggtcgcatttggctttcgaagattctttcaggataggtggaaccagctggacctggccattgtcctcctttcaattatgggaataacccttgaagagatagaagtgaacgcctcgctgccaattaaccccacaatcatccgcatcatgcgagtattgcggattgccagagtcctcaagctgctcaaaatggcggtgggtatgcgagccctgctcgatacagtcatgcaggctctgcctcaggtgggcaacctcggacttctgtttatgctgctatttttcattttcgcagccctgggcgttgaactgtttggggacctggaatgcgacgaaacacacccctgcgaggggctcggtcggcatgctaccttccgtaactttgggatggcatttttgaccctgttccgagtatcgaccggcgacaattggaacggtataatgaaagataccctgagagactgtgatcaggagtccacctgttacaacaccgtgatttctcctatttattttgtgtcctttgtcctgacagcacagtttgtactggttaatgtcgttattgctgtgctgatgaagcaccttgaggagagcaataaagaggccaaggaggaagccgaactcgaggcagagttggagctggaaatgaaaacactttctccacagcctcactctccccttggtagcccgttcttgtggcccggcgtggagggaccagactctcctgactctcctaagccaggtgcactgcaccctgctgcccacgcgcgaagcgctagtcatttttcactggaacacccaactatgcagccccatcccactgagctacctgggcctgacctgcttactgtgaggaagtcaggggtgagtagaacgcactctctgcctaacgatagctacatgtgccgccacggtagcaccgccgaaggaccactgggtcatagaggctggggtcttccgaaggcccagagtggttctgtgctgtcagtccactcccagcctgcggacacttcgtatattctgcagttgcctaaggacgcccctcacttacttcagccccatagcgcgcctacatgggggacaatccctaaactgccaccccctggccgctccccgcttgcacagaggccattacggcgacaggcggcaataagaacagactcattggatgtacaggggcttgggtcccgggaggatctcctcgctgaggtgagcggtccatcacctcctctggctagagcctactctttttgggggcaaagttccacccaagcacagcaacacagtcgatcacatagtaagatttcgaagcacatgacacctccagctccatgtccagggcctgaacctaattgggggaaggggccacccgagacccggagttccctcgagctggatacagagttgagctggatttccggggatcttctgccccctgggggacaagaggaacccccaagccctagagatttgaaaaagtgttacagcgtggaggcccaaagctgtcagaggaggccgaccagttggctagacgagcagcgccgccacagtatcgcagtgtcctgtctggactcggggtcacagccccacctcgggactgatcccagcaacttaggaggacaacccctggggggtcccggtagtcggccaaaaaaaaagttgagcccgcctagcattacgattgacccacccgagtcccaggggcctaggactcctccatctcccggcatttgtctgcgacgcagggcaccgagttctgactccaaggatccactagcttcgggccctccagattcaatggccgcgtccccttctcctaaaaaggatgttttatctctgtcggggctctcatcagacccagccgacctcgacccatag

SEQ ID NO: 259766 - DNA, 6753 bp, Artificial Sequence
  derived and/or modified sequence
atggatgaggaggaggatggagctggagctgaggagagcggccagcccaggagcttcatgaggctgaatgacctgagcggggccggcggccggcccggccctggcagcgctgagaaggaccccggcagcgctgacagcgaggccgagggcctgccctacccagccctggcccctgtggtgttcttctacctgagccaggacagccggcccaggtcctggtgcctgaggacagtgtgcaacccctggtttgagcgcatctccatgctggtgatcctgctgaactgtgtgaccctgggcatgttccggccctgtgaagatattgcctgtgacagccagcgctgccgcatcctgcaggcctttgatgacttcatctttgccttctttgctgtggagatggtggtgaagatggtggccctgggcatctttgggaagaagtgctacctgggggacacctggaaccggctggacttcttcatcgtgattgctggcatgctggagtacagcctggacctgcagaatgtgtccttctctgctgtgaggacagtgcgggtgctgcggcccctgcgggccatcaacagagtgcccagcatgaggatcctggtgaccctgctgctggacaccctgcccatgctgggcaatgtgctgctgctgtgcttctttgtgttcttcatctttggaattgtgggcgtgcagctgtgggccggcctgctgaggaaccgctgcttcctgcctgagaacttcagcctgcccctgtctgtggacctggagcgctactaccagacagaaaatgaagatgagagccccttcatctgcagccagccccgggagaatggcatgaggagctgccgctctgtgcccaccctgcggggagatggcggcggcggccccccctgtggcctggactatgaggcctacaacagcagcagcaacaccacctgtgtgaactggaaccagtactacaccaactgcagcgctggggagcacaaccccttcaagggggccatcaactttgacaacatcggctacgcctggatcgccatcttccaggtgatcaccctggagggctgggtggacatcatgtactttgtgatggatgcccacagcttctacaacttcatctacttcatcctgctgatcatcgtgggcagcttcttcatgatcaacctgtgcctggtggtgattgccacccagttcagcgagaccaagcagcgggagagccagctgatgagggagcagagggtgcgcttcctgagcaatgccagcaccctggccagcttcagcgagcccggcagctgctatgaggagctgctgaagtacctggtgtacatcctgaggaaggccgcccggcggctggcccaggtgtccagagctgctggggtgcgggtgggcctgctgagcagccctgcccccctgggcggccaggagacccagcccagcagcagctgcagccgcagccaccggcggctgtctgtgcaccacctggtgcaccaccaccaccaccaccaccaccactaccacctgggcaatggcaccctgcgggccccccgggccagccctgagatccaggacagagatgccaacggcagccggcggctgatgctgcccccacccagcaccccagccctgagcggggcccctcctggaggagctgagagcgtgcacagcttctaccacgccgactgccacctggagcctgtgcgctgccaggcccccccacccaggagccccagcgaggccagcggccgcacagtgggcagcggcaaggtgtaccccaccgtgcacaccagccccccacctgagaccctgaaggagaaggccctggtggaggtggccgccagcagcggcccccccaccctgaccagcctgaacatccccccaggcccctacagctccatgcacaagctgctggagacccagagcactggagcctgccagagcagctgcaagatcagcagcccctgcctgaaggctgacagcggggcctgtggccctgacagctgcccctactgtgcccgggccggggccggggaggtggagctggccgaccgggagatgccagacagcgacagcgaggccgtgtatgagttcacccaggatgcccagcacagcgacctgcgggacccccacagccggcggcagaggagcctgggcccagatgctgagcccagctctgtgctggccttctggaggctcatctgtgacaccttcaggaagatcgtggacagcaagtacttcggccggggcatcatgattgccatcctggtgaacaccctgtccatgggcatcgagtaccacgagcagcctgaggagctgaccaatgccctggagatcagcaacatcgtgttcaccagcctgtttgccctggagatgctgctgaagctgctggtgtatggccccttcggctacatcaagaacccctacaacatctttgatggagtcatcgtggtgatctctgtgtgggagatcgtgggccagcagggcggcggcctgtctgtgctgcggaccttccggctgatgagggtgctgaagctggtgcgcttcctgcctgccctgcagaggcagctggtggtgctgatgaagaccatggacaacgtggccaccttctgcatgctgctgatgctgttcatcttcatcttcagcatcctgggcatgcacctgtttggctgcaagtttgccagcgagagagatggagacaccctgcctgacaggaagaactttgacagcctgctgtgggccatcgtgacagtgttccagatcctgacccaggaggactggaacaaggtgctgtacaacggcatggccagcaccagctcctgggccgccctgtacttcatcgccctgatgaccttcggcaactacgtgctcttcaacctgctggtggccatcctggtggagggcttccaggccgagggagatgccaacaagtctgagagcgagccagacttcttcagccccagcctggatggagatggagacaggaagaagtgcctggccctggtgtccctgggggagcaccctgagctgaggaagagcctgctgcccccactcatcatccacacagctgccacccccatgagcctgcccaagagcaccagcacaggcctgggggaggccctgggccctgccagcaggaggaccagcagcagcggcagcgctgagcccggggccgcccacgagatgaagagccccccatctgcccggagcagcccccacagcccctggagcgctgccagctcctggaccagcagaagaagcagcaggaacagcctgggccgggcccccagcctgaagaggaggagccccagcggggagaggaggagcctgctgagcggggagggccaggagagccaggatgaggaggagagcagcgaggaggagcgggccagccctgctggcagtgaccaccgccaccggggcagcctggagcgggaggccaagagcagctttgacctgcctgacaccctgcaggtgcccggcctgcacaggacagccagcggccggggcagcgccagcgagcaccaggactgcaatggcaagagcgccagcggccgcctggcccgggccctgcggccagatgacccccccctggatggagatgatgctgatgatgagggcaacctgagcaaaggagagcgggtgcgggcctggatccgggcccggctgcctgcctgctgcctggagcgggacagctggagcgcctacatcttccccccccagagccgcttccggctgctgtgccaccgcatcatcacccacaagatgtttgaccacgtggtgctggtgatcatcttcctgaactgcatcaccatcgccatggagcggcccaagattgacccccacagcgctgagcgcatcttcctgaccctgagcaactacatcttcaccgctgtgttcctggccgagatgacagtgaaggtggtggccctgggctggtgctttggagagcaggcctacctgcggagctcctggaatgtgctggatggcctgctggtgctgatcagcgtcatcgacatcctggtgtccatggtgtctgacagcggcaccaagatcctgggcatgctgcgggtgctgcggctgctgcggaccctgcggcccctgcgggtcatcagccgggcccagggcctgaagctggtggtggagaccctgatgagcagcctgaagcccatcggcaacatcgtggtgatctgctgtgccttcttcatcatcttcggcatcctgggcgtgcagctgttcaagggcaagttctttgtgtgccagggcgaggacaccaggaacatcaccaacaagagtgactgtgccgaggccagctaccgctgggtgcgccacaagtacaactttgacaacctgggccaggccctgatgagcctgtttgtgctggccagcaaggatggctgggtggacatcatgtatgatggcctggatgctgtgggcgtggaccagcagcccatcatgaaccacaacccctggatgctgctgtacttcatctccttcctgctgattgtggccttctttgtgctgaacatgtttgtgggcgtggtggtggagaacttccacaagtgccggcagcaccaggaggaggaggaggccaggagaagagaggagaagaggctgcggcggctggagaagaagaggaggagcaaggagaagcagatggccgaggcccagtgcaagccctactacagcgactacagccgcttccggctgctggtgcaccacctgtgcaccagccactacctggacctcttcatcaccggggtgattggcctgaatgtggtgaccatggccatggagcactaccagcagccccagatcctggatgaggccctgaagatctgcaactacatcttcaccgtcatctttgtgctggagagcgtcttcaagctggtggccttcggcttccgccgcttcttccaggaccgctggaaccagctggacctggccatcgtgctgctgagcatcatgggcatcaccctggaggagattgaggtgaatgccagcctgcccatcaaccccaccatcatccgcatcatgagggtgctgcgcatcgcccgggtgctgaagctgctgaagatggctgtgggcatgagggccctgctggacacagtgatgcaggccctgccccaggtgggcaacctgggcctgctcttcatgctgctcttcttcatctttgctgccctgggcgtggagctgtttggagacctggagtgtgatgagacccacccctgtgagggcctgggcagacatgccaccttcaggaactttggcatggccttcctgaccctcttccgggtgtccactggagacaactggaatggcatcatgaaggacaccctgcgggactgtgaccaggagagcacctgctacaacacagtcatcagccccatctactttgtgtcctttgtgctgacagcccagtttgtgctggtgaatgtggtgattgctgtgctgatgaagcacctggaggagagcaacaaggaggccaaggaggaggccgagctggaggccgagctggagctggagatgaagaccctgagcccccagccccacagccccctgggcagccccttcctgtggccaggagtggagggccctgacagcccagacagccccaagccaggggccctgcaccctgctgcccacgcccggagcgccagccacttcagcctggagcaccccaccatgcagccccaccccacagagctgcccggccctgacctgctgactgtgaggaagagcggcgtgtccaggacccacagcctgcccaatgacagctacatgtgcagacatggcagcacagctgagggccccctgggccaccggggctggggcctgcccaaggcccagagcggctctgtgctgtctgtgcacagccagcctgctgacaccagctacatcctgcagctgcccaaggatgccccccacctgctgcagccccacagcgcccccacctggggcaccatccccaagctgcccccacctggccgcagccccctggcccagaggcccctgcggcggcaggccgccatcagaacagacagcctggatgtgcagggcctgggcagccgggaggacctgctggccgaggtgtctggccccagcccccccctggcccgggcctacagcttctggggccagagcagcacccaggcccagcagcacagccgcagccacagcaagatcagcaagcacatgaccccaccagccccctgccccggccctgagcccaactggggcaaaggacctcctgagaccaggagcagcctggagctggacacagagctgtcctggatcagcggggacctgctgcccccaggcggccaggaggagccccccagcccccgggacctgaagaagtgctacagcgtggaggcccagagctgccagaggcggcccacctcctggctggatgagcagaggaggcacagcattgctgtgtcctgcctggacagcggcagccagccccacctgggcacagaccccagcaacctgggcggccagcccctgggcggccctggcagccggcccaagaagaagctgagccccccatccatcaccatcgaccccccagagagccagggccccaggaccccacccagccctggcatctgcctgcggcggcgggcccccagcagtgacagcaaggaccccctggccagcggccccccagacagcatggccgccagccccagccccaagaaggatgtgctgagcctgagcggcctgagcagtgaccctgctgacctggacccctag

SEQ ID NO: 259767 - DNA, 6753 bp, Artificial Sequence
  derived and/or modified sequence
atggacgaggaggaggacggcgccggcgccgaggagagcggccagccgagatcgttcatgagactcaatgacctttctggggcggggggtcgacccggcccaggtagcgccgagaaggatcccgggtccgcagattcagaagctgaagggctgccataccccgctctcgctcccgtagtttttttctacttgagccaggacagtagacctcggagctggtgcctgcgaaccgtctgcaacccttggtttgagcggatttccatgttggtgatactgttaaactgcgtaacattggggatgtttaggccgtgtgaagacattgcctgcgacagtcagcggtgtcggatcctgcaggcctttgacgacttcatattcgcattcttcgccgtagagatggtggtcaagatggtcgcccttggcatcttcggcaaaaagtgctacctgggagatacctggaacagactggacttcttcatcgtaattgccggaatgctggagtacagcctggacctgcagaatgtttccttttcagctgtccgcactgtgcgagtcctgaggcccctgcgcgctattaatcgagtcccttccatgcggatattggttactctgcttttggataccctgcccatgttaggaaatgtgttgctgctgtgcttcttcgtcttcttcatctttggaatcgtaggcgtacagctgtgggcgggacttctgcgcaaccgatgtttcctgcctgaaaacttctccctccctttatctgtggacctggaacgctactatcaaaccgagaacgaggacgagtccccctttatctgtagtcagccacgcgagaacgggatgaggtcttgcagaagcgtaccaacgcttagaggggacggaggggggggacctccttgcggtctggactacgaagcatataactcatccagtaataccacatgtgttaattggaatcaatattacaccaattgctctgccggtgagcataatccattcaaaggcgcgatcaattttgacaatatcggctacgcttggattgccatcttccaggtgatcaccctggagggatgggtcgacatcatgtacttcgtaatggacgcacacagcttctataatttcatctactttatactgctcatcattgtgggcagcttctttatgatcaacctctgtctcgtcgtcattgcgacccagttcagtgaaaccaaacaacgagaatcccagctgatgcgggaacaaagagttcggtttctctctaacgcatccacgttggcttccttcagcgagccaggctcatgctacgaagaacttctgaaatacctggtgtacatattgagaaaagccgctcgcagattagcacaggtctctcgtgcagctggagtgagggtgggactgctgagcagtcctgcgccattggggggacaggagacccaaccaagtagcagctgcagccgctctcaccgtaggctgtccgtgcaccacctagtgcatcatcatcaccatcatcaccatcactaccatctcggcaatgggactctgcgtgcgccccgcgcgagtcccgagatccaggacagagatgccaacggatctagacgattgatgctccctccaccttcgacgcctgcattgtccggcgctcctcccggaggagctgaatctgtgcattctttttatcacgccgattgtcacttagaacccgtccgttgccaagcaccccccccaaggagtccttccgaggccagtgggaggaccgtcggatccggcaaagtgtaccccaccgtgcatacatccccaccaccagagactctgaaggagaaggctctggtcgaggtagctgccagctccggtcctcctaccctgaccagtctcaatatcccaccaggcccatattcttccatgcataaattgctcgagacccaatcgaccggagcctgtcagtcatcgtgtaaaattagcagcccgtgcctcaaggccgactcgggcgcatgcggcccagatagctgcccctattgtgccagagccggcgcaggcgaggttgaactagcggacagggaaatgcccgacagtgacagcgaggctgtctatgaattcactcaggacgcacagcattctgacctgagggatccccattccagaaggcagcgatctctcggccctgacgctgagccaagcagcgtccttgccttttggcggcttatttgcgacaccttcagaaagattgtggattccaagtattttgggcgaggaattatgatcgcaatactcgtgaatacccttagcatgggtatcgaataccacgaacagcccgaggaactaaccaacgctctggagattagtaatatcgtattcacttccctgtttgccctcgagatgcttctgaaactgctggtgtacgggccttttgggtacataaagaacccctacaatatctttgacggcgtcatcgtggtcatctcagtgtgggagattgtgggacagcaaggcggaggactgtctgttcttaggacatttcgcctgatgcgcgtgcttaagctggtcagattccttcccgccctccagcggcagcttgtggttctgatgaaaaccatggacaatgtggccactttctgcatgctgctaatgctgtttattttcatcttctccattctgggtatgcatttgtttggttgtaagtttgccagcgaacgcgacggggacacactacctgataggaaaaattttgactcactattgtgggctatcgtgacagtctttcaaatcctaacgcaggaggattggaataaagtcttgtacaacggtatggcctcaacaagcagctgggccgccttgtatttcattgcgctcatgacatttgggaattacgtgcttttcaacctcctcgtagcgattctcgtggaaggttttcaggctgagggggacgcgaacaaaagcgagagcgaacctgactttttttcaccatcgcttgacggagacggcgatagaaagaagtgtttagctttagtgagcctcggtgaacatcctgagctacggaagtctcttctgccaccactcattatacacactgccgccaccccaatgtcactcccaaagtctacctctaccggtctgggtgaagcactgggaccagcgagtcgaagaacgagctcttcaggctccgccgaaccaggagctgctcatgaaatgaaatcgccacccagcgctcggtcaagccctcactccccgtggagtgcagcgagctcatggacaagcaggaggtcaagccgcaattcactaggccgggccccctctctgaagcgacgaagcccttcgggagagagaaggagtctgctctctggcgaggggcaggaatcacaggacgaggaggaaagcagtgaggaagagcgagccagccccgccggctccgaccataggcatcggggttcccttgagagggaggcgaaaagcagctttgatctgcctgataccctgcaagtgcctgggctgcacagaactgctagtggtcggggcagtgcttccgagcaccaagactgcaacggcaaaagcgcttccggtagactggcacgcgccctgcggcctgacgacccgccactcgacggcgacgacgcagacgacgaagggaacctctcaaagggagagagggtgcgagcctggattcgggctagattaccagcatgttgtctggaaagagactcttggtccgcatatatttttccacctcagagccgtttccgcctgctgtgtcaccggatcatcacacacaagatgtttgatcacgtggtgcttgtaatcatatttctaaactgcatcaccatcgcaatggaacggcccaagattgatccgcattccgctgagaggattttcctcaccctttccaactatatctttactgcagttttcctcgctgaaatgacagttaaggtcgtggcactaggatggtgcttcggagagcaggcctacctacggtcctcgtggaacgttctcgatggcctgctcgttcttatcagtgttatagatatcctcgtgtctatggtgtccgattctggaaccaaaattttgggtatgctgagagtcctcaggctcctaagaacactgcggccacttagggttatctcaagggctcagggactgaaactggttgtagagactttgatgtccagcttaaagcccatcggaaacatcgtggtgatctgctgtgctttttttatcatcttcggaatcctcggcgtgcagctttttaagggcaaattctttgtgtgccagggggaggacactagaaacatcactaacaaatctgattgtgctgaggcttcatacagatgggtgcgccacaagtacaattttgataatttgggacaggctctgatgtcactgttcgtgctagcctctaaggacgggtgggtcgatattatgtacgacggtctggatgccgtgggcgtagaccagcaaccaatcatgaaccacaacccatggatgcttctgtactttatttccttcctgcttatcgttgctttcttcgtgctgaatatgtttgtgggggtggtcgtggagaattttcacaaatgtagacagcaccaggaagaagaggaggcccgccggagagaagagaagaggttgcgcaggctggagaaaaaacgccggtcaaaggagaaacagatggctgaagcccagtgtaagccctattattccgattattcacggtttcgccttctggtccaccatctgtgcacatcccattacctggatttgtttatcaccggagtaatcggtctgaatgtggtgaccatggctatggaacattatcaacagccccagatactagatgaggcgctgaagatttgtaactatatcttcacagtgattttcgtgctcgagtctgtctttaaactggtggcattcggcttccgtagattctttcaggatagatggaaccagctcgacctcgccatagtcctactgtccattatgggaataacattggaagagattgaagtgaacgccagtctgcctatcaacccaacaatcatccggatcatgcgcgtgctccgaattgcacgggtcctcaaactcctaaagatggcggtcggtatgagagccctcctggacactgtgatgcaggctctgccacaggttgggaatttggggcttttgtttatgttgttgttcttcatattcgcagccctgggcgttgagctatttggtgacctggaatgtgacgagacccatccctgtgagggtctgggccgccatgcgacttttaggaactttggaatggcctttcttaccctgttccgggtgagtacgggagataattggaacggtattatgaaggataccctgagagactgcgaccaagaatcaacctgctacaatacggtaattagccccatctatttcgttagcttcgtgttgaccgctcagtttgtgcttgtaaatgtggtcatcgcagtgctgatgaaacacctggaggagtccaacaaggaagctaaggaagaggcggaattggaggccgaactcgagctcgagatgaaaacattgagcccccagcctcattctccactgggatcccccttcctctggccgggggtggaaggccctgattccccagactcacctaagcctggcgcactgcatccagcagcgcacgcacgatccgcttcacacttctcgctagagcatccaaccatgcagcctcaccctaccgagcttcccggcccggatctgctaaccgtgagaaaatcaggcgtttctcgtactcacagcttaccgaatgacagctacatgtgcagacacgggtctaccgccgagggcccccttgggcaccggggttggggactaccaaaggctcagagtgggagtgtgctcagcgtacacagccagccagcagacaccagttatatcctgcagcttcccaaggacgccccgcatctcctgcagccgcatagcgccccaacatgggggactattcctaagttacccccaccagggaggagcccactcgcacaaaggcctcttcgccggcaagccgctatcaggacagactcgcttgacgtccagggtctgggctcccgcgaggatctgctggctgaggtctctggcccttccccgccgctagccagagcttactccttctgggggcagtcttccacgcaggcccagcagcactctaggagtcatagcaagatcagcaagcacatgacgccccctgcaccatgtccggggcctgagcctaactggggcaaaggtccgcctgagaccaggtcctcgttggaactggatacagaactgtcatggataagcggagacctgttgcccccggggggacaagaagagccaccctcccctcgcgacttgaagaagtgttactcagtcgaagctcagtcctgtcagagacgccccaccagctggctggacgagcagcgaagacactcgatcgcagtgtcgtgcctggacagcggcagccagcctcacctcggaacggacccttcgaacttgggtggtcagccccttggggggcctggctccagaccaaagaaaaagctgtccccacctagcattaccatcgaccctccagagtcccagggcccacggactccgccatcacccggcatctgtctccgcagacgcgcgccttcttccgactcaaaagacccccttgcctccggccctcctgacagcatggctgcctcgcctagcccaaaaaaagacgtgttatccctctcaggcctctcaagcgatccagccgacttagacccttag

SEQ ID NO: 259768 - DNA, 6752 bp, Artificial Sequence
  derived and/or modified sequence
atggatgaggaggaagacggggcaggagcggaggagtcaggtcaaccacgatccttcatgcgtctgaatgacctatcaggagccggtggaaggcccggacctggatccgctgagaaggatcccggaagtgcggactccgaagccgaagggctgccctaccccgcactggcgcctgtggtgtttttttatctgagtcaggattcaaggccacggtcctggtgtctcaggacagtgtgcaacccctggtttgagaggatctcaatgctagtgatactcctcaattgcgtgacattagggatgtttcgtccatgtgaagacatcgcgtgtgactcacagcggtgcagaatcttgcaggctttcgatgattttatttttgctttcttcgcagtggagatggtggttaaaatggtggccctcggaatctttgggaaaaagtgctatttaggcgacacatggaatcgactggatttcttcatcgtaattgcaggaatgttagagtattccctggatctgcagaatgtaagttttagcgccgtacggactgttagagtgctgcgcccactgcgcgctataaaccgcgtccccagcatgaggatactggtaaccctcttactggacactttgcccatgctgggcaacgtgctgctgctttgctttttcgtgttcttcatctttggcattgtgggagtgcagctttgggcaggactcctgagaaaccgctgctttctgccagagaatttctccctgcccctgtcggtcgatctggagcgctattatcaaactgaaaatgaagacgagtcccctttcatctgttctcagcctagggagaatggcatgcgctcctgcaggagtgtgcccacactgaggggcgacggcggagggggtcccccttgtgggctggattacgaagcttacaatagcagttccaacaccacctgcgtgaattggaaccagtattacacgaactgctccgccggtgaacataaccccttcaaaggcgcaattaattttgataatatcggatacgcctggatcgccatattccaggtcattactctcgaaggttgggtggacatcatgtattttgtgatggatgcacacagcttctacaactttatttattttatcctgctgatcattgtgggctccttcttcatgatcaacctgtgcttggtagtgatcgcaacccagttttccgaaaccaagcagagagagtctcaacttatgagagaacagcgggtccgattcctttcaaatgcttctaccctggcctcatttagcgaaccagggagctgctacgaagagctgctgaaatacctggtatacatcctgcgcaaggctgccaggcgcctcgctcaggtgtctcgcgcagcaggagtccgcgttggactactttcttcccccgcacccctcggcggacaggagactcaacccagcagctcgtgcagtagatcacatcgtagactatctgtgcatcacttagtgcatcaccaccaccaccatcatcatcactatcacctgggaaacggcactttgagggcccctcgagcctcccccgagattcaggatagagatgctaacggctcacgacgcctgatgcttcctcctccctccacacccgctctgagcggggcaccacctggcggagccgagagcgttcattccttctaccacgctgattgtcatttggagcccgttcgctgccaagcccctccacctcggagtccctctgaagcaagtggacgtactgttgggtctggtaaggtttacccaactgtgcacaccagtcctcctccagagacgcttaaggagaaagctttagtggaggtggccgcatcatctggtccacctacgctcaccagtctgaacatcccccctggaccatactcctctatgcacaaactcttggagacccagtctacaggcgcatgccagtcctcttgcaaaatttcctcaccctgtctgaaagccgacagtggggcatgtggtcctgacagttgcccatactgtgcacgagcaggtgcgggagaggtggagttggcagatagagaaatgcccgattccgattccgaggctgtatacgagtttactcaagatgcccagcattcggacctgagagaccctcacagccgcagacagcgcagcctcggcccagatgcagaaccgtcctctgtgctcgccttctggcgcctgatctgcgacacatttcggaaaatcgtcgatagcaagtattttggtagggggattatgatcgccattctggtcaacacattgtctatgggtatcgagtaccatgagcagcccgaggagctgactaatgctttagagatatccaatatagtgtttaccagcctttttgcactggagatgcttcttaaattgttagtctatgggcctttcggatatattaagaatccctacaatattttcgacggagtgatcgttgtgatctcagtatgggagattgtcgggcagcaaggagggggactctcagtcttacggacattcaggctgatgagagtccttaaactggtgcgcttcctgcctgctttgcaacgtcagctagtggtgttaatgaagacaatggacaatgtcgccactttctgcatgttgctaatgctgtttatatttatcttttcgatcttggggatgcatttattcggctgcaaatttgcttccgagagagatggcgacaccctgccggacaggaagaatttcgattcccttctgtgggcgatcgtgacagtcttccaaatcttaacacaggaggattggaacaaagtgctgtataacgggatggcgtcaaccagttcctgggccgcactttattttattgctctgatgacctttgggaactacgtgctgttcaacctgttagtcgccattctggtggagggatttcaagccgagggggacgctaacaagtccgaaagtgagcccgacttttttagcccctccctggatggagatggggatagaaaaaagtgtctggctctggtcagcctaggggagcacccagagttacgcaagtcgctgctcccccctctgatcatacacaccgctgcaactcctatgtcattacctaagagcacatcaacagggttgggggaagccctcgggccagcatctcggaggacaagttctagcggcagtgctgaacccggtgctgcccatgaaatgaagtcccctccatccgcccgatccagtccgcattcaccatggagcgccgcaagttcttggacctccaggcgaagctcccgaaacagcttggggagggcgccatcccttaagcggaggtcgcccagcggtgagcgccgttctttgctcagcggtgagggccaggaatcgcaggatgaagaggagtcaagcgaagaggaacgggctagcccagctgggagtgaccatcgccacagaggctccctagaaagggaagcaaaatcctcattcgacctgcctgataccctccaggttccaggcttgcatagaacggccagcggaagagggtcagcttctgaacatcaggattgcaacggcaagtctgcaagcgggaggctggccagagctcttcgcccagacgaccccccactggatggcgatgatgctgacgacgagggcaatcttagcaagggggaacgcgtgagggcctggattcgcgctcgtcttccggcttgctgtctggagcgagacagctggagtgcgtacattttccctccccaatctcgcttccgcctgttatgccatcgcatcatcacccacaaaatgttcgaccatgtcgtgctagtgatcatttttctgaactgcatcaccattgctatggaacgtccaaaaatcgaccctcacagcgccgaaagaatttttctgaccctgtctaactacatcttcacagccgtgttcctggccgagatgacagtaaaagtcgtcgccctgggctggtgttttggggaacaggcctatctgcgaagcagctggaacgttctggatggactactggtgctgatcagcgtcatcgacattctggtctcaatggtgagtgactctggaactaaaattttgggcatgctccgagttttacgcctgctccgaaccctgagaccactcagagtaatttcgcgcgcacagggcctgaagctagtagttgaaactcttatgtcatccttaaagcccatcggtaatatcgtcgtgatttgctgtgctttttttatcatcttcgggattttaggcgtccagctcttcaaagggaagttcttcgtctgtcagggcgaggatacccgcaacataacaaataaaagcgattgtgccgaggcctcctaccgctgggtgagacataaatacaacttcgacaatctgggtcaggcgctaatgtcacttttcgtcctggcctcgaaggacggttgggtagacattatgtacgacgggctagatgctgtgggagtggaccagcagcctatcatgaaccacaatccctggatgcttctttacttcatcagctttttgctgattgtcgctttcttcgtgctgaatatgttcgtaggagtggttgtggagaattttcataagtgtcgccagcaccaggaggaagaggaagcaagaagacgggaggagaagaggctgaggaggcttgaaaagaagcgtcggtctaaagaaaagcagatggcagaagcacagtgcaagccctactactctgactactccaggtttaggttattagtgcatcatttatgcacttctcattaccttgacttattcattacaggagtgataggtcttaacgttgttaccatggcaatggagcactaccagcagccacagattctcgatgaagcccttaagatctgtaactatattttcaccgtgatcttcgtgctagaatctgtgttcaagctggtagctttcggattccggaggtttttccaagataggtggaaccagctagacctggccatcgtgctcctgtctattatgggaatcaccttggaagagattgaggtcaacgcctcgcttccaattaatcccactataatccgcattatgagagtgctccgcattgctcgcgttctcaaattgcttaagatggccgtgggaatgagagctctcctcgacactgtgatgcaggcattgccccaggttgggaatcttggactactgtttatgctattgttttttatcttcgccgctttgggagtagaactattcggggatctggagtgcgatgaaactcatccctgcgagggtttgggccgtcatgccaccttcaggaatttcggcatggcctttctgacactcttcagagtgagcacaggggacaattggaacggcataatgaaggataccctaagggattgcgatcaagagtccacctgctacaatactgttatctcaccaatctattttgttagcttcgtgctgacagctcaattcgtgctggtcaatgttgtcatcgctgtattgatgaaacacttggaggagtccaataaggaggctaaagaggaagccgagcttgaagccgaactggagttggagatgaagacactgtcaccccagcctcattctcctcttggaagcccgtttctatggcccggagtggaaggcccagactctcccgatagtcccaaaccgggagccctgcaccccgcagcccatgctagaagcgcttctcactttagtttggagcacccgacaatgcaaccacacccaactgagctacctggccctgatctcttgacggtaagaaaatccggtgtctccagaactcacagcctgccaaatgattcttatatgtgccgccacggctctaccgcagaggggccactggggcatagagggtggggattgcccaaggctcagagcggctcagtgctgagtgtacactcccagccagctgatacaagctacatactccagctgccaaaggacgcaccccatcttctgcagccacactcagcgcctacttgggggactatcccaaaactgcctcccccaggcagatctcccctcgctcagagaccgttgaggcgccaggccgcaatccggactgattcattggacgtccaaggactgggcagccgagaggacctgctggcagaggtgagtggcccatccccccctttagcacgagcatacagcttctggggacagagttccacccaggcccaacaacacagtagaagtcattccaaaatcagcaaacacatgacaccacctgctccatgcccagggccagagcccaattgggggaaaggtcctcccgagacccgttctagcttggaactcgacactgagcttagctggatctccggggatctcctgccgccaggtgggcaagaggagcccccatccccaagagatctgaagaagtgttactcagtggaggcacagagttgccagcggaggccaaccagttggctcgacgagcagaggcggcactcaattgcggtaagctgtctcgattccggttcacagccacatctgggcactgaccctagcaacctgggcggacagcccttgggcggacctggctccagaccaaagaaaaagttgtcacccccttctattaccatcgatcctcccgagagccagggcccacggacaccgccatcgcccggaatttgtctgaggaggcgtgctccatcctccgacagtaaagaccccctggcttctggcccaccagactccatggccgctagccccagccccaagaaagatgtattgtctctgagtgggctctcttctgaccctgctgacctggatcccta

SEQ ID NO: 259769 - DNA, 7848 bp, Artificial Sequence
  derived and/or modified sequence
ccttttcgttcgccctctcggggcggcttcgccgaaggtagcgccgaatccggcaaccggagcctgggcgcgaagcgaagaagccggaacaaagtgagggggagccggccggctggcccgggaagccccaggggcgcaggggaagcgggactcgcgccgggcggggtttccctgcgccccggcgccccgcgggcagcatgcccctgcgggcagggggagctgggctgaactggccctcccgggggctcagcttgcgccctagagcccaccagatgtgcccccgccggggcccccgggttgcgtgaggacacctcctctgaggggcgccgcttgcccctctccggatcgcccggggccccggctggccagaggatggacgaggaggaggatggagcgggcgccgaggagtcgggacagccccggagcttcatgcggctcaacgacctgtcgggggccgggggccggccggggccggggtcagcagaaaaggacccgggcagcgcggactccgaggcggaggggctgccgtacccggcgctggccccggtggttttcttctacttgagccaggacagccgcccgcggagctggtgtctccgcacggtctgtaacccctggtttgagcgcatcagcatgttggtcatccttctcaactgcgtgaccctgggcatgttccggccatgcgaggacatcgcctgtgactcccagcgctgccggatcctgcaggcctttgatgacttcatctttgccttctttgccgtggagatggtggtgaagatggtggccttgggcatctttgggaaaaagtgttacctgggagacacttggaaccggcttgactttttcatcgtcatcgcagggatgctggagtactcgctggacctgcagaacgtcagcttctcagctgtcaggacagtccgtgtgctgcgaccgctcagggccattaaccgggtgcccagcatgcgcatccttgtcacgttgctgctggatacgctgcccatgctgggcaacgtcctgctgctctgcttcttcgtcttcttcatcttcggcatcgtcggcgtccagctgtgggcagggctgcttcggaaccgatgcttcctacctgagaatttcagcctccccctgagcgtggacctggagcgctattaccagacagagaacgaggatgagagccccttcatctgctcccagccacgcgagaacggcatgcggtcctgcagaagcgtgcccacgctgcgcggggacgggggcggtggcccaccttgcggtctggactatgaggcctacaacagctccagcaacaccacctgtgtcaactggaaccagtactacaccaactgctcagcgggggagcacaaccccttcaagggcgccatcaactttgacaacattggctatgcctggatcgccatcttccaggtcatcacgctggagggctgggtcgacatcatgtactttgtgatggatgctcattccttctacaatttcatctacttcatcctcctcatcatcgtgggctccttcttcatgatcaacctgtgcctggtggtgattgccacgcagttctcagagaccaagcagcgggaaagccagctgatgcgggagcagcgtgtgcggttcctgtccaacgccagcaccctggctagcttctctgagcccggcagctgctatgaggagctgctcaagtacctggtgtacatccttcgtaaggcagcccgcaggctggctcaggtctctcgggcagcaggtgtgcgggttgggctgctcagcagcccagcacccctcgggggccaggagacccagcccagcagcagctgctctcgctcccaccgccgcctatccgtccaccacctggtgcaccaccaccaccaccatcaccaccactaccacctgggcaatgggacgctcagggccccccgggccagcccggagatccaggacagggatgccaatgggtcccgccggctcatgctgccaccaccctcgacgcctgccctctccggggccccccctggtggcgcagagtctgtgcacagcttctaccatgccgactgccacttagagccagtccgctgccaggcgccccctcccaggtccccatctgaggcatccggcaggactgtgggcagcgggaaggtgtatcccaccgtgcacaccagccctccaccggagacgctgaaggagaaggcactagtagaggtggctgccagctctgggcccccaaccctcaccagcctcaacatcccacccgggccctacagctccatgcacaagctgctggagacacagagtacaggtgcctgccaaagctcttgcaagatctccagcccttgcttgaaagcagacagtggagcctgtggtccagacagctgcccctactgtgcccgggccggggcaggggaggtggagctcgccgaccgtgaaatgcctgactcagacagcgaggcagtttatgagttcacacaggatgcccagcacagcgacctccgggacccccacagccggcggcaacggagcctgggcccagatgcagagcccagctctgtgctggccttctggaggctaatctgtgacaccttccgaaagattgtggacagcaagtactttggccggggaatcatgatcgccatcctggtcaacacactcagcatgggcatcgaataccacgagcagcccgaggagcttaccaacgccctagaaatcagcaacatcgtcttcaccagcctctttgccctggagatgctgctgaagctgcttgtgtatggtccctttggctacatcaagaatccctacaacatcttcgatggtgtcattgtggtcatcagcgtgtgggagatcgtgggccagcaggggggcggcctgtcggtgctgcggaccttccgcctgatgcgtgtgctgaagctggtgcgcttcctgccggcgctgcagcggcagctggtggtgctcatgaagaccatggacaacgtggccaccttctgcatgctgcttatgctcttcatcttcatcttcagcatcctgggcatgcatctcttcggctgcaagtttgcctctgagcgggatggggacaccctgccagaccggaagaattttgactccttgctctgggccatcgtcactgtctttcagatcctgacccaggaggactggaacaaagtcctctacaatggtatggcctccacgtcgtcctgggcggccctttatttcattgccctcatgaccttcggcaactacgtgctcttcaatttgctggtcgccattctggtggagggcttccaggcggagggagatgccaacaagtccgaatcagagcccgatttcttctcacccagcctggatggtgatggggacaggaagaagtgcttggccttggtgtccctgggagagcacccggagctgcggaagagcctgctgccgcctctcatcatccacacggccgccacacccatgtcgctgcccaagagcaccagcacgggcctgggcgaggcgctgggccctgcgtcgcgccgcaccagcagcagcgggtcggcagagcctggggcggcccacgagatgaagtcaccgcccagcgcccgcagctctccgcacagcccctggagcgctgcaagcagctggaccagcaggcgctccagccggaacagcctcggccgtgcacccagcctgaagcggagaagcccaagtggagagcggcggtccctgttgtcgggagaaggccaggagagccaggatgaagaggagagctcagaagaggagcgggccagccctgcgggcagtgaccatcgccacagggggtccctggagcgggaggccaagagttcctttgacctgccagacacactgcaggtgccagggctgcatcgcactgccagtggccgagggtctgcttctgagcaccaggactgcaatggcaagtcggcttcagggcgcctggcccgggccctgcggcctgatgaccccccactggatggggatgacgccgatgacgagggcaacctgagcaaaggggaacgggtccgcgcgtggatccgagcccgactccctgcctgctgcctcgagcgagactcctggtcagcctacatcttccctcctcagtccaggttccgcctcctgtgtcaccggatcatcacccacaagatgttcgaccacgtggtccttgtcatcatcttccttaactgcatcaccatcgccatggagcgccccaaaattgacccccacagcgctgaacgcatcttcctgaccctctccaattacatcttcaccgcagtctttctggctgaaatgacagtgaaggtggtggcactgggctggtgcttcggggagcaggcgtacctgcggagcagttggaacgtgctggacgggctgttggtgctcatctccgtcatcgacattctggtgtccatggtctctgacagcggcaccaagatcctgggcatgctgagggtgctgcggctgctgcggaccctgcgcccgctcagggtgatcagccgggcgcaggggctgaagctggtggtggagacgctgatgtcctcactgaaacccatcggcaacattgtagtcatctgctgtgccttcttcatcattttcggcatcttgggggtgcagctcttcaaagggaagtttttcgtgtgccagggcgaggataccaggaacatcaccaataaatcggactgtgccgaggccagttaccggtgggtccggcacaagtacaactttgacaaccttggccaggccctgatgtccctgttcgttttggcctccaaggatggttgggtggacatcatgtacgatgggctggatgctgtgggcgtggaccagcagcccatcatgaaccacaacccctggatgctgctgtacttcatctcgttcctgctcattgtggccttctttgtcctgaacatgtttgtgggtgtggtggtggagaacttccacaagtgtcggcagcaccaggaggaagaggaggcccggcggcgggaggagaagcgcctacgaagactggagaaaaagagaaggagtaaggagaagcagatggctgaagcccagtgcaaaccttactactccgactactcccgcttccggctcctcgtccaccacttgtgcaccagccactacctggacctcttcatcacaggtgtcatcgggctgaacgtggtcaccatggccatggagcactaccagcagccccagattctggatgaggctctgaagatctgcaactacatcttcactgtcatctttgtcttggagtcagttttcaaacttgtggcctttggtttccgtcggttcttccaggacaggtggaaccagctggacctggccattgtgctgctgtccatcatgggcatcacgctggaggaaatcgaggtcaacgcctcgctgcccatcaaccccaccatcatccgcatcatgagggtgctgcgcattgcccgagtgctgaagctgctgaagatggctgtgggcatgcgggcgctgctggacacggtgatgcaggccctgccccaggtggggaacctgggacttctcttcatgttgttgtttttcatctttgcagctctgggcgtggagctctttggagacctggagtgtgacgagacacacccctgtgagggcctgggccgtcatgccacctttcggaactttggcatggccttcctaaccctcttccgagtctccacaggtgacaattggaatggcattatgaaggacaccctccgggactgtgaccaggagtccacctgctacaacacggtcatctcgcctatctactttgtgtccttcgtgctgacggcccagttcgtgctagtcaacgtggtgatcgccgtgctgatgaagcacctggaggagagcaacaaggaggccaaggaggaggccgagctagaggctgagctggagctggagatgaagaccctcagcccccagccccactcgccactgggcagccccttcctctggcctggggtcgagggccccgacagccccgacagccccaagcctggggctctgcacccagcggcccacgcgagatcagcctcccacttttccctggagcaccccacgatgcagccccaccccacggagctgccaggaccagacttactgactgtgcggaagtctggggtcagccgaacgcactctctgcccaatgacagctacatgtgtcggcatgggagcactgccgaggggcccctgggacacaggggctgggggctccccaaagctcagtcaggctccgtcttgtccgttcactcccagccagcagataccagctacatcctgcagcttcccaaagatgcacctcatctgctccagccccacagcgccccaacctggggcaccatccccaaactgcccccaccaggacgctcccctttggctcagaggccactcaggcgccaggcagcaataaggactgactccttggacgttcagggtctgggcagccgggaagacctgctggcagaggtgagtgggccctccccgcccctggcccgggcctactctttctggggccagtcaagtacccaggcacagcagcactcccgcagccacagcaagatctccaagcacatgaccccgccagccccttgcccaggcccagaacccaactggggcaagggccctccagagaccagaagcagcttagagttggacacggagctgagctggatttcaggagacctcctgccccctggcggccaggaggagcccccatccccacgggacctgaagaagtgctacagcgtggaggcccagagctgccagcgccggcctacgtcctggctggatgagcagaggagacactctatcgccgtcagctgcctggacagcggctcccaaccccacctgggcacagacccctctaaccttgggggccagcctcttggggggcctgggagccggcccaagaaaaaactcagcccgcctagtatcaccatagacccccccgagagccaaggtcctcggaccccgcccagccctggtatctgcctccggaggagggctccgtccagcgactccaaggatcccttggcctctggcccccctgacagcatggctgcctcgccctccccaaagaaagatgtgctgagtctctccggtttatcctctgacccagcagacctggacccctgagtcctgccccactttcccactcacctttctccactgggtgccaagtcctagctcctcctcctgggctatattcctgacaaaagttccatatagacaccaaggaggcggaggcgctcctccctgcctcagtggctctgggtacctgcaagcagaacttccaaagagagttaaaagcagcagccccggcaactctggctccaggcagaaggagaggcccggtgcagctgaggttcccgacaccagaagctgttgggagaaagcaatacgtttgtgcagaatctctatgtatattctattttattaaattaattgaatctagtatatgcgggatgtacgacattttgtgactgaagagacttgtttccttctacttttatgtgtctcagaatatttttgaggcgaaggcgtctgtctcttggctattttaacctaaaataacagtctagttatattccctcttcttgcaaagcacaagctgggaccgcgagcacattgcagccccaacggtggcccatcttcagcggagagcgagaaccattttggaaactgtaatgtaacttattttttcctttaacctcgtcatcattttctgtagggaaaaaaaaaagaaaaagaaaaaatgagattttacaagtgaaatggaacctttttatatatacatacatacatatctatctatctatctatatatatataaaataaagtaattttcctaaataaaaa

SEQ ID NO: 259770 - protein, 2243 aa, Artificial Sequence
  derived and/or modified sequence
MDEEEDGAGAEESGQPRSFMRLNDLSGAGGRPGPGSAEKDPGSADSEAEGLPYPALAPVVFFYLSQDSRPRSWCLRTVCNPWFERISMLVILLNCVTLGMFRPCEDIACDSQRCRILQAFDDFIFAFFAVEMVVKMVALGIFGKKCYLGDTWNRLDFFIVIAGMLEYSLDLQNVSFSAVRTVRVLRPLRAINRVPSMRILVTLLLDTLPMLGNVLLLCFFVFFIFGIVGVQLWAGLLRNRCFLPENFSLPLSVDLERYYQTENEDESPFICSQPRENGMRSCRSVPTLRGDGGGGPPCGLDYEAYNSSSNTTCVNWNQYYTNCSAGEHNPFKGAINFDNIGYAWIAIFQVITLEGWVDIMYFVMDAHSFYNFIYFILLIIVGSFFMINLCLVVIATQFSETKQRESQLMREQRVRFLSNASTLASFSEPGSCYEELLKYLVYILRKAARRLAQVSRAAGVRVGLLSSPAPLGGQETQPSSSCSRSHRRLSVHHLVHHHHHHHHHYHLGNGTLRAPRASPEIQDRDANGSRRLMLPPPSTPALSGAPPGGAESVHSFYHADCHLEPVRCQAPPPRSPSEASGRTVGSGKVYPTVHTSPPPETLKEKALVEVAASSGPPTLTSLNIPPGPYSSMHKLLETQSTGACQSSCKISSPCLKADSGACGPDSCPYCARAGAGEVELADREMPDSDSEAVYEFTQDAQHSDLRDPHSRRQRSLGPDAEPSSVLAFWRLICDTFRKIVDSKYFGRGIMIAILVNTLSMGIEYHEQPEELTNALEISNIVFTSLFALEMLLKLLVYGPFGYIKNPYNIFDGVIVVISVWEIVGQQGGGLSVLRTFRLMRVLKLVRFLPALQRQLVVLMKTMDNVATFCMLLMLFIFIFSILGMHLFGCKFASERDGDTLPDRKNFDSLLWAIVTVFQILTQEDWNKVLYNGMASTSSWAALYFIALMTFGNYVLFNLLVAILVEGFQAEGDANKSESEPDFFSPSLDGDGDRKKCLALVSLGEHPELRKSLLPPLIIHTAATPMSLPKSTSTGLGEALGPASRRTSSSGSAEPGAAHEMKSPPSARSSPHSPWSAASSWTSRRSSRNSLGRAPSLKRRSPSGERRSLLSGEGQESQDEEESSEEERASPAGSDHRHRGSLEREAKSSFDLPDTLQVPGLHRTASGRGSASEHQDCNGKSASGRLARALRPDDPPLDGDDADDEGNLSKGERVRAWIRARLPACCLERDSWSAYIFPPQSRFRLLCHRIITHKMFDHVVLVIIFLNCITIAMERPKIDPHSAERIFLTLSNYIFTAVFLAEMTVKVVALGWCFGEQAYLRSSWNVLDGLLVLISVIDILVSMVSDSGTKILGMLRVLRLLRTLRPLRVISRAQGLKLVVETLMSSLKPIGNIVVICCAFFIIFGILGVQLFKGKFFVCQGEDTRNITNKSDCAEASYRWVRHKYNFDNLGQALMSLFVLASKDGWVDIMYDGLDAVGVDQQPIMNHNPWMLLYFISFLLIVAFFVLNMFVGVVVENFHKCRQHQEEEEARRREEKRLRRLEKKRRKAQCKPYYSDYSRFRLLVHHLCTSHYLDLFITGVIGLNVVTMAMEHYQQPQILDEALKICNYIFTVIFVLESVFKLVAFGFRRFFQDRWNQLDLAIVLLSIMGITLEEIEVNASLPINPTIIRIMRVLRIARVLKLLKMAVGMRALLDTVMQALPQVGNLGLLFMLLFFIFAALGVELFGDLECDETHPCEGLGRHATFRNFGMAFLTLFRVSTGDNWNGIMKDTLRDCDQESTCYNTVISPIYFVSFVLTAQFVLVNVVIAVLMKHLEESNKEAKEEAELEAELELEMKTLSPQPHSPLGSPFLWPGVEGPDSPDSPKPGALHPAAHARSASHFSLEHPTMQPHPTELPGPDLLTVRKSGVSRTHSLPNDSYMCRHGSTAEGPLGHRGWGLPKAQSGSVLSVHSQPADTSYILQLPKDAPHLLQPHSAPTWGTIPKLPPPGRSPLAQRPLRRQAAIRTDSLDVQGLGSREDLLAEVSGPSPPLARAYSFWGQSSTQAQQHSRSHSKISKHMTPPAPCPGPEPNWGKGPPETRSSLELDTELSWISGDLLPPGGQEEPPSPRDLKKCYSVEAQSCQRRPTSWLDEQRRHSIAVSCLDSGSQPHLGTDPSNLGGQPLGGPGSRPKKKLSPPSITIDPPESQGPRTPPSPGICLRRRAPSSDSKDPLASGPPDSMAASPSPKKDVLSLSGLSSDPADLDP

SEQ ID NO: 259771 - DNA, 6732 bp, Artificial Sequence
  derived and/or modified sequence
atggacgaggaggaggacggcgccggcgccgaggagagcggccagcccagaagcttcatgagactgaacgacctgagcggcgccggcggcagacccggccccggcagcgccgagaaggaccccggcagcgccgacagcgaggccgagggcctgccctaccccgccctggcccccgtggtgttcttctacctgagccaggacagcagacccagaagctggtgcctgagaaccgtgtgcaacccctggttcgagagaatcagcatgctggtgatcctgctgaactgcgtgaccctgggcatgttcagaccctgcgaggacatcgcctgcgacagccagagatgcagaatcctgcaggccttcgacgacttcatcttcgccttcttcgccgtggagatggtggtgaagatggtggccctgggcatcttcggcaagaagtgctacctgggcgacacctggaacagactggacttcttcatcgtgatcgccggcatgctggagtacagcctggacctgcagaacgtgagcttcagcgccgtgagaaccgtgagagtgctgagacccctgagagccatcaacagagtgcccagcatgagaatcctggtgaccctgctgctggacaccctgcccatgctgggcaacgtgctgctgctgtgcttcttcgtgttcttcatcttcggcatcgtgggcgtgcagctgtgggccggcctgctgagaaacagatgcttcctgcccgagaacttcagcctgcccctgagcgtggacctggagagatactaccagaccgagaacgaggacgagagccccttcatctgcagccagcccagagagaacggcatgagaagctgcagaagcgtgcccaccctgagaggcgacggcggcggcggccccccctgcggcctggactacgaggcctacaacagcagcagcaacaccacctgcgtgaactggaaccagtactacaccaactgcagcgccggcgagcacaaccccttcaagggcgccatcaacttcgacaacatcggctacgcctggatcgccatcttccaggtgatcaccctggagggctgggtggacatcatgtacttcgtgatggacgcccacagcttctacaacttcatctacttcatcctgctgatcatcgtgggcagcttcttcatgatcaacctgtgcctggtggtgatcgccacccagttcagcgagaccaagcagagagagagccagctgatgagagagcagagagtgagattcctgagcaacgccagcaccctggccagcttcagcgagcccggcagctgctacgaggagctgctgaagtacctggtgtacatcctgagaaaggccgccagaagactggcccaggtgagcagagccgccggcgtgagagtgggcctgctgagcagccccgcccccctgggcggccaggagacccagcccagcagcagctgcagcagaagccacagaagactgagcgtgcaccacctggtgcaccaccaccaccaccaccaccaccactaccacctgggcaacggcaccctgagagcccccagagccagccccgagatccaggacagagacgccaacggcagcagaagactgatgctgcccccccccagcacccccgccctgagcggcgccccccccggcggcgccgagagcgtgcacagcttctaccacgccgactgccacctggagcccgtgagatgccaggcccccccccccagaagccccagcgaggccagcggcagaaccgtgggcagcggcaaggtgtaccccaccgtgcacaccagccccccccccgagaccctgaaggagaaggccctggtggaggtggccgccagcagcggcccccccaccctgaccagcctgaacatcccccccggcccctacagcagcatgcacaagctgctggagacccagagcaccggcgcctgccagagcagctgcaagatcagcagcccctgcctgaaggccgacagcggcgcctgcggccccgacagctgcccctactgcgccagagccggcgccggcgaggtggagctggccgacagagagatgcccgacagcgacagcgaggccgtgtacgagttcacccaggacgcccagcacagcgacctgagagacccccacagcagaagacagagaagcctgggccccgacgccgagcccagcagcgtgctggccttctggagactgatctgcgacaccttcagaaagatcgtggacagcaagtacttcggcagaggcatcatgatcgccatcctggtgaacaccctgagcatgggcatcgagtaccacgagcagcccgaggagctgaccaacgccctggagatcagcaacatcgtgttcaccagcctgttcgccctggagatgctgctgaagctgctggtgtacggccccttcggctacatcaagaacccctacaacatcttcgacggcgtgatcgtggtgatcagcgtgtgggagatcgtgggccagcagggcggcggcctgagcgtgctgagaaccttcagactgatgagagtgctgaagctggtgagattcctgcccgccctgcagagacagctggtggtgctgatgaagaccatggacaacgtggccaccttctgcatgctgctgatgctgttcatcttcatcttcagcatcctgggcatgcacctgttcggctgcaagttcgccagcgagagagacggcgacaccctgcccgacagaaagaacttcgacagcctgctgtgggccatcgtgaccgtgttccagatcctgacccaggaggactggaacaaggtgctgtacaacggcatggccagcaccagcagctgggccgccctgtacttcatcgccctgatgaccttcggcaactacgtgctgttcaacctgctggtggccatcctggtggagggcttccaggccgagggcgacgccaacaagagcgagagcgagcccgacttcttcagccccagcctggacggcgacggcgacagaaagaagtgcctggccctggtgagcctgggcgagcaccccgagctgagaaagagcctgctgccccccctgatcatccacaccgccgccacccccatgagcctgcccaagagcaccagcaccggcctgggcgaggccctgggccccgccagcagaagaaccagcagcagcggcagcgccgagcccggcgccgcccacgagatgaagagcccccccagcgccagaagcagcccccacagcccctggagcgccgccagcagctggaccagcagaagaagcagcagaaacagcctgggcagagcccccagcctgaagagaagaagccccagcggcgagagaagaagcctgctgagcggcgagggccaggagagccaggacgaggaggagagcagcgaggaggagagagccagccccgccggcagcgaccacagacacagaggcagcctggagagagaggccaagagcagcttcgacctgcccgacaccctgcaggtgcccggcctgcacagaaccgccagcggcagaggcagcgccagcgagcaccaggactgcaacggcaagagcgccagcggcagactggccagagccctgagacccgacgacccccccctggacggcgacgacgccgacgacgagggcaacctgagcaagggcgagagagtgagagcctggatcagagccagactgcccgcctgctgcctggagagagacagctggagcgcctacatcttccccccccagagcagattcagactgctgtgccacagaatcatcacccacaagatgttcgaccacgtggtgctggtgatcatcttcctgaactgcatcaccatcgccatggagagacccaagatcgacccccacagcgccgagagaatcttcctgaccctgagcaactacatcttcaccgccgtgttcctggccgagatgaccgtgaaggtggtggccctgggctggtgcttcggcgagcaggcctacctgagaagcagctggaacgtgctggacggcctgctggtgctgatcagcgtgatcgacatcctggtgagcatggtgagcgacagcggcaccaagatcctgggcatgctgagagtgctgagactgctgagaaccctgagacccctgagagtgatcagcagagcccagggcctgaagctggtggtggagaccctgatgagcagcctgaagcccatcggcaacatcgtggtgatctgctgcgccttcttcatcatcttcggcatcctgggcgtgcagctgttcaagggcaagttcttcgtgtgccagggcgaggacaccagaaacatcaccaacaagagcgactgcgccgaggccagctacagatgggtgagacacaagtacaacttcgacaacctgggccaggccctgatgagcctgttcgtgctggccagcaaggacggctgggtggacatcatgtacgacggcctggacgccgtgggcgtggaccagcagcccatcatgaaccacaacccctggatgctgctgtacttcatcagcttcctgctgatcgtggccttcttcgtgctgaacatgttcgtgggcgtggtggtggagaacttccacaagtgcagacagcaccaggaggaggaggaggccagaagaagagaggagaagagactgagaagactggagaagaagagaagaaaggcccagtgcaagccctactacagcgactacagcagattcagactgctggtgcaccacctgtgcaccagccactacctggacctgttcatcaccggcgtgatcggcctgaacgtggtgaccatggccatggagcactaccagcagccccagatcctggacgaggccctgaagatctgcaactacatcttcaccgtgatcttcgtgctggagagcgtgttcaagctggtggccttcggcttcagaagattcttccaggacagatggaaccagctggacctggccatcgtgctgctgagcatcatgggcatcaccctggaggagatcgaggtgaacgccagcctgcccatcaaccccaccatcatcagaatcatgagagtgctgagaatcgccagagtgctgaagctgctgaagatggccgtgggcatgagagccctgctggacaccgtgatgcaggccctgccccaggtgggcaacctgggcctgctgttcatgctgctgttcttcatcttcgccgccctgggcgtggagctgttcggcgacctggagtgcgacgagacccacccctgcgagggcctgggcagacacgccaccttcagaaacttcggcatggccttcctgaccctgttcagagtgagcaccggcgacaactggaacggcatcatgaaggacaccctgagagactgcgaccaggagagcacctgctacaacaccgtgatcagccccatctacttcgtgagcttcgtgctgaccgcccagttcgtgctggtgaacgtggtgatcgccgtgctgatgaagcacctggaggagagcaacaaggaggccaaggaggaggccgagctggaggccgagctggagctggagatgaagaccctgagcccccagccccacagccccctgggcagccccttcctgtggcccggcgtggagggccccgacagccccgacagccccaagcccggcgccctgcaccccgccgcccacgccagaagcgccagccacttcagcctggagcaccccaccatgcagccccaccccaccgagctgcccggccccgacctgctgaccgtgagaaagagcggcgtgagcagaacccacagcctgcccaacgacagctacatgtgcagacacggcagcaccgccgagggccccctgggccacagaggctggggcctgcccaaggcccagagcggcagcgtgctgagcgtgcacagccagcccgccgacaccagctacatcctgcagctgcccaaggacgccccccacctgctgcagccccacagcgcccccacctggggcaccatccccaagctgcccccccccggcagaagccccctggcccagagacccctgagaagacaggccgccatcagaaccgacagcctggacgtgcagggcctgggcagcagagaggacctgctggccgaggtgagcggccccagcccccccctggccagagcctacagcttctggggccagagcagcacccaggcccagcagcacagcagaagccacagcaagatcagcaagcacatgaccccccccgccccctgccccggccccgagcccaactggggcaagggcccccccgagaccagaagcagcctggagctggacaccgagctgagctggatcagcggcgacctgctgccccccggcggccaggaggagccccccagccccagagacctgaagaagtgctacagcgtggaggcccagagctgccagagaagacccaccagctggctggacgagcagagaagacacagcatcgccgtgagctgcctggacagcggcagccagccccacctgggcaccgaccccagcaacctgggcggccagcccctgggcggccccggcagcagacccaagaagaagctgagcccccccagcatcaccatcgacccccccgagagccagggccccagaaccccccccagccccggcatctgcctgagaagaagagcccccagcagcgacagcaaggaccccctggccagcggcccccccgacagcatggccgccagccccagccccaagaaggacgtgctgagcctgagcggcctgagcagcgaccccgccgacctggacccctag

SEQ ID NO: 259772 - DNA, 5208 bp, Artificial Sequence
  derived and/or modified sequence
atggacgaggaggaggacggcgccggcgccgaggagagcggccagcccagaagcttcatgagactgaacgacctgagcggcgccggcggcagacccggccccggcagcgccgagaaggaccccggcagcgccgacagcgaggccgagggcctgccctaccccgccctggcccccgtggtgttcttctacctgagccaggacagcagacccagaagctggtgcctgagaaccgtgtgcaacccctggttcgagagaatcagcatgctggtgatcctgctgaactgcgtgaccctgggcatgttcagaccctgcgaggacatcgcctgcgacagccagagatgcagaatcctgcaggccttcgacgacttcatcttcgccttcttcgccgtggagatggtggtgaagatggtggccctgggcatcttcggcaagaagtgctacctgggcgacacctggaacagactggacttcttcatcgtgatcgccggcatgctggagtacagcctggacctgcagaacgtgagcttcagcgccgtgagaaccgtgagagtgctgagacccctgagagccatcaacagagtgcccagcatgagaatcctggtgaccctgctgctggacaccctgcccatgctgggcaacgtgctgctgctgtgcttcttcgtgttcttcatcttcggcatcgtgggcgtgcagctgtgggccggcctgctgagaaacagatgcttcctgcccgagaacttcagcctgcccctgagcgtggacctggagagatactaccagaccgagaacgaggacgagagccccttcatctgcagccagcccagagagaacggcatgagaagctgcagaagcgtgcccaccctgagaggcgacggcggcggcggccccccctgcggcctggactacgaggcctacaacagcagcagcaacaccacctgcgtgaactggaaccagtactacaccaactgcagcgccggcgagcacaaccccttcaagggcgccatcaacttcgacaacatcggctacgcctggatcgccatcttccaggtgatcaccctggagggctgggtggacatcatgtacttcgtgatggacgcccacagcttctacaacttcatctacttcatcctgctgatcatcgtgggcagcttcttcatgatcaacctgtgcctggtggtgatcgccacccagttcagcgagaccaagcagagagagagccagctgatgagagagcagagagtgagattcctgagcaacgccagcaccctggccagcttcagcgagcccggcagctgctacgaggagctgctgaagtacctggtgtacatcctgagaaaggccgccagaagactggcccaggtgagcagagccgccggcgtgagagtgggcctgctgagcagccccgcccccctgggcggccaggagacccagcccagcagcagctgcagcagaagccacagaagactgagcgtgcaccacctggtgcaccaccaccaccaccaccaccaccactaccacctgggcaacggcaccctgagagcccccagagccagccccgagatccaggacagagacgccaacggcagcagaagactgatgctgcccccccccagcacccccgccctgagcggcgccccccccggcggcgccgagagcgtgcacagcttctaccacgccgactgccacctggagcccgtgagatgccaggcccccccccccagaagccccagcgaggccagcggcagaaccgtgggcagcggcaaggtgtaccccaccgtgcacaccagccccccccccgagaccctgaaggagaaggccctggtggaggtggccgccagcagcggcccccccaccctgaccagcctgaacatcccccccggcccctacagcagcatgcacaagctgctggagacccagagcaccggcgcctgccagagcagctgcaagatcagcagcccctgcctgaaggccgacagcggcgcctgcggccccgacagctgcccctactgcgccagagccggcgccggcgaggtggagctggccgacagagagatgcccgacagcgacagcgaggccgtgtacgagttcacccaggacgcccagcacagcgacctgagagacccccacagcagaagacagagaagcctgggccccgacgccgagcccagcagcgtgctggccttctggagactgatctgcgacaccttcagaaagatcgtggacagcaagtacttcggcagaggcatcatgatcgccatcctggtgaacaccctgagcatgggcatcgagtaccacgagcagcccgaggagctgaccaacgccctggagatcagcaacatcgtgttcaccagcctgttcgccctggagatgctgctgaagctgctggtgtacggccccttcggctacatcaagaacccctacaacatcttcgacggcgtgatcgtggtgatcagcgtgtgggagatcgtgggccagcagggcggcggcctgagcgtgctgagaaccttcagactgatgagagtgctgaagctggtgagattcctgcccgccctgcagagacagctggtggtgctgatgaagaccatggacaacgtggccaccttctgcatgctgctgatgctgttcatcttcatcttcagcatcctgggcatgcacctgttcggctgcaagttcgccagcgagagagacggcgacaccctgcccgacagaaagaacttcgacagcctgctgtgggccatcgtgaccgtgttccagatcctgacccaggaggactggaacaaggtgctgtacaacggcatggccagcaccagcagctgggccgccctgtacttcatcgccctgatgaccttcggcaactacgtgctgttcaacctgctggtggccatcctggtggagggcttccaggccgagggcgacgccaacaagagcgagagcgagcccgacttcttcagccccagcctggacggcgacggcgacagaaagaagtgcctggccctggtgagcctgggcgagcaccccgagctgagaaagagcctgctgccccccctgatcatccacaccgccgccacccccatgagcctgcccaagagcaccagcaccggcctgggcgaggccctgggccccgccagcagaagaaccagcagcagcggcagcgccgagcccggcgccgcccacgagatgaagagcccccccagcgccagaagcagcccccacagcccctggagcgccgccagcagctggaccagcagaagaagcagcagaaacagcctgggcagagcccccagcctgaagagaagaagccccagcggcgagagaagaagcctgctgagcggcgagggccaggagagccaggacgaggaggagagcagcgaggaggagagagccagccccgccggcagcgaccacagacacagaggcagcctggagagagaggccaagagcagcttcgacctgcccgacaccctgcaggtgcccggcctgcacagaaccgccagcggcagaggcagcgccagcgagcaccaggactgcaacggcaagagcgccagcggcagactggccagagccctgagacccgacgacccccccctggacggcgacgacgccgacgacgagggcaacctgagcaagggcgagagagtgagagcctggatcagagccagactgcccgcctgctgcctggagagagacagctggagcgcctacatcttccccccccagagcagattcagactgctgtgccacagaatcatcacccacaagatgttcgaccacgtggtgctggtgatcatcttcctgaactgcatcaccatcgccatggagagacccaagatcgacccccacagcgccgagagaatcttcctgaccctgagcaactacatcttcaccgccgtgttcctggccgagatgaccgtgaaggtggtggccctgggctggtgcttcggcgagcaggcctacctgagaagcagctggaacgtgctggacggcctgctggtgctgatcagcgtgatcgacatcctggtgagcatggtgagcgacagcggcaccaagatcctgggcatgctgagagtgctgagactgctgagaaccctgagacccctgagagtgatcagcagagcccagggcctgaagctggtggtggagaccctgatgagcagcctgaagcccatcggcaacatcgtggtgatctgctgcgccttcttcatcatcttcggcatcctgggcgtgcagctgttcaagggcaagttcttcgtgtgccagggcgaggacaccagaaacatcaccaacaagagcgactgcgccgaggccagctacagatgggtgagacacaagtacaacttcgacaacctgggccaggccctgatgagcctgttcgtgctggccagcaaggacggctgggtggacatcatgtacgacggcctggacgccgtgggcgtggaccagcagcccatcatgaaccacaacccctggatgctgctgtacttcatcagcttcctgctgatcgtggccttcttcgtgctgaacatgttcgtgggcgtggtggtggagaacttccacaagtgcagacagcaccaggaggaggaggaggccagaagaagagaggagaagagactgagaagactggagaagaagagaagaaaggcccagtgcaagccctactacagcgactacagcagattcagactgctggtgcaccacctgtgcaccagccactacctggacctgttcatcaccggcgtgatcggcctgaacgtggtgaccatggccatggagcactaccagcagccccagatcctggacgaggccctgaagatctgcaactacatcttcaccgtgatcttcgtgctggagagcgtgttcaagctggtggccttcggcttcagaagattcttccaggacagatggaaccagctggacctggccatcgtgctgctgagcatcatgggcatcaccctggaggagatcgaggtgaacgccagcctgcccatcaaccccaccatcatcagaatcatgagagtgctgagaatcgccagagtgctgaagctgctgaagatggccgtgggcatgagagccctgctggacaccgtgatgcaggccctgccccagctgtgggcctggagcagcctggagacctggagcgtgaccagacacacccccgtgagagcctgggccgtgatgccccccttcggcaccctggcctggcccagctag

SEQ ID NO: 259773 - DNA, 6732 bp, Artificial Sequence
  derived and/or modified sequence
atggacgaagaggaagacggggcaggggccgaggaatccgggcagcccaggagtttcatgaggctgaacgatctgagcggggcagggggacggcctggcccgggatctgccgagaaagatcccggctccgctgattcggaggctgagggattgccttaccccgcactggctcctgtcgtgtttttttacctgtcccaggactcccgtccacggtcatggtgtctacgaactgtgtgcaacccttggtttgagcggatcagcatgcttgtaatccttctgaactgtgtgaccttgggcatgttccgtccctgcgaagacatcgcctgcgattctcagcgatgtcgtatattacaagcgttcgacgactttatttttgctttctttgccgtggagatggtagtgaaaatggtcgctctcgggatcttcggcaaaaagtgttatctgggggacacatggaatcgactggacttcttcatcgtgatcgccggcatgctcgaatattccctggatctccagaacgtcagtttcagcgccgtcagaaccgtgcgggtccttcgtccccttcgcgcaattaaccgtgtgccctctatgcgaatcctcgtcacactgttactggataccctgcctatgctcggcaatgtccttttactgtgcttcttcgtgttttttattttcgggatcgtgggggtccaactctgggctgggctccttcggaataggtgctttttgccagagaacttttccttaccactgtctgtggacctggagcgttactatcagaccgaaaatgaggacgagtcccccttcatatgcagccagccaagagaaaacgggatgagatcttgccgctctgtccctacacttcggggcgacggtgggggagggccgccttgtggcttggattacgaggcctacaatagctcttccaataccacctgcgtaaattggaaccagtattacacaaattgtagcgctggggagcacaaccccttcaagggtgcgattaacttcgacaacatcggttacgcctggattgcgatattccaggtcatcaccttggaaggatgggtcgatattatgtattttgtgatggacgctcacagtttttacaattttatttactttattctgttgattattgtggggtcctttttcatgatcaatctttgcctggtggtcatcgcaactcagttcagtgagaccaagcagcgtgagtcccaactcatgagggaacagagggtgcgttttctctcaaatgcgagcacactcgcatctttttctgagccaggttcttgttacgaggagcttttaaaatatttagtgtatatcttgaggaaggccgcccggaggctggcacaagtgtccagggctgccggagtaagagtgggcctgttgtccagcccagcgccactgggtggtcaggagacacagccttccagctcctgctcaaggagccacaggcgactgtccgtgcatcatctcgtgcaccaccatcatcatcaccatcatcattaccatctcggaaatgggaccttacgagccccaagggcctcacctgaaatccaagatagagacgccaatggttcaagaagactgatgctgccacctccttcaaccccggccctttcaggcgccccgccaggcggggccgaaagcgtccactcgttttatcatgctgattgccacctggaacccgtgagatgtcaagcacctcccccaaggagtccatctgaagcttccggccgcactgtggggtcagggaaggtgtacccaacagtgcatacgtctccccctcccgagaccttaaaagagaaagcgctggtggaggtggcagcgtcctccggccctccaacactgacaagcctcaatatccctcctggcccatacagcagcatgcataagctgctagaaacacagtccaccggcgcttgtcagagcagctgtaagattagttctccctgccttaaggcagactcgggggcatgtggacccgactcatgtccttactgtgcccgggcaggggctggagaagtcgaattggcagatcgagagatgcctgactcggattccgaagcggtgtatgagttcacccaggacgcccagcactctgatctaagggaccctcattctagacgccagaggtcactgggcccggatgctgagccttcaagcgtgctggcattttggaggttgatctgtgacacctttcggaaaatcgttgattccaagtactttggacgagggatcatgatcgccattctggtgaacaccctgagcatgggtatcgaataccacgaacagccagaagagctgaccaatgccctggaaatctccaacattgtattcacctctttgttcgcactagagatgctactgaaactgctggtgtacggaccgtttggctatataaaaaacccatataatattttcgatggggtcatcgtcgtcatcagcgtgtgggagattgtgggccaacagggcgggggcctcagcgtccttagaaccttcaggcttatgagagttctcaagttggtgcgctttctacccgctctgcagagacagctggtagtcctgatgaagacaatggacaatgtggcaactttttgcatgctgctgatgctgtttatcttcatattctctatcctcggcatgcatctttttggctgtaaattcgccagcgaaagggatggtgacactctccctgatcggaaaaatttcgattcacttctatgggccatcgttacagtgttccaaatacttacacaggaagattggaacaaagttctgtacaacggaatggccagcacctcttcttgggctgcactgtatttcattgcactcatgacctttggtaattacgtcctctttaacctgttggtggcaatcctggtagaggggtttcaggctgaaggcgacgcaaataagagcgaaagtgaaccagacttctttagccccagcctggacggcgacggcgataggaagaaatgcctggcactagtttcacttggagaacatccagaacttaggaagtccctactgccacccctcatcattcatacggcagcaacaccgatgtccctcccaaagagcacttctacaggactgggcgaggcgctcggaccagcctctcgcaggacctccagctcagggtccgcagaacccggagccgcccacgagatgaaaagccctccgtccgcccggagttcaccccatagcccttggtccgctgccagctcctggacctctagacgcagcagcagaaattccctgggacgtgctcctagtttgaagaggagaagtccatctggtgaaaggagatcgctgttgtccggggaaggtcaggagagccaggatgaagaagagtcaagcgaagaagaacgcgcctcccctgctgggtcggaccatagacaccggggaagtctggagcgagaggcaaagtcttcattcgacttgcccgacacactccaggtgcctgggctgcaccgcaccgcctcagggagaggtagcgcgagcgagcatcaggattgtaacggcaaaagtgctagcggcagactggcgcgcgccctgcgacccgacgatcctcctcttgatggagacgacgcggacgacgaaggtaacctcagtaaaggtgaaagggtcagggcttggattcgagcgaggctccctgcctgctgtctggagagagactcctggtccgcctatatctttccaccccaatcacggttccgtctgctgtgccataggattatcactcataagatgtttgaccacgtggtgctggtgatcatctttctgaattgcatcacgatagctatggaaagacctaagattgacccccatagtgccgagagaatttttctgacactgagcaactacatatttacagccgtgttcctggccgaaatgacagtgaaggtggtggccttgggctggtgctttggcgagcaagcctaccttcgctcttcctggaatgtgctggatgggctcctcgtgctcatctcagtgattgacattttggtctctatggtttctgacagtggtacaaaaatactgggaatgcttcgggtgcttagactgctgcgaacgctgagaccgctccgggtgatcagccgggcgcagggactcaaactggtcgtggaaaccctgatgagctcccttaagcccatcggaaatatcgtggtgatctgctgcgccttcttcatcattttcggaatcctcggcgttcagctgtttaaaggaaagttcttcgtctgccagggggaggatactagaaacattaccaataaaagtgactgcgccgaggcttcgtacaggtgggtgcgccacaagtataacttcgataacctgggccaggcgctgatgtccctatttgtacttgcttctaaggacggctgggtagacattatgtacgacggccttgacgccgttggtgttgatcaacagcccattatgaaccacaacccatggatgctattatacttcatctcgttcctgctcattgtcgctttcttcgtcctcaatatgttcgttggcgtcgtggttgaaaatttccacaagtgcagacagcaccaggaggaagaagaggcacggagacgggaggaaaaaaggttacgaaggttagaaaaaaaacggagaaaggctcagtgcaagccttactactctgactattctagattccggctcctagtccatcatttgtgtacttcccattatttagacctgtttattactggtgttatcggtctgaacgttgtcacaatggctatggagcactaccagcaaccacagatcctggacgaggcacttaagatctgtaactatatttttactgtgatcttcgtgctagagagtgtgttcaaactcgttgccttcggattccggcgctttttccaagataggtggaaccaactggacctggcaatcgtgctgctgagtattatgggcattacactggaagagatcgaagtgaatgccagcttgccaatcaatccaacaatcattcgaattatgcgtgtgctgagaattgctcgggtgctcaagctgctcaagatggctgtggggatgcgggccctgctcgacacagtgatgcaggcactgccgcaggtgggcaatctgggcctgctgtttatgctgctgttcttcatattcgccgccctgggtgtggagctgtttggcgacctagagtgtgatgagactcatccctgtgaaggcttgggtcggcacgctacattccggaatttcgggatggccttcttgactctgtttcgggtgtctactggggataactggaatggaatcatgaaggacacactccgcgattgtgatcaggaaagcacatgctacaacaccgtaatatccccaatatatttcgtttcattcgtgctaaccgcccagtttgtcctggtgaatgtggttattgctgtgttgatgaagcatctggaggaatccaacaaagaggcaaaggaggaagcagagcttgaagctgaattggaactggagatgaaaaccctctctccacagccccatagccccctgggaagcccatttctctggccgggcgtcgaggggcctgattcccccgattcccctaagcccggtgctctgcacccagcggctcacgcacgatctgctagtcatttttctctggagcatccaaccatgcaacctcacccaaccgagctgcccggcccagatttgctcaccgtgcggaagtccggagtctcacggactcatagcttaccaaatgactcctacatgtgtcggcacggctcgaccgctgagggccctctgggacacagggggtggggtctcccaaaagctcaatccgggtctgtcctgagcgtccatagccagccagctgacacatcctatatccttcagctcccaaaggacgcaccccacttgctgcagccccatagcgcccccacttggggaacaatccccaagctcccacctcctggccggtcccctctggcgcagaggcccttacgacggcaggcagccatacgcaccgacagcctggatgtgcagggcttggggagtagagaagacctgcttgcagaagtttctgggcccagtccacctctagcacgggcctactcattttggggccagagcagcacacaggctcaacagcacagccggtcccattctaaaatttccaaacatatgacaccccccgctccgtgccctggtccagagccgaactggggaaaaggcccaccggaaaccaggtcctcgctcgagcttgataccgagctgagctggatcagtggagatctgcttccccccggtggccaagaggagccaccctcacccagggacctgaagaagtgctacagcgtcgaagctcaaagttgccagcgacgaccaacaagttggcttgacgagcagcgccgccacagcatcgctgtcagttgtctagattctggttcccaaccccatctggggaccgatcctagtaacctgggcggccagccccttggaggacccggcagcaggccaaagaagaaactgtcccctccaagcatcacaatcgatccccccgagtctcagggccccaggacaccgccctcaccaggcatctgtcttagacggagagcaccgagttccgattcaaaggatcccctcgcgtctgggccccctgattccatggccgcctctccatcccccaagaaagacgtcctgtccctctcagggttaagttctgacccagccgacctggacccttag

SEQ ID NO: 259774 - DNA, 5208 bp, Artificial Sequence
  derived and/or modified sequence
atggatgaggaagaggatggcgctggagctgaggagagcggccagcctcgctcctttatgcgtctaaatgacctgtccggcgctggcggcagacctggacctggcagcgcggagaaagatcccggttccgccgacagcgaggccgaaggcttgccatacccagccctggcccccgtcgtctttttctatctgagccaggacagtcgaccgcgctcctggtgtttgcgcaccgtatgcaatccttggtttgaacggataagtatgcttgtcatcttactcaattgcgttaccctgggcatgttcaggccctgcgaggacatagcatgcgactctcagagatgccgcatactgcaggctttcgatgactttattttcgctttttttgcagtggagatggtggtgaagatggtggccctgggaatcttcggaaaaaagtgttatctgggggacacttggaaccgccttgatttttttatcgttatagcaggaatgctagagtatagcctggacctgcagaacgtctccttttcagcggtgcggaccgttcgggttctaaggccactacgcgcaatcaaccgggtgcctagcatgcgcatcctggtgaccttactgctggataccctgccgatgctaggtaacgttttgctgctatgtttcttcgtttttttcatttttggaatcgtgggagttcagctatgggcaggacttcttagaaataggtgcttcttgccagagaacttttccctgccattgtccgtggacctggaaagatattatcaaactgaaaatgaagatgagagtcccttcatctgcagtcagcccagggaaaacggtatgcggtcatgtcggagtgtccccacgctacgtggagacggaggcggcggcccaccttgtggcttggactacgaagcttacaactcctctagtaatacgacctgtgtgaattggaatcaatactataccaattgttcagctggggagcacaacccgtttaagggcgcgatcaacttcgataatatcggatacgcgtggatcgctatctttcaagtgatcactcttgaggggtgggtcgacattatgtactttgtgatggacgcccattctttctacaattttatatatttcatactgttaatcatagtgggatcattcttcatgattaacctatgcttggtcgttatcgctactcagtttagcgagaccaaacaacgcgagtcacagctaatgagagaacagagggttcgatttctctccaacgcctcaactctggcctctttctccgagccaggaagttgttacgaagagctgctgaagtatctggtttatatcctgaggaaggcggcccgaaggctcgcacaagtgagcagagctgccggagtcagagtgggattactgtcaagccctgcaccgctcggcggccaagaaacccagccatcctcctcctgctcccggtcacaccgtcgtctgagcgtccatcacttagtgcatcaccaccaccaccatcatcaccactaccacttgggcaacggaaccctgagagctcctagggcaagcccagagatccaggaccgggatgccaacggcagccgcaggttaatgttgccacccccctctacacctgcgttgagtggggcacccccaggcggagccgaaagcgtgcattctttttaccacgctgactgtcatctcgaaccagtgaggtgtcaggctccccctccgcggtccccatcagaggcctctggaaggactgttgggagtggaaaagtgtatccaacggttcatacatcccccccccccgaaaccctgaaagaaaaggctctggtggaagtggctgcgtcctctgggccgcctactctgacatctctgaatatcccccctgggccatattcgagtatgcataagctgctcgaaactcagagcaccggagcgtgtcaatcttcgtgtaagatcagctccccttgtctgaaggccgattccggggcatgtggcccggattcctgcccatactgcgctagggcaggcgccggcgaagttgaactcgcggatcgcgaaatgccagactccgattctgaggcagtgtacgagttcacccaagacgcccaacatagcgacctacgggaccctcattctagaaggcaacgctcgctgggacccgatgctgagccttccagtgttctagccttttggcgccttatttgcgatacgtttcgcaagattgtggattctaagtattttggtcgaggcattatgatcgccatcctggttaataccctgagtatgggtatcgagtatcacgagcagcccgaggaactcaccaatgcgctggagattagcaatatagtctttacatctttgttcgcactggagatgttgctgaaactcctcgtctacgggccattcggttacatcaagaacccctataatatctttgatggcgtgattgtggtgattagcgtgtgggagattgtcggccagcaggggggaggtctgtccgtcctgaggacattccggctgatgagagtcctgaaactggtgcggtttctgcccgccttgcagcgccagcttgtagtcctgatgaaaacaatggacaatgtggcgaccttctgtatgttgctcatgttgttcatatttattttttccattctgggcatgcacttgtttggctgcaagtttgcctcagagagggacggggatacattacccgaccgaaaaaacttcgactcacttctgtgggcgatcgtgacggttttccagattttgacgcaggaggactggaataaggtgctgtataacggaatggcatctacctcttcatgggcagcgctgtattttattgccctgatgacctttgggaattatgtcctattcaacctgctcgtggcgatcctggtggagggatttcaggccgaaggcgatgcaaacaagagcgagtccgaaccggactttttcagccccagtttagatggggatggagatagaaaaaaatgcttggccctcgttagtctcggcgaacatccagagctgagaaagagcctgctcccaccactgataatacatactgcggctactcccatgtcccttccaaaatcaacatccactggcctgggtgaggcactgggcccagcttctcgccgaaccagtagcagtggctccgcggagcccggagccgctcacgaaatgaaaagccctccatccgccaggtccagccctcactcaccgtggagcgccgcctcatcttggactagcaggcgatcctcacgtaacagcctgggtcgggctccatccttgaagagacgctctccaagtggtgagagacgatcgctactgagtggggaaggccaagaaagtcaggatgaggaggagtctagcgaggaggagagggcttcgccggctggctccgaccacaggcaccgaggtagcttagaacgcgaggccaaatcttcttttgacctgcctgataccctgcaggtgccaggcttacatcggaccgcctccggtcgcggcagtgccagtgagcaccaggattgcaacggaaaatctgcctccggccgtctggctcgggcgctgcgtcccgatgacccccccctggacggggacgatgcagatgacgaaggcaatctgtccaagggggagagagtgagggcctggattagagcccggttgcccgcgtgctgcttggagagggacagttggtccgcatacattttccctccacagagcaggtttaggctgctgtgccaccgaattataacccataagatgtttgatcacgtggtgctcgtgattatttttttgaactgcattactatcgctatggaacggcctaagattgatccccacagcgccgagcgcatcttcctgaccctatctaattatattttcactgcagtgttcctggccgagatgactgtgaaggtagtggccctcggctggtgttttggcgagcaggcttatttacgctcctcttggaatgtgctggacggcctgctcgttctcatcagtgtgatagacattctggtttccatggtgagcgatagtgggaccaaaatcctcgggatgctcagggttttgaggctactgcggacattgcgccccctccgagttatctctagagctcagggcctcaaactggtcgtcgagactctgatgtcttccctaaagccgattggtaatatcgtggttatttgctgcgctttctttattatattcggcatcctgggagtgcaactcttcaagggcaaattttttgtttgccaaggtgaggatacccgtaacatcacaaataagtcagactgtgccgaagccagctaccgttgggtgagacacaagtataactttgacaacctgggccaggcgctgatgtcactgttcgtgctggcaagcaaagatggctgggtggacataatgtacgacgggctggacgcagtgggtgtggatcaacagccaataatgaaccataacccctggatgcttttgtattttatctctttcttgctgatcgtggcattcttcgtgctgaatatgtttgtgggcgtggtggtggagaattttcacaagtgtcgccagcatcaagaggaggaagaagctaggcgccgggaggagaagcggcttcggagactcgagaagaaacgacggaaggcacaatgcaagccctactattctgactatagccggtttaggctcttagtccaccatctgtgtacctctcactatcttgacctgtttatcacgggagttatcggcctgaacgtagtgacaatggcgatggagcattaccagcagccccagatactagatgaggccctgaagatctgcaattacatctttacagttatctttgttctggaatccgtctttaagctggttgcatttggatttaggcggttttttcaggatagatggaatcagctggatttagccatcgtgctgctgtcaattatgggcatcacactggaggagatagaggttaacgcttccctcccgattaaccccaccattatcaggatcatgagggtgttgcgcatagcaagagtgctgaagctgttgaaaatggccgtgggcatgagagctcttttggacacggtgatgcaggccctgcctcagctgtgggcctggtcatcgctggagacgtggagtgttacccggcacacccctgtgcgggcttgggcagtaatgccaccattcgggacattagcctggccttcatag

SEQ ID NO: 259775 - DNA, 6732 bp, Artificial Sequence
  derived and/or modified sequence
atggatgaggaggaggatggagctggagctgaggagagcggccagcccaggagcttcatgaggctgaatgacctgagcggggccggcggccggcccggccctggcagcgctgagaaggaccccggcagcgctgacagcgaggccgagggcctgccctacccagccctggcccctgtggtgttcttctacctgagccaggacagccggcccaggtcctggtgcctgaggacagtgtgcaacccctggtttgagcgcatctccatgctggtgatcctgctgaactgtgtgaccctgggcatgttccggccctgtgaagatattgcctgtgacagccagcgctgccgcatcctgcaggcctttgatgacttcatctttgccttctttgctgtggagatggtggtgaagatggtggccctgggcatctttgggaagaagtgctacctgggggacacctggaaccggctggacttcttcatcgtgattgctggcatgctggagtacagcctggacctgcagaatgtgtccttctctgctgtgaggacagtgcgggtgctgcggcccctgcgggccatcaacagagtgcccagcatgaggatcctggtgaccctgctgctggacaccctgcccatgctgggcaatgtgctgctgctgtgcttctttgtgttcttcatctttggaattgtgggcgtgcagctgtgggccggcctgctgaggaaccgctgcttcctgcctgagaacttcagcctgcccctgtctgtggacctggagcgctactaccagacagaaaatgaagatgagagccccttcatctgcagccagccccgggagaatggcatgaggagctgccgctctgtgcccaccctgcggggagatggcggcggcggccccccctgtggcctggactatgaggcctacaacagcagcagcaacaccacctgtgtgaactggaaccagtactacaccaactgcagcgctggggagcacaaccccttcaagggggccatcaactttgacaacatcggctacgcctggatcgccatcttccaggtgatcaccctggagggctgggtggacatcatgtactttgtgatggatgcccacagcttctacaacttcatctacttcatcctgctgatcatcgtgggcagcttcttcatgatcaacctgtgcctggtggtgattgccacccagttcagcgagaccaagcagcgggagagccagctgatgagggagcagagggtgcgcttcctgagcaatgccagcaccctggccagcttcagcgagcccggcagctgctatgaggagctgctgaagtacctggtgtacatcctgaggaaggccgcccggcggctggcccaggtgtccagagctgctggggtgcgggtgggcctgctgagcagccctgcccccctgggcggccaggagacccagcccagcagcagctgcagccgcagccaccggcggctgtctgtgcaccacctggtgcaccaccaccaccaccaccaccaccactaccacctgggcaatggcaccctgcgggccccccgggccagccctgagatccaggacagagatgccaacggcagccggcggctgatgctgcccccacccagcaccccagccctgagcggggcccctcctggaggagctgagagcgtgcacagcttctaccacgccgactgccacctggagcctgtgcgctgccaggcccccccacccaggagccccagcgaggccagcggccgcacagtgggcagcggcaaggtgtaccccaccgtgcacaccagccccccacctgagaccctgaaggagaaggccctggtggaggtggccgccagcagcggcccccccaccctgaccagcctgaacatccccccaggcccctacagctccatgcacaagctgctggagacccagagcactggagcctgccagagcagctgcaagatcagcagcccctgcctgaaggctgacagcggggcctgtggccctgacagctgcccctactgtgcccgggccggggccggggaggtggagctggccgaccgggagatgccagacagcgacagcgaggccgtgtatgagttcacccaggatgcccagcacagcgacctgcgggacccccacagccggcggcagaggagcctgggcccagatgctgagcccagctctgtgctggccttctggaggctcatctgtgacaccttcaggaagatcgtggacagcaagtacttcggccggggcatcatgattgccatcctggtgaacaccctgtccatgggcatcgagtaccacgagcagcctgaggagctgaccaatgccctggagatcagcaacatcgtgttcaccagcctgtttgccctggagatgctgctgaagctgctggtgtatggccccttcggctacatcaagaacccctacaacatctttgatggagtcatcgtggtgatctctgtgtgggagatcgtgggccagcagggcggcggcctgtctgtgctgcggaccttccggctgatgagggtgctgaagctggtgcgcttcctgcctgccctgcagaggcagctggtggtgctgatgaagaccatggacaacgtggccaccttctgcatgctgctgatgctgttcatcttcatcttcagcatcctgggcatgcacctgtttggctgcaagtttgccagcgagagagatggagacaccctgcctgacaggaagaactttgacagcctgctgtgggccatcgtgacagtgttccagatcctgacccaggaggactggaacaaggtgctgtacaacggcatggccagcaccagctcctgggccgccctgtacttcatcgccctgatgaccttcggcaactacgtgctcttcaacctgctggtggccatcctggtggagggcttccaggccgagggagatgccaacaagtctgagagcgagccagacttcttcagccccagcctggatggagatggagacaggaagaagtgcctggccctggtgtccctgggggagcaccctgagctgaggaagagcctgctgcccccactcatcatccacacagctgccacccccatgagcctgcccaagagcaccagcacaggcctgggggaggccctgggccctgccagcaggaggaccagcagcagcggcagcgctgagcccggggccgcccacgagatgaagagccccccatctgcccggagcagcccccacagcccctggagcgctgccagctcctggaccagcagaagaagcagcaggaacagcctgggccgggcccccagcctgaagaggaggagccccagcggggagaggaggagcctgctgagcggggagggccaggagagccaggatgaggaggagagcagcgaggaggagcgggccagccctgctggcagtgaccaccgccaccggggcagcctggagcgggaggccaagagcagctttgacctgcctgacaccctgcaggtgcccggcctgcacaggacagccagcggccggggcagcgccagcgagcaccaggactgcaatggcaagagcgccagcggccgcctggcccgggccctgcggccagatgacccccccctggatggagatgatgctgatgatgagggcaacctgagcaaaggagagcgggtgcgggcctggatccgggcccggctgcctgcctgctgcctggagcgggacagctggagcgcctacatcttccccccccagagccgcttccggctgctgtgccaccgcatcatcacccacaagatgtttgaccacgtggtgctggtgatcatcttcctgaactgcatcaccatcgccatggagcggcccaagattgacccccacagcgctgagcgcatcttcctgaccctgagcaactacatcttcaccgctgtgttcctggccgagatgacagtgaaggtggtggccctgggctggtgctttggagagcaggcctacctgcggagctcctggaatgtgctggatggcctgctggtgctgatcagcgtcatcgacatcctggtgtccatggtgtctgacagcggcaccaagatcctgggcatgctgcgggtgctgcggctgctgcggaccctgcggcccctgcgggtcatcagccgggcccagggcctgaagctggtggtggagaccctgatgagcagcctgaagcccatcggcaacatcgtggtgatctgctgtgccttcttcatcatcttcggcatcctgggcgtgcagctgttcaagggcaagttctttgtgtgccagggcgaggacaccaggaacatcaccaacaagagtgactgtgccgaggccagctaccgctgggtgcgccacaagtacaactttgacaacctgggccaggccctgatgagcctgtttgtgctggccagcaaggatggctgggtggacatcatgtatgatggcctggatgctgtgggcgtggaccagcagcccatcatgaaccacaacccctggatgctgctgtacttcatctccttcctgctgattgtggccttctttgtgctgaacatgtttgtgggcgtggtggtggagaacttccacaagtgccggcagcaccaggaggaggaggaggccaggagaagagaggagaagaggctgcggcggctggagaagaagaggaggaaggcccagtgcaagccctactacagcgactacagccgcttccggctgctggtgcaccacctgtgcaccagccactacctggacctcttcatcactggagtcatcggcctgaatgtggtgaccatggccatggagcactaccagcagccccagatcctggatgaggccctgaagatctgcaactacatcttcaccgtcatctttgtgctggagagcgtcttcaagctggtggccttcggcttccgccgcttcttccaggaccgctggaaccagctggacctggccatcgtgctgctgagcatcatgggcatcaccctggaggagattgaggtgaatgccagcctgcccatcaaccccaccatcatccgcatcatgagggtgctgagaattgcccgggtgctgaagctgctgaagatggctgtgggcatgagggccctgctggacacagtgatgcaggccctgccccaggtgggcaacctgggcctgctcttcatgctgctcttcttcatctttgctgccctgggcgtggagctgtttggagacctggagtgtgatgagacccacccctgtgagggcctgggcagacatgccaccttcaggaactttggcatggccttcctgaccctcttccgggtgtccactggagacaactggaatggcatcatgaaggacaccctgcgggactgtgaccaggagagcacctgctacaacacagtcatcagccccatctactttgtgtcctttgtgctgacagcccagtttgtgctggtgaatgtggtgattgctgtgctgatgaagcacctggaggagagcaacaaggaggccaaggaggaggccgagctggaggccgagctggagctggagatgaagaccctgagcccccagccccacagccccctgggcagccccttcctgtggccaggagtggagggccctgacagcccagacagccccaagccaggggccctgcaccctgctgcccacgcccggagcgccagccacttcagcctggagcaccccaccatgcagccccaccccacagagctgcccggccctgacctgctgactgtgaggaagtctggagtgtccaggacccacagcctgcccaatgacagctacatgtgccgccacggcagcacagctgagggccccctgggccaccggggctggggcctgcccaaggcccagagcggctctgtgctgtctgtgcacagccagcctgctgacaccagctacatcctgcagctgcccaaggatgccccccacctgctgcagccccacagcgcccccacctggggcaccatccccaagctgcccccacctggccgcagccccctggcccagaggcccctgcggcggcaggccgccatcagaacagacagcctggatgtgcagggcctgggcagccgggaggacctgctggccgaggtgtctggccccagcccccccctggcccgggcctacagcttctggggccagagcagcacccaggcccagcagcacagccgcagccacagcaagatcagcaagcacatgaccccaccagccccctgccccggccctgagcccaactggggcaagggccccccagagaccaggagcagcctggagctggacacagagctgtcctggatcagcggggacctgctgcccccaggcggccaggaggagccccccagcccccgggacctgaagaagtgctacagcgtggaggcccagagctgccagaggcggcccacctcctggctggatgagcagaggaggcacagcattgctgtgtcctgcctggacagcggcagccagccccacctgggcacagaccccagcaacctgggcggccagcccctgggcggccctggcagccggcccaagaagaagctgagcccccccagcatcaccattgatcctcctgagagccagggccccaggaccccacccagccctggcatctgcctgcggcggcgggcccccagcagtgacagcaaggaccccctggccagcggccccccagacagcatggccgccagccccagccccaagaaggatgtgctgagcctgagcggcctgagcagtgaccctgctgacctggacccctag

SEQ ID NO: 259776 - DNA, 5208 bp, Artificial Sequence
  derived and/or modified sequence
atggatgaggaggaggatggagctggagctgaggagagcggccagcccaggagcttcatgaggctgaatgacctgagcggggccggcggccggcccggccctggcagcgctgagaaggaccccggcagcgctgacagcgaggccgagggcctgccctacccagccctggcccctgtggtgttcttctacctgagccaggacagccggcccaggtcctggtgcctgaggacagtgtgcaacccctggtttgagcgcatctccatgctggtgatcctgctgaactgtgtgaccctgggcatgttccggccctgtgaagatattgcctgtgacagccagcgctgccgcatcctgcaggcctttgatgacttcatctttgccttctttgctgtggagatggtggtgaagatggtggccctgggcatctttgggaagaagtgctacctgggggacacctggaaccggctggacttcttcatcgtgattgctggcatgctggagtacagcctggacctgcagaatgtgtccttctctgctgtgaggacagtgcgggtgctgcggcccctgcgggccatcaacagagtgcccagcatgaggatcctggtgaccctgctgctggacaccctgcccatgctgggcaatgtgctgctgctgtgcttctttgtgttcttcatctttggaattgtgggcgtgcagctgtgggccggcctgctgaggaaccgctgcttcctgcctgagaacttcagcctgcccctgtctgtggacctggagcgctactaccagacagaaaatgaagatgagagccccttcatctgcagccagccccgggagaatggcatgaggagctgccgctctgtgcccaccctgcggggagatggcggcggcggccccccctgtggcctggactatgaggcctacaacagcagcagcaacaccacctgtgtgaactggaaccagtactacaccaactgcagcgctggggagcacaaccccttcaagggggccatcaactttgacaacatcggctacgcctggatcgccatcttccaggtgatcaccctggagggctgggtggacatcatgtactttgtgatggatgcccacagcttctacaacttcatctacttcatcctgctgatcatcgtgggcagcttcttcatgatcaacctgtgcctggtggtgattgccacccagttcagcgagaccaagcagcgggagagccagctgatgagggagcagagggtgcgcttcctgagcaatgccagcaccctggccagcttcagcgagcccggcagctgctatgaggagctgctgaagtacctggtgtacatcctgaggaaggccgcccggcggctggcccaggtgtccagagctgctggggtgcgggtgggcctgctgagcagccctgcccccctgggcggccaggagacccagcccagcagcagctgcagccgcagccaccggcggctgtctgtgcaccacctggtgcaccaccaccaccaccaccaccaccactaccacctgggcaatggcaccctgcgggccccccgggccagccctgagatccaggacagagatgccaacggcagccggcggctgatgctgcccccacccagcaccccagccctgagcggggcccctcctggaggagctgagagcgtgcacagcttctaccacgccgactgccacctggagcctgtgcgctgccaggcccccccacccaggagccccagcgaggccagcggccgcacagtgggcagcggcaaggtgtaccccaccgtgcacaccagccccccacctgagaccctgaaggagaaggccctggtggaggtggccgccagcagcggcccccccaccctgaccagcctgaacatccccccaggcccctacagctccatgcacaagctgctggagacccagagcactggagcctgccagagcagctgcaagatcagcagcccctgcctgaaggctgacagcggggcctgtggccctgacagctgcccctactgtgcccgggccggggccggggaggtggagctggccgaccgggagatgccagacagcgacagcgaggccgtgtatgagttcacccaggatgcccagcacagcgacctgcgggacccccacagccggcggcagaggagcctgggcccagatgctgagcccagctctgtgctggccttctggaggctcatctgtgacaccttcaggaagatcgtggacagcaagtacttcggccggggcatcatgattgccatcctggtgaacaccctgtccatgggcatcgagtaccacgagcagcctgaggagctgaccaatgccctggagatcagcaacatcgtgttcaccagcctgtttgccctggagatgctgctgaagctgctggtgtatggccccttcggctacatcaagaacccctacaacatctttgatggagtcatcgtggtgatctctgtgtgggagatcgtgggccagcagggcggcggcctgtctgtgctgcggaccttccggctgatgagggtgctgaagctggtgcgcttcctgcctgccctgcagaggcagctggtggtgctgatgaagaccatggacaacgtggccaccttctgcatgctgctgatgctgttcatcttcatcttcagcatcctgggcatgcacctgtttggctgcaagtttgccagcgagagagatggagacaccctgcctgacaggaagaactttgacagcctgctgtgggccatcgtgacagtgttccagatcctgacccaggaggactggaacaaggtgctgtacaacggcatggccagcaccagctcctgggccgccctgtacttcatcgccctgatgaccttcggcaactacgtgctcttcaacctgctggtggccatcctggtggagggcttccaggccgagggagatgccaacaagtctgagagcgagccagacttcttcagccccagcctggatggagatggagacaggaagaagtgcctggccctggtgtccctgggggagcaccctgagctgaggaagagcctgctgcccccactcatcatccacacagctgccacccccatgagcctgcccaagagcaccagcacaggcctgggggaggccctgggccctgccagcaggaggaccagcagcagcggcagcgctgagcccggggccgcccacgagatgaagagccccccatctgcccggagcagcccccacagcccctggagcgctgccagctcctggaccagcagaagaagcagcaggaacagcctgggccgggcccccagcctgaagaggaggagccccagcggggagaggaggagcctgctgagcggggagggccaggagagccaggatgaggaggagagcagcgaggaggagcgggccagccctgctggcagtgaccaccgccaccggggcagcctggagcgggaggccaagagcagctttgacctgcctgacaccctgcaggtgcccggcctgcacaggacagccagcggccggggcagcgccagcgagcaccaggactgcaatggcaagagcgccagcggccgcctggcccgggccctgcggccagatgacccccccctggatggagatgatgctgatgatgagggcaacctgagcaaaggagagcgggtgcgggcctggatccgggcccggctgcctgcctgctgcctggagcgggacagctggagcgcctacatcttccccccccagagccgcttccggctgctgtgccaccgcatcatcacccacaagatgtttgaccacgtggtgctggtgatcatcttcctgaactgcatcaccatcgccatggagcggcccaagattgacccccacagcgctgagcgcatcttcctgaccctgagcaactacatcttcaccgctgtgttcctggccgagatgacagtgaaggtggtggccctgggctggtgctttggagagcaggcctacctgcggagctcctggaatgtgctggatggcctgctggtgctgatcagcgtcatcgacatcctggtgtccatggtgtctgacagcggcaccaagatcctgggcatgctgcgggtgctgcggctgctgcggaccctgcggcccctgcgggtcatcagccgggcccagggcctgaagctggtggtggagaccctgatgagcagcctgaagcccatcggcaacatcgtggtgatctgctgtgccttcttcatcatcttcggcatcctgggcgtgcagctgttcaagggcaagttctttgtgtgccagggcgaggacaccaggaacatcaccaacaagagtgactgtgccgaggccagctaccgctgggtgcgccacaagtacaactttgacaacctgggccaggccctgatgagcctgtttgtgctggccagcaaggatggctgggtggacatcatgtatgatggcctggatgctgtgggcgtggaccagcagcccatcatgaaccacaacccctggatgctgctgtacttcatctccttcctgctgattgtggccttctttgtgctgaacatgtttgtgggcgtggtggtggagaacttccacaagtgccggcagcaccaggaggaggaggaggccaggagaagagaggagaagaggctgcggcggctggagaagaagaggaggaaggcccagtgcaagccctactacagcgactacagccgcttccggctgctggtgcaccacctgtgcaccagccactacctggacctcttcatcactggagtcatcggcctgaatgtggtgaccatggccatggagcactaccagcagccccagatcctggatgaggccctgaagatctgcaactacatcttcaccgtcatctttgtgctggagagcgtcttcaagctggtggccttcggcttccgccgcttcttccaggaccgctggaaccagctggacctggccatcgtgctgctgagcatcatgggcatcaccctggaggagattgaggtgaatgccagcctgcccatcaaccccaccatcatccgcatcatgagggtgctgagaattgcccgggtgctgaagctgctgaagatggctgtgggcatgagggccctgctggacacagtgatgcaggccctgccccagctgtgggcctggagcagcctggagacctggagcgtgaccaggcacacccctgtgcgggcctgggccgtgatgccacccttcggcaccctggcctggcccagctag

SEQ ID NO: 259777 - DNA, 6732 bp, Artificial Sequence
  derived and/or modified sequence
atggacgaggaggaggacggcgccggcgccgaggagagcggccagcctagatcatttatgagactcaacgacttgtctggcgccggtggtcgtccaggaccaggttctgccgagaaggaccctgggagcgccgactcagaggcagaagggctgccgtatcccgcactggcccccgttgtctttttctacctgtcgcaggactcccgcccaaggtcttggtgccttcgcaccgtctgcaacccctggttcgagaggattagcatgcttgtcatcttattaaattgcgtgactctggggatgtttaggccctgcgaagacattgcatgcgacagccagaggtgtcgcatactgcaggcattcgacgattttatcttcgcattttttgctgtggaaatggtagtgaaaatggtcgcactgggtatctttggcaaaaaatgctatctgggcgacacgtggaacaggttggacttctttatcgtaatcgccggaatgcttgagtactccttggacctacagaatgtgagcttctctgctgtacgcaccgtccgtgtgctaaggcccttgcgggcaatcaaccgcgtcccatccatgagaattctcgtcacgctcctgctcgatacacttcccatgttgggcaacgtgcttctcctgtgcttctttgtcttctttattttcgggattgtcggcgtacagttgtgggcgggtctactacgcaatcgctgcttcctgccagaaaactttagtttgcccctgtccgtggacctcgagcgttattaccaaacagaaaatgaagatgagtccccgttcatatgttcccagccgagggagaatggcatgcgctcctgtagaagcgttcccactctgaggggagacggaggcgggggccctccatgcgggctggactacgaagcctacaactcaagttctaacacaacatgcgtaaattggaatcagtattataccaattgctcagctggggaacataaccccttcaagggtgccatcaacttcgacaatatcgggtacgcttggattgcaatctttcaggttattactctggagggctgggtggacatcatgtacttcgtgatggatgcccactcattctataatttcatttattttatcttattgattatcgtcgggagtttcttcatgatcaacttgtgtctggttgtaatagctacacagttctccgaaacgaagcaaagggaaagccagctaatgcgggagcaaagagtccgatttctgtctaatgcctccacgctggcaagcttttctgaaccgggcagttgctacgaagaactgctaaagtacctcgtctatatcctcaggaaagctgctagacgtctggcccaggtcagcagggccgctggcgtgagggtgggcctgctcagctctccagccccactcggcggtcaggagacccagcctagctcttcttgctcaaggtctcatagacgcctgtcagtacaccaccttgttcaccatcaccaccatcaccaccaccattatcatctaggcaacggcactttgagagcccctagggcctctccagaaattcaggacagggacgctaatgggtctaggagactgatgctgcctcccccgtccacacctgcgctctctggcgctcccccagggggcgctgagtcggttcattctttctatcacgccgactgccacctggagcctgtccggtgccaggcaccacctccgcggtctccttctgaggcttccggccgcacggtgggaagtgggaaggtgtacccgaccgtgcacacttcccctcctccggaaactctgaaagagaaagccctggtcgaggtcgctgcttcatctggcccccccacactaaccagcttaaatatccctcccggaccttattctagcatgcataagctcctcgagactcaatcaaccggtgcctgccagagctcttgcaaaatatcatcaccatgtctcaaggcggacagtggtgcttgcggcccagattcttgtccatactgtgctcgggccggtgctggggaggtggagcttgccgacagagagatgcctgactctgacagcgaggccgtgtatgagtttacccaggacgctcaacattctgacttgcgagatccccatagtcggaggcagcgatctcttggaccagacgccgagccgagttccgtgctcgccttctggagactgatttgtgacactttcagaaaaatcgtcgacagtaagtatttcggacgtgggataatgattgccatcctcgttaataccctctcaatgggcatcgagtaccatgaacagccagaggagttgaccaatgccctggaaatatctaacatcgtttttaccagcctgttcgccctcgagatgcttcttaaactgctggtgtacggtccctttggttacattaaaaatccctataatattttcgatggggtgatcgtggtgatatcggtgtgggagattgtcgggcagcaaggaggtggtctctcagtgctgcgtacttttaggctgatgagagtgctcaagctagtgagattcctgcccgccctgcagcgccagctagtggtgttgatgaagaccatggataacgtcgcgacgttctgcatgttacttatgttatttatttttatctttagcatcctggggatgcatctcttcggctgtaaatttgcgagcgaaagagacggagacaccctgcccgacaggaaaaacttcgactctcttttatgggcaatcgtgaccgtattccagatattgacacaggaggattggaataaggttctctacaatggcatggcaagcacttcgtcatgggccgccttgtactttatcgcactgatgacgtttggcaattatgtgctgttcaacctcttagtagccatcctggttgagggtttccaagccgagggagatgctaacaaaagcgaaagcgagcccgatttcttttccccgtcactggatggagacggcgacaggaagaaatgtctggcgctggtgagcctgggggagcaccctgagctccggaaatccctactgccccctctgatcatccacacagcagccacacctatgtctctgcctaagtctacatcaactggattaggagaggctttgggacccgcgtcacgacgcaccagctcaagcggctccgcagaacctggcgccgcccatgagatgaagtctcccccttctgccagatcctccccgcattctccatggagcgctgcgtcaagctggacttcccgccgttcttctcgaaattccttaggtcgcgctcccagtcttaagaggcgttctccgtcgggcgaacggcggtccctactatctggggaggggcaggagtcgcaggacgaggaggaatcttccgaggaagagcgagcctcacccgctggatcagaccaccgacacaggggttccctggagcgtgaagcgaagtcgtcctttgaccttccagatactcttcaggtcccaggcctccaccgaaccgcttccggacggggatctgcatcagagcatcaagactgtaacggcaaatctgcctctggccggctggcccgggctctgcgtcccgatgatcctcccttggacggagacgatgccgacgacgaggggaatctcagcaagggcgagcgcgtgcgcgcttggattagggcgcgcctgcctgcttgctgcctcgaacgagattcttggtctgcctacatcttccctccccagtctcggtttcggctattgtgtcacaggatcatcactcataagatgttcgatcatgtggtactggtcatcatctttttgaattgcattacaattgctatggaacgccccaagattgacccacactctgccgaacgcattttcctgacgctctcaaattacatctttaccgctgtcttcctggctgaaatgaccgtgaaggtcgtggcattaggctggtgttttggcgagcaggcctatctccgcagcagctggaacgttcttgacggcctcctggtattgatctcagttatagatattttggtctccatggtgtccgactctggcaccaaaattctggggatgctcagagtcctccgtctgttgagaactttacgccctttgcgtgtgatttcaagagcacaagggcttaagctggtggtggagacactcatgtccagcttgaaacccataggtaatattgtggtgatctgctgtgcattttttatcatctttggcattcttggcgttcagcttttcaaggggaagttttttgtgtgtcagggcgaggatacaaggaacatcacaaacaagagtgactgcgctgaggcgtcatatagatgggtgagacataaatacaactttgataatctggggcaggctctgatgtctctattcgtgctggcctccaaagacgggtgggtggacataatgtacgatggactcgacgcggtgggcgtggatcagcaacctatcatgaatcacaacccatggatgttgctttacttcatcagcttcctcctgatcgtggcattcttcgtgctaaatatgtttgttggtgtggttgtggagaacttccacaagtgtaggcagcaccaggaagaggaggaagcccgcagacgtgaggagaagagactgaggagactggagaagaaaaggaggaaggcacagtgtaaaccctactattctgattactctcgtttccgcttgctggtgcaccacctttgcaccagtcactacctggatctgttcataactggcgtgatcggcctgaacgtcgtgaccatggcaatggagcattaccagcagccgcagatcctggacgaggccctaaagatctgtaattatattttcacggtcatcttcgtgctggagtccgtattcaaactagtggcttttgggttccggagattttttcaggataggtggaatcagctggacttagccattgtgctgcttagcataatgggcataacactcgaagaaattgaggtcaacgccagtctccctatcaaccccaccatcatacggattatgcgggtactgagaatcgccagagtgctgaagttactcaagatggctgttggtatgcgagccttgctagacaccgttatgcaggctctgcctcaggttggcaacctgggcctgttattcatgctgctgttcttcatctttgcagcactgggggttgaactgttcggcgacctggagtgtgatgaaacccatccatgcgagggcttgggccgccatgcgaccttcagaaacttcggaatggcttttcttaccctatttagagtgtctactggcgacaattggaacggcatcatgaaagatactctccgggattgcgatcaagaatcaacatgctataataccgtcatctccccaatttatttcgtgagctttgtcctgaccgcccagtttgtgctcgtgaacgtcgtcatagcggttttaatgaagcacctcgaggaatctaacaaagaggcaaaagaggaggctgagctcgaggccgaactcgagcttgaaatgaagactctttcccctcaaccacacagtcccttgggcagccctttcctgtggcccggtgtagaagggcctgattcacctgattccccaaagcccggtgccctacatcccgccgctcatgctcgttcagcatcacacttttcgctggaacaccctaccatgcagccccacccaacagaacttccggggcctgacctgctaacagttcgcaagagtggcgtcagtcggacacactccctgcctaacgactcctacatgtgcagacacggatctacggctgagggacccttaggtcacaggggttggggactgcctaaggcccaatccgggagcgttctctctgtgcatagtcagcccgccgacacttcttatatcttgcagctgccaaaagacgctccccatctgcttcagccccactcggcacctacctgggggacgattcccaagctccctcctcccggaaggagccccctcgctcaacggcccttgcggagacaggccgcaataaggactgacagtctcgatgtgcagggtctcggctctagagaggacctgctggcagaggttagtggccccagcccacccttggcgagagcatactctttttggggccagagcagtacccaggctcagcagcactcacgcagccattctaaaatatccaaacatatgaccccccccgcaccgtgtcccgggccagaaccaaattgggggaaaggcccacccgaaacccgttctagtctggaattggatacagagttgagctggatatcaggagacctactcccgccaggtggacaagaagagcctccgtccccacgagacctaaagaagtgttattccgttgaggcccaaagctgtcaacggagacctacctcatggcttgatgagcagcgaagacactcaatcgcagttagttgtttagactctggcagccagccccatcttggcaccgatcccagtaaccttggcgggcagcctctgggagggcccgggtcccggcccaagaaaaagctgagtccacccagcataactatcgatcccccagagtctcagggtccccggacaccaccgtccccgggcatttgcttgaggcgacgggcaccatcctccgactcaaaagatcctttggcgtctgggcctcccgattcgatggccgcctctcccagccccaaaaaggacgtcttatcgctgtcaggactgtcatctgatccagcggatttagatccttag

SEQ ID NO: 259778 - DNA, 5208 bp, Artificial Sequence
  derived and/or modified sequence
atggacgaggaggaggacggcgccggcgccgaggagagcggccagcctcggtcatttatgcgactcaacgatctaagcggcgccggggggcggcctggccccggatctgcagagaaagaccccggttccgctgatagcgaagccgaggggctgccatacccagctctggcacctgtggtgtttttttacttgagccaagactctcgccctcgatcctggtgccttaggaccgtctgtaatccatggttcgaacggatctcaatgctggtgatcctactcaattgcgtaaccctcggaatgttccggccctgcgaagacatagcctgtgatagccaaagatgccgcattctgcaggcctttgacgattttatattcgcattctttgctgttgaaatggtagtcaaaatggtggcgctggggatttttgggaagaaatgctatctcggcgatacatggaatagactcgacttctttatagtgatagctggaatgctggagtacagcctagatctgcagaatgtgtccttttccgccgttagaaccgtgcgggtgctccgccccctgcgcgcaatcaatcgggtcccttcaatgcgcatcttggtgacactgcttcttgacacactccccatgctagggaatgtgctgctgctgtgctttttcgtgttctttatcttcggaattgtaggcgtccagctgtgggcggggctcctaagaaataggtgcttcttgccagagaatttcagcctgcctctgtccgtcgaccttgaacgctattaccagacggagaacgaggacgaatctccctttatctgcagccaaccacgggagaacggcatgaggtcctgccgaagtgtgccaaccctccgaggagatggcggcgggggccccccgtgtggattggactacgaagcgtataatagctcttcgaataccacctgtgtcaactggaaccaatactataccaattgctctgcgggcgaacataacccctttaagggggcaattaattttgacaacattggatacgcctggatagctattttccaggtcatcacgctcgaaggctgggtagatattatgtacttcgtaatggatgcccactccttctacaatttcatctattttattctgcttatcatagttggatcctttttcatgattaacctctgcctggtagttatcgcaacccagtttagtgagactaaacagagggagtctcagctgatgcgggagcagcgcgtacgcttcctctccaacgcatctactctagcaagcttcagcgagccaggttcgtgctatgaagaacttttgaaatacttggtttacatactccgcaaggcagcccgcagactggcccaggtctcccgcgcggctggcgtacgcgtgggactgctaagtagtcccgcccccctgggcgggcaagaaacacagccatcatcttcgtgcagccgcagccaccgaagactgagcgtgcaccatctcgtgcatcatcaccaccatcatcaccaccactaccaccttggtaatgggactctgcgcgctcccagggcatcaccagagattcaggacagagacgccaatggctccaggcggcttatgctacctcctccctccactccagctttatctggtgccccacccggaggcgctgaaagtgtgcattccttttatcacgccgactgccatctagagcctgtgcggtgccaggctccaccacctcggtctccttcagaggcctctggaagaaccgttggatcaggcaaagtctacccgactgttcatacctcgccaccacccgagaccctcaaggagaaagctttggtcgaggtggccgcttcttctggccctccaaccctcacttctctgaatatcccacctggcccatactcctccatgcataagctcttagaaacccagagcaccggcgcctgtcaatcttcttgcaagattagcagtccctgtttgaaggctgattctggagcttgcggtcctgactcttgcccctattgtgctagggccggtgccggcgaggtggaactcgcagacagagaaatgcctgatagtgatagtgaagccgtctatgaattcacccaggatgcacagcacagcgatctgagagaccctcacagccgccgccaaagaagccttgggcccgacgcagaaccctctagtgtcttggccttctggcgactcatttgtgacacatttcgaaaaatcgtagactctaagtactttggccgggggatcatgatagccatcctcgtcaatacgcttagtatggggattgagtaccacgaacaaccagaggaactgacaaacgcactcgagattagcaacatcgtgttcacctcactatttgccttagaaatgctcctgaaacttctggtctacgggcctttcggatacatcaaaaacccttataatatcttcgatggggttatcgtcgtgatttcagtgtgggagattgtaggacaacaaggggggggactgtccgtgctacggaccttcaggttgatgagagtgttgaagctcgtgcggtttctgcctgccctgcaaaggcagctggtggtgttaatgaagaccatggacaacgttgcaacattctgcatgttgctaatgttgtttatcttcatcttttctatactgggcatgcacctgtttggctgtaagtttgcctccgagcgtgatggcgatactttgccagaccgcaagaattttgatagcctgttgtgggcaatcgtgactgtttttcaaattcttacccaagaggattggaacaaggtgctctacaacggaatggccagtacaagttcttgggctgccctctatttcatcgcccttatgacctttggaaattatgttctgttcaatctactggttgctatcctagtcgaggggttccaagccgaaggagacgccaataaatctgagagcgagcctgactttttcagtccgtcacttgatggggacggggatagaaaaaagtgtctcgctcttgtttccctgggagagcatccggagctcagaaaatctttactccccccacttatcattcacacagccgctacacctatgagtcttccgaagtccacctccacaggtctgggggaggcactgggtcccgctagtagacgtacatcttccagcggctccgctgagcctggcgccgcacatgagatgaaatctcctccttctgctcgctctagccctcactccccatggtcagccgcgtcttcttggacttcccgcaggagcagccggaactcactcggaagagctcctagtctaaagcggcggtccccaagtggcgaacgtcggtctcttctttctggcgaaggacaggagtcacaggacgaagaagagagttctgaggaggagcgcgcctcccctgccggttccgatcatcgccaccgcggaagcctcgagagagaagctaagagctccttcgacctgcctgacacgctgcaagtgcccgggcttcaccgcacagcgagtggcagaggctcggccagtgagcatcaggattgtaatggtaaatccgcctcaggacgactggcccgggcacttcgcccggacgatccacctctggacggcgatgacgctgatgatgagggaaatttgagtaaaggtgaacgcgtgcgcgcttggatccgcgcaagactgccggcgtgctgtttagaaagagattcctggagcgcttacattttcccgccccagtccaggtttcggctactatgccacaggatcatcacacacaagatgtttgaccacgttgtactggtaatcatctttctgaattgtatcaccattgcaatggaacgtccgaagatagatccacattctgccgaaaggatcttcctgaccctttctaattatatttttaccgctgtgttcctggccgaaatgactgtaaaagtggtcgccctaggttggtgtttcggagaacaggcttacctacggagctcgtggaacgtgctggacgggctgctggtgctgataagcgttattgacattctggtgtcaatggtctcagattccggcacgaagatacttggcatgttgagagtgctacgtctgctgcggaccttgagaccccttcgcgtcatctccagagcccagggattgaagctggtggtggaaaccctaatgtcttccctgaagccaattggcaatatcgtggtgatttgctgtgcgttcttcattatcttcgggatcttaggagtacagctcttcaagggaaagttcttcgtctgtcagggggaagacacccgaaacattacaaacaagtctgactgcgcagaggccagttaccgttgggtgcggcataaatataactttgataacctaggacaggcactaatgagcctattcgtattggctagtaaggatgggtgggttgatattatgtacgatggcctggatgccgtgggcgtcgaccaacagcctataatgaatcacaacccatggatgcttctgtactttatttcttttctcctgattgtggctttcttcgttttgaatatgttcgttggtgtagtggtcgaaaactttcacaaatgtagacagcaccaggaagaggaagaagctcgtcggcgggaagagaagcgactgagacgcctggaaaaaaaaaggagaaaggctcagtgtaagccctattattctgattattcgcgcttcagactgcttgtgcatcacttgtgtacgtctcattacttggatctcttcattaccggcgtgatagggttgaacgttgttacgatggccatggagcactaccaacagccgcagatactggacgaagccttgaagatatgcaactacatttttacggtaattttcgtgctggagtctgtgttcaagctcgtggccttcgggtttaggaggttcttccaagaccggtggaaccagttggatttggctattgtccttttgagcatcatgggaatcacactggaagagatagaggttaatgcttcgctgccaataaatcctacaatcattcgaatcatgcgcgtgctgagaatcgccagggtcctgaagttactgaaaatggcagtaggaatgcgggcactgcttgatactgtcatgcaggcactgccccaactgtgggcttggagttccctggaaacctggagcgtaacaaggcatacaccagtgagggcttgggcggttatgccaccttttggcacacttgcctggccgtcttag

SEQ ID NO: 259779 - DNA, 6731 bp, Artificial Sequence
  derived and/or modified sequence
atggatgaagaggaagacggcgcaggcgcagaggagtcgggccagcctcgttctttcatgagactcaacgacctgtccggggctggtggccgacctggcccaggatctgccgagaaagacccaggctctgcggattctgaggccgaagggttaccgtatcccgcactggctcccgttgtcttcttctatctgtctcaggatagccgacctcgctcatggtgcctcaggaccgtgtgcaatccttggttcgagagaatcagcatgctggtcatcctcttaaactgcgtgactctgggcatgtttagaccttgcgaagacatcgcctgcgattcccagaggtgtagaatcctgcaggctttcgatgattttatcttcgcattctttgcagtcgaaatggtcgtgaagatggtagctttgggaattttcggaaagaaatgctacttgggggatacctggaaccgattggatttcttcattgtgatcgccggtatgcttgagtatagtctagacttgcagaacgtgagcttctcggcagtgagaactgtgcgcgttcttaggcccctcagagccatcaacagggtcccgtcaatgaggattcttgtgacattattactggacactttgcccatgcttggtaatgtactcctgctgtgcttcttcgtcttcttcatttttgggatcgtcggcgtacagttatgggccggacttctgcgaaacagatgtttcctgcctgagaacttttcattgccattgtcggtggatctcgagcgatactaccagaccgaaaatgaggatgagtccccctttatctgtagtcagccaagggaaaatgggatgaggtcatgccgatctgtgcccaccctgcggggagatggcggaggtggcccaccctgcgggctggactacgaagcgtataactcatcaagcaacacgacctgcgtcaactggaaccagtactatacgaactgttccgctggtgaacataatccgtttaagggagccattaacttcgataatattggatatgcctggatcgccatcttccaggttatcacactggagggctgggtcgacattatgtactttgttatggatgcgcatagtttttacaacttcatatatttcatccttctcattatcgtggggagcttttttatgattaacctatgcctcgtggtcatcgccacacagttttccgaaacaaagcagcgcgagagtcaattgatgagggaacagcgagtcagattcttatccaacgccagcacacttgcatcttttagtgagcccggatcatgctatgaggagctactgaaatatctggtctatatcctccgtaaggccgcacgtaggttggcgcaggtcagtagagcagccggagtccgagttggacttctgagcagtcctgctcctttgggaggccaggagactcagcctagttcgtcttgcagccggagccaccggaggctgagcgttcatcacttggtacaccatcaccatcaccatcaccaccactatcacctgggaaacgggactctgcgtgcaccccgtgcaagcccagaaatacaggaccgtgacgccaatggaagtcgtaggctaatgctgccccctccttccacccccgctctatccggagctcctccagggggagctgaaagcgtacattccttctaccatgccgattgccacttagaaccagtgcgatgccaggcccctccaccaagatccccatctgaggcctctggcaggacagtgggaagcggcaaggtgtaccccacagtgcacacatccccgcctcccgagacattaaaagagaaagctttggtcgaggtggccgcatcctctggaccacccaccctgacctctttgaacatcccccctggtccctacagtagcatgcacaagctccttgagacccaaagcactggggcttgccagtctagctgcaagatttcaagcccttgcctgaaagcggattccggcgcttgtgggccagatagctgtccctactgcgcacgagcaggtgctggcgaggtggagctggctgacagagaaatgccagactccgattctgaagccgtttacgagttcacgcaggacgctcagcattccgatctgcgggaccctcatagtcgccgacagaggtccctgggaccagacgcggaacctagtagcgtattggctttttggaggctgatttgtgatactttcaggaagatcgtggactcaaagtacttcggacggggtataatgatcgccattctggttaataccctctccatggggatagagtatcatgaacagcccgaggaactcactaacgccctagagatctctaatatcgtcttcaccagtctcttcgccttagaaatgctactgaagctgctggtttacgggccatttggctacatcaaaaacccatacaatatttttgatggcgtaattgtggtgatttccgtctgggagatcgtcggacagcagggcggaggactgtctgtcctgcgtacttttagactcatgagggtgctgaagctcgtaagattcttacctgctctgcagaggcagttggtagttctgatgaagactatggacaacgtggcgactttctgtatgctgctcatgttgttcatcttcatcttcagtattcttggaatgcatctgttcggctgcaagttcgcgtctgaacgagatggcgacaccctacctgaccgaaagaattttgacagcctgctgtgggcaattgtcacggtgttccaaatcctgacccaggaggattggaacaaagtactgtacaacggcatggcttccacctccagctgggccgcactgtattttatcgctctcatgaccttcgggaactacgttctttttaaccttctggtggcaatcctggtcgaaggattccaggctgaaggggatgctaacaaaagtgagagcgagcccgattttttctctcctagccttgatggcgacggcgaccgcaaaaagtgcctggccttggtttctcttggcgaacaccctgaattaaggaagtccctgctgccacctctaattatccatacagccgctactccaatgtccctgccgaagagcaccagcactggtctcggtgaggcacttggccctgcctcaaggcgaacttcttcttccggctccgccgaacctggggctgcgcatgagatgaagagccctccatctgccaggtcttccccacacagcccttggtccgccgcatcttcatggaccagcaggcggtcgagccgcaattctctgggaagagcccctagcctcaagagaaggagtcccagtggggaacggagatccctgctttcaggagagggccaagaatcacaagatgaagaggagtcgagcgaggaagagagggcctctccagctgggtctgatcatcggcataggggctctctcgaaagagaggcaaaaagtagtttcgacctgccagacacgctgcaggtccctggcctgcacaggactgcgtctggaagggggagcgcttctgagcatcaggactgcaatggcaagtcagcatctgggagattggcgagggcccttcggccagatgatccccctcttgacggggacgatgccgacgacgagggaaacctgtcaaagggggagagagtcagagcctggatacgtgctagactgcccgcatgctgccttgaacgcgattcctggtccgcctatattttccccccacagagccggttccgcctgctgtgtcaccggattattacgcataagatgttcgaccacgtggtattggtgatcatctttctaaactgcattaccatagcgatggaacggcctaagattgacccccattctgcagagcgaattttcctcaccttatccaactacatctttactgctgtgttccttgctgaaatgacggtgaaggtggtggcactggggtggtgtttcggcgaacaagcttacctcagatcatcatggaatgtactggatggtctgctcgtcctcatttccgttatcgatatattggtcagtatggtgtctgactctgggaccaagatcctcggcatgttaagggtgctgagactgctccggactctcagacctctgagagttatctcccgggctcagggcctgaaactggtagttgaaacgcttatgagtagtctgaaacccatcgggaacatcgtggtgatctgttgtgcctttttcattattttcggcatcctgggtgtgcagctattcaaaggcaaattctttgtgtgccagggagaagacacccgaaacataaccaataagtctgactgcgccgaagccagctaccgctgggttcggcataaatataacttcgacaacctcggtcaagctcttatgtctctatttgtcctggcctcaaaagatggatgggtcgacattatgtacgatggccttgatgcagtcggcgttgatcagcagccaatcatgaaccacaacccttggatgctgctctacttcatttcattcctcctgatagtcgcatttttcgttctgaacatgttcgtgggggtggtggtcgaaaattttcacaaatgccggcagcatcaggaagaggaggaggctcgtagacgtgaagaaaaacggctaaggaggctggagaagaaacgcaggaaggcccagtgtaaaccttattactccgactactcccgattcagactactcgtgcatcacctgtgcacatcccattacctggatctgtttatcaccggagtcatcggtctgaatgttgtgaccatggccatggagcactaccaacagccccagatactcgatgaagctctcaagatatgtaattacatttttaccgtcatcttcgtgctggagtcagtgttcaaactcgtggcctttggcttccgccgattttttcaggaccggtggaatcaactcgatttggccattgtcctactttctataatgggaatcacattggaagaaattgaggtgaacgctagccttcccatcaatcccacgataatccgaatcatgcgggtgctgcgaatagctagagttttgaagctgttgaagatggctgtgggaatgagggccctgttagatacagtcatgcaggccctgccccaagtcgggaacctcgggctgttatttatgctcctgttcttcatctttgcggctttaggagtggagctgttcggcgatctggaatgcgatgaaacccatccatgtgaaggactcgggagacatgccacgttcagaaactttggaatggcctttctaacactcttcagagtttctacaggggacaattggaacggcataatgaaagacacacttagagactgtgatcaggagtccacctgctacaatactgtgatctctcccatctattttgtgtcttttgtgctgacagctcagttcgtactggtcaatgtggtgatcgcggttttaatgaagcatttagaggagtccaataaagaagctaaggaagaagctgaacttgaggctgaactggaattagagatgaaaacactgagcccacaaccgcactcccccttggggtcaccctttctgtggcccggtgtcgaagggcctgattccccagactctcccaagcccggagcactgcaccctgccgctcacgctagatctgcctcccactttagtctggaacatcccactatgcagccccacccaaccgagctgccgggacctgacctattgacagtccgtaagagcggtgttagtcgcacacactcgctgccaaacgattcatatatgtgtcggcatggatcgactgcagagggcccactcggccatcggggatgggggttacctaaggcccagagcggcagcgttctgagtgtgcattcacagccggcagacacaagctatatcctgcagctcccaaaggatgccccacacttgctgcagccacatagcgcgcctacctggggaacgattcccaagttgcctccaccgggtagaagccctttagcgcaacgtcctctccgccgtcaggcagctatcagaacggatagcttggacgttcagggcctggggtcccgggaagacctcctcgctgaggtgagcggcccatccccacccttggctcgagcctactctttctggggacagagtagcacacaggcacagcagcatagtcggtcccacagcaaaatcagtaagcatatgacaccacctgcaccttgtcctggtcctgagcccaactgggggaaggggcctccagaaaccagaagttctcttgagttagatacagagctgtcatggattagtggggacttattaccgccaggtggccaggaagaacccccttctccacgtgaccttaagaagtgctattcggtggaggcacagtcttgtcagaggaggccaacctcttggctggatgaacagagacgccatagtatcgccgtgtcctgtttggattcgggcagtcagccgcacttgggcaccgatccaagtaacctgggaggccagccattagggggtccagggtcacgccctaagaaaaaattaagtcccccatccatcactattgatccccctgaatcccagggtcctcggaccccgccttctcccggaatttgcctcagacggcgagcgccttccagcgattccaaagacccattagcgagcggccctcccgactccatggcagccagcccaagcccaaagaaggatgttctctcgctgagcggtctttcctcggatcccgctgacctggatccgta

SEQ ID NO: 259780 - DNA, 5208 bp, Artificial Sequence
  derived and/or modified sequence
atggacgaagaggaggatggagccggagccgaggagtctgggcaacccaggagcttcatgcgcctgaatgacctctccggcgcaggtggtaggccagggcctgggagcgccgagaaagaccccggaagcgccgattctgaagctgaggggttgccttacccagcgttggcgcctgtagtgttcttctacctttcccaggactctcggcctcggagctggtgtcttaggaccgtttgtaatccctggttcgagcgaatatccatgctcgtgatactgctgaactgcgttacgctggggatgttcaggccttgtgaggacattgcatgtgattcccagcggtgccgcatactgcaggcctttgacgacttcatcttcgcattctttgcggtggaaatggtcgtgaaaatggtggccctgggaattttcggcaaaaagtgttacttaggcgacacatggaaccggctggacttctttatcgtcattgctgggatgctggagtactctctagatctgcaaaacgtgagctttagcgcagttaggacagtaagagtgctgcggcctcttcgtgctatcaatagagtgccgtcaatgaggattctggtgacactgctcttggatacgcttcctatgcttgggaatgtgctgctcctctgtttcttcgtattctttattttcggaatagttggggttcaactgtgggcagggctgctgcgcaatagatgctttctccctgaaaatttctccctcccactgagcgtagacctggaacggtattaccagacggagaacgaggacgagtctcccttcatctgcagccaaccacgagagaatgggatgcgttcgtgtagatcagtgcccaccctgcggggagatgggggtggtggtcccccatgtgggctggactacgaagcttacaacagctcgagtaacaccacttgtgtcaactggaatcagtattatactaattgctctgctggtgaacacaatcccttcaagggcgcaatcaactttgataacattgggtatgcttggattgccatcttccaggtgatcactctggaaggttgggtggatatcatgtactttgtcatggacgcccattctttttacaacttcatttacttcattctcctcattatcgtgggaagtttctttatgattaatctttgtttagtcgtaatagccactcagttcagcgaaaccaaacaacgcgagagtcaactgatgcgggaacagagggtgaggttcctgtctaacgccagcactctggcaagcttctctgagcccggttcttgttatgaggaactattgaagtatcttgtctatattcttagaaaggccgcaagaaggttggcccaggtgtccagggcggcaggtgtgagagtgggtctgctgtcctctccagccccactggggggacaggaaacacagccaagtagctcgtgcagcaggagccacagacgtcttagcgtccatcacctggtccatcaccaccaccaccatcaccaccactatcacctggggaatgggactttgcgagctccgagggcctcccctgaaatccaggaccgcgatgctaacgggtctcgtaggctaatgcttccccctccctctacacctgcattgagtggggctccgcctggtggagcagagagcgttcacagcttttaccatgctgattgtcacctggagcctgtccgctgccaggcacccccaccaaggagcccatccgaagcctccggaagaacagtgggctcaggaaaggtttaccctactgttcatacatctcccccacccgaaaccctcaaggagaaggcattggtggaggtcgccgcttctagcgggcctcctaccctgacctcactcaacataccccctggcccatactctagtatgcacaagctgcttgagactcagtcaactggcgcatgtcaatccagctgcaagataagttctccttgcctgaaggcggacagcggtgcttgcgggcctgactcttgcccttattgtgccagagcgggagcaggagaggtggaactggccgaccgggagatgcccgactcggacagtgaagcggtttacgagtttacccaggacgcacagcactccgacttgcgcgacccccactctcggagacagagaagtcttggacctgacgctgaacctagcagcgtcttggccttctggcgcctcatttgtgatacttttcgtaagattgtggactcaaagtactttggccgaggtataatgatcgccatacttgtgaatactctgtccatggggatcgaatatcatgaacaaccagaggagctcacaaacgccctggaaatctcaaatattgtctttaccagccttttcgccctcgaaatgcttctgaagttactcgtctatggcccatttgggtacatcaagaacccctacaacatcttcgacggtgtgatcgtcgtaatttcagtgtgggaaattgtaggccagcagggcggtgggctttcggtgttacgcacctttagactgatgagggtactgaaactggtcaggtttctccctgctctccaacgccagcttgtggtactcatgaagactatggataatgttgctactttctgtatgttgctcatgctgttcatctttattttctccattttggggatgcacttgtttggctgcaaattcgcatccgagcgtgatggagatacacttcccgatagaaagaactttgactccctgctctgggcaatcgtaacggtgttccagatcctgacgcaagaggactggaataaagtgctgtataacgggatggcctcgacctctagctgggccgctttatattttatcgccttgatgacattcggaaactatgtcttatttaatctacttgtggccattcttgtggaggggtttcaggctgagggcgatgcaaacaaatctgagagcgagcccgactttttcagccctagcctggatggggacggggatagaaaaaagtgcctcgccctagtctccttaggcgagcaccccgagctcagaaaaagcctgctgccaccactgattatacacaccgcagctacacctatgagcctccctaagagtacctcaaccggtctgggcgaagccttgggacccgcatctaggcggacctccagttcaggctcagctgagcccggagctgctcatgagatgaaatcacccccatcagcccgttcttccccacactcaccttggtctgccgcttcttcatggacttcgcgccgatcgtctcggaacagtctcggccgagccccatctctcaaacggcgtagcccaagcggcgagcggcgaagcttattgagcggtgagggccaagagagccaggacgaggaggaaagcagcgaggaggagcgcgcatccccagctggatcagatcacagacatcgtgggtctctcgagagagaagccaaatcatccttcgacttgcccgacaccctacaggttccaggccttcataggaccgcctcaggccgaggctccgcatccgaacaccaggattgtaacgggaaatccgcaagcggcagactcgcaagggccctcagacctgacgaccccccacttgatggcgatgatgcagatgacgaagggaacctgtctaagggggagagggtgcgtgcatggattcgggcacggctgcctgcttgctgcctggaaagggattcttggtcagcttacatattcccaccgcagtctcgctttcgactgttgtgccacagaataatcacacataagatgttcgaccacgtggtcctggtgattatctttttgaattgcatcaccattgccatggaaaggcccaagatagatcctcacagcgctgaacgcattttcttaaccctttcaaactacatctttacggctgtgttccttgcagagatgaccgtgaaagtcgtagcattggggtggtgcttcggcgaacaggcatatttgcgtagtagttggaacgtgctcgatggacttcttgttctcatcagcgtgattgacattcttgtttccatggttagtgactctggcactaagatcctgggtatgctgcgtgtgttgaggttactccggaccctgagaccgctgcgggtcatctctcgcgctcagggtctgaagctcgtggtggaaacattaatgagctcgctcaaacctattggcaatatcgtggtgatatgttgcgccttcttcatcatcttcgggatcctaggcgttcaactgtttaaggggaagttctttgtttgccagggcgaggacaccagaaacattaccaataagtcggattgcgcagaggcctcgtatcggtgggtacgtcacaagtataattttgataatctcgggcaggcgcttatgtctcttttcgtgctagcctctaaggatggctgggtcgacatcatgtacgatgggctggacgctgtcggtgtggatcagcagccgatcatgaaccacaacccctggatgttattgtacttcatctcctttctcctgattgtggccttttttgtgcttaacatgtttgtgggcgtggttgttgaaaatttccacaagtgtcgccagcaccaagaggaggaagaagcgcgaagaagggaggagaaaaggctcaggcggctcgaaaagaaacgacggaaagcccaatgtaagccctactactccgactattccagatttcgcttgcttgtccaccatttatgcacttcacattacctggatctcttcataactggcgtgatcggcttgaatgtggtaacaatggccatggagcactaccagcagccccagatcctggatgaggcacttaagatttgcaactacatctttacggtgattttcgtgctggaaagtgtgttcaagctggtggccttcgggttccggcgattttttcaggaccggtggaaccaactggacctggccatcgtgctcctgtccattatggggatcaccttggaagaaatcgaggtgaacgcaagtttaccaattaatccgactatcattcgaataatgagagtgcttcgcattgcccgtgtgctgaaattgctgaagatggccgtcggtatgcgggcacttctagacactgtaatgcaagctcttccccaactgtgggcgtggtcctccctggaaacctggtcagtcacgcgacacacccccgtacgtgcgtgggccgttatgcctccctttggaacccttgcctggccatcataa

SEQ ID NO: 259781 - DNA, 7226 bp, Artificial Sequence
  derived and/or modified sequence
atgcccctgcgggcagggggagctgggctgaactggccctcccgggggctcagcttgcgccctagagcccaccagatgtgcccccgccggggcccccgggttgcgtgaggacacctcctctgaggggcgccgcttgcccctctccggatcgcccggggccccggctggccagaggatggacgaggaggaggatggagcgggcgccgaggagtcgggacagccccggagcttcatgcggctcaacgacctgtcgggggccgggggccggccggggccggggtcagcagaaaaggacccgggcagcgcggactccgaggcggaggggctgccgtacccggcgctggccccggtggttttcttctacttgagccaggacagccgcccgcggagctggtgtctccgcacggtctgtaacccctggtttgagcgcatcagcatgttggtcatccttctcaactgcgtgaccctgggcatgttccggccatgcgaggacatcgcctgtgactcccagcgctgccggatcctgcaggcctttgatgacttcatctttgccttctttgccgtggagatggtggtgaagatggtggccttgggcatctttgggaaaaagtgttacctgggagacacttggaaccggcttgactttttcatcgtcatcgcagggatgctggagtactcgctggacctgcagaacgtcagcttctcagctgtcaggacagtccgtgtgctgcgaccgctcagggccattaaccgggtgcccagcatgcgcatccttgtcacgttgctgctggatacgctgcccatgctgggcaacgtcctgctgctctgcttcttcgtcttcttcatcttcggcatcgtcggcgtccagctgtgggcagggctgcttcggaaccgatgcttcctacctgagaatttcagcctccccctgagcgtggacctggagcgctattaccagacagagaacgaggatgagagccccttcatctgctcccagccacgcgagaacggcatgcggtcctgcagaagcgtgcccacgctgcgcggggacgggggcggtggcccaccttgcggtctggactatgaggcctacaacagctccagcaacaccacctgtgtcaactggaaccagtactacaccaactgctcagcgggggagcacaaccccttcaagggcgccatcaactttgacaacattggctatgcctggatcgccatcttccaggtcatcacgctggagggctgggtcgacatcatgtactttgtgatggatgctcattccttctacaatttcatctacttcatcctcctcatcatcgtgggctccttcttcatgatcaacctgtgcctggtggtgattgccacgcagttctcagagaccaagcagcgggaaagccagctgatgcgggagcagcgtgtgcggttcctgtccaacgccagcaccctggctagcttctctgagcccggcagctgctatgaggagctgctcaagtacctggtgtacatccttcgtaaggcagcccgcaggctggctcaggtctctcgggcagcaggtgtgcgggttgggctgctcagcagcccagcacccctcgggggccaggagacccagcccagcagcagctgctctcgctcccaccgccgcctatccgtccaccacctggtgcaccaccaccaccaccatcaccaccactaccacctgggcaatgggacgctcagggccccccgggccagcccggagatccaggacagggatgccaatgggtcccgccggctcatgctgccaccaccctcgacgcctgccctctccggggccccccctggtggcgcagagtctgtgcacagcttctaccatgccgactgccacttagagccagtccgctgccaggcgccccctcccaggtccccatctgaggcatccggcaggactgtgggcagcgggaaggtgtatcccaccgtgcacaccagccctccaccggagacgctgaaggagaaggcactagtagaggtggctgccagctctgggcccccaaccctcaccagcctcaacatcccacccgggccctacagctccatgcacaagctgctggagacacagagtacaggtgcctgccaaagctcttgcaagatctccagcccttgcttgaaagcagacagtggagcctgtggtccagacagctgcccctactgtgcccgggccggggcaggggaggtggagctcgccgaccgtgaaatgcctgactcagacagcgaggcagtttatgagttcacacaggatgcccagcacagcgacctccgggacccccacagccggcggcaacggagcctgggcccagatgcagagcccagctctgtgctggccttctggaggctaatctgtgacaccttccgaaagattgtggacagcaagtactttggccggggaatcatgatcgccatcctggtcaacacactcagcatgggcatcgaataccacgagcagcccgaggagcttaccaacgccctagaaatcagcaacatcgtcttcaccagcctctttgccctggagatgctgctgaagctgcttgtgtatggtccctttggctacatcaagaatccctacaacatcttcgatggtgtcattgtggtcatcagcgtgtgggagatcgtgggccagcaggggggcggcctgtcggtgctgcggaccttccgcctgatgcgtgtgctgaagctggtgcgcttcctgccggcgctgcagcggcagctggtggtgctcatgaagaccatggacaacgtggccaccttctgcatgctgcttatgctcttcatcttcatcttcagcatcctgggcatgcatctcttcggctgcaagtttgcctctgagcgggatggggacaccctgccagaccggaagaattttgactccttgctctgggccatcgtcactgtctttcagatcctgacccaggaggactggaacaaagtcctctacaatggtatggcctccacgtcgtcctgggcggccctttatttcattgccctcatgaccttcggcaactacgtgctcttcaatttgctggtcgccattctggtggagggcttccaggcggagggagatgccaacaagtccgaatcagagcccgatttcttctcacccagcctggatggtgatggggacaggaagaagtgcttggccttggtgtccctgggagagcacccggagctgcggaagagcctgctgccgcctctcatcatccacacggccgccacacccatgtcgctgcccaagagcaccagcacgggcctgggcgaggcgctgggccctgcgtcgcgccgcaccagcagcagcgggtcggcagagcctggggcggcccacgagatgaagtcaccgcccagcgcccgcagctctccgcacagcccctggagcgctgcaagcagctggaccagcaggcgctccagccggaacagcctcggccgtgcacccagcctgaagcggagaagcccaagtggagagcggcggtccctgttgtcgggagaaggccaggagagccaggatgaagaggagagctcagaagaggagcgggccagccctgcgggcagtgaccatcgccacagggggtccctggagcgggaggccaagagttcctttgacctgccagacacactgcaggtgccagggctgcatcgcactgccagtggccgagggtctgcttctgagcaccaggactgcaatggcaagtcggcttcagggcgcctggcccgggccctgcggcctgatgaccccccactggatggggatgacgccgatgacgagggcaacctgagcaaaggggaacgggtccgcgcgtggatccgagcccgactccctgcctgctgcctcgagcgagactcctggtcagcctacatcttccctcctcagtccaggttccgcctcctgtgtcaccggatcatcacccacaagatgttcgaccacgtggtccttgtcatcatcttccttaactgcatcaccatcgccatggagcgccccaaaattgacccccacagcgctgaacgcatcttcctgaccctctccaattacatcttcaccgcagtctttctggctgaaatgacagtgaaggtggtggcactgggctggtgcttcggggagcaggcgtacctgcggagcagttggaacgtgctggacgggctgttggtgctcatctccgtcatcgacattctggtgtccatggtctctgacagcggcaccaagatcctgggcatgctgagggtgctgcggctgctgcggaccctgcgcccgctcagggtgatcagccgggcgcaggggctgaagctggtggtggagacgctgatgtcctcactgaaacccatcggcaacattgtagtcatctgctgtgccttcttcatcattttcggcatcttgggggtgcagctcttcaaagggaagtttttcgtgtgccagggcgaggataccaggaacatcaccaataaatcggactgtgccgaggccagttaccggtgggtccggcacaagtacaactttgacaaccttggccaggccctgatgtccctgttcgttttggcctccaaggatggttgggtggacatcatgtacgatgggctggatgctgtgggcgtggaccagcagcccatcatgaaccacaacccctggatgctgctgtacttcatctcgttcctgctcattgtggccttctttgtcctgaacatgtttgtgggtgtggtggtggagaacttccacaagtgtcggcagcaccaggaggaagaggaggcccggcggcgggaggagaagcgcctacgaagactggagaaaaagagaaggaaagcccagtgcaaaccttactactccgactactcccgcttccggctcctcgtccaccacttgtgcaccagccactacctggacctcttcatcacaggtgtcatcgggctgaacgtggtcaccatggccatggagcactaccagcagccccagattctggatgaggctctgaagatctgcaactacatcttcactgtcatctttgtcttggagtcagttttcaaacttgtggcctttggtttccgtcggttcttccaggacaggtggaaccagctggacctggccattgtgctgctgtccatcatgggcatcacgctggaggaaatcgaggtcaacgcctcgctgcccatcaaccccaccatcatccgcatcatgagggtgctgcgcattgcccgagtgctgaagctgctgaagatggctgtgggcatgcgggcgctgctggacacggtgatgcaggccctgccccaggtggggaacctgggacttctcttcatgttgttgtttttcatctttgcagctctgggcgtggagctctttggagacctggagtgtgacgagacacacccctgtgagggcctgggccgtcatgccacctttcggaactttggcatggccttcctaaccctcttccgagtctccacaggtgacaattggaatggcattatgaaggacaccctccgggactgtgaccaggagtccacctgctacaacacggtcatctcgcctatctactttgtgtccttcgtgctgacggcccagttcgtgctagtcaacgtggtgatcgccgtgctgatgaagcacctggaggagagcaacaaggaggccaaggaggaggccgagctagaggctgagctggagctggagatgaagaccctcagcccccagccccactcgccactgggcagccccttcctctggcctggggtcgagggccccgacagccccgacagccccaagcctggggctctgcacccagcggcccacgcgagatcagcctcccacttttccctggagcaccccacgatgcagccccaccccacggagctgccaggaccagacttactgactgtgcggaagtctggggtcagccgaacgcactctctgcccaatgacagctacatgtgtcggcatgggagcactgccgaggggcccctgggacacaggggctgggggctccccaaagctcagtcaggctccgtcttgtccgttcactcccagccagcagataccagctacatcctgcagcttcccaaagatgcacctcatctgctccagccccacagcgccccaacctggggcaccatccccaaactgcccccaccaggacgctcccctttggctcagaggccactcaggcgccaggcagcaataaggactgactccttggacgttcagggtctgggcagccgggaagacctgctggcagaggtgagtgggccctccccgcccctggcccgggcctactctttctggggccagtcaagtacccaggcacagcagcactcccgcagccacagcaagatctccaagcacatgaccccgccagccccttgcccaggcccagaacccaactggggcaagggccctccagagaccagaagcagcttagagttggacacggagctgagctggatttcaggagacctcctgccccctggcggccaggaggagcccccatccccacgggacctgaagaagtgctacagcgtggaggcccagagctgccagcgccggcctacgtcctggctggatgagcagaggagacactctatcgccgtcagctgcctggacagcggctcccaaccccacctgggcacagacccctctaaccttgggggccagcctcttggggggcctgggagccggcccaagaaaaaactcagcccgcctagtatcaccatagacccccccgagagccaaggtcctcggaccccgcccagccctggtatctgcctccggaggagggctccgtccagcgactccaaggatcccttggcctctggcccccctgacagcatggctgcctcgccctccccaaagaaagatgtgctgagtctctccggtttatcctctgacccagcagacctggacccctgagtcctgccccactttcccactcacctttctccactgggtgccaagtcctagctcctcctcctgggctatattcctgacaaaagttccatatagacaccaaggaggcggaggcgctcctccctgcctcagtggctctgggtacctgcaagcagaacttccaaagagagttaaaagcagcagccccggcaactctggctccaggcagaaggagaggcccggtgcagctgaggttcccgacaccagaagctgttgggagaaagcaatacgtttgtgcagaatctctatgtatattctattttattaaattaattgaatctag

SEQ ID NO: 259782 - DNA, 6698 bp, Artificial Sequence
  derived and/or modified sequence
atggacgaggaggaggatggagcgggcgccgaggagtcgggacagccccggagcttcatgcggctcaacgacctgtcgggggccgggggccggccggggccggggtcagcagaaaaggacccgggcagcgcggactccgaggcggaggggctgccgtacccggcgctggccccggtggttttcttctacttgagccaggacagccgcccgcggagctggtgtctccgcacggtctgtaacccctggtttgagcgcatcagcatgttggtcatccttctcaactgcgtgaccctgggcatgttccggccatgcgaggacatcgcctgtgactcccagcgctgccggatcctgcaggcctttgatgacttcatctttgccttctttgccgtggagatggtggtgaagatggtggccttgggcatctttgggaaaaagtgttacctgggagacacttggaaccggcttgactttttcatcgtcatcgcagggatgctggagtactcgctggacctgcagaacgtcagcttctcagctgtcaggacagtccgtgtgctgcgaccgctcagggccattaaccgggtgcccagcatgcgcatccttgtcacgttgctgctggatacgctgcccatgctgggcaacgtcctgctgctctgcttcttcgtcttcttcatcttcggcatcgtcggcgtccagctgtgggcagggctgcttcggaaccgatgcttcctacctgagaatttcagcctccccctgagcgtggacctggagcgctattaccagacagagaacgaggatgagagccccttcatctgctcccagccacgcgagaacggcatgcggtcctgcagaagcgtgcccacgctgcgcggggacgggggcggtggcccaccttgcggtctggactatgaggcctacaacagctccagcaacaccacctgtgtcaactggaaccagtactacaccaactgctcagcgggggagcacaaccccttcaagggcgccatcaactttgacaacattggctatgcctggatcgccatcttccaggtcatcacgctggagggctgggtcgacatcatgtactttgtgatggatgctcattccttctacaatttcatctacttcatcctcctcatcatcgtgggctccttcttcatgatcaacctgtgcctggtggtgattgccacgcagttctcagagaccaagcagcgggaaagccagctgatgcgggagcagcgtgtgcggttcctgtccaacgccagcaccctggctagcttctctgagcccggcagctgctatgaggagctgctcaagtacctggtgtacatccttcgtaaggcagcccgcaggctggctcaggtctctcgggcagcaggtgtgcgggttgggctgctcagcagcccagcacccctcgggggccaggagacccagcccagcagcagctgctctcgctcccaccgccgcctatccgtccaccacctggtgcaccaccaccaccaccatcaccaccactaccacctgggcaatgggacgctcagggccccccgggccagcccggagatccaggacagggatgccaatgggtcccgccggctcatgctgccaccaccctcgacgcctgccctctccggggccccccctggtggcgcagagtctgtgcacagcttctaccatgccgactgccacttagagccagtccgctgccaggcgccccctcccaggtccccatctgaggcatccggcaggactgtgggcagcgggaaggtgtatcccaccgtgcacaccagccctccaccggagacgctgaaggagaaggcactagtagaggtggctgccagctctgggcccccaaccctcaccagcctcaacatcccacccgggccctacagctccatgcacaagctgctggagacacagagtacaggtgcctgccaaagctcttgcaagatctccagcccttgcttgaaagcagacagtggagcctgtggtccagacagctgcccctactgtgcccgggccggggcaggggaggtggagctcgccgaccgtgaaatgcctgactcagacagcgaggcagtttatgagttcacacaggatgcccagcacagcgacctccgggacccccacagccggcggcaacggagcctgggcccagatgcagagcccagctctgtgctggccttctggaggctaatctgtgacaccttccgaaagattgtggacagcaagtactttggccggggaatcatgatcgccatcctggtcaacacactcagcatgggcatcgaataccacgagcagcccgaggagcttaccaacgccctagaaatcagcaacatcgtcttcaccagcctctttgccctggagatgctgctgaagctgcttgtgtatggtccctttggctacatcaagaatccctacaacatcttcgatggtgtcattgtggtcatcagcgtgtgggagatcgtgggccagcaggggggcggcctgtcggtgctgcggaccttccgcctgatgcgtgtgctgaagctggtgcgcttcctgccggcgctgcagcggcagctggtggtgctcatgaagaccatggacaacgtggccaccttctgcatgctgcttatgctcttcatcttcatcttcagcatcctgggcatgcatctcttcggctgcaagtttgcctctgagcgggatggggacaccctgccagaccggaagaattttgactccttgctctgggccatcgtcactgtctttcagatcctgacccaggaggactggaacaaagtcctctacaatggtatggcctccacgtcgtcctgggcggccctttatttcattgccctcatgaccttcggcaactacgtgctcttcaatttgctggtcgccattctggtggagggcttccaggcggagggagatgccaacaagtccgaatcagagcccgatttcttctcacccagcctggatggtgatggggacaggaagaagtgcttggccttggtgtccctgggagagcacccggagctgcggaagagcctgctgccgcctctcatcatccacacggccgccacacccatgtcgctgcccaagagcaccagcacgggcctgggcgaggcgctgggccctgcgtcgcgccgcaccagcagcagcgggtcggcagagcctggggcggcccacgagatgaagtcaccgcccagcgcccgcagctctccgcacagcccctggagcgctgcaagcagctggaccagcaggcgctccagccggaacagcctcggccgtgcacccagcctgaagcggagaagcccaagtggagagcggcggtccctgttgtcgggagaaggccaggagagccaggatgaagaggagagctcagaagaggagcgggccagccctgcgggcagtgaccatcgccacagggggtccctggagcgggaggccaagagttcctttgacctgccagacacactgcaggtgccagggctgcatcgcactgccagtggccgagggtctgcttctgagcaccaggactgcaatggcaagtcggcttcagggcgcctggcccgggccctgcggcctgatgaccccccactggatggggatgacgccgatgacgagggcaacctgagcaaaggggaacgggtccgcgcgtggatccgagcccgactccctgcctgctgcctcgagcgagactcctggtcagcctacatcttccctcctcagtccaggttccgcctcctgtgtcaccggatcatcacccacaagatgttcgaccacgtggtccttgtcatcatcttccttaactgcatcaccatcgccatggagcgccccaaaattgacccccacagcgctgaacgcatcttcctgaccctctccaattacatcttcaccgcagtctttctggctgaaatgacagtgaaggtggtggcactgggctggtgcttcggggagcaggcgtacctgcggagcagttggaacgtgctggacgggctgttggtgctcatctccgtcatcgacattctggtgtccatggtctctgacagcggcaccaagatcctgggcatgctgagggtgctgcggctgctgcggaccctgcgcccgctcagggtgatcagccgggcgcaggggctgaagctggtggtggagacgctgatgtcctcactgaaacccatcggcaacattgtagtcatctgctgtgccttcttcatcattttcggcatcttgggggtgcagctcttcaaagggaagtttttcgtgtgccagggcgaggataccaggaacatcaccaataaatcggactgtgccgaggccagttaccggtgggtccggcacaagtacaactttgacaaccttggccaggccctgatgtccctgttcgttttggcctccaaggatggttgggtggacatcatgtacgatgggctggatgctgtgggcgtggaccagcagcccatcatgaaccacaacccctggatgctgctgtacttcatctcgttcctgctcattgtggccttctttgtcctgaacatgtttgtgggtgtggtggtggagaacttccacaagtgtcggcagcaccaggaggaagaggaggcccggcggcgggaggagaagcgcctacgaagactggagaaaaagagaaggaaagcccagtgcaaaccttactactccgactactcccgcttccggctcctcgtccaccacttgtgcaccagccactacctggacctcttcatcacaggtgtcatcgggctgaacgtggtcaccatggccatggagcactaccagcagccccagattctggatgaggctctgaagatctgcaactacatcttcactgtcatctttgtcttggagtcagttttcaaacttgtggcctttggtttccgtcggttcttccaggacaggtggaaccagctggacctggccattgtgctgctgtccatcatgggcatcacgctggaggaaatcgaggtcaacgcctcgctgcccatcaaccccaccatcatccgcatcatgagggtgctgcgcattgcccgagtgctgaagctgctgaagatggctgtgggcatgcgggcgctgctggacacggtgatgcaggccctgccccagctctgggcgtggagctctttggagacctggagtgtgacgagacacacccctgtgagggcctgggccgtcatgccacctttcggaactttggcatggccttcctaaccctcttccgagtctccacaggtgacaattggaatggcattatgaaggacaccctccgggactgtgaccaggagtccacctgctacaacacggtcatctcgcctatctactttgtgtccttcgtgctgacggcccagttcgtgctagtcaacgtggtgatcgccgtgctgatgaagcacctggaggagagcaacaaggaggccaaggaggaggccgagctagaggctgagctggagctggagatgaagaccctcagcccccagccccactcgccactgggcagccccttcctctggcctggggtcgagggccccgacagccccgacagccccaagcctggggctctgcacccagcggcccacgcgagatcagcctcccacttttccctggagcaccccacgatgcagccccaccccacggagctgccaggaccagacttactgactgtgcggaagtctggggtcagccgaacgcactctctgcccaatgacagctacatgtgtcggcatgggagcactgccgaggggcccctgggacacaggggctgggggctccccaaagctcagtcaggctccgtcttgtccgttcactcccagccagcagataccagctacatcctgcagcttcccaaagatgcacctcatctgctccagccccacagcgccccaacctggggcaccatccccaaactgcccccaccaggacgctcccctttggctcagaggccactcaggcgccaggcagcaataaggactgactccttggacgttcagggtctgggcagccgggaagacctgctggcagaggtgagtgggccctccccgcccctggcccgggcctactctttctggggccagtcaagtacccaggcacagcagcactcccgcagccacagcaagatctccaagcacatgaccccgccagccccttgcccaggcccagaacccaactggggcaagggccctccagagaccagaagcagcttagagttggacacggagctgagctggatttcaggagacctcctgccccctggcggccaggaggagcccccatccccacgggacctgaagaagtgctacagcgtggaggcccagagctgccagcgccggcctacgtcctggctggatgagcagaggagacactctatcgccgtcagctgcctggacagcggctcccaaccccacctgggcacagacccctctaaccttgggggccagcctcttggggggcctgggagccggcccaagaaaaaactcagcccgcctagtatcaccatagacccccccgagagccaaggtcctcggaccccgcccagccctggtatctgcctccggaggagggctccgtccagcgactccaaggatcccttggcctctggcccccctgacagcatggctgcctcgccctccccaaagaaagatgtgctgagtctctccggtttatcctctgacccagcagacctggacccctgagtcctgccccacttt

SEQ ID NO: 259783 - protein, 773 aa, Artificial Sequence
  derived and/or modified sequence
MDVTSSSGGGGDPRQIEETKPLLGGDVSAPEGTKMGAVPCRRALLLCNGMRYKLLQEGDIQVCVIRHPRTFLSKILTSKFLRRWEPHHLTLADNSLASATPTGYMENSVSYSAIEDVQLLSWENAPKYCLQLTIPGGTVLLQAANSYLRDQWFHSLQWKKKIYKYKKVLSNPSRWEVVLKEIRTLVDMALTSPLQDDSINQAPLEIVSKLLSENTNLTTQEHENIIVAIAPLLENNHPPPDLCEFFCKHCRERPRSMVVIEVFTPVVQRILKHNMDFGKCPRLRLFTQEYILALNELNAGMEVVKKFIQSMHGPTGHCPHPRVLPNLVAVCLAAIYSCYEEFINSRDNSPSLKEIRNGCQQPCDRKPTLPLRLLHPSPDLVSQEATLSEARLKSVVVASSEIHVEVERTSTAKPALTASAGNDSEPNLIDCLMVSPACSTMSIELGPQADRTLGCYVEILKLLSDYDDWRPSLASLLQPIPFPKEALAHEKFTKELKYVIQRFAEDPRQEVHSCLLSVRAGKDGWFQLYSPGGVACDDDGELFASMVHILMGSCYKTKKFLLSLAENKLGPCMLLALRGNQTMVEILCLMLEYNIIDNNDTQLQIISTLESTDVGKRMYEQLCDRQRELKELQRKGGPTRLTLPSKSTDADLARLLSSGSFGNLENLSLAFTNVTSACAEHLIKLPSLKQLNLWSTQFGDAGLRLLSEHLTMLQVLNLCETPVTDAGLLALSSMKSLCSLNMNSTKLSADTYEDLKAKLPNLKEVDVRYTEAW

SEQ ID NO: 259784 - DNA, 2322 bp, Artificial Sequence
  derived and/or modified sequence
atggacgtgactagctcctccggtggtggcggcgacccgagacaaatcgaggaaactaaaccgttgctgggaggcgatgtttctgcccctgaagggacaaagatgggggctgtgccatgtagaagggccctgctgctttgcaatggtatgagatacaaactgctgcaggagggtgatatacaggtctgcgttatccggcacccccgcacttttttgagcaagatcttaactagtaaatttctaaggcgctgggaacctcaccatttgactctggctgataactctctggcctctgccaccccgacaggctatatggagaacagcgtctcttacagtgctatcgaagatgttcagctcctgagctgggaaaatgctcctaaatattgcctgcagttaactattccaggggggacggtgcttctccaagctgctaactcttacctgagggatcagtggttccactctctgcaatggaagaaaaagatctacaagtataaaaaggttttgagcaaccccagtcgatgggaggtggttctaaaggaaattcgaactctcgtcgatatggcgctcaccagccccttgcaggatgattccatcaatcaggcgccgctcgaaatcgtctcgaagctgctgtctgaaaataccaatctaactacccaagaacacgaaaacatcatcgtggctatagctccactcctggagaataaccatcctcctccagacctgtgcgagttcttctgcaaacactgcagagagagacccaggagcatggtggtcatcgaggtctttacgcccgttgtgcaacggattcttaagcataacatggactttggcaaatgtcctcggctgaggctcttcacccaggaatatattcttgcgctgaacgagctaaatgctgggatggaggtagtcaaaaaatttatacagagcatgcacggccccactggacactgtcctcacccccgcgtcttgcccaacctggtcgcagtgtgcctggcagctatctattcttgctatgaagagtttatcaacagccgggacaatagtccctctttgaaggaaatacgcaatggttgccagcagccttgcgatcgcaagcccacactcccactccggctgcttcatcccagcccggaccttgtctcgcaggaggccacactgtccgaagctaggctcaagtccgttgttgtggcaagttctgaaatccatgtggaggttgagcgaacaagtacagctaaaccagcactgacagcaagcgcagggaatgattccgagcctaacttgattgactgtttaatggtaagcccagcctgcagtaccatgtcaatagagctgggaccgcaggctgaccggactctcggatgttatgtcgagattctcaaacttttgagcgactacgatgattggcgaccctctcttgcttcactgctccagcccattccttttccaaaggaggcactagcacacgaaaaattcacaaaagaactgaaatacgtgatccagaggttcgcagaggacccgaggcaagaggtgcattcctgcctgctttctgtgcgcgcgggcaaggacgggtggttccagctgtacagccccgggggcgttgcttgcgacgacgacggtgaactgttcgcgagcatggtgcacatacttatgggaagttgctataaaactaagaagttcctgctgtccttggcagagaacaagctgggcccatgcatgttactggcccttagaggcaatcaaacaatggttgaaattctttgcctcatgctggaatataacatcatagacaacaacgacacacagttgcaaataatatctaccctcgagtccaccgacgtcggcaagaggatgtatgaacaactctgtgaccgccagcgcgaactgaaggagttgcaaaggaaggggggccccaccaggctcaccttgcccagcaagagtacggacgccgaccttgcccgactgttgagctctggcagcttcggtaacctggagaacctctcgctggccttcaccaatgtgacttcagcttgcgcagagcaccttattaagcttccctcgctgaaacaacttaacctctggtcgacacaattcggggatgccggacttagattgctttctgaacacctcacaatgttgcaggtgttgaatctttgtgagacaccagtgactgatgcagggttactagccctgtctagcatgaagtccttatgctcgctcaatatgaattccacaaaactttccgctgatacctatgaagacctcaaagcaaagcttccgaatctgaaggaggtggacgtgcgctatacagaagcgtggtag

SEQ ID NO: 259785 - DNA, 2322 bp, Artificial Sequence
  derived and/or modified sequence
atggatgtgaccagcagcagcggcggcggcggggacccccggcagatcgaggagaccaagcccctgctgggcggagatgtgtctgcccctgagggcaccaagatgggcgctgtgccctgcagaagagccctgctgctgtgcaatggcatgagatacaagctgctgcaggagggggacatccaggtgtgtgtgatccgccaccccaggaccttcctgagcaagatcctgaccagcaagttcctgcggcgctgggagccccaccacctgaccctggccgacaacagcctggccagcgccacccccaccggctacatggagaacagcgtgtcctacagcgccattgaagatgtgcagctgctgtcctgggagaatgcccccaagtactgcctgcagctgaccatccctgggggcaccgtgctgctgcaggccgccaacagctacctgcgggaccagtggttccacagcctgcagtggaagaagaagatctacaagtacaagaaggtgctgagcaaccccagccgctgggaggtggtgctgaaggagatccgcaccctggtggacatggccctgaccagccccctgcaggatgacagcatcaaccaggcccccctggagatcgtgtccaagctgctgtctgagaacaccaacctgaccacccaggagcacgagaacatcatcgtggccatcgcccccctgctggagaacaaccaccccccaccagacctgtgtgagttcttctgcaagcactgccgggagcggcccaggtccatggtggtgattgaggtgttcacccctgtggtgcagaggatcctgaagcacaacatggactttggaaaatgtccccggctgcggctcttcacccaggagtacatcctggccctgaatgagctgaatgccggcatggaggtggtgaagaagttcatccagagcatgcacggccccaccggccactgcccccacccccgggtgctgcccaacctggtggccgtgtgcctggccgccatctacagctgctatgaggagttcatcaacagccgggacaacagccccagcctgaaggagatcagaaatggctgccagcagccctgtgacaggaagcccaccctgcccctgcggctgctgcaccccagcccagacctggtgtcccaggaggccaccctgtctgaggcccggctgaagtctgtggtggtggccagcagcgagatccacgtggaggtggagaggaccagcacagccaagccagccctgacagccagcgctggaaatgacagcgagcccaacctgattgactgcctgatggtgtccccagcctgcagcaccatgagcattgagctgggcccccaggccgacaggaccctgggctgctacgtggagatcctgaagctgctgagtgactatgatgactggaggcccagcctggccagcctgctgcagcccatccccttccccaaggaggccctggcccacgagaagttcaccaaggagctgaagtatgtgatccagagatttgctgaggacccccggcaggaggtgcacagctgcctgctgtctgtgcgggccggcaaggatggctggttccagctgtacagccctggaggagtggcctgtgatgatgatggagagctgtttgcctccatggtgcacatcctgatgggcagctgctacaagaccaagaagttcctgctgagcctggccgagaacaagctgggcccctgcatgctgctggccctgcggggcaaccagaccatggtggagatcctgtgcctgatgctggagtacaacatcatcgacaacaatgacacccagctgcagatcatcagcaccctggagagcacagatgtgggcaagaggatgtatgagcagctgtgtgaccggcagcgggagctgaaggagctgcagaggaaaggaggccccacccggctgaccctgcccagcaagagcacagatgctgacctggcccggctgctgagcagcggcagctttggaaacctggagaacctgagcctggccttcaccaacgtgaccagcgcctgtgccgagcacctgatcaagctgcccagcctgaagcagctgaacctgtggagcacccagtttggagatgctggcctgcggctgctgtctgagcacctgaccatgctgcaggtgctgaacctgtgtgagacccctgtgacagatgctggcctgctggccctgagctccatgaagagcctgtgcagcctgaacatgaacagcaccaagctgtctgctgacacctatgaggacctgaaggccaagctgcccaacctgaaggaggtggatgtgcgctacacagaggcctggtag

SEQ ID NO: 259786 - DNA, 2322 bp, Artificial Sequence
  derived and/or modified sequence
atggacgtgaccagcagcagcggcggcggcggcgacccccggcagattgaagaaacgaaaccactactggggggggacgtgagtgcgccagaagggacaaaaatgggtgccgtgccatgccgccgagccctgctcctgtgcaacggaatgcgttacaagctgcttcaggaaggagatatccaggtgtgcgtcatccggcacccacggacatttctgagtaaaatcctcacatccaaattcctgagaagatgggaaccgcatcacctgacactggccgataatagcttagcctcagcaactcccaccgggtatatggagaactccgtctcatatagcgctattgaggacgtccaactcctatcatgggaaaacgcccccaaatactgcttacaactaacaatacccggggggactgtcctgctccaggctgccaactcttatcttagggatcagtggttccactcactgcaatggaaaaagaaaatctacaagtataagaaggtgctgtccaacccttccaggtgggaggtggtactgaaagagatccgaacactggttgacatggcacttacatctcccctccaggacgactcaatcaaccaggcccccctcgagattgtgtctaagctgctatctgaaaatactaacctcaccacacaggaacacgaaaacattatcgtggccattgcgccattactggagaacaaccacccccctcccgatctgtgcgaatttttctgcaaacactgtagagagcgtcccaggagtatggtggtgattgaggtgtttacgccggtagtgcagcggatccttaagcataacatggactttggcaagtgccctaggctaaggcttttcacacaggagtatattttggcactaaatgagctcaatgctgggatggaggtggttaagaagttcatccagtctatgcatggaccaaccggccactgtccgcatccccgcgtcttacccaatctggtggcagtctgtcttgccgcgatttactcttgctacgaggagtttataaatagccgagacaactctcccagcttaaaggagattcgcaacggatgtcagcagccctgtgaccgtaagcctactctgcctctgaggctgctgcacccctctcccgacctcgttagccaggaggccacgctgagtgaggcccggttgaagtctgtcgtggtggcctcctccgaaatccacgtggaagttgaaagaacaagcactgcaaaaccggctctgactgcttccgctggcaatgactcagagcccaatctgatcgattgtcttatggtgagtcctgcatgttctactatgtctatagagctggggccccaggcagatcgaacacttgggtgttacgtagaaatccttaaactgctttctgactatgacgattggcggccctcgcttgcctctctcctgcagcccatcccctttcccaaagaggcattagcccacgagaagttcactaaggagcttaagtacgtgattcagaggtttgccgaagatcccagacaggaggttcacagttgtcttctgagcgtgagagctggcaaggacggttggttccagctgtacagccccggcggggtcgcgtgtgatgatgacggggaattgtttgcatccatggtccatatacttatgggttcatgctacaagactaagaagttccttttgagtcttgccgagaataaattgggcccctgtatgctgctggctctccggggcaatcagacaatggtcgagatactttgtctgatgctggaatataacattatagataataatgacacccagctccagatcatcagcactctcgaaagcacagacgtgggcaaaaggatgtatgaacagctctgtgacaggcagcgcgagctgaaggagcttcagcggaagggaggacctaccaggctaaccctgccctccaaatccactgatgcggatctggccagattattgagctctgggtcttttggtaacctcgagaatctctcgctggcctttactaacgtcacttcagcttgcgccgagcacttaattaagctaccatccctgaagcagttgaacctctggtctacgcagttcggcgacgccgggcttcgattgctcagtgagcacctaaccatgttgcaggtgctgaatctgtgtgaaaccccagttacagacgcaggactgttagcactaagttctatgaaatctttgtgttccctgaacatgaatagcaccaaactgtcagccgacacttacgaagatctgaaggcaaagctccctaatctcaaggaggttgacgttaggtataccgaggcttggtag

SEQ ID NO: 259787 - DNA, 2322 bp, Artificial Sequence
  derived and/or modified sequence
atggacgtcacctcctcgtctgggggaggcggtgatcctcgtcaaatagaagagaccaagccattgctggggggtgatgtctcggctcctgaggggaccaaaatgggggcagtgccatgccggcgtgcactattgctctgcaatggcatgaggtataagcttctacaagaaggagacatccaagtttgcgtaattcgtcacccaaggacgttcctttcaaagatattgacaagcaaattcctgcgtagatgggaaccccaccacttaaccctagcagacaacagcctcgcatccgcaacccctacaggatacatggaaaattctgtctcatactccgcaatcgaagacgtgcagctgctgtcctgggagaacgcaccaaaatactgcctgcaactgaccattccaggaggcactgtgctgcttcaagccgctaattcctatctgcgtgaccaatggttccactcattgcagtggaaaaaaaagatatataaatacaaaaaggtgctttccaaccccagccgctgggaggttgttctgaaggaaatccgtaccctggtcgacatggccctcactagccccctgcaggacgacagcattaaccaagcacctctcgagattgtctcgaagctcctgagcgagaacaccaatctgacaacccaggaacacgaaaatatcatcgttgccattgctccattgctggagaacaaccatcctccccctgatctgtgtgaatttttttgcaaacattgccgcgagcgccctcgcagcatggtggtgattgaggtgttcacccccgtagtgcagcgcatcctcaaacataatatggatttcgggaaatgtccgagacttaggctgttcacccaggagtatattctcgcacttaacgagctcaatgccggaatggaagtcgtgaagaaatttatccagagcatgcatggccctaccgggcactgccctcatcccagagtgctcccaaacttagtagccgtctgtttggccgctatctacagttgctatgaagagtttatcaattcaagggacaacagcccaagcctcaaggaaatcagaaacggatgccagcagccttgcgatcgtaagcccacacttccattaagactgctccacccctcacctgatctggtaagtcaggaagccacgctgagcgaagcccgtctaaaatccgtggtggtggcctcctctgagatccatgttgaggttgagagaaccagtacagccaaacccgctttgacagcttccgctggcaatgatagcgagcctaatctgatcgactgtctgatggtgagcccggcttgcagcaccatgagtatagagttaggtcctcaagcagaccggacactggggtgttatgtggaaatcctgaaactgctgtccgattacgacgattggcgtccctccctggcctcccttttacagccgatccccttccctaaggaggccctggctcatgaaaagttcaccaaggaacttaagtacgtgattcaaaggttcgctgaagatccacgccaggaagtacacagttgtctattgagtgtgagagcaggtaaagatggctggttccaactctactctcccggaggagtagcttgcgacgatgatggggagctttttgccagtatggtccatatcttgatggggtcctgctacaaaacgaagaaattcctgctaagtcttgcagagaataaattggggccatgcatgctcctggccctgagaggtaaccagactatggtagagatcctatgcctgatgctggaatacaacatcatagacaacaacgacacacagctccagatcataagtacgcttgagtcaacggacgtgggtaagcgcatgtatgagcaattatgtgacagacagagggagctgaaggagctgcagcgcaaaggagggccaacacggctaacgctacccagcaagagcactgacgccgatttggcccgtctgctcagttctggcagttttggcaatctcgaaaacttaagtctggctttcaccaacgtgactagtgcttgtgcagaacatcttatcaagctaccctctttgaagcaactgaatttatggagcacccagtttggcgatgcgggtctgcgcttgctgagcgaacacttaactatgctgcaggtattgaatctttgcgagacgcccgtcaccgacgctggtctactcgccctgagttcaatgaagtctctgtgttctttgaacatgaactccactaagctgtccgccgatacatacgaggacctcaaagcaaagctaccgaacctgaaggaagtggatgtacggtataccgaagcttggtag

SEQ ID NO: 259788 - DNA, 4357 bp, Artificial Sequence
  derived and/or modified sequence
gggggccccgccgccccagcagcccaggacagccccctctccccgcccccagccccctcccccggcgcggccatggatgtgaccagcagctcgggcggcggcggcgacccccggcagatcgaggagaccaagccgctgctggggggcgacgtgtcggcccccgaaggcacgaagatgggcgccgtgccctgccgccgggctcttctgctttgcaacgggatgaggtacaaactgctgcaggagggcgacattcaggtctgtgtcatccggcacccgcggacctttctcagcaagatcctcacctcgaaattcctgaggcgctgggagccgcaccacctaacgctggccgacaacagcctggcgtccgccacgccaactgggtacatggaaaactcagtctcctacagcgcaattgaagacgttcagctgctgtcctgggagaatgccccgaagtactgtttacagctcacgattcctgggggaactgtcttactgcaggctgccaatagctacctgcgagaccagtggttccattctctgcaatggaagaaaaagatttacaaatataagaaagtgctgagtaacccaagccgctgggaagttgtcttgaaagagatccggaccctggtggacatggccctgacatcccccctgcaggatgactccatcaaccaggccccactggaaatcgtctcgaaactgctctcagagaacacaaacttgaccacccaggagcatgaaaacatcattgtggcaatcgctcctttgctggaaaacaaccacccaccaccagatctctgtgaattcttttgcaagcactgcagagagcggccccggtccatggtggtcatcgaggtgttcacccccgtggtgcagcgaatcctcaagcataacatggactttgggaagtgcccgcgactgaggctgtttactcaggagtacatccttgccttgaacgagctcaacgcggggatggaagtggtgaagaagttcattcagagcatgcacggccccacagggcactgcccccacccccgggtcctgcccaacctggtggccgtgtgcctggctgccatctactcctgctatgaagagttcatcaacagccgcgacaattccccaagcctgaaggaaatccggaacggctgccagcagccgtgcgaccggaagcccactttacctctgcgccttctgcaccccagcccggacctggtgtctcaggaagccacgctgtctgaggcccggctcaagtcggtggtcgtggcctccagtgagatccacgtggaggtggaacgcaccagcactgccaagccggcgctgacggccagcgcaggcaacgacagcgagcccaacctcatcgactgcctcatggtcagccccgcctgcagcaccatgagcatcgagctgggcccccaggccgaccgcacgctcggctgctacgtggaaatcctcaagctgctgtcagactatgatgactggagaccgtctctggccagtttgcttcaacccattccattccccaaagaagctctcgcacatgagaagttcaccaaggaactgaagtacgtgattcagaggttcgccgaagaccccaggcaagaggtccactcatgcctgctgagcgtgcgggccggcaaagatggctggttccagctctacagccccggaggggtggcctgcgacgatgacggggagctgttcgccagcatggtgcacatcctcatgggctcctgttacaagaccaaaaaattcctgctctccctggcagaaaacaagctgggtccctgcatgctcctggcactgagggggaaccagaccatggtggagatcctgtgcttgatgctggaatacaacatcatcgacaacaacgacacccaactgcagatcatctcaaccctggagagcacagacgtggggaagcgcatgtacgagcagctgtgtgaccggcagcgggagctgaaggagctgcaaaggaaaggcgggcccaccaggctaacactgccctccaagtccacagacgctgacttggctcgtttgctgagctccggctccttcggaaacctggagaacctcagtttggccttcaccaatgtaaccagtgcctgcgccgagcacctcatcaaactgccttcgctcaagcagctgaacctgtggtccactcagtttggagacgctggccttcggctcctgtcggaacacctcaccatgctccaggtgctgaacctgtgcgagaccccggtcacagacgctggcctgctggccctgagctccatgaagagtctctgcagtttaaacatgaacagcaccaagctctcagctgacacctacgaagatctgaaggccaagcttcccaatttgaaggaagtggacgtccgctacaccgaagcctggtgaagctcccagctcaaggcaggaagacgtttgcaaccgcgacaaaataactcttgactaacagccgcagagcagccggtcctggggtcccaccctggtgccctggctgtgagatagatggggagtctttctgggggcggaggggggagggggtggggagggggcccacaagcacgcccagcccccgccgaattcttttagcttcgtaattggaacctttgacctgatctaaagtggactttgtagcaacaagaggagcatcagcgggtcggggaggggtttgggggtgggctggggggtgggggaccctttgtggattttctttgcctttgtgtttgatgccgtcgtgtgggaaaagtcaactccgatgccaccattgcgggccggacgaaggatgctttcttcctagaggctccgagctgagctgcgaactcgccccccgcccttgggacaagaagacccagtcacatcactgcacccgtcctgtgtcctcaccattgctatgcaaagtgattcttgttgtacataagatttaaataatgcacctatttaagacatgttgacaaattgcgggtctgggacccgcctcttatttatgaagtctttgaccgtcccccccgcccgaccccaccgccctcccgcccccacctggcgtgtagtactgtataaaccagtcagctgtcgggttagtggtagtattattgttatttttttaaaggaaacaaacagacaacaaaaagaagaaaaaaaaaaagaacctccttggaaaaattaattgctttttcgtaatggattctctatgctaatgctctctcgtctgtctgtctgtctgcccactcccccacccaccactgtgcgtttctgatttccaaatgtctccaactccctcacgaggtggggctcaggctggaggaggagggattaagatccccttgctccactaaggcccaagctctttctctcggcaccttttagacttgaatgggaggctgctaacccgccctctccagtccaccccggtaaaagagctgttccccacccccagggagctcctgtccctgtcagcctttgctgtcccctgtccccaacggagactctgtcacccctgggctccccctgccatcgtgtgcttcacgtggccccatgcatgcccgcctctctgcatggtctcttgggaaaagagagatgtgtcgcctccgccagtccgactgccctccccaccccacccccgccaccccccacatgtgaccactgcaacgaagacactccttctgtccccacctgctccgaagacaaaccaacctccgtttcttttataaacagtcggctttttcttaataagccctcactgtacagaacagcccgttgatggtttatttggggtccccctctccccccagcccttttttctgttggtttagcacaaatacttccctcctccggcacctccaaacctaccccacagtcagtgtacttgttttatatatatttaatcttattcaatggaaaccatgcttttgtcgttttatactttgctaggtagactttattacccccccactatgccctcatttttttaaaaaaggaaaaaaaaaagaaactgggttccagtcttaattcattttccgtgccaggttttatttcgtgtgtgtgtgagtgtgttctgttttgtgttttgttttttgttgttgtttttagttgtttggttttcttttctttcccccctccggtcccatacttcacagcactctggtgcgggaagaagcagaagcaaaaaaaataaaaataaaaaaataaataaaaataaaaaaaataaaaaaggaaaaaaaaaaaagaagaaacaagacatgccacctttcccctcgcactgttgcttttcctgatggttaatactactgtcacgtagctgtgtacaaagagatgtgaaatactttcaggcaaaaataaactgtaagtgactcatcaa

SEQ ID NO: 259789 - DNA, 2322 bp, Artificial Sequence
  derived and/or modified sequence
atggacgtgaccagcagcagcggcggcggcggcgaccccagacagatcgaggagaccaagcccctgctgggcggcgacgtgagcgcccccgagggcaccaagatgggcgccgtgccctgcagaagagccctgctgctgtgcaacggcatgagatacaagctgctgcaggagggcgacatccaggtgtgcgtgatcagacaccccagaaccttcctgagcaagatcctgaccagcaagttcctgagaagatgggagccccaccacctgaccctggccgacaacagcctggccagcgccacccccaccggctacatggagaacagcgtgagctacagcgccatcgaggacgtgcagctgctgagctgggagaacgcccccaagtactgcctgcagctgaccatccccggcggcaccgtgctgctgcaggccgccaacagctacctgagagaccagtggttccacagcctgcagtggaagaagaagatctacaagtacaagaaggtgctgagcaaccccagcagatgggaggtggtgctgaaggagatcagaaccctggtggacatggccctgaccagccccctgcaggacgacagcatcaaccaggcccccctggagatcgtgagcaagctgctgagcgagaacaccaacctgaccacccaggagcacgagaacatcatcgtggccatcgcccccctgctggagaacaaccaccccccccccgacctgtgcgagttcttctgcaagcactgcagagagagacccagaagcatggtggtgatcgaggtgttcacccccgtggtgcagagaatcctgaagcacaacatggacttcggcaagtgccccagactgagactgttcacccaggagtacatcctggccctgaacgagctgaacgccggcatggaggtggtgaagaagttcatccagagcatgcacggccccaccggccactgcccccaccccagagtgctgcccaacctggtggccgtgtgcctggccgccatctacagctgctacgaggagttcatcaacagcagagacaacagccccagcctgaaggagatcagaaacggctgccagcagccctgcgacagaaagcccaccctgcccctgagactgctgcaccccagccccgacctggtgagccaggaggccaccctgagcgaggccagactgaagagcgtggtggtggccagcagcgagatccacgtggaggtggagagaaccagcaccgccaagcccgccctgaccgccagcgccggcaacgacagcgagcccaacctgatcgactgcctgatggtgagccccgcctgcagcaccatgagcatcgagctgggcccccaggccgacagaaccctgggctgctacgtggagatcctgaagctgctgagcgactacgacgactggagacccagcctggccagcctgctgcagcccatccccttccccaaggaggccctggcccacgagaagttcaccaaggagctgaagtacgtgatccagagattcgccgaggaccccagacaggaggtgcacagctgcctgctgagcgtgagagccggcaaggacggctggttccagctgtacagccccggcggcgtggcctgcgacgacgacggcgagctgttcgccagcatggtgcacatcctgatgggcagctgctacaagaccaagaagttcctgctgagcctggccgagaacaagctgggcccctgcatgctgctggccctgagaggcaaccagaccatggtggagatcctgtgcctgatgctggagtacaacatcatcgacaacaacgacacccagctgcagatcatcagcaccctggagagcaccgacgtgggcaagagaatgtacgagcagctgtgcgacagacagagagagctgaaggagctgcagagaaagggcggccccaccagactgaccctgcccagcaagagcaccgacgccgacctggccagactgctgagcagcggcagcttcggcaacctggagaacctgagcctggccttcaccaacgtgaccagcgcctgcgccgagcacctgatcaagctgcccagcctgaagcagctgaacctgtggagcacccagttcggcgacgccggcctgagactgctgagcgagcacctgaccatgctgcaggtgctgaacctgtgcgagacccccgtgaccgacgccggcctgctggccctgagcagcatgaagagcctgtgcagcctgaacatgaacagcaccaagctgagcgccgacacctacgaggacctgaaggccaagctgcccaacctgaaggaggtggacgtgagatacaccgaggcctggtag

SEQ ID NO: 259790 - protein, 649 aa, Artificial Sequence
  derived and/or modified sequence
MISAAWSIFLIGTKIGLFLQVAPLSVMAKSCPSVCRCDAGFIYCNDRFLTSIPTGIPEDATTLYLQNNQINNAGIPSDLKNLLKVERIYLYHNSLDEFPTNLPKYVKELHLQENNIRTITYDSLSKIPYLEELHLDDNSVSAVSIEEGAFRDSNYLRLLFLSRNHLSTIPWGLPRTIEELRLDDNRISTISSPSLQGLTSLKRLVLDGNLLNNHGLGDKVFFNLVNLTELSLVRNSLTAAPVNLPGTNLRKLYLQDNHINRVPPNAFSYLRQLYRLDMSNNNLSNLPQGIFDDLDNITQLILRNNPWYCGCKMKWVRDWLQSLPVKVNVRGLMCQAPEKVRGMAIKDLNAELFDCKDSGIVSTIQITTAIPNTVYPAQGQWPAPVTKQPDIKNPKLTKDHQTTGSPSRKTITITVKSVTSDTIHISWKLALPMTALRLSWLKLGHSPAFGSITETIVTGERSEYLVTALEPDSPYKVCMVPMETSNLYLFDETPVCIETETAPLRMYNPTTTLNREQEKEPYKNPNLPLAAIIGGAVALVTIALLALVCWYVHRNGSLFSRNCAYSKGRRRKDDYAEAGTKKDNSILEIRETSFQMLPISNEPISKEEFVIHTIFPPNGMNLYKNNHSESSSNRSYRDSGIPDSDHSHS

SEQ ID NO: 259791 - protein, 627 aa, Artificial Sequence [sequence omitted]

SEQ ID NO: 259792 - DNA, 3971 bp, Artificial Sequence
  derived and/or modified sequence
ctgtgtgcagtaaactggaatgctctccctcgctcactcctcagtgtaggagtgatctgaagcaggacaagctcagcctgcagctgccgtgggctttgtgtggactggacgcagagcttgggagacgggggagggctattactccaattcactgtcaatggaattacagctatagcggcagtgtatataggattgctttttctcgtcttcctggagatgctcagtcccagtatattttaaggaagagaaatataaaggaaatttagtatgcctccttttctttaaatgaagaatttagtttcctttacttcttaaaagagaatacctgttcttgtataacgtgactgcaccagacattctgaaaaatcagcaagaagcaaaagctggaaatagctatttcacagcagggttctgaagtaacggaagctaccttgtataaagacctcaacactgctgaccatgatcagcgcagcctggagcatcttcctcatcgggactaaaattgggctgttccttcaagtagcacctctatcagttatggctaaatcctgtccatctgtgtgtcgctgcgatgcgggtttcatttactgtaatgatcgctttctgacatccattccaacaggaataccagaggatgctacaactctctaccttcagaacaaccaaataaataatgctgggattccttcagatttgaaaaacttgctgaaagtagaaagaatatacctataccacaacagtttagatgaatttcctaccaacctcccaaagtatgtaaaagagttacatttgcaagaaaataacataaggactatcacttatgattcactttcaaaaattccctatctggaagaattacatttagatgacaactctgtctctgcagttagcatagaagagggagcattccgagacagcaactatctccgactgcttttcctgtcccgtaatcaccttagcacaattccctggggtttgcccaggactatagaagaactacgcttggatgataatcgcatatccactatttcatcaccatctcttcaaggtctcactagtctaaaacgcctggttctagatggaaacctgttgaacaatcatggtttaggtgacaaagttttcttcaacctagttaatttgacagagctgtccctggtgcggaattccctgactgctgcaccagtaaaccttccaggcacaaacctgaggaagctttatcttcaagataaccacatcaatcgggtgcccccaaatgctttttcttatctaaggcagctctatcgactggatatgtccaataataacctaagtaatttacctcagggtatctttgatgatttggacaatataacacaactgattcttcgcaacaatccctggtattgcgggtgcaagatgaaatgggtacgtgactggttacaatcactacctgtgaaggtcaacgtgcgtgggctcatgtgccaagccccagaaaaggttcgtgggatggctattaaggatctcaatgcagaactgtttgattgtaaggacagtgggattgtaagcaccattcagataaccactgcaatacccaacacagtgtatcctgcccaaggacagtggccagctccagtgaccaaacagccagatattaagaaccccaagctcactaaggatcaccaaaccacagggagtccctcaagaaaaacaattacaattactgtgaagtctgtcacctctgataccattcatatctcttggaaacttgctctacctatgactgctttgagactcagctggcttaaactgggccatagcccggcatttggatctataacagaaacaattgtaacaggggaacgcagtgagtacttggtcacagccctggagcctgattcaccctataaagtatgcatggttcccatggaaaccagcaacctctacctatttgatgaaactcctgtttgtattgagactgaaactgcaccccttcgaatgtacaaccctacaaccaccctcaatcgagagcaagagaaagaaccttacaaaaaccccaatttacctttggctgccatcattggtggggctgtggccctggttaccattgcccttcttgctttagtgtgttggtatgttcataggaatggatcgctcttctcaaggaactgtgcatatagcaaagggaggagaagaaaggatgactatgcagaagctggcactaagaaggacaactctatcctggaaatcagggaaacttcttttcagatgttaccaataagcaatgaacccatctcgaaggaggagtttgtaatacacaccatatttcctcctaatggaatgaatctgtacaaaaacaatcacagtgaaagcagtagtaaccgaagctacagagacagtggtattccagactcagatcactcacactcatgatgctgaaggactcacagcagacttgtgttttgggttttttaaacctaagggaggtgatggtaggaaccctgttctactgcaaaacactggaaaaagagactgaaaaaaagcaatgtactgtacatttgccatataatttatatttaagaactttttattaaaagtttcaaatttcaggttactgctgcgattgatgtagtggagatgcctgaacacaattctatattttagtattttttagtaatttgtactgtattttccttgcaaatattggagttataaaccatttactttgtgttctactgagtaagatgacttgttgactgtgaaagtgaattttcttgctgtgtcgaacaatcaggactgcattcatatgagatccttgtagtataagcacaggccatttttcactttggtattaataaaatgtaaaaaaaaaaaactggctgaatggctgaatgagataaaatttaattttaaaaaatggttatgaaataatgttccaattattaaatttgtattatcccagtggtattcaataaatcaaaatgtgtgaagtaatgggcaatatcaaacttcctgcatatctccatttttgctctaggcaaattaattatccttaaaaaagttaagcatatcttctgaactgaatacatcagctggcataaaaggagcatgaagtctgttaaagccattgtcagcaaagctttgaaaataaaggacttcacaaaaacggtaatgtaaatgtgcttccaagttggggggaaaatgtgtacttaggaaaacatggaaacttagacttgtatagtgtaatgaacacaaataccaaaactgcattttggttttgcctataccatcctgatttttgaaaagtgaattataaacacaaaattgttagtgtttatgatgtttttatcataaaggatgtcagagaaactttatgcatattaaaaatgtaatgtaattataagcgattcccctcaacaatccagagaaagtagttctttaaataagagataatttaaagaaaaataaatactagacatcaaatttagatctggtttatgtcaaaggttttaacactgtacataaatgttcaatttacttttacaaagatcaagaatactgcccattactgtcacaattttccagatattatataatgaactcgtaatgtaacatttccttctagcttcctactgaattgtgagctgttacttgttgaaaaaccatatcacttttctgttgccatgattttttttttttcaacaaaaaaccaaagtgcattgtacgccctttggccagtcttgtatgtgccttgatccaacgctacatgtattcagcttttaaaactccacaaatttttcatactccttaaatatgaaaaattatggtcttattgctgaataaaacttttaaaaagtacagaataattgtgcttgctttttcaggattgtgttactatcactaagtagcaaattgcccagcacattagtcctaaacgtcccatgtatttttctaggcataaaaataaaagttggctaaaaattttaaaaaatcaa

SEQ ID NO: 259793 - DNA, 4776 bp, Artificial Sequence
  derived and/or modified sequence
agtaaactggaatgctctccctcgctcactcctcagtgtaggagtgatctgaagcaggacaagctcagcctgcagctgccgtgggctttgtgtggactggacgcagagcttgggagacgggggagggctattactccaattcactgtcaatggaattacagctatagcggcagtgtatataggattgctttttctcgtcttcctgggttctgaagtaacggaagctaccttgtataaagacctcaacactgctgaccatgatcagcgcagcctggagcatcttcctcatcgggactaaaattgggctgttccttcaagtagcacctctatcagttatggctaaatcctgtccatctgtgtgtcgctgcgatgcgggtttcatttactgtaatgatcgctttctgacatccattccaacaggaataccagaggatgctacaactctctaccttcagaacaaccaaataaataatgctgggattccttcagatttgaaaaacttgctgaaagtagaaagaatatacctataccacaacagtttagatgaatttcctaccaacctcccaaagtatgtaaaagagttacatttgcaagaaaataacataaggactatcacttatgattcactttcaaaaattccctatctggaagaattacatttagatgacaactctgtctctgcagttagcatagaagagggagcattccgagacagcaactatctccgactgcttttcctgtcccgtaatcaccttagcacaattccctggggtttgcccaggactatagaagaactacgcttggatgataatcgcatatccactatttcatcaccatctcttcaaggtctcactagtctaaaacgcctggttctagatggaaacctgttgaacaatcatggtttaggtgacaaagttttcttcaacctagttaatttgacagagctgtccctggtgcggaattccctgactgctgcaccagtaaaccttccaggcacaaacctgaggaagctttatcttcaagataaccacatcaatcgggtgcccccaaatgctttttcttatctaaggcagctctatcgactggatatgtccaataataacctaagtaatttacctcagggtatctttgatgatttggacaatataacacaactgattcttcgcaacaatccctggtattgcgggtgcaagatgaaatgggtacgtgactggttacaatcactacctgtgaaggtcaacgtgcgtgggctcatgtgccaagccccagaaaaggttcgtgggatggctattaaggatctcaatgcagaactgtttgattgtaaggacagtgggattgtaagcaccattcagataaccactgcaatacccaacacagtgtatcctgcccaaggacagtggccagctccagtgaccaaacagccagatattaagaaccccaagctcactaaggatcaccaaaccacagggagtccctcaagaaaaacaattacaattactgtgaagtctgtcacctctgataccattcatatctcttggaaacttgctctacctatgactgctttgagactcagctggcttaaactgggccatagcccggcatttggatctataacagaaacaattgtaacaggggaacgcagtgagtacttggtcacagccctggagcctgattcaccctataaagtatgcatggttcccatggaaaccagcaacctctacctatttgatgaaactcctgtttgtattgagactgaaactgcaccccttcgaatgtacaaccctacaaccaccctcaatcgagagcaagagaaagaaccttacaaaaaccccaatttacctttggctgccatcattggtggggctgtggccctggttaccattgcccttcttgctttagtgtgttggtatgttcataggaatggatcgctcttctcaaggaactgtgcatatagcaaagggaggagaagaaaggatgactatgcagaagctggcactaagaaggacaactctatcctggaaatcagggaaacttcttttcagatgttaccaataagcaatgaacccatctcgaaggaggagtttgtaatacacaccatatttcctcctaatggaatgaatctgtacaaaaacaatcacagtgaaagcagtagtaaccgaagctacagagacagtggtattccagactcagatcactcacactcatgatgctgaaggactcacagcagacttgtgttttgggttttttaaacctaagggaggtgatggtaggaaccctgttctactgcaaaacactggaaaaagagactgaaaaaaagcaatgtactgtacatttgccatataatttatatttaagaactttttattaaaagtttcaaatttcaggttactgctgcgattgatgtagtggagatgcctgaacacaattctatattttagtattttttagtaatttgtactgtattttccttgcaaatattggagttataaaccatttactttgtgttctactgagtaagatgacttgttgactgtgaaagtgaattttcttgctgtgtcgaacaatcaggactgcattcatatgagatccttgtagtataagcacaggccatttttcactttggtattaataaaatgtaaaaaaaaaaaactggctgaatggctgaatgagataaaatttaattttaaaaaatggttatgaaataatgttccaattattaaatttgtattatcccagtggtattcaataaatcaaaatgtgtgaagtaatgggcaatatcaaacttcctgcatatctccatttttgctctaggcaaattaattatccttaaaaaagttaagcatatcttctgaactgaatacatcagctggcataaaaggagcatgaagtctgttaaagccattgtcagcaaagctttgaaaataaaggacttcacaaaaacggtaatgtaaatgtgcttccaagttggggggaaaatgtgtacttaggaaaacatggaaacttagacttgtatagtgtaatgaacacaaataccaaaactgcattttggttttgcctataccatcctgatttttgaaaagtgaattataaacacaaaattgttagtgtttatgatgtttttatcataaaggatgtcagagaaactttatgcatattaaaaatgtaatgtaattataagcgattcccctcaacaatccagagaaagtagttctttaaataagagataatttaaagaaaaataaatactagacatcaaatttagatctggtttatgtcaaaggttttaacactgtacataaatgttcaatttacttttacaaagatcaagaatactgcccattactgtcacaattttccagatattatataatgaactcgtaatgtaacatttccttctagcttcctactgaattgtgagctgttacttgttgaaaaaccatatcacttttctgttgccatgattttttttttttcaacaaaaaaccaaagtgcattgtacgccctttggccagtcttgtatgtgccttgatccaacgctacatgtattcagcttttaaaactccacaaatttttcatactccttaaatatgaaaaattatggtcttattgctgaataaaacttttaaaaagtacagaataattgtgcttgctttttcaggattgtgttactatcactaagtagcaaattgcccagcacattagtcctaaacgtcccatgtatttttctaggcataaaaataaaagttggctaaaaattttaaaaaatcaacatcttgaggttgtgtatcattttacttcaaagagttcagtgtttcatgtataaatgtatttcctcttacttatacactgtatagatggaaaatttaagaaatggtttcaaagcctttctctcttaggcgcactgctgccactgtcctgatactttttaaggtggtctttgaaaaactgtttttttaaaatagccttttagtagagtgagttggcatttgtgatactgtgaaatacacactttctctttgtccctgtttctggcatacaactcctaaaatccttgcaatcttcaaagtgatatattttcatatgctaatgagttcactgatagctggcaggccctaggtagcttcaagataaagtctgatcattgaaaagaccaagacatgattatagggttgggacttacaaccccaaaccctaacctccagagagggcgaagtggatgaagattaagttgatcaccagtgaccagtggtttaatcaagcatgcctatgtaatcaagcctccataaaaaaacaaaaggtcaagatttggagagcttccagattgctgaacatgtggtggttcctgcaggatggcatgcctggagagggcatggaagctctgtgcccacctagacctcaccttatgtttcctgccatctggatcctttgtaacatcctttataatacgtcagtaaatctgtttccttgcattttgtgagctgttgtagcaaattaatagaacacaaaaaggggatcctgggaaaccaaacttgaagctgactagtcttgcaactggtgtctgaagaggaggcagttttgtgggaataagccctcaacctgtgggatatgacacaatttccaggtagacagtgttgggattaaactgaattggaggacacccagctggtatctgctgaagaactgattgcttgcgtggtgtatggggcaaaacttgttaagacaagtcttctatgttgattattgttgaatgagagaattaaacacacatacacactt

SEQ ID NO: 259794 - DNA, 2635 bp, Artificial Sequence
  derived and/or modified sequence
agtaaactggaatgctctccctcgctcactcctcagtgtaggagtgatctgaagcaggacaagctcagcctgcagctgccgtgggctttgtgtggactggacgcagagcttgggagacgggggagggctattactccaattcactgtcaatggaattacagctatagcggcagtgtatataggattgctttttctcgtcttcctgggttctgaagtaacggaagctaccttgtataaagacctcaacactgctgaccatgatcagcgcagcctggagcatcttcctcatcgggactaaaattgggctgttccttcaagtagcacctctatcagttatggctaaatcctgtccatctgtgtgtcgctgcgatgcgggtttcatttactgtaatgatcgctttctgacatccattccaacaggaataccagaggatgctacaactctctaccttcagaacaaccaaataaataatgctgggattccttcagatttgaaaaacttgctgaaagtagaaagaatatacctataccacaacagtttagatgaatttcctaccaacctcccaaagtatgtaaaagagttacatttgcaagaaaataacataaggactatcacttatgattcactttcaaaaattccctatctggaagaattacatttagatgacaactctgtctctgcagttagcatagaagagggagcattccgagacagcaactatctccgactgcttttcctgtcccgtaatcaccttagcacaattccctggggtttgcccaggactatagaagaactacgcttggatgataatcgcatatccactatttcatcaccatctcttcaaggtctcactagtctaaaacgcctggttctagatggaaacctgttgaacaatcatggtttaggtgacaaagttttcttcaacctagttaatttgacagagctgtccctggtgcggaattccctgactgctgcaccagtaaaccttccaggcacaaacctgaggaagctttatcttcaagataaccacatcaatcgggtgcccccaaatgctttttcttatctaaggcagctctatcgactggatatgtccaataataacctaagtaatttacctcagggtatctttgatgatttggacaatataacacaactgattcttcgcaacaatccctggtattgcgggtgcaagatgaaatgggtacgtgactggttacaatcactacctgtgaaggtcaacgtgcgtgggctcatgtgccaagccccagaaaaggttcgtgggatggctattaaggatctcaatgcagaactgtttgattgtaaggacagtgggattgtaagcaccattcagataaccactgcaatacccaacacagtgtatcctgcccaaggacagtggccagctccagtgaccaaacagccagatattaagaaccccaagctcactaaggatcaccaaaccacagggagtccctcaagaaaaacaattacaattactgtgaagtctgtcacctctgataccattcatatctcttggaaacttgctctacctatgactgctttgagactcagctggcttaaactgggccatagcccggcatttggatctataacagaaacaattgtaacaggggaacgcagtgagtacttggtcacagccctggagcctgattcaccctataaagtatgcatggttcccatggaaaccagcaacctctacctatttgatgaaactcctgtttgtattgagactgaaactgcaccccttcgaatgtacaaccctacaaccaccctcaatcgagagcaagagaaagaaccttacaaaaaccccaatttacctttggctgccatcattggtggggctgtggccctggttaccattgcccttcttgctttagtgtgttggtatgttcataggaatggatcgctcttctcaaggaactgtgcatatagcaaagggaggagaagaaaggatgactatgcagaagctggcactaagaaggacaactctatcctggaaatcagggaaacttcttttcagatgttaccaataagcaatgaacccatctcgaaggaggagtttgtaatacacaccatatttcctcctaatggaatgaatctgtacaaacaatcacagtgaaagcagtagtaaccgaagctacagagacagtggtattccagactcagatcactcacactcatgatgctgaaggactcacagcagacttgtgttttgggttttttaaacctaagggaggtgatggtaggaaccctgttctactgcaaaacactggaaaaagagactgaaaaaaagcaatgtactgtacatttgccatataatttatatttaagaactttttattaaaagtttcaaatttcaggttactgctgcgattgatgtagtggagatgcctgaacacaattctatattttagtattttttagtaatttgtactgtattttccttgcaaatattggagttataaaccatttactttgtgttctactgagtaagatgacttgttgactgtgaaagtgaattttcttgctgtgtcgaacaatcaggactgcattcatatgagatccttgtagtataagcacaggccatttttcactttggtattaataaaatgt

SEQ ID NO: 259795 - DNA, 1950 bp, Artificial Sequence
  derived and/or modified sequence
atgatctcagctgcctggtctattttcctaattggaaccaaaatcggattgttcttacaagtcgcccccctaagtgtcatggccaagtcttgccccagtgtgtgtcgctgcgacgctggatttatctattgcaatgaccggtttttaacctccatcccaacagggatcccagaggatgcaaccaccctttacttgcaaaataatcagattaacaacgcaggcatcccatctgacctcaaaaatctgcttaaggtggagagaatttatctttaccataatagtcttgatgagttccctaccaacctacccaagtacgtgaaagagctgcatctccaggagaataacattcgtactattacctacgactctctgagcaaaattccctacctagaagagctgcaccttgacgacaacagcgtgagcgccgtgtccattgaagaaggagctttcagggacagcaactatctccggcttctgttcttatctaggaaccatctgagcaccattccatggggcctcccaaggaccatcgaggagctcagactcgatgataacaggatcagcaccatcagctccccaagccttcaggggttgaccagcctgaagcgactggttcttgacggcaacctgctaaataaccatggcctgggcgacaaagtcttttttaatctcgttaatctcaccgagctgtcgctggtgcgcaattcattaacggcagcccccgttaatcttcctggcacgaacttgagaaaactttacctgcaggacaaccacatcaatcgcgtgccccccaacgcttttagctaccttcgccagttatataggctggatatgtcaaataacaacctatcaaacctgccccaagggatttttgacgatctcgataacattacgcaactgattctccggaacaacccttggtactgtgggtgtaagatgaaatgggtcagggattggttgcagtcacttcccgtgaaagtcaacgttcggggcctcatgtgtcaagcgcctgagaaagtgcgcgggatggccatcaaggacctgaacgctgaactgtttgactgcaaggattcaggtatcgtgagtactatccagatcaccacagcgattcctaacacagtttacccagcccaagggcagtggccggcacccgtaacaaagcagccagatatcaaaaacccgaagctgactaaagaccaccagaccaccggaagcccctctagaaagaccatcacgattactgtgaagagcgtgacgagtgatacgatccatatttcatggaaattagcgttgcccatgaccgctctccgcttgagttggctgaagttggggcatagtcctgcgtttggatccatcacggagactatagttaccggcgagcgcagtgagtacctggttactgccctagagcccgacagcccgtataaggtctgcatggttccgatggagacgagcaatctgtatctcttcgatgagactccagtatgcatcgaaacggagactgcaccactgagaatgtacaatcctacgactaccctgaatagagaacaggagaaggagccttacaagaatcccaacctccccctggcggctatcatcggcggagcagtggccctggtgactatcgccctgctcgccctggtctgctggtatgtgcaccgcaacgggtcgttgttctcgagaaattgtgcttacagtaagggacgcagaagaaaagacgattacgccgaagccgggaccaaaaaggacaattcaatattggaaatccgcgagacatccttccagatgttaccaatatccaatgagccaatctcaaaggaagaatttgttatacacactattttccccccaaatggtatgaacctctacaaaaacaaccacagcgagtccagcagcaatcgtagttatagggactccggtattcccgacagtgaccattcgcatagttag

SEQ ID NO: 259796 - DNA, 1950 bp, Artificial Sequence
  derived and/or modified sequence
atgatttcagctgcctggagtatttttcttatcggtacaaaaattggtttgtttttgcaggtggctcccctgtctgtgatggcaaagtcatgtccctctgtctgtagatgtgatgccggcttcatctactgcaacgatcggttcttgactagtatccctacaggcatccctgaggacgctacaaccctgtatctgcagaataaccagatcaacaatgccggaattccatccgacctgaagaacctgctgaaggtagagcgcatttacctttaccacaactcactcgacgagttccctactaacctccctaagtacgtgaaagagctccatcttcaagaaaacaatatcaggaccattacctatgattctttatccaagatcccgtacttggaagaactgcaccttgacgataacagcgtgagcgctgtgagcatagaagagggtgcgttcagggatagcaactacttgagactcctgttcctttcccggaatcatctttctactattccatggggactgcctcgcactatcgaggaattaaggctcgacgacaatcgcatctccactatttcttccccttctcttcagggcctcacatctcttaaacgcctggtactggacggcaatttgctcaacaatcacggattgggggataaagtgttctttaaccttgtcaacttgacagaactgtccctggtgcggaattcgcttacagccgctcctgtaaacctgcccggaactaacctcaggaagctctatctgcaggacaatcatattaaccgcgtgcctcctaatgctttcagttatctgcggcaactttaccgattggatatgagcaacaataatctatccaatctgccgcaagggatcttcgatgacctcgataatattacacagttaattctccgcaacaacccttggtactgtggctgtaagatgaagtgggtacgggattggcttcagtccctgcccgtgaaagtaaacgttcgcgggctgatgtgccaagccccagagaaagtgaggggcatggccatcaaggacttaaacgccgagctcttcgactgcaaggactcaggtattgtgagtacaatccaaatcactacagctattcctaacactgtctaccccgcacagggacagtggccagctccggtgaccaagcagcctgacattaagaaccctaagctcacaaaggatcaccagaccacaggtagtccctcccgcaaaacaatcactattaccgttaagagtgtcacaagcgataccattcacatctcatggaagctcgccctccccatgactgctctccggttaagctggttgaagctaggtcacagcccagctttcgggagtataaccgaaacgattgtgacaggcgaaaggtccgagtatcttgtgaccgcgctggaaccagactccccctataaggtttgtatggtgcctatggaaacctccaatctgtacctgtttgatgagacacctgtttgcatcgagacagaaactgcacctcttcgaatgtataaccctacgacaacgttaaatcgggagcaggaaaaggagccctacaaaaaccccaacctacctctggccgctataattgggggggcggtggctctggtgaccatagccctcttggctctagtctgttggtacgttcaccggaacggctccctgttttctcggaattgcgcgtattccaaggggcggagaagaaaagacgattacgccgaagcaggaactaagaaggacaactctattctggagatccgcgaaacaagctttcagatgctaccaatttccaatgagcccatttcaaaagaggaatttgtcatacatacaatctttccacctaacgggatgaatctctacaaaaacaatcactctgaatcgtccagtaatcgctcttatagagactcgggtattccagactccgaccattctcacagttag

SEQ ID NO: 259797 - DNA, 1884 bp, Artificial Sequence
  derived and/or modified sequence
atgattagtgctgcctggtccatatttctcatcgggaccaaaatcggtcttttccttcaagttgcccccctgtccgtgatggccaaatcatgtccctccgtgtgccggtgtgatgctggattcatctattgtaacgataggtttttgacaagtattccaactggcatacctgaggacgccaccacactgtatctacaaaacaaccagattaataacgccggtatcccctccgacttgaaaaatctattgaaagtggagcggatttatctgtaccataattccctggacgagtttcctacaaatctccctaaatacgtgaaggagctccatctgcaagagaacaatattcgtaccattacatacgattcactgtctaagatcccctatttagaagagctgcatttagatgacaactccgtatccgctgtcagtattgaggaaggggcctttagggactcaaactatctgcggctgttgttcctctctcgaaaccacctgtcgaccatcccatggggactgccccgcacaatcgaggagctgcgacttgatgacaatagaatctccacaatttcgagcccaagtctccagggtctcacctccctgaagcgtcttgtgctggacgggaacctgttgaataaccatggcttgggcgataaagtcttcttcaacttggtaaatctaactgagctctcgttggttcgcaattccctgacagctgctccagtcaatctgccgggtacaaaccttagaaaactgtacctccaggacaaccacatcaacagggtccctccgaatgctttcagctatcttcggcaattatacagacttgatatgtcaaacaataacctgtcaaatcttccccaggggatttttgacgacttggataatatcacccaattaatactgcggaacaacccatggtattgcggttgcaaaatgaagtgggttcgagattggttgcagagcctgcctgtgaaggttaatgtgagggggctgatgtgtcaggctccggagaaggtgcgcggcatggccattaaggacctgaacgccgaacttttcgactgcaaggatagtggaatcgtaagcaccattcaaattaccactgccattccgaataccgtgtacccagcacagggccagtggcctgcacctgtcactaagcagcccgatattaagaatccgaagctgactaaagatcaccaaaccaccggtagcccctctagaaaaaccattaccatcactgtgaagagtgtcacgagcgataccatccacatatcttggaaattggccttgcccatgaccgccctgaggctctcgtggctgaagctgggccacagcccagccttcggcagcatcactgaaaccatcgtgacaggggaacgtagcgaatacctggtcaccgccctggagccagatagcccctacaaagtgtgcatggtgcctatggaaacttcaaatctttacttgttcgatgagacaccggtgtgcatcgagacggagacagccccactgaggatgtataatcctaccacaacactgaacagagagcaggaaaaggagccctataagaaccccaacctgccgctggccgctattattgggggagccgtcgctcttgtcacaattgccttgctcgccttggtctgctggtacgtgcatcgcaacggctcgttgttctcccggaactgtgcatacagtaagggacgaaggcgtaaggatgattacgcagaggcaggtactaaaaaagataattcgatcctggaaataagagagacttcctttcaaatgcttcccatctccaatgaacccatctctaaagaggagtttgtcatacacaccatttttccccccaacggaatgaacctgtataaacaatcccagtag

SEQ ID NO: 259798 - DNA, 1950 bp, Artificial Sequence
  derived and/or modified sequence
atgatctctgctgcctggagcatcttcctgattggcaccaagattggcctcttcctgcaggtggcccccctgtctgtgatggccaagagctgccccagcgtgtgccgctgtgatgctggcttcatctactgcaatgaccgcttcctgaccagcatccccaccggcatcccagaagatgccaccaccctgtacctgcagaacaaccagatcaacaatgccggcatccccagcgacctgaagaacctgctgaaggtggagcgcatctacctgtaccacaacagcctggatgagttccccaccaacctgcccaagtatgtgaaggagctgcacctgcaggagaacaacatccgcaccatcacctatgacagcctgagcaagatcccctacctggaggagctgcacctggatgacaacagcgtgtctgctgtgtccattgaggagggcgccttccgggacagcaactacctgcggctgctcttcctgagcaggaaccacctgagcaccatcccctggggcctgcccaggaccatcgaggagctgcggctggatgacaaccgcatcagcaccatcagcagccccagcctgcagggcctgaccagcctgaagaggctggtgctggatggcaacctgctgaacaaccacggcctgggggacaaggtgttcttcaacctggtgaacctgacagagctgagcctggtgaggaacagcctgacagctgcccctgtgaacctgcccggcaccaacctgaggaagctgtacctgcaggacaaccacatcaacagagtgcccccaaatgccttctcctacctgcggcagctgtaccgcctggacatgagcaacaacaacctgagcaacctgccccagggcatctttgatgacctggacaacatcacccagctgatcctgaggaacaacccctggtactgcggctgcaagatgaagtgggtgcgggactggctgcagagcctgcctgtgaaggtgaatgtgcggggcctgatgtgccaggcccctgagaaggtgcggggcatggccatcaaggacctgaatgctgagctgtttgactgcaaggacagcggcatcgtgtccaccatccagatcaccacagccatccccaacacagtgtacccagcccagggccagtggccagcccctgtgaccaagcagcctgacatcaagaaccccaagctgaccaaggaccaccagaccaccggcagccccagcaggaagaccatcaccatcaccgtgaagtctgtgaccagtgacaccatccacatctcctggaagctggccctgcccatgacagccctgcggctgtcctggctgaagctgggccacagccctgccttcggcagcatcacagagaccatcgtgactggagagaggtctgagtacctggtgacagccctggagccagacagcccctacaaggtgtgcatggtgcccatggagaccagcaacctgtacctgtttgatgagacccctgtgtgcattgaaacagaaacagcccccctgaggatgtacaaccccaccaccaccctgaaccgggagcaggagaaggagccctacaagaaccccaacctgcccctggccgccatcattggaggagctgtggccctggtgaccatcgccctgctggccctggtgtgctggtacgtgcacagaaatggcagcctcttcagcaggaactgtgcctacagcaaaggaagaagaaggaaggatgattatgcagaggccggcaccaagaaggacaacagcatcctggagatccgggagaccagcttccagatgctgcccatcagcaatgagcccatcagcaaggaggagtttgtgatccacaccatcttcccccccaacggcatgaacctgtacaagaacaaccacagcgagagcagcagcaacagaagctacagagattctggcatcccagacagcgaccacagccacagctag

SEQ ID NO: 259799 - DNA, 1884 bp, Artificial Sequence
  derived and/or modified sequence
atgatctctgctgcctggagcatcttcctgattggcaccaagattggcctcttcctgcaggtggcccccctgtctgtgatggccaagagctgccccagcgtgtgccgctgtgatgctggcttcatctactgcaatgaccgcttcctgaccagcatccccaccggcatcccagaagatgccaccaccctgtacctgcagaacaaccagatcaacaatgccggcatccccagcgacctgaagaacctgctgaaggtggagcgcatctacctgtaccacaacagcctggatgagttccccaccaacctgcccaagtatgtgaaggagctgcacctgcaggagaacaacatccgcaccatcacctatgacagcctgagcaagatcccctacctggaggagctgcacctggatgacaacagcgtgtctgctgtgtccattgaggagggcgccttccgggacagcaactacctgcggctgctcttcctgagcaggaaccacctgagcaccatcccctggggcctgcccaggaccatcgaggagctgcggctggatgacaaccgcatcagcaccatcagcagccccagcctgcagggcctgaccagcctgaagaggctggtgctggatggcaacctgctgaacaaccacggcctgggggacaaggtgttcttcaacctggtgaacctgacagagctgagcctggtgaggaacagcctgacagctgcccctgtgaacctgcccggcaccaacctgaggaagctgtacctgcaggacaaccacatcaacagagtgcccccaaatgccttctcctacctgcggcagctgtaccgcctggacatgagcaacaacaacctgagcaacctgccccagggcatctttgatgacctggacaacatcacccagctgatcctgaggaacaacccctggtactgcggctgcaagatgaagtgggtgcgggactggctgcagagcctgcctgtgaaggtgaatgtgcggggcctgatgtgccaggcccctgagaaggtgcggggcatggccatcaaggacctgaatgctgagctgtttgactgcaaggacagcggcatcgtgtccaccatccagatcaccacagccatccccaacacagtgtacccagcccagggccagtggccagcccctgtgaccaagcagcctgacatcaagaaccccaagctgaccaaggaccaccagaccaccggcagccccagcaggaagaccatcaccatcaccgtgaagtctgtgaccagtgacaccatccacatctcctggaagctggccctgcccatgacagccctgcggctgtcctggctgaagctgggccacagccctgccttcggcagcatcacagagaccatcgtgactggagagaggtctgagtacctggtgacagccctggagccagacagcccctacaaggtgtgcatggtgcccatggagaccagcaacctgtacctgtttgatgagacccctgtgtgcattgaaacagaaacagcccccctgaggatgtacaaccccaccaccaccctgaaccgggagcaggagaaggagccctacaagaaccccaacctgcccctggccgccatcattggaggagctgtggccctggtgaccatcgccctgctggccctggtgtgctggtacgtgcacagaaatggcagcctcttcagcaggaactgtgcctacagcaaaggaagaagaaggaaggatgattatgcagaggccggcaccaagaaggacaacagcatcctggagatccgggagaccagcttccagatgctgcccatcagcaatgagcccatcagcaaggaggagtttgtgatccacaccatcttcccccccaacggcatgaacctgtacaagcagagccagtag

SEQ ID NO: 259800 - DNA, 1950 bp, Artificial Sequence
  derived and/or modified sequence
atgatcagcgccgcctggagcatcttcctgatcggcaccaagatcggcttgtttctccaggttgctcccttgtcggtcatggccaagagctgtcccagcgtatgccgctgtgacgctggcttcatttactgtaacgacaggtttctcacttccataccgactggcatccctgaagacgccaccacactgtacctccaaaataatcagataaataatgcaggcatacctagtgatcttaagaatctactcaaagtcgagcgaatctatctttatcataattctcttgatgagttccctacgaacttgcctaaatatgtcaaagagctacaccttcaagaaaacaacattcggaccattacctacgattctttatcaaagattccatacctggaagaattgcacctcgacgataatagcgttagcgccgttagcatagaggagggagcgtttcgggactcgaactatctgaggttgctatttctgagtcgaaaccaccttagcacaataccttggggcttgcctcgcacaatcgaggagctgcggctggatgacaatcgcatcagcacaatttctagtccatcacttcagggcttaacctctctgaagcggctcgtactggacgggaatcttctgaataaccacggccttggcgataaagtgtttttcaatcttgtgaatctcacagagctgagccttgtgcgaaactcactgacggcggcgcccgtaaaccttcccggcactaacctgcgaaaattgtatctacaggacaaccacatcaacagggtcccaccaaacgccttctcctacctgagacagttataccgcctcgatatgtctaataataatttgtccaacttgcctcagggtatttttgatgaccttgacaatatcactcaactgatcctgaggaacaacccctggtattgcggatgcaagatgaagtgggtcagggactggctacaatctctgccggtgaaagtaaacgttagaggtctcatgtgccaggcgcccgagaaggtaagaggtatggctattaaggatcttaacgccgaactctttgattgtaaggattccggtatcgtaagcactatacagatcaccactgcaatccccaacacagtgtatccagctcagggacagtggccagcgcctgtgaccaaacagcccgacatcaagaacccaaagctgacaaaggaccaccagactaccggctcacccagtaggaagacgatcacaataactgtcaagtcagtgaccagcgatacaattcatataagctggaagctcgcattgccgatgacagcgttgagattaagctggctgaagttgggtcattcacctgcttttggctccattactgaaaccatcgtcacgggagagagatcagagtatctggttacagcgctggagccggactctccttacaaagtgtgcatggtgcccatggaaacatcaaatctgtacctttttgacgagactccggtgtgtatcgagaccgagactgctcctctgcggatgtacaatcccaccaccaccctcaaccgggagcaggaaaaggagccatacaagaatcctaatcttcccctggccgctattattggaggagcagtggccctagtgactatcgcactgttggcattggtctgttggtacgtacacaggaatggttctcttttctccagaaactgcgcatattcaaaggggaggaggagaaaagatgattatgcggaggctggcactaagaaagataactccattctcgagatcagggaaactagtttccagatgctgcctatcagcaacgagcccataagtaaagaagaatttgttattcacaccatttttcctccgaatgggatgaacctgtataagaataaccatagcgaatcaagttctaaccgctcttatcgagactctggcatcccagactcagatcattcccactcatag

SEQ ID NO: 259801 - DNA, 1950 bp, Artificial Sequence
  derived and/or modified sequence
atgatcagcgccgcctggagcatcttcctgatcggcaccaagatcggcctcttcctgcaggttgctccactgtctgttatggccaagtcctgtccctctgtttgtcgctgcgacgcggggttcatctattgtaacgacaggttcctcactagcataccaaccggcattccagaggacgccacgacactttatttgcagaataaccaaattaataatgccggtatacccagcgatctgaaaaatctgctgaaagtggaacgaatttacctgtatcacaattcattggacgaattccccaccaaccttcccaagtatgtcaaggagctgcacctccaggagaacaatataagaactattacatacgattcattgagcaaaatcccctatctggaggagttgcatctggacgataactcagtgagcgctgttagtattgaggaaggggcttttcgcgacagcaactatctcaggcttctgttcctgtcccggaatcacctgtctactatcccatggggcctccctcgaaccatagaagagctgaggctcgacgacaaccgtatttcaactatttccagtcctagcctccaaggacttactagtttgaagaggctggtgttagatggcaacctccttaacaaccatggcttgggagacaaagtgttttttaatttggtaaatctgaccgagctgtctctggttagaaactcactgacagcggctcccgtgaatctacctggcaccaatctaaggaagctgtatctgcaagataaccatattaatagagtgccaccgaatgctttttcatacttacgccagttgtaccgcttagatatgtctaataataatctctccaacctcccccagggaatcttcgacgacctggacaacattacccaactgatccttcgtaataacccatggtactgtggctgcaaaatgaaatgggttcgtgactggctccagtcgctgccagtgaaagttaacgttagggggttgatgtgtcaagctccagagaaggtaaggggaatggccatcaaagatctgaatgctgaactgtttgactgcaaggattcaggtatcgtgtctactattcaaattaccactgccattcccaacaccgtgtaccccgcacaagggcagtggccggcaccggtgacaaaacaacccgatatcaagaaccccaaacttaccaaagaccaccagaccaccggctccccaagtcgaaagactatcactattacagtgaagagtgtgacaagcgacacaatccacatctcctggaagctcgcccttcctatgactgccttgcggttgtcatggctcaagctgggacattcccccgcatttggctccattacagaaacaatcgtgaccggagagcggtcagagtaccttgtcaccgccctggaacccgattccccatataaggtgtgtatggtgccaatggagacatctaacctttatctgtttgacgagactccagtctgtatcgagacggaaactgcaccactgcgcatgtacaatcccaccaccacgcttaatcgcgagcaggagaaggaaccttataagaaccctaacctgcccctggccgccattatcggtggtgcagttgctcttgtgacgatagcgctgctcgctttagtatgctggtatgtgcaccggaacggaagcctgttctccaggaactgcgcatatagcaaaggacgccgacgcaaagacgactatgccgaagccggaaccaagaaagacaattctatcttggagatccgggagacctctttccagatgcttcctataagtaacgaacccatcagtaaggaagagttcgtaattcacacaattttcccgccaaatggtatgaatctttataaaaataaccattctgagtctagctcaaacaggtcttacagagactcagggatacctgactccgatcacagccattcctag

SEQ ID NO: 259802 - DNA, 1884 bp, Artificial Sequence
  derived and/or modified sequence
atgatcagcgccgcctggagcatcttcctgatcggcaccaagatcggcctgtttctgcaggtagcaccgctaagcgtgatggccaagtcctgtccttcagtgtgtagatgcgacgcaggcttcatctactgtaatgacagattcctaacatccatccccactggaattccggaggacgctactacgctctatcttcagaataatcagattaacaacgctggaatcccatccgatttgaagaatctgctcaaggtggagaggatttatctgtatcacaactctctggacgagtttccaacaaaccttccaaagtacgtcaaagagctccacctgcaggaaaacaacatacgtaccatcacgtacgactccctgtccaaaatcccatatcttgaagaactgcatttagatgataatagtgtttctgctgtcagcatagaagaaggcgccttcagagactcaaattaccttcgcctcttgtttctttcacgcaaccacctcagcacaattccctggggcctgcccagaaccatcgaggaactcaggctggatgataatcgcatttccacaatctccagcccatctctccagggactcacttccctcaaacgcctcgtcctggacggaaacttgctgaataaccacgggctgggcgataaagtattctttaatctcgtgaatttgactgagcttagcctcgtgagaaattcattgaccgccgcgcccgtgaacttaccagggactaacctgcggaagttgtacctccaggacaatcacatcaatcgcgtgccacccaacgccttttcgtatcttaggcaattgtaccggctagacatgtccaataacaacctgtcaaatctgccgcagggtatcttcgatgaccttgataacatcacacagctgattttaaggaacaacccgtggtattgcggatgcaaaatgaaatgggtgcgggactggctgcagtccctcccagtcaaggtcaatgtccgtggcctgatgtgccaggcccctgagaaggtgagaggcatggcaatcaaagaccttaacgctgaactgtttgattgcaaagacagcggcattgttagtacgattcagatcaccaccgccatcccaaatactgtctatccggcacagggccagtggccagcacctgtgacaaaacaacccgatattaagaaccccaaactcactaaggaccatcagacaaccgggtcacctagccgcaagaccattactatcaccgtgaagagcgtgacaagtgataccatacatatcagttggaaacttgctctgcccatgacagctctacgcctgagctggttgaaactaggccattctcccgctttcggcagcattaccgaaactatagtaaccggagaacgctccgagtatttagttaccgccctggagcccgacagtccgtacaaggtgtgcatggttccaatggagactagtaacctttatttgtttgacgaaactcccgtgtgcattgagactgaaacagcccctctcagaatgtacaaccccacaacaactctgaatagagaacaggaaaaggaaccctataagaatccaaacttacccctcgcggctataattgggggggccgtcgcactggtgactatcgcactgcttgccctggtctgctggtacgtccatcgcaacgggagcttgttttctagaaactgcgcttactccaagggacgccggaggaaagatgactatgcagaagcaggcaccaagaaggataattccattttggagatcagagagacaagtttccaaatgcttccaatttccaacgaaccgatctcaaaggaggagttcgtcatccacaccatattccctcctaacggtatgaacctctataaacagtcccagtag

SEQ ID NO: 259803 - DNA, 1950 bp, Artificial Sequence
  derived and/or modified sequence
atgatctcggctgcatggtctatcttcctcatcggaactaaaatagggttgttcttacaagtcgcacctttatccgtgatggcaaagtcatgtccatccgtgtgcaggtgcgatgctgggtttatctattgtaatgatcgctttctgacatcaattcccacaggcatacccgaggatgccactactctttacttgcagaacaatcaaatcaataatgctgggataccaagcgatcttaaaaaccttttaaaagtggagcgaatatatttatatcacaattcactggacgagtttcccacgaatttaccaaagtacgtaaaagagttacatttgcaagagaacaatatcaggacaattacctacgacagcctttccaaaattccttatctggaggaactccacctcgatgacaacagtgtgtccgcggtgagcatagaggagggtgccttccgtgacagcaactatctgagactactgttcctgtctagaaatcatctcagtactatcccctgggggttgccaagaacgatcgaggaattgaggttagacgacaacagaatcagcacaatcagttccccctcgctgcagggactgacttcattaaagagactggtgttggatggcaatcttctcaacaatcacggccttggagataaagttttcttcaacttagtgaacctgacggagctgtcactagtacgcaacagtctcaccgctgctcccgtaaatcttcccggaaccaatttaagaaaactgtacctacaggacaatcacatcaatcgagttccccctaacgccttcagctacttacgtcagctgtatcgtctagatatgtccaacaacaatttaagtaaccttcctcaaggaattttcgatgacttagacaacatcacacaactgatcctaagaaacaacccttggtattgcgggtgcaagatgaagtgggtgcgggattggctacagtcactccccgtgaaagttaatgtccggggactaatgtgccaggccccagaaaaagtgagaggcatggccataaaggacctaaacgcagagctgttcgattgcaaggacagtggaatagtctccaccatccagatcacaacggccatccccaatactgtctaccccgctcagggccagtggccagcacccgtcaccaagcagccagatatcaagaatcccaagttgaccaaagatcatcagactaccgggagtcctagtaggaagacgatcaccattactgttaaatcagtgacttccgatacaatccacatttcgtggaaactggccctgccaatgacggctctaaggctctcttggctgaaactgggtcacagccccgctttcggatccatcactgagacgatcgtaaccggtgagaggtccgaatacctggtgactgctttggaaccagatagtccatacaaagtgtgcatggtgcctatggaaactagcaatctttacctgtttgacgaaacccccgtctgtatcgagacagagactgccccattgaggatgtataacccgaccacaactctgaaccgggagcaggaaaaggaaccctacaagaatccaaacctgcctctggctgccatcatcggaggtgctgttgcactggttactattgctctcctagctctcgtatgttggtatgttcaccgaaacggttctctgttttcaagaaactgcgcatattcgaagggtcggaggcgtaaggacgattatgctgaggccggaaccaaaaaggataactctattctggagatcagagagacgtctttccagatgcttccaatatccaatgaacctattagtaaggaagagtttgtgattcataccatctttccacccaacggcatgaatttatataaaaataatcacagtgagagctctagcaatcggtcgtatagagactccgggatcccagacagtgatcatagccatagctag

SEQ ID NO: 259804 - DNA, 1950 bp, Artificial Sequence
  derived and/or modified sequence
atgatttccgccgcttggtccatctttcttattggaaccaagatcggtctgtttctgcaggtggcccctctgtccgtgatggcgaaaagctgcccctcagtgtgtaggtgtgacgcaggctttatctactgcaacgatagatttctgacttctatccccaccgggatccccgaagatgcgaccacgctttatctgcagaataaccaaataaacaacgcgggtatcccttccgacttgaaaaacctgctgaaagtggagcggatctacttataccataacagcctagacgaattccctaccaatttgcctaaatacgtcaaagagctccaccttcaggaaaataacatccgtacaatcacttatgacagcctctcaaagatcccctatctggaagagctgcacttagatgacaattctgtgtcggctgtctccattgaagaaggagccttcagagactctaattatctccggttgctcttcctgtcacgaaatcacttgtcaacaattccgtgggggttgcccaggacaatagaggaacttagacttgacgataatcgtatctcaaccatctccagcccgtcactacagggactgactagtctcaagagactggttttagacggcaatctcctcaataatcacgggctcggcgacaaagtttttttcaatctggtgaatttaaccgagctctccctggtacggaacagcctgaccgccgctccagtcaatctgcctggaacaaaccttcgtaagctctacctgcaggacaatcatatcaatcgtgttccccctaatgctttttcatatttgagacaactgtacagactcgacatgtcaaataacaatctcagcaacctcccacagggaatctttgacgatctggataatatcacccaactgatcctcagaaataacccctggtactgcggctgtaaaatgaagtgggttcgggattggctgcagtcattgccggtcaaggtgaacgtgcgaggcctgatgtgtcaggccccagaaaaggtacgcggaatggcaataaaagaccttaatgctgaactgttcgattgcaaagactctggaatcgtttccacaattcagataaccaccgcaatcccaaacactgtctacccggcacagggtcagtggcccgctcctgttacgaagcaacccgacatcaagaacccaaagctgactaaagatcaccaaaccaccgggtctccgtctaggaaaacaatcaccatcactgttaaatccgttacttctgataccattcacatcagttggaaactagccttgccaatgacagcattgcggctgagctggttgaagttggggcattcacccgctttcggatcgattactgagaccatcgtgaccggggagcggtctgagtatcttgtcaccgcgctggagcccgactctccttacaaggtatgcatggttccgatggaaacatcaaatctctacctgtttgatgaaactccagtgtgcatcgagacggagaccgcccctctgcggatgtataaccccaccactacgctaaaccgagaacaggagaaggagccctacaagaacccgaatctgcctctcgctgccataattggtggagccgtggctctggtgactatagcactgctggcactcgtgtgctggtacgtccatcgcaatggtagcctcttctctcgaaactgcgcctactctaagggtcgccgacggaaggacgattatgccgaagcaggaactaaaaaagataacagtattcttgagattcgtgagacctcattccagatgttaccaattagcaacgagccaatcagcaaggaagagttcgtaatccatactatcttcccacctaacggcatgaacctgtataaaaataatcatagtgaatcttctagtaaccgtagctaccgtgatagcggcatccctgattctgaccacagtcactcgtag

SEQ ID NO: 259805 - DNA, 1884 bp, Artificial Sequence
  derived and/or modified sequence
atgatctcagccgcttggagcatcttcttgatcgggactaagattggcttgtttttacaagtggcccctctttccgtcatggccaaaagctgcccctctgtatgcagatgcgacgccggttttatatactgtaacgaccggttcctaacctctataccaaccggcatcccggaagacgctaccaccctgtatctccaaaacaaccagataaacaacgctgggattccttctgacctcaagaatctgctgaaggtggagaggatctacctctatcataacagtttagatgagtttcccaccaacctgcctaaatatgtgaaagagctgcacctgcaggagaataacatccgcaccatcacatatgatagcttgtctaagattccttacttagaggagctacaccttgatgataacagtgttagcgctgtgagcatcgaagagggtgcatttagagactctaactacctgagactgctgttcctgagtcggaaccaccttagcacgattccatggggcctgcctaggactatcgaagagttgcgcctggatgacaacaggatttcaactatcagctccccttctttacaaggattgacaagcctgaaacgcctcgtgctcgatggtaacttgctcaacaaccatggactgggggataaagtgtttttcaacctggtgaacttgactgagctctccctagtcaggaacagcctcaccgcagcacctgtcaacctcccgggtacaaacctcagaaaattatacctgcaggacaatcatatcaatagagttccccctaacgccttctcttacctccggcagctctacagactagacatgtccaataataacttgtctaacctcccccagggtatcttcgatgatctcgataacatcactcagctcatcttgcggaacaacccctggtactgtggctgtaagatgaagtgggttagagactggctgcagtctctgccggtcaaggtgaatgtcagaggactgatgtgccaggcaccggaaaaggtgagaggcatggccattaaggatctgaatgccgagctgttcgactgtaaggatagcggcattgtgtccacgatccaaattactaccgctattcctaacacggtataccccgctcaagggcagtggcccgcacctgtgactaagcagccggacatcaaaaaccctaaactgacaaaagatcatcagaccaccggtagcccatcacggaagactattaccatcactgttaagtctgtgacatctgatacaatccacattagctggaagctggcgttgccaatgacggctctgcgcctatcttggctcaagctcggtcacagccctgccttcgggagtatcacagaaactatcgtcactggagaacgctcagagtacctagtcacagcactggagcccgatagtccctataaagtgtgtatggtgcctatggagacttcaaacctgtacctgtttgatgaaacaccagtgtgcatagagactgaaactgcccctctgagaatgtacaatccgacaacaaccctgaaccgagaacaggaaaaagaaccctacaagaaccccaatctacctttggcagcaatcatcggcggagctgtggccctggtgaccatagccctgttggctctggtatgttggtacgtgcacagaaacggttccttgttctcccggaactgtgcttactctaaggggcgtaggaggaaagatgactatgccgaagctgggaccaaaaaggacaacagtatcctcgaaatacgagagacaagcttccaaatgctaccaattagcaatgagcccatttcgaaggaagagtttgtcatccacaccattttcccccctaatgggatgaatttgtacaaacagtcccaatag

SEQ ID NO: 259806 - DNA, 1950 bp, Artificial Sequence
  derived and/or modified sequence
atgatcagcgccgcctggagcatcttcctgatcggcaccaagatcggcctgttcctgcaggtggcccccctgagcgtgatggccaagagctgccccagcgtgtgcagatgcgacgccggcttcatctactgcaacgacagattcctgaccagcatccccaccggcatccccgaggacgccaccaccctgtacctgcagaacaaccagatcaacaacgccggcatccccagcgacctgaagaacctgctgaaggtggagagaatctacctgtaccacaacagcctggacgagttccccaccaacctgcccaagtacgtgaaggagctgcacctgcaggagaacaacatcagaaccatcacctacgacagcctgagcaagatcccctacctggaggagctgcacctggacgacaacagcgtgagcgccgtgagcatcgaggagggcgccttcagagacagcaactacctgagactgctgttcctgagcagaaaccacctgagcaccatcccctggggcctgcccagaaccatcgaggagctgagactggacgacaacagaatcagcaccatcagcagccccagcctgcagggcctgaccagcctgaagagactggtgctggacggcaacctgctgaacaaccacggcctgggcgacaaggtgttcttcaacctggtgaacctgaccgagctgagcctggtgagaaacagcctgaccgccgcccccgtgaacctgcccggcaccaacctgagaaagctgtacctgcaggacaaccacatcaacagagtgccccccaacgccttcagctacctgagacagctgtacagactggacatgagcaacaacaacctgagcaacctgccccagggcatcttcgacgacctggacaacatcacccagctgatcctgagaaacaacccctggtactgcggctgcaagatgaagtgggtgagagactggctgcagagcctgcccgtgaaggtgaacgtgagaggcctgatgtgccaggcccccgagaaggtgagaggcatggccatcaaggacctgaacgccgagctgttcgactgcaaggacagcggcatcgtgagcaccatccagatcaccaccgccatccccaacaccgtgtaccccgcccagggccagtggcccgcccccgtgaccaagcagcccgacatcaagaaccccaagctgaccaaggaccaccagaccaccggcagccccagcagaaagaccatcaccatcaccgtgaagagcgtgaccagcgacaccatccacatcagctggaagctggccctgcccatgaccgccctgagactgagctggctgaagctgggccacagccccgccttcggcagcatcaccgagaccatcgtgaccggcgagagaagcgagtacctggtgaccgccctggagcccgacagcccctacaaggtgtgcatggtgcccatggagaccagcaacctgtacctgttcgacgagacccccgtgtgcatcgagaccgagaccgcccccctgagaatgtacaaccccaccaccaccctgaacagagagcaggagaaggagccctacaagaaccccaacctgcccctggccgccatcatcggcggcgccgtggccctggtgaccatcgccctgctggccctggtgtgctggtacgtgcacagaaacggcagcctgttcagcagaaactgcgcctacagcaagggcagaagaagaaaggacgactacgccgaggccggcaccaagaaggacaacagcatcctggagatcagagagaccagcttccagatgctgcccatcagcaacgagcccatcagcaaggaggagttcgtgatccacaccatcttcccccccaacggcatgaacctgtacaagaacaaccacagcgagagcagcagcaacagaagctacagagacagcggcatccccgacagcgaccacagccacagctag

SEQ ID NO: 259807 - DNA, 1884 bp, Artificial Sequence
  derived and/or modified sequence
atgatcagcgccgcctggagcatcttcctgatcggcaccaagatcggcctgttcctgcaggtggcccccctgagcgtgatggccaagagctgccccagcgtgtgcagatgcgacgccggcttcatctactgcaacgacagattcctgaccagcatccccaccggcatccccgaggacgccaccaccctgtacctgcagaacaaccagatcaacaacgccggcatccccagcgacctgaagaacctgctgaaggtggagagaatctacctgtaccacaacagcctggacgagttccccaccaacctgcccaagtacgtgaaggagctgcacctgcaggagaacaacatcagaaccatcacctacgacagcctgagcaagatcccctacctggaggagctgcacctggacgacaacagcgtgagcgccgtgagcatcgaggagggcgccttcagagacagcaactacctgagactgctgttcctgagcagaaaccacctgagcaccatcccctggggcctgcccagaaccatcgaggagctgagactggacgacaacagaatcagcaccatcagcagccccagcctgcagggcctgaccagcctgaagagactggtgctggacggcaacctgctgaacaaccacggcctgggcgacaaggtgttcttcaacctggtgaacctgaccgagctgagcctggtgagaaacagcctgaccgccgcccccgtgaacctgcccggcaccaacctgagaaagctgtacctgcaggacaaccacatcaacagagtgccccccaacgccttcagctacctgagacagctgtacagactggacatgagcaacaacaacctgagcaacctgccccagggcatcttcgacgacctggacaacatcacccagctgatcctgagaaacaacccctggtactgcggctgcaagatgaagtgggtgagagactggctgcagagcctgcccgtgaaggtgaacgtgagaggcctgatgtgccaggcccccgagaaggtgagaggcatggccatcaaggacctgaacgccgagctgttcgactgcaaggacagcggcatcgtgagcaccatccagatcaccaccgccatccccaacaccgtgtaccccgcccagggccagtggcccgcccccgtgaccaagcagcccgacatcaagaaccccaagctgaccaaggaccaccagaccaccggcagccccagcagaaagaccatcaccatcaccgtgaagagcgtgaccagcgacaccatccacatcagctggaagctggccctgcccatgaccgccctgagactgagctggctgaagctgggccacagccccgccttcggcagcatcaccgagaccatcgtgaccggcgagagaagcgagtacctggtgaccgccctggagcccgacagcccctacaaggtgtgcatggtgcccatggagaccagcaacctgtacctgttcgacgagacccccgtgtgcatcgagaccgagaccgcccccctgagaatgtacaaccccaccaccaccctgaacagagagcaggagaaggagccctacaagaaccccaacctgcccctggccgccatcatcggcggcgccgtggccctggtgaccatcgccctgctggccctggtgtgctggtacgtgcacagaaacggcagcctgttcagcagaaactgcgcctacagcaagggcagaagaagaaaggacgactacgccgaggccggcaccaagaaggacaacagcatcctggagatcagagagaccagcttccagatgctgcccatcagcaacgagcccatcagcaaggaggagttcgtgatccacaccatcttcccccccaacggcatgaacctgtacaagcagagccagtag

SEQ ID NO: 259808 - protein, 1491 aa, Artificial Sequence
  derived and/or modified sequence
MSRAVRLPVPCPVQLGTLRNDSLEAQLHEYVKQGNYVKVKKILKKGIYVDAVNSLGQTALFVAALLGLRKFVDVLVDYGSDPNHRCFDGSTPVHAAAFSGNQWILSKLLDAGGDLRLHDERGQNPKTWALTAGKERSTQIVEFMQRCASHMQAIIQGFSYDLLKKIDSPQRLVYSPSWCGGLVQGNPNGSPNRLLKAGVISAQNIYSFGFGKFYLTGATQMAYLGSLPVIGEKEVIQADDEPTFSFFSGPYMVMTNLVWNGSRVTVKELNLPTHPHCSRLRLADLLIAEQEHSSKLRHPYLLQLMAVCLSQDLEKTRLVYERITIGTLFSVLHERRSQFPVLHMEVIVHLLLQISDALRYLHFQGFIHRSLSSYAVHIISPGEARLTNLEYMLESEDRGVQRDLTRVPLPTQLYNWAAPEVILQKAATVKSDIYSFSMIMQEILTDDIPWKGLDGSVVKKAVVSGNYLEADVRLPKPYYDIVKSGIHVKQKDRTMNLQDIRYILKNDLKDFTGAQRTQPTESPRVQRYGLHPDVNVYLGLTSEHPRETPDMEIIELKEMGSQPHSPRVHSLFTEGTLDPQAPDPCLMARETQNQDAPCPAPFMAEEASSPSTGQPSLCSFEINEIYSGCLILEDDIEEPPGAASSLEADGPNQVDELKSMEEELDKMEREACCFGSEDESSSKAETEYSFDDWDWQNGSLSSLSLPESTREAKSNLNNMSTTEEYLISKCVLDLKIMQTIMHENDDRLRNIEQILDEVEMKQKEQEERMSLWATSREFTNAYKLPLAVGPPSLNYIPPVLQLSGGQKPDTSGNYPTLPRFPRMLPTLCDPGKQNTDEQFQCTQGAKDSLETSRIQNTSSQGRPRESTAQAKATQFNSALFTLSSHRQGPSASPSCHWDSTRMSVEPVSSEIYNAESRNKDDGKVHLKWKMEVKEMAKKAATGQLTVPPWHPQSSLTLESEAENEPDALLQPPIRSPENTDWQRVIEYHRENDEPRGNGKFDKTGNNDCDSDQHGRQPRLGSFTSIRHPSPRQKEQPEHSEAFQASSDTLVAVEKSYSHQSMQSTCSPESSEDITDEFLTPDGEYFYSSTAQENLALETSSPIEEDFEGIQGAFAQPQVSGEEKFQMRKILGKNAEILPRSQFQPVRSTEDEQEETSKESPKELKEKDISLTDIQDLSSISYEPDSSFKEASCKTPKINHAPTSVSTPLSPGSVSSAASQYKDCLESITFQVKTEFASCWNSQEFIQTLSDDFISVRERAKKLDSLLTSSETPPSRLTGLKRLSSFIGAGSPSLVKACDSSPPHATQRRSLPKVEAFSQHHIDELPPPSQELLDDIELLKQQQGSSTVLHENTASDGGGTANDQRHLEEQETDSKKEDSSMLLSKETEDLGEDTERAHSTLDEDLERWLQPPEESVELQDLPKGSERETNIKDQKVGEEKRKREDSITPERRKSEGVLGTSEEDELKSCFWKRLGWSESSRIIVLDQSDLSD

SEQ ID NO: 259809 - DNA, 4476 bp, Artificial Sequence
  derived and/or modified sequence
atgagcagagccgtgagactgcccgtgccctgccccgtgcagctgggcaccctgagaaacgacagcctggaggcccagctgcacgagtacgtgaagcagggcaactacgtgaaggtgaagaagatcctgaagaagggcatctacgtggacgccgtgaacagcctgggccagaccgccctgttcgtggccgccctgctgggcctgagaaagttcgtggacgtgctggtggactacggcagcgaccccaaccacagatgcttcgacggcagcacccccgtgcacgccgccgccttcagcggcaaccagtggatcctgagcaagctgctggacgccggcggcgacctgagactgcacgacgagagaggccagaaccccaagacctgggccctgaccgccggcaaggagagaagcacccagatcgtggagttcatgcagagatgcgccagccacatgcaggccatcatccagggcttcagctacgacctgctgaagaagatcgacagcccccagagactggtgtacagccccagctggtgcggcggcctggtgcagggcaaccccaacggcagccccaacagactgctgaaggccggcgtgatcagcgcccagaacatctacagcttcggcttcggcaagttctacctgaccggcgccacccagatggcctacctgggcagcctgcccgtgatcggcgagaaggaggtgatccaggccgacgacgagcccaccttcagcttcttcagcggcccctacatggtgatgaccaacctggtgtggaacggcagcagagtgaccgtgaaggagctgaacctgcccacccacccccactgcagcagactgagactggccgacctgctgatcgccgagcaggagcacagcagcaagctgagacacccctacctgctgcagctgatggccgtgtgcctgagccaggacctggagaagaccagactggtgtacgagagaatcaccatcggcaccctgttcagcgtgctgcacgagagaagaagccagttccccgtgctgcacatggaggtgatcgtgcacctgctgctgcagatcagcgacgccctgagatacctgcacttccagggcttcatccacagaagcctgagcagctacgccgtgcacatcatcagccccggcgaggccagactgaccaacctggagtacatgctggagagcgaggacagaggcgtgcagagagacctgaccagagtgcccctgcccacccagctgtacaactgggccgcccccgaggtgatcctgcagaaggccgccaccgtgaagagcgacatctacagcttcagcatgatcatgcaggagatcctgaccgacgacatcccctggaagggcctggacggcagcgtggtgaagaaggccgtggtgagcggcaactacctggaggccgacgtgagactgcccaagccctactacgacatcgtgaagagcggcatccacgtgaagcagaaggacagaaccatgaacctgcaggacatcagatacatcctgaagaacgacctgaaggacttcaccggcgcccagagaacccagcccaccgagagccccagagtgcagagatacggcctgcaccccgacgtgaacgtgtacctgggcctgaccagcgagcaccccagagagacccccgacatggagatcatcgagctgaaggagatgggcagccagccccacagccccagagtgcacagcctgttcaccgagggcaccctggacccccaggcccccgacccctgcctgatggccagagagacccagaaccaggacgccccctgccccgcccccttcatggccgaggaggccagcagccccagcaccggccagcccagcctgtgcagcttcgagatcaacgagatctacagcggctgcctgatcctggaggacgacatcgaggagccccccggcgccgccagcagcctggaggccgacggccccaaccaggtggacgagctgaagagcatggaggaggagctggacaagatggagagagaggcctgctgcttcggcagcgaggacgagagcagcagcaaggccgagaccgagtacagcttcgacgactgggactggcagaacggcagcctgagcagcctgagcctgcccgagagcaccagagaggccaagagcaacctgaacaacatgagcaccaccgaggagtacctgatcagcaagtgcgtgctggacctgaagatcatgcagaccatcatgcacgagaacgacgacagactgagaaacatcgagcagatcctggacgaggtggagatgaagcagaaggagcaggaggagagaatgagcctgtgggccaccagcagagagttcaccaacgcctacaagctgcccctggccgtgggcccccccagcctgaactacatcccccccgtgctgcagctgagcggcggccagaagcccgacaccagcggcaactaccccaccctgcccagattccccagaatgctgcccaccctgtgcgaccccggcaagcagaacaccgacgagcagttccagtgcacccagggcgccaaggacagcctggagaccagcagaatccagaacaccagcagccagggcagacccagagagagcaccgcccaggccaaggccacccagttcaacagcgccctgttcaccctgagcagccacagacagggccccagcgccagccccagctgccactgggacagcaccagaatgagcgtggagcccgtgagcagcgagatctacaacgccgagagcagaaacaaggacgacggcaaggtgcacctgaagtggaagatggaggtgaaggagatggccaagaaggccgccaccggccagctgaccgtgcccccctggcacccccagagcagcctgaccctggagagcgaggccgagaacgagcccgacgccctgctgcagccccccatcagaagccccgagaacaccgactggcagagagtgatcgagtaccacagagagaacgacgagcccagaggcaacggcaagttcgacaagaccggcaacaacgactgcgacagcgaccagcacggcagacagcccagactgggcagcttcaccagcatcagacaccccagccccagacagaaggagcagcccgagcacagcgaggccttccaggccagcagcgacaccctggtggccgtggagaagagctacagccaccagagcatgcagagcacctgcagccccgagagcagcgaggacatcaccgacgagttcctgacccccgacggcgagtacttctacagcagcaccgcccaggagaacctggccctggagaccagcagccccatcgaggaggacttcgagggcatccagggcgccttcgcccagccccaggtgagcggcgaggagaagttccagatgagaaagatcctgggcaagaacgccgagatcctgcccagaagccagttccagcccgtgagaagcaccgaggacgagcaggaggagaccagcaaggagagccccaaggagctgaaggagaaggacatcagcctgaccgacatccaggacctgagcagcatcagctacgagcccgacagcagcttcaaggaggccagctgcaagacccccaagatcaaccacgcccccaccagcgtgagcacccccctgagccccggcagcgtgagcagcgccgccagccagtacaaggactgcctggagagcatcaccttccaggtgaagaccgagttcgccagctgctggaacagccaggagttcatccagaccctgagcgacgacttcatcagcgtgagagagagagccaagaagctggacagcctgctgaccagcagcgagaccccccccagcagactgaccggcctgaagagactgagcagcttcatcggcgccggcagccccagcctggtgaaggcctgcgacagcagccccccccacgccacccagagaagaagcctgcccaaggtggaggccttcagccagcaccacatcgacgagctgcccccccccagccaggagctgctggacgacatcgagctgctgaagcagcagcagggcagcagcaccgtgctgcacgagaacaccgccagcgacggcggcggcaccgccaacgaccagagacacctggaggagcaggagaccgacagcaagaaggaggacagcagcatgctgctgagcaaggagaccgaggacctgggcgaggacaccgagagagcccacagcaccctggacgaggacctggagagatggctgcagccccccgaggagagcgtggagctgcaggacctgcccaagggcagcgagagagagaccaacatcaaggaccagaaggtgggcgaggagaagagaaagagagaggacagcatcacccccgagagaagaaagagcgagggcgtgctgggcaccagcgaggaggacgagctgaagagctgcttctggaagagactgggctggagcgagagcagcagaatcatcgtgctggaccagagcgacctgagcgactag

SEQ ID NO: 259810 - DNA, 4476 bp, Artificial Sequence
  derived and/or modified sequence
atgtctcgcgctgttcgcctcccagtcccatgtccagtccagctgggcaccctcaggaatgacagtctagaggcccaactacatgagtacgtgaagcaaggcaactatgtgaaagtgaagaaaatcttaaagaagggcatctatgttgacgctgtgaactccctgggacagacggcccttttcgtggccgctttgctggggctgaggaaattcgtcgacgtgctagtggactatgggtctgatcctaaccaccgctgctttgacggttccactcctgtccatgcggcagctttctcaggaaaccagtggatactctctaaactgttggacgctgggggggacctcaggctgcacgatgagagaggccaaaatcccaagacatgggcgctgacagcaggcaaagagaggtctacgcaaattgtcgagttcatgcaaaggtgtgcatcccacatgcaggccatcattcagggattttcctatgatctgctgaagaagattgatagtcctcaacggcttgtgtactcaccttcatggtgcggtggactcgtccagggcaatccaaatggttccccgaatcgcctgcttaaggcaggtgtgattagcgcccagaacatttattctttcggattcggtaaattctatctgacaggcgcgactcagatggcctacctcggttccctgccagtgattggagagaaggaagttattcaggctgatgacgaacccaccttctcttttttttcaggaccctacatggtgatgactaatctggtgtggaacggcagccgggtgacggtgaaggagctcaacttaccaacccatccccactgctcaagactgcggttagcagaccttttgattgctgaacaagagcacagcagcaaattaagacacccatacctgttacaactgatggccgtctgtctgtctcaggacctcgaaaagacgcgcctggtttacgagaggattaccatcggtactctgttctctgtgttgcacgagcggagaagccagttccctgttctacatatggaggtcatagttcatctacttttgcaaatttcagacgcccttcgttatctccatttccagggctttatacaccgctccctcagttcatatgcagtgcacataatttcacctggcgaggcccgtttaacgaacctggaatatatgctggagtcagaagaccggggcgtccaaagggacctgaccagagtgccactgccgacacagctgtacaattgggccgccccagaagtgattctgcagaaagcggcgactgtgaaaagcgacatttacagcttctccatgattatgcaagagatactgaccgatgacatcccttggaaaggcctggacggatccgtggtcaagaaagccgttgtatctggcaactatctagaagccgacgtgcgcctgccaaagccttattatgacattgtcaagagtggaatccatgtgaaacagaaggatagaacaatgaacctccaggacatccggtacatactgaagaacgatttgaaggacttcactggagcccagaggacgcagccaacggaaagccctagagttcaacgatacggcttgcaccctgatgtgaatgtgtacctcgggctgaccagcgagcaccctcgcgaaacaccagacatggaaatcatcgagctgaaagagatgggcagtcagccccatagcccaagggtgcacagcctattcacagaggggactctcgacccacaagcacctgatccctgcctcatggcccgggagacacagaaccaggatgccccttgcccagcaccatttatggccgaagaagcttctagtccaagcaccgggcagccttcactttgctcattcgagataaacgagatttatagcggatgcctgattctcgaggacgacattgaagagcccccaggcgcagcaagttccctggaagccgatggacctaaccaggtggatgaacttaagagcatggaggaagagttggacaagatggagcgagaggcttgttgcttcggctccgaagatgaatcctcctccaaggccgagaccgagtatagctttgatgattgggactggcagaacgggagccttagctcccttagcctcccagaatcaactagggaggcaaaatctaatctgaacaacatgagcacaacagaggaatacctgatcagtaaatgcgttctggaccttaaaataatgcagaccatcatgcacgagaatgatgaccgactgaggaatatcgagcagatccttgacgaagtcgagatgaaacagaaggagcaggaagagagaatgtctctgtgggccacaagccgggagttcacaaatgcgtataagctgcccctggcagttggacccccatcccttaactacatcccacctgttctgcagctatcaggcgggcagaaaccggatacgtcggggaattacccaacattaccgcgtttcccacggatgttgccgactctgtgtgaccccggaaaacaaaacaccgatgagcagtttcagtgcacacagggagctaaggactcacttgagacgtccaggattcagaacacaagctcacaggggcggcccagggaatccaccgcccaagcaaaggccacccaatttaacagcgccctattcacactaagtagccaccggcagggcccctccgcctccccgagttgccattgggactcaactaggatgtcagttgaaccggtgagcagcgagatctataatgcggaatctagaaataaagatgatggaaaggtacatttgaaatggaagatggaggtgaaggaaatggctaagaaggcggccactggccagcttacagtgccgccttggcatcctcagtcctccctaacactcgagagcgaggccgagaacgagcccgacgccctgctgcagcctccgatcaggagccccgagaacactgattggcagagagtcattgagtatcacagggagaatgacgaacctaggggaaatggcaaattcgataaaactggcaataacgactgcgattctgaccagcacggcagacagcctaggctcggctctttcacttctataagacacccatccccaagacagaaggaacagcccgaacacagtgaagctttccaggctagcagtgataccttagtagccgttgaaaaatcatattcccatcagtctatgcagagcacatgtagccctgagtccagcgaagatattacagacgagtttcttacacctgatggggaatacttttattcaagcacggcccaggaaaatctcgctctagagaccagttccccaatcgaggaagactttgagggaatccagggagctttcgcacagcctcaggttagcggggaggaaaagttccagatgcgtaagattttaggtaagaatgcggaaatcctgcctcgttctcagtttcagcccgtgcgctccaccgaggacgaacaagaggagacaagcaaggagtcccccaaagaactgaaagagaaggacatttcactgacagacattcaggacctgagctctatttcctatgagcccgacagttcttttaaagaggcatcctgtaagactcccaaaatcaatcatgccccgacctctgtgtcaactccccttagcccgggtagtgtaagtagcgccgcgtcacaatataaggattgtctggaatctattacttttcaggtgaagacagagttcgctagttgctggaactcgcaagaattcatccagaccctgagcgatgatttcatcagtgtgcgggagagagcaaagaaactggactcgctgctcacctcctctgagacccctccttcaaggctgaccggtttaaagagactgtcctccttcatcggagccgggagtccatccctggtgaaggcttgtgatagctctccaccccacgccacccaaagaagaagtctgcctaaggtggaagccttctctcagcatcacattgatgagctgcccccaccctcccaagagttgcttgatgatattgagcttctaaagcaacagcagggaagctctaccgtgcttcacgaaaacactgcatcagacggcggaggtacagccaacgaccaacgtcacttggaggaacaggaaaccgacagcaaaaaagaagactcttccatgttgctctctaaggaaaccgaggacctcggggaagatacagagagggcacactcgacattagacgaggacttagagcgctggctgcagcctcccgaggagagcgtggaattgcaggatcttcccaaaggctcagagagggagacaaacatcaaggaccagaaagtaggcgaggagaaacggaaacgggaagattccatcacacccgagcgccggaagtccgagggagtgctcggcacaagcgaggaggacgagcttaaatcatgtttttggaaacgcttgggttggtccgagtccagcaggattatcgtgctggaccaaagtgatctctccgattag

SEQ ID NO: 259811 - DNA, 4476 bp, Artificial Sequence
  derived and/or modified sequence
atgagcagagctgtgcggctgcctgtgccctgccctgtgcagctgggcaccctgagaaatgacagcctggaggcccagctgcacgagtatgtgaagcagggcaactacgtgaaggtgaagaagatcctgaagaagggcatctacgtggatgctgtgaacagcctgggccagacagccctgtttgtggccgccctgctgggcctgaggaagtttgtggatgtgctggtggactatggcagtgaccccaaccaccgctgctttgatggcagcacccctgtgcatgctgctgccttcagcggcaaccagtggatcctgagcaagctgctggatgctggaggagacctgcggctgcatgatgagcggggccagaaccccaagacctgggccctgacagctgggaaggagaggagcacccagatcgtggagttcatgcagagatgtgccagccacatgcaggccatcatccagggcttctcctatgacctgctgaagaagattgacagcccccagaggctggtgtacagccccagctggtgtggcggcctggtgcagggcaaccccaacggcagccccaaccggctgctgaaggccggggtcatcagcgcccagaacatctacagctttggatttgggaagttctacctgaccggggccacccagatggcctacctgggcagcctgcccgtcatcggggagaaggaggtgatccaggctgatgatgagcccaccttctccttcttcagcggcccctacatggtgatgaccaacctggtgtggaatggcagccgggtgacagtgaaggagctgaacctgcccacccacccccactgcagccggctgcggctggccgacctgctgattgctgagcaggagcacagcagcaagctgcggcacccctacctgctgcagctgatggctgtgtgcctgagccaggacctggagaagacccggctggtgtatgaaagaatcaccatcggcaccctcttctctgtgctgcatgaaagaagaagccagtttcctgtgctgcacatggaggtgattgtgcacctgctgctgcagatcagtgatgccctgcgctacctgcacttccagggcttcatccacaggagcctgagcagctatgctgtgcacatcatcagccctggagaggcccggctgaccaacctggagtacatgctggagagcgaggacagaggagtgcagagggacctgaccagggtgcccctgcccacccagctgtacaactgggccgcccctgaggtgatcctgcagaaggccgccaccgtgaagagtgacatctacagcttctccatgatcatgcaggagatcctgacagatgacatcccctggaagggcctggatggctctgtggtgaagaaggctgtggtgtctggcaactacctggaggctgatgtgcggctgcccaagccctactatgacatcgtgaagagcggcatccacgtgaagcagaaggacaggaccatgaacctgcaggacatccgctacatcctgaagaatgacctgaaggacttcaccggggcccagaggacccagcccacagagagcccccgggtgcagagatatggcctgcacccagatgtgaatgtgtacctgggcctgaccagcgagcacccccgggagaccccagacatggagatcatcgagctgaaggagatgggcagccagccccacagcccccgggtgcacagcctcttcacagagggcaccctggacccccaggccccagacccctgcctgatggcccgggagacccagaaccaggatgccccctgcccagcccccttcatggccgaggaggccagcagccccagcacaggccagcccagcctgtgcagctttgagatcaatgagatctacagcggctgcctgatcctggaggatgacatcgaggagcccccaggggccgccagcagcctggaggctgatggccccaaccaggtggatgagctgaagtccatggaggaggagctggacaagatggagcgggaggcctgctgcttcggctctgaagatgagagcagcagcaaggccgagacagagtacagctttgatgactgggactggcagaatggcagcctgagcagcctgagcctgcctgagagcacccgggaggccaagagcaacctgaacaacatgagcaccacagaggagtacctgatcagcaaatgtgtgctggacctgaagatcatgcagaccatcatgcatgaaaatgatgaccggctgagaaatattgagcagatcctggatgaggtggagatgaagcagaaggagcaggaggagaggatgagcctgtgggccaccagccgggagttcaccaatgcctacaagctgcccctggccgtgggcccccccagcctgaactacatcccccctgtgctgcagctgagcggcggccagaagccagacaccagcggcaactaccccaccctgccccgcttccccaggatgctgcccaccctgtgtgaccccgggaagcagaacacagatgagcagttccagtgcacccagggcgccaaggacagcctggagaccagccgcatccagaacaccagcagccagggccggccccgggagagcacagcccaggccaaggccacccagttcaacagcgccctcttcaccctgagcagccaccggcagggccccagcgccagccccagctgccactgggacagcaccaggatgtctgtggagcctgtgtcctctgagatctacaatgctgagagcaggaacaaggatgatggcaaggtgcacctgaagtggaagatggaggtgaaggagatggccaagaaggccgccaccggccagctgactgtgcccccctggcacccccagagcagcctgaccctggagagcgaggccgagaatgaaccagatgccctgctgcagccccccatccgcagcccagaaaatacagactggcagagggtgattgagtaccaccgggagaatgatgagcccagaggaaatggcaagtttgacaagacaggcaacaatgactgtgacagcgaccagcacggccggcagccccggctgggcagcttcaccagcatccgccaccccagcccccggcagaaggagcagcctgagcacagcgaggccttccaggccagcagtgacaccctggtggccgtggagaagagctacagccaccagagcatgcagagcacctgcagccctgagagcagcgaggacatcacagatgagttcctgaccccagatggagagtacttctacagcagcacagcccaggagaacctggccctggagaccagcagccccatcgaggaggactttgagggcatccagggcgcctttgcccagccccaggtgtctggagaggagaagttccagatgaggaagatcctgggcaagaatgctgagatcctgcccaggagccagttccagcctgtgcgcagcacagaagatgagcaggaggagaccagcaaggagagccccaaggagctgaaggagaaggacatcagcctgacagacatccaggacctgagcagcatctcctatgagccagacagcagcttcaaggaggccagctgcaagacccccaagatcaaccacgcccccacctctgtgtccacccccctgagccctggctctgtgtcctctgctgccagccagtacaaggactgcctggagagcatcaccttccaggtgaagacagaatttgccagctgctggaacagccaggagttcatccagaccctgagtgatgacttcatctctgtgcgggagcgggccaagaagctggacagcctgctgaccagcagcgagaccccacccagccggctgaccggcctgaagaggctgagcagcttcatcggggccggcagccccagcctggtgaaggcctgtgacagcagcccccctcatgccacccagaggaggagcctgcccaaggtggaggccttcagccagcaccacattgatgagctgcccccacccagccaggagctgctggatgacatcgagctgctgaagcagcagcagggcagcagcacagtgctgcacgagaacacagccagtgatggcggcggcacagccaatgaccagaggcacctggaggagcaggagacagacagcaagaaggaggacagctccatgctgctgagcaaggagacagaggacctgggggaggacacagagcgggcccacagcaccctggatgaggacctggagcgctggctgcagcccccagaggagagcgtggagctgcaggacctgcccaagggcagcgagcgggagaccaacatcaaggaccagaaggtgggggaggagaagaggaagagagaagattccatcaccccagagaggaggaagtcagaaggagtgctgggcaccagcgaggaggatgagctgaagagctgcttctggaagaggctgggctggagcgagagcagccgcatcatcgtgctggaccagagcgacctgagtgactag

SEQ ID NO: 259812 - DNA, 4476 bp, Artificial Sequence
  derived and/or modified sequence
atgagccgggccgtgcggctgcccgtgccctgccccgtgcagctgggtaccctgaggaatgactcgctggaagcacagttgcacgagtacgtcaaacagggtaactatgtaaaagtgaagaaaatcctcaaaaaggggatctacgtggacgctgtgaacagcctgggccagactgccctttttgtcgccgcccttctcggtctaaggaagttcgtagacgtcctcgtggattacggaagtgatccaaaccataggtgctttgatgggtccacaccagtgcacgcagccgccttctcaggaaatcagtggatcctatctaaattactcgacgctgggggagatttgaggttacatgatgaaagaggtcagaaccctaaaacatgggcccttactgccggcaaggagaggtccacacagatcgtagaattcatgcagcgttgcgcttcccatatgcaggctattatccaaggatttagctacgatctccttaaaaaaatcgacagcccacagcgtctcgtgtactctccctcgtggtgtggaggactggtgcaggggaaccctaatggcagcccaaacaggctcctcaaggccggcgttattagcgctcaaaacatctattcctttggcttcggaaaattttacctgacaggcgctacacaaatggcatatctgggatccctgcctgttattggggagaaagaagtgattcaggcagatgacgagcctacattctcgttctttagcggaccttacatggtaatgaccaacttagtttggaacgggtctagagtcaccgtcaaagagttgaacctgcccactcaccctcactgctctcgacttcgcctggccgacttgttgatcgcagagcaggaacactcatctaagcttcggcacccctacctgctgcagctgatggcagtttgtctgtctcaggacctagagaagaccagattggtgtacgaaagaataactattggaactctcttctccgtgcttcacgagaggcgcagccagttccctgtgttgcacatggaggtcatcgtacatttgctgcttcagatttctgacgccctccggtacctgcactttcaagggtttatccacaggtcactcagcagttatgccgttcacataatcagccctggcgaagctcggctaaccaatctcgaatatatgctcgagagcgaggaccggggtgttcaaagggatctcacccgggtgccgctgcccacacagctgtataactgggctgccccagaggtgatcttgcaaaaggcagctactgtgaaatctgatatttacagtttttctatgattatgcaggagattctcacagacgacataccatggaagggactggatggcagtgtcgttaagaaagctgtcgttagcggcaattatcttgaagcagatgtgcgtctcccaaagccttactacgacatcgtgaagagcggtattcatgtgaagcagaaagatcgcaccatgaatctgcaggacattcggtacatactgaaaaacgacctaaaggattttactggtgcccaacgaacacaacccactgagtctccccgcgtacagaggtatgggctgcaccccgatgtaaatgtctatctgggactcactagcgaacacccccgagagacacctgacatggagatcattgagcttaaagagatgggctcccaaccccacagcccacgtgtccacagcctgttcacagaaggaacgctagacccccaagccccagacccttgcctaatggcccgtgaaacccagaatcaggacgccccatgtccagccccgtttatggcagaggaggcttccagcccatctaccgggcaaccaagcctgtgttccttcgaaattaatgaaatttattcgggctgcctcattttggaagacgacattgaggagccaccaggagctgcctccagcctggaagctgacggaccaaatcaagttgatgagttaaagtctatggaagaagaattggataaaatggaaagggaggcatgttgttttggtagtgaggacgagtcttctagtaaggcagaaacagagtactctttcgacgattgggattggcagaatggtagtctgtctagtctttcgctccccgagtcaacacgggaggccaagagtaacctcaacaacatgtcaaccacggaagaatacctgatctcaaaatgcgtgctggatctgaagataatgcagacaattatgcatgagaacgatgatagactccgaaatatcgagcagatccttgacgaagtcgagatgaaacaaaaggaacaggaagagcggatgtccctgtgggccacatctcgcgagtttactaacgcatacaaactgcccctcgcggtgggacctcccagtcttaactacataccccccgtgctgcagctctctggagggcaaaagcccgacaccagtggaaactacccgacccttccccgctttcctcgaatgctccccactctatgtgacccaggaaaacagaatactgacgagcagtttcaatgcactcagggcgcaaaggattccttggagacttctaggattcagaatacaagtagtcaaggaaggccacgggagtccacggcgcaggctaaggccactcagtttaattctgccctttttacattatcctcccaccggcaggggccgagcgcgtcgcccagttgccattgggatagtactcggatgagcgtcgaacccgtgagcagcgagatttacaacgcggaaagcaggaataaggacgatggcaaggtgcacctgaagtggaaaatggaggtgaaagagatggcgaagaaggcagcaacagggcagttgacggttccaccctggcaccctcagtcttctcttaccctagagagtgaagccgagaacgagcctgatgcactcctccaaccacctatccgatcgccagagaatactgattggcagcgcgttattgagtaccacagggagaatgacgagccaagggggaatgggaagtttgacaagacagggaacaacgactgcgactccgaccagcacggaagacagccgagactcggtagtttcaccagtattaggcacccgagcccgcgacaaaaggaacagccagaacatagcgaagctttccaagcgagctccgatacgctagtcgccgtggaaaaatcctacagtcaccagtccatgcagtccacttgtagcccagagagtagcgaggatatcacagatgagtttctcacccctgacggggagtacttctatagttctaccgcgcaggaaaatctggccttagaaacaagttcccctattgaagaagattttgagggcatccaaggagccttcgcccagcctcaagtctcgggcgaggaaaagtttcagatgcggaagattctcggaaaaaacgccgagattttaccgcgctcccagtttcaacccgtcaggagcacagaagacgaacaggaagagaccagtaaagagtcccccaaggagttaaaggagaaggacatttcgctgactgacatccaggacttatcttcaataagctacgagccagactcctccttcaaggaagccagctgtaagacccccaaaattaaccatgctcctacttcggtcagtacccccctttcccctgggtcagtcagttctgcagcgtcccagtataaggactgcctggaaagcattacctttcaggttaagactgaattcgcctcctgttggaactctcaggagttcatccaaacattgagcgatgacttcatatcagtgagagaaagggcaaaaaagcttgatagtcttttgacttccagtgagaccccaccctcccggctgactgggctcaaacggctctcttccttcattggcgctggcagcccgagcctggtgaaggcgtgtgattccagcccaccccacgccacgcagcgccgtagtctgcccaaggtggaggctttcagccagcatcatattgacgaacttccacctccttcgcaagagctcctggatgacatcgagctgctgaagcagcagcaggggtcgtccaccgtgctgcatgaaaacactgcctccgatggaggcggcactgcaaatgaccagcgccacctagaagagcaagaaacggactctaagaaagaggactcgtcaatgcttttgagtaaggagactgaagaccttggagaggataccgaacgcgctcattccaccctagatgaggatttggagagatggctccagccaccagaagaatcagttgagctacaggacctgccaaagggaagcgagcgcgaaactaacattaaggatcagaaggtgggggaagagaaaagaaagcgggaagactcgatcacccctgaaagacgcaagtctgagggcgtgttgggaaccagtgaggaggatgagctgaaatcctgtttttggaaacgactgggctggtcggaatcgagtcggattatcgttctggaccaatcggatctttctgattag

SEQ ID NO: 259813 - DNA, 4476 bp, Artificial Sequence
  derived and/or modified sequence
atgagcagggccgtgcgcctgcctgtgccctgtcccgtgcaactgggcactctccgaaatgactctcttgaagcccagctccacgagtacgtgaaacaaggcaactatgtaaaggtcaagaaaatcctgaaaaaaggaatctacgttgacgctgtcaattcgctcgggcagaccgctctgtttgttgctgccctgctgggactccggaaatttgttgatgtgctggtggactacgggtcagatcctaatcataggtgcttcgatggttcgactcctgtccatgctgcagccttcagcggcaatcagtggatacttagcaagctgctggacgcgggaggcgatttgagacttcatgatgaacgcggacagaatccaaagacttgggcattgaccgctggaaaggaaagatcaactcagatcgtagaatttatgcagcgctgcgcaagccacatgcaggcaatcatacaggggttcagctatgatttgctcaagaaaatcgattctcctcagcgacttgtttacagtcctagctggtgtggcggtctggtgcagggcaatcctaacggatcccctaacaggcttctcaaggccggtgtaatctccgcccagaatatctactcatttggattcggcaaattctatctgactggtgccacacagatggcctacctggggagcttaccagtaatcggagaaaaggaggtgatccaggcggatgatgaacccactttctcgtttttctctggtccatatatggtgatgaccaacttggtgtggaacggaagccgcgtaacagtgaaggagctaaaccttcccactcatcctcattgttcacggctgcgtctggccgacctgttgatcgcggagcaagagcacagcagtaaactgcgtcacccatatctcttgcagctaatggcagtttgtttaagccaggacctagagaagactagactcgtctacgaacgcatcaccattggaaccctgttttcagtgcttcacgaaaggcgctctcaatttcccgtcctgcatatggaggtcatcgttcatctgttactgcagatttctgatgccctacgttatctgcacttccagggctttatacacagatctctgtccagctacgctgtgcacattatttcgcccggagaagcccgactgaccaatctggaatatatgctcgagtctgaggaccgaggcgtgcaaagggacctgacaagggtgccactgcccacccagctgtataattgggcagccccagaggtcattttgcagaaggccgctactgtaaaatccgatatatactcattctctatgattatgcaagaaatccttaccgacgatattccttggaagggactggacggcagcgtggtcaagaaagctgttgtaagcgggaactatctcgaggccgatgtgagactgccgaagccctactatgatattgtcaaatctgggatccacgtaaagcagaaagatcggaccatgaaccttcaagacattagatatattctcaaaaacgacctgaaagatttcactggcgcacagaggactcagccaacggagagcccgcgtgttcagaggtacggccttcaccccgacgtgaatgtctatctgggtcttacttccgaacatccccgagaaactccagatatggaaatcatcgagctgaaggagatgggatctcagccacactctcctcgcgttcatagtctgtttactgaagggacactggatccccaagctcccgacccctgcctgatggccagagagacacaaaaccaggacgctccatgcccagcaccctttatggctgaggaagcatcttcgccttcgactggacagccgtctctgtgttcgtttgaaatcaatgaaatctacagtggctgtcttatcttagaggatgatatcgaggaaccacctggcgcagccagctctctcgaagccgacggtccaaaccaggttgacgagctgaaatctatggaggaagaactggataaaatggaacgcgaagcatgttgtttcggttcagaggacgagtcttcatctaaggccgaaaccgagtacagcttcgatgattgggactggcagaacggctctctgagctccttgagtctaccggaatcaacccgggaggccaaatctaatctcaataatatgagcactacggaagagtatctgatcagtaaatgtgtgctcgacttgaagatcatgcagactatcatgcacgagaatgatgatcggctcagaaatattgagcagatcctggatgaagtcgaaatgaaacagaaggagcaggaggaacggatgtctttgtgggcgacaagccgcgagttcaccaatgcgtataagctgcctttggccgtggggccaccctctctgaactatatcccaccagtcctccaactttctgggggacagaagccagatacaagcgggaattaccccacactaccccgattccccaggatgctacctaccctgtgtgatccaggcaagcaaaataccgatgagcagttccagtgcacacagggggcaaaggattctcttgaaacttccagaattcagaacacctcttcccagggcagacccagagaaagcacagcccaagcaaaggctacacagttcaatagcgcccttttcactttgtcttctcaccgccagggccctagtgcttctccaagttgtcattgggattcaacaaggatgtcagtagagcccgtctccagtgagatctacaacgcagagtccagaaacaaagatgacggaaaggttcatctgaagtggaaaatggaggtgaaggagatggctaagaaagccgctaccggccagctgacagtcccaccttggcatcctcagagttccctgacactcgaatccgaggcagagaacgagccggacgcactactgcaacctccgatcagatcacctgagaacacagattggcagagggtgatcgagtaccacagagaaaatgacgaaccaaggggcaatggcaagttcgataagaccgggaataacgattgcgatagcgatcaacacggacgacagccgcgtctcggctcctttacttctattaggcaccccagcccacgacagaaagagcagcctgagcacagcgaggctttccaggcctcctccgacactttggtggccgtggaaaagtcctattcacatcagtcaatgcagtctacctgcagccctgagtctagtgaggatatcaccgacgagtttctgacaccagacggagagtacttttactcctccactgcgcaagaaaacctggccctagagaccagctcaccaattgaggaggactttgagggcattcagggggctttcgcccagccgcaggtcagcggcgaagagaaattccagatgcggaagatcctgggaaagaacgccgaaatcctaccccgtagccaattccagccagtgcggtcaacagaagacgagcaagaggagacttctaaggagtcaccaaaggagcttaaagaaaaggatatttctttgacagatatccaagacctgtcttccatctcttacgagcctgatagtagcttcaaagaagccagctgtaaaacgcccaaaatcaaccatgcaccaacgtctgttagcacacccctctcgcctggctcggtctcctccgctgcatcccagtataaggattgcctagagtctatcacctttcaggttaaaaccgaatttgcttcttgttggaactctcaggagttcatccaaactttgagcgatgattttatctcggtccgggagagagccaaaaagctggattctttgctgacaagttctgaaactccacctagtcggctgaccgggctgaagcgcctgtcgagcttcattggagctggcagccccagtctggtcaaagcctgcgacagttcaccacctcacgccacccagagacgcagcctgcctaaggtggaagcttttagtcagcaccacatcgacgaactgccacccccatctcaagaattattagatgacatagaacttcttaagcagcagcaaggctcttccaccgtgctgcatgagaatacagcatccgacggaggaggtaccgcgaatgaccaacgtcacctagaggagcaagagaccgactccaaaaaggaagattcctccatgttactgagcaaggagactgaggatttaggagaagacaccgagcgggcacacagcacattggacgaggatctggagagatggttgcagccaccagaagaatcagtggaattgcaagatctgccgaaggggagcgaaagagagacaaatatcaaagaccagaaggtgggagaggaaaagaggaaacgggaagactccattacacccgaacggaggaagtccgagggcgttcttgggacgtcggaagaggatgaattgaagagttgcttttggaaacggcttggctggagcgagagcagccggatcatcgtgctggaccaatcggacctctctgactag

SEQ ID NO: 259814 - DNA, 4924 bp, Artificial Sequence
  derived and/or modified sequence
atcagtccgcattccccgcacccacccacgtcttcccgggagtcgtatcccgagcatggaggttactgagaccgttatttcttcatggcctgcctagcttaagcagtagctggaaaagatgtctcgggctgttcgtcttccagtcccctgtcctgttcaacttggtaccttaagaaatgactccctggaagctcagcttcatgagtatgtcaaacaagggaactatgtgaaagtgaagaaaattcttaagaaaggaatttatgttgatgcagttaactccttgggccaaacagcactttttgttgcggcgttattgggccttaggaaattcgttgatgttctggtggattatggatcagatccaaatcaccgctgctttgatgggagcacccctgtccatgcagcagcattttcgggcaatcagtggatccttagcaaactgctggatgcaggaggtgacctgcgactccacgatgagaggggtcaaaacccgaagacttgggctttgacagcaggaaaggagcgtagcacccagatagtggagttcatgcagcgctgtgcctcacacatgcaggccatcatccagggcttctcttacgacctcctgaagaagatagactccccgcagcggcttgtctacagcccgtcctggtgtgggggcctcgtgcagggaaaccctaatggctctcctaaccgactgcttaaagctggagtcatttctgctcaaaatatctacagctttggttttgggaagttttatcttactggggcgacacagatggcctatctaggatctcttccggtcattggagaaaaggaagtgattcaagctgatgatgagcccaccttctctttcttcagcggcccctacatggtcatgaccaacctagtgtggaatgggagcagggtcacagtgaaagagctgaatctccccacccacccacactgcagcaggctgcggctggccgacttgttaattgccgagcaggaacacagcagcaagctgcggcacccctacttgctacagttgatggctgtgtgtctctcccaggacctagagaaaacccgccttgtgtacgagcgcatcactatcggcacattgttcagtgtccttcatgaacgacggtcccagttcccagtgctgcacatggaggtgattgtgcacctgctgctccagatatctgatgccctgagatacctgcatttccaggggtttatccaccgctccctcagctcctatgctgtccatatcatctccccaggtgaagcgaggctgaccaacctggagtacatgttggaaagcgaggacagaggtgtacagagggacctgactcgagtgccccttcctacgcagctatacaactgggccgcaccagaagtgatcttacagaaggcagccacagtgaaatcagacatctacagcttttctatgatcatgcaggagattttaacagatgacataccctggaagggcttagatggctcagttgttaaaaaagccgtagtctcggggaattatttagaagctgatgtcaggcttccgaaaccttactatgatattgttaagtcaggcatccacgtcaagcagaaagaccgaactatgaaccttcaagatatccggtatattctgaagaatgacttaaaggattttactggagcccagagaactcaaccaaccgagagccccagagtgcagagatacggactccatcccgatgtcaatgtctatctaggactgacttcagaacaccccagagagacacctgacatggaaatcatagaactaaaggaaatgggcagtcaacctcattcaccaagggttcactctttattcactgaggggacactagatcctcaggccccagatccatgtctgatggccagggagactcagaatcaagatgctccttgccctgctccatttatggcagaagaggccagcagccccagcacaggtcagccaagcctctgcagtttcgaaatcaacgagatctactcaggctgcttgattttggaagatgacatagaagagcctccaggagctgcttcatctttggaggcagacggacctaaccaggtagatgaactgaaatccatggaagaagagctggataagatggagagagaggcgtgttgttttggcagtgaggatgagagctcttcaaaagctgagacagagtactcttttgatgactgggactggcaaaacggttcactcagttcactcagccttcctgagtcaaccagagaagccaagagcaatttgaacaacatgtccacgactgaggagtatctcatcagtaagtgtgtgctggatctaaagattatgcagacaataatgcacgagaatgatgataggctgaggaatatcgagcagatattagatgaagtcgagatgaaacagaaggaacaggaagagcgcatgtctttatgggccacttcaagagagtttacaaatgcctacaagttacctctggccgtgggccctccatctttaaactatattcctcctgtcctacagctttcagggggtcagaagccagacaccagtggcaactacccaaccctaccaagatttccaagaatgctgccgactctttgtgaccctggaaaacagaacacagatgaacaatttcagtgcactcaaggagccaaggacagtttggaaacaagcaggatccaaaataccagtagccagggaagacctagagagtccactgcccaagccaaagccacacagtttaatagtgcactcttcactctgtcaagccaccggcagggaccttctgcatcacccagctgtcactgggactctaccaggatgagtgtggaacctgtttcttctgaaatctataatgcagagtccagaaataaagatgatggaaaggtacacttaaaatggaaaatggaggtgaaagaaatggcaaagaaagcagctactggacagctcacagtacctccttggcatcctcagagtagtctgactttagagagcgaggctgaaaatgagcccgacgccctgctgcagccccccattaggagcccagaaaacacggattggcagcgagttattgagtatcatagggaaaatgatgagcccagaggaaatggcaagtttgacaagacgggcaacaatgactgtgacagtgaccagcatggcagacagcccaggcttggaagcttcaccagtatcaggcacccatctcccagacaaaaggagcaaccagagcatagtgaagccttccaagcaagttctgacacattggtggctgtagagaaatcttacagtcatcagtccatgcaatcaacttgttcaccagagtcttctgaggatataacagatgaatttttaactccagacggtgaatatttttactcctcgactgctcaagaaaacttagctctagagacctcgagtcccatagaagaggactttgaaggaatacaaggtgcatttgcccaacctcaagtctctggtgaggaaaagttccaaatgagaaaaattcttggaaagaatgctgagattttgcccaggtctcaatttcaacctgtacgaagtactgaagatgaacaagaagagacatcaaaggagtcaccaaaggaactgaaagagaaagacatatcattgacggatattcaagacctgtctagtatctcctatgaaccagacagctcttttaaggaagcttcatgcaaaacacccaaaataaaccatgcacctaccagtgtcagcactccactcagcccagggtccgtttcttcagctgccagtcagtataaagactgccttgaaagtatcacatttcaggttaagacagagtttgcctcttgctggaacagtcaagaatttattcaaactttgtctgatgactttataagtgtccgagagagagcaaagaaactggattctctccttacttcctctgaaactcccccttcaagactgactggtcttaaaagattgtcttcatttattggggctggatcccccagccttgttaaggcatgtgactcatcaccaccccatgccacccagagaaggagcctgcctaaagtagaagccttctcacagcatcacattgatgagctgccaccaccatctcaggagctacttgatgacattgagctcttgaaacagcagcagggctcatccacggtgttgcatgagaacacagcaagtgatggaggaggcactgcaaatgatcaaaggcacttagaagaacaagaaactgacagtaaaaaagaagatagtagtatgcttttgtccaaagaaactgaagatcttggagaggacacagagagagctcactctactctggatgaggacctggaaagatggctgcagccacctgaggagagcgtggagctacaagaccttcccaagggctctgaaagggagacaaatatcaaagatcaaaaagttggtgaagagaaaagaaaaagggaagatagcattacaccagaaagaaggaaatcagagggtgttctagggacttctgaagaagatgaactaaaatcctgtttttggaagcgactaggttggtccgaatcatccaggataatcgtgctggatcagagtgacttgtcagactgattggaattggatcatagacggactcctggcctgagtttgagtgtcctggttgtaagctcctttcttctctttctgcttcagttgctgtcagggcagcagttccagttctgtaagtctcactttgttcagctgccacaatagacatcatcgtttggccctctctgttagcagcacattcaaccatttgttttcagtcagatttctgaaaagtgagaggtagttttgatagtaaaaatttttggttgtgcctagaatggctttggttttgttgatgttaattttcaaaaactttaactcttgttatataataaaatgtttaattttaataac

SEQ ID NO: 259815 - protein, 2343 aa, Artificial Sequence
  derived and/or modified sequence
MDEEEDGAGAEESGQPRSFMRLNDLSGAGGRPGPGSAEKDPGSADSEAEGLPYPALAPVVFFYLSQDSRPRSWCLRTVCNPWFERISMLVILLNCVTLGMFRPCEDIACDSQRCRILQAFDDFIFAFFAVEMVVKMVALGIFGKKCYLGDTWNRLDFFIVIAGMLEYSLDLQNVSFSAVRTVRVLRPLRAINRVPSMRILVTLLLDTLPMLGNVLLLCFFVFFIFGIVGVQLWAGLLRNRCFLPENFSLPLSVDLERYYQTENEDESPFICSQPRENGMRSCRSVPTLRGDGGGGPPCGLDYEAYNSSSNTTCVNWNQYYTNCSAGEHNPFKGAINFDNIGYAWIAIFQVITLEGWVDIMYFVMDAHSFYNFIYFILLIIVGSFFMINLCLVVIATQFSETKQRESQLMREQRVRFLSNASTLASFSEPGSCYEELLKYLVYILRKAARRLAQVSRAAGVRVGLLSSPAPLGGQETQPSSSCSRSHRRLSVHHLVHHHHHHHHHYHLGNGTLRAPRASPEIQDRDANGSRRLMLPPPSTPALSGAPPGGAESVHSFYHADCHLEPVRCQAPPPRSPSEASGRTVGSGKVYPTVHTSPPPETLKEKALVEVAASSGPPTLTSLNIPPGPYSSMHKLLETQSTGACQSSCKISSPCLKADSGACGPDSCPYCARAGAGEVELADREMPDSDSEAVYEFTQDAQHSDLRDPHSRRQRSLGPDAEPSSVLAFWRLICDTFRKIVDSKYFGRGIMIAILVNTLSMGIEYHEQPEELTNALEISNIVFTSLFALEMLLKLLVYGPFGYIKNPYNIFDGVIVVISVWEIVGQQGGGLSVLRTFRLMRVLKLVRFLPALQRQLVVLMKTMDNVATFCMLLMLFIFIFSILGMHLFGCKFASERDGDTLPDRKNFDSLLWAIVTVFQILTQEDWNKVLYNGMASTSSWAALYFIALMTFGNYVLFNLLVAILVEGFQAEGDANKSESEPDFFSPSLDGDGDRKKCLALVSLGEHPELRKSLLPPLIIHTAATPMSLPKSTSTGLGEALGPASRRTSSSGSAEPGAAHEMKSPPSARSSPHSPWSAASSWTSRRSSRNSLGRAPSLKRRSPSGERRSLLSGEGQESQDEEESSEEERASPAGSDHRHRGSLEREAKSSFDLPDTLQVPGLHRTASGRGSASEHQDCNGKSASGRLARALRPDDPPLDGDDADDEGNLSKGERVRAWIRARLPACCLERDSWSAYIFPPQSRFRLLCHRIITHKMFDHVVLVIIFLNCITIAMERPKIDPHSAERIFLTLSNYIFTAVFLAEMTVKVVALGWCFGEQAYLRSSWNVLDGLLVLISVIDILVSMVSDSGTKILGMLRVLRLLRTLRPLRVISRAQGLKLVVETLMSSLKPIGNIVVICCAFFIIFGILGVQLFKGKFFVCQGEDTRNITNKSDCAEASYRWVRHKYNFDNLGQALMSLFVLASKDGWVDIMYDGLDAVGVDQQPIMNHNPWMLLYFISFLLIVAFFVLNMFVGVVVENFHKCRQHQEEEEARRREEKRLRRLEKKRRSKEKQMAEAQCKPYYSDYSRFRLLVHHLCTSHYLDLFITGVIGLNVVTMAMEHYQQPQILDEALKICNYIFTVIFVLESVFKLVAFGFRRFFQDRWNQLDLAIVLLSIMGITLEEIEVNASLPINPTIIRIMRVLRIARVLKLLKMAVGMRALLDTVMQALPQVGNLGLLFMLLFFIFAALGVELFGDLECDETHPCEGLGRHATFRNFGMAFLTLFRVSTGDNWNGIMKDTLRDCDQESTCYNTVISPIYFVSFVLTAQFVLVNVVIAVLMKHLEESNKEAKEEAELEAELELEMKTLSPQPHSPLGSPFLWPGVEGPDSPDSPKPGALHPAAHARSASHFSLEHPTDRQLFDTISLLIQGSLEWELKLMDELAGPGGQPSAFPSAPSLGGSDPQIPLAEMEALSLTSEIVSEPSCSLALTDDSLPDDMHTLLLSALESNMQPHPTELPGPDLLTVRKSGVSRTHSLPNDSYMCRHGSTAEGPLGHRGWGLPKAQSGSVLSVHSQPADTSYILQLPKDAPHLLQPHSAPTWGTIPKLPPPGRSPLAQRPLRRQAAIRTDSLDVQGLGSREDLLAEVSGPSPPLARAYSFWGQSSTQAQQHSRSHSKISKHMTPPAPCPGPEPNWGKGPPETRSSLELDTELSWISGDLLPPGGQEEPPSPRDLKKCYSVEAQSCQRRPTSWLDEQRRHSIAVSCLDSGSQPHLGTDPSNLGGQPLGGPGSRPKKKLSPPSITIDPPESQGPRTPPSPGICLRRRAPSSDSKDPLASGPPDSMAASPSPKKDVLSLSGLSSDPADLDP

SEQ ID NO: 259816 - DNA, 7032 bp, Artificial Sequence
  derived and/or modified sequence
atggacgaggaggaggacggcgccggcgccgaggagagcggccagcccagaagcttcatgagactgaacgacctgagcggcgccggcggcagacccggccccggcagcgccgagaaggaccccggcagcgccgacagcgaggccgagggcctgccctaccccgccctggcccccgtggtgttcttctacctgagccaggacagcagacccagaagctggtgcctgagaaccgtgtgcaacccctggttcgagagaatcagcatgctggtgatcctgctgaactgcgtgaccctgggcatgttcagaccctgcgaggacatcgcctgcgacagccagagatgcagaatcctgcaggccttcgacgacttcatcttcgccttcttcgccgtggagatggtggtgaagatggtggccctgggcatcttcggcaagaagtgctacctgggcgacacctggaacagactggacttcttcatcgtgatcgccggcatgctggagtacagcctggacctgcagaacgtgagcttcagcgccgtgagaaccgtgagagtgctgagacccctgagagccatcaacagagtgcccagcatgagaatcctggtgaccctgctgctggacaccctgcccatgctgggcaacgtgctgctgctgtgcttcttcgtgttcttcatcttcggcatcgtgggcgtgcagctgtgggccggcctgctgagaaacagatgcttcctgcccgagaacttcagcctgcccctgagcgtggacctggagagatactaccagaccgagaacgaggacgagagccccttcatctgcagccagcccagagagaacggcatgagaagctgcagaagcgtgcccaccctgagaggcgacggcggcggcggccccccctgcggcctggactacgaggcctacaacagcagcagcaacaccacctgcgtgaactggaaccagtactacaccaactgcagcgccggcgagcacaaccccttcaagggcgccatcaacttcgacaacatcggctacgcctggatcgccatcttccaggtgatcaccctggagggctgggtggacatcatgtacttcgtgatggacgcccacagcttctacaacttcatctacttcatcctgctgatcatcgtgggcagcttcttcatgatcaacctgtgcctggtggtgatcgccacccagttcagcgagaccaagcagagagagagccagctgatgagagagcagagagtgagattcctgagcaacgccagcaccctggccagcttcagcgagcccggcagctgctacgaggagctgctgaagtacctggtgtacatcctgagaaaggccgccagaagactggcccaggtgagcagagccgccggcgtgagagtgggcctgctgagcagccccgcccccctgggcggccaggagacccagcccagcagcagctgcagcagaagccacagaagactgagcgtgcaccacctggtgcaccaccaccaccaccaccaccaccactaccacctgggcaacggcaccctgagagcccccagagccagccccgagatccaggacagagacgccaacggcagcagaagactgatgctgcccccccccagcacccccgccctgagcggcgccccccccggcggcgccgagagcgtgcacagcttctaccacgccgactgccacctggagcccgtgagatgccaggcccccccccccagaagccccagcgaggccagcggcagaaccgtgggcagcggcaaggtgtaccccaccgtgcacaccagccccccccccgagaccctgaaggagaaggccctggtggaggtggccgccagcagcggcccccccaccctgaccagcctgaacatcccccccggcccctacagcagcatgcacaagctgctggagacccagagcaccggcgcctgccagagcagctgcaagatcagcagcccctgcctgaaggccgacagcggcgcctgcggccccgacagctgcccctactgcgccagagccggcgccggcgaggtggagctggccgacagagagatgcccgacagcgacagcgaggccgtgtacgagttcacccaggacgcccagcacagcgacctgagagacccccacagcagaagacagagaagcctgggccccgacgccgagcccagcagcgtgctggccttctggagactgatctgcgacaccttcagaaagatcgtggacagcaagtacttcggcagaggcatcatgatcgccatcctggtgaacaccctgagcatgggcatcgagtaccacgagcagcccgaggagctgaccaacgccctggagatcagcaacatcgtgttcaccagcctgttcgccctggagatgctgctgaagctgctggtgtacggccccttcggctacatcaagaacccctacaacatcttcgacggcgtgatcgtggtgatcagcgtgtgggagatcgtgggccagcagggcggcggcctgagcgtgctgagaaccttcagactgatgagagtgctgaagctggtgagattcctgcccgccctgcagagacagctggtggtgctgatgaagaccatggacaacgtggccaccttctgcatgctgctgatgctgttcatcttcatcttcagcatcctgggcatgcacctgttcggctgcaagttcgccagcgagagagacggcgacaccctgcccgacagaaagaacttcgacagcctgctgtgggccatcgtgaccgtgttccagatcctgacccaggaggactggaacaaggtgctgtacaacggcatggccagcaccagcagctgggccgccctgtacttcatcgccctgatgaccttcggcaactacgtgctgttcaacctgctggtggccatcctggtggagggcttccaggccgagggcgacgccaacaagagcgagagcgagcccgacttcttcagccccagcctggacggcgacggcgacagaaagaagtgcctggccctggtgagcctgggcgagcaccccgagctgagaaagagcctgctgccccccctgatcatccacaccgccgccacccccatgagcctgcccaagagcaccagcaccggcctgggcgaggccctgggccccgccagcagaagaaccagcagcagcggcagcgccgagcccggcgccgcccacgagatgaagagcccccccagcgccagaagcagcccccacagcccctggagcgccgccagcagctggaccagcagaagaagcagcagaaacagcctgggcagagcccccagcctgaagagaagaagccccagcggcgagagaagaagcctgctgagcggcgagggccaggagagccaggacgaggaggagagcagcgaggaggagagagccagccccgccggcagcgaccacagacacagaggcagcctggagagagaggccaagagcagcttcgacctgcccgacaccctgcaggtgcccggcctgcacagaaccgccagcggcagaggcagcgccagcgagcaccaggactgcaacggcaagagcgccagcggcagactggccagagccctgagacccgacgacccccccctggacggcgacgacgccgacgacgagggcaacctgagcaagggcgagagagtgagagcctggatcagagccagactgcccgcctgctgcctggagagagacagctggagcgcctacatcttccccccccagagcagattcagactgctgtgccacagaatcatcacccacaagatgttcgaccacgtggtgctggtgatcatcttcctgaactgcatcaccatcgccatggagagacccaagatcgacccccacagcgccgagagaatcttcctgaccctgagcaactacatcttcaccgccgtgttcctggccgagatgaccgtgaaggtggtggccctgggctggtgcttcggcgagcaggcctacctgagaagcagctggaacgtgctggacggcctgctggtgctgatcagcgtgatcgacatcctggtgagcatggtgagcgacagcggcaccaagatcctgggcatgctgagagtgctgagactgctgagaaccctgagacccctgagagtgatcagcagagcccagggcctgaagctggtggtggagaccctgatgagcagcctgaagcccatcggcaacatcgtggtgatctgctgcgccttcttcatcatcttcggcatcctgggcgtgcagctgttcaagggcaagttcttcgtgtgccagggcgaggacaccagaaacatcaccaacaagagcgactgcgccgaggccagctacagatgggtgagacacaagtacaacttcgacaacctgggccaggccctgatgagcctgttcgtgctggccagcaaggacggctgggtggacatcatgtacgacggcctggacgccgtgggcgtggaccagcagcccatcatgaaccacaacccctggatgctgctgtacttcatcagcttcctgctgatcgtggccttcttcgtgctgaacatgttcgtgggcgtggtggtggagaacttccacaagtgcagacagcaccaggaggaggaggaggccagaagaagagaggagaagagactgagaagactggagaagaagagaagaagcaaggagaagcagatggccgaggcccagtgcaagccctactacagcgactacagcagattcagactgctggtgcaccacctgtgcaccagccactacctggacctgttcatcaccggcgtgatcggcctgaacgtggtgaccatggccatggagcactaccagcagccccagatcctggacgaggccctgaagatctgcaactacatcttcaccgtgatcttcgtgctggagagcgtgttcaagctggtggccttcggcttcagaagattcttccaggacagatggaaccagctggacctggccatcgtgctgctgagcatcatgggcatcaccctggaggagatcgaggtgaacgccagcctgcccatcaaccccaccatcatcagaatcatgagagtgctgagaatcgccagagtgctgaagctgctgaagatggccgtgggcatgagagccctgctggacaccgtgatgcaggccctgccccaggtgggcaacctgggcctgctgttcatgctgctgttcttcatcttcgccgccctgggcgtggagctgttcggcgacctggagtgcgacgagacccacccctgcgagggcctgggcagacacgccaccttcagaaacttcggcatggccttcctgaccctgttcagagtgagcaccggcgacaactggaacggcatcatgaaggacaccctgagagactgcgaccaggagagcacctgctacaacaccgtgatcagccccatctacttcgtgagcttcgtgctgaccgcccagttcgtgctggtgaacgtggtgatcgccgtgctgatgaagcacctggaggagagcaacaaggaggccaaggaggaggccgagctggaggccgagctggagctggagatgaagaccctgagcccccagccccacagccccctgggcagccccttcctgtggcccggcgtggagggccccgacagccccgacagccccaagcccggcgccctgcaccccgccgcccacgccagaagcgccagccacttcagcctggagcaccccaccgacagacagctgttcgacaccatcagcctgctgatccagggcagcctggagtgggagctgaagctgatggacgagctggccggccccggcggccagcccagcgccttccccagcgcccccagcctgggcggcagcgacccccagatccccctggccgagatggaggccctgagcctgaccagcgagatcgtgagcgagcccagctgcagcctggccctgaccgacgacagcctgcccgacgacatgcacaccctgctgctgagcgccctggagagcaacatgcagccccaccccaccgagctgcccggccccgacctgctgaccgtgagaaagagcggcgtgagcagaacccacagcctgcccaacgacagctacatgtgcagacacggcagcaccgccgagggccccctgggccacagaggctggggcctgcccaaggcccagagcggcagcgtgctgagcgtgcacagccagcccgccgacaccagctacatcctgcagctgcccaaggacgccccccacctgctgcagccccacagcgcccccacctggggcaccatccccaagctgcccccccccggcagaagccccctggcccagagacccctgagaagacaggccgccatcagaaccgacagcctggacgtgcagggcctgggcagcagagaggacctgctggccgaggtgagcggccccagcccccccctggccagagcctacagcttctggggccagagcagcacccaggcccagcagcacagcagaagccacagcaagatcagcaagcacatgaccccccccgccccctgccccggccccgagcccaactggggcaagggcccccccgagaccagaagcagcctggagctggacaccgagctgagctggatcagcggcgacctgctgccccccggcggccaggaggagccccccagccccagagacctgaagaagtgctacagcgtggaggcccagagctgccagagaagacccaccagctggctggacgagcagagaagacacagcatcgccgtgagctgcctggacagcggcagccagccccacctgggcaccgaccccagcaacctgggcggccagcccctgggcggccccggcagcagacccaagaagaagctgagcccccccagcatcaccatcgacccccccgagagccagggccccagaaccccccccagccccggcatctgcctgagaagaagagcccccagcagcgacagcaaggaccccctggccagcggcccccccgacagcatggccgccagccccagccccaagaaggacgtgctgagcctgagcggcctgagcagcgaccccgccgacctggacccctag

SEQ ID NO: 259817 - DNA, 7032 bp, Artificial Sequence
  derived and/or modified sequence
atggacgaggaagaggacggagccggcgccgaggaaagcggccagcctcgcagtttcatgcggctgaacgatttgtccggagccggggggcggccgggccccggttcagcggaaaaggacccggggagcgccgacagtgaggcagaagggctcccctatcccgccttggctcccgttgtgttcttttacctctcccaggatagtcggccgaggtcatggtgcctccgaaccgtttgcaacccgtggttcgaacgaattagtatgctcgtcatcttgctcaactgtgtcactctaggaatgttcaggccctgcgaggacattgcatgtgatagccagcgctgccgaattctccaggcatttgacgactttatattcgcttttttcgcggtggaaatggttgttaaaatggtagctctaggaatttttggcaaaaagtgctaccttggcgacacatggaacagattggattttttcatcgtcatcgctggcatgctggagtacagtctcgatctccaaaacgtgtccttctccgcggttaggacggtgcgagtcctacgcccactgcgtgcaatcaaccgagtgccctcaatgcggattctcgttacactgctgttggataccttgccaatgctggggaatgtactccttctctgcttctttgtcttttttatcttcggtatcgtgggcgtccagctgtgggccggactgctgcggaatagatgttttctgccagagaacttctctttaccacttagtgttgacctggagcggtactatcaaactgagaacgaagacgaaagcccctttatctgcagccagcccagagaaaacgggatgcgctcctgtcggtccgtcccaacactccggggcgatggcgggggtggccccccttgtggcctcgactatgaagcgtataattctagctccaacactacttgcgtgaattggaatcagtattacactaactgtagtgcgggggagcataacccctttaagggcgccatcaacttcgacaacattgggtacgcctggattgccattttccaagtgatcacactggagggctgggtggatatcatgtacttcgtaatggacgctcatagcttttataatttcatctacttcattctgctgattattgtgggttccttttttatgatcaatctttgtcttgtagtgattgcaacccagttttccgaaactaagcagcgggaaagtcaactgatgcgggaacagcgcgtccgatttctgtcgaacgcctcaacattagcatcgttttctgaaccaggttcgtgttacgaggaactgctcaaatatctggtgtacatccttcggaaagcagctcggcgcttggcgcaagtctccagagccgcgggcgtgcgcgtcggcctgctgagcagtcctgctccgcttgggggacaggaaactcagccctcctcctcctgctctagatcacataggcggctctccgttcaccacctggtgcatcatcaccaccatcatcaccaccattaccacctgggaaacggcactctgagggcccctagggcatccccagaaattcaggacagagacgcaaacggaagtcggagactgatgttgccaccccctagtacacccgcgctttctggagccccaccaggtggggccgagtccgtgcactctttctaccatgccgactgccatctcgaacctgtgcgctgtcaggctccaccgcctcgcagtccaagcgaggcttccggacggactgttggatcagggaaggtctacccaacagtgcacaccagcccaccacccgaaacgctgaaagagaaggcactggtcgaagtggccgcaagtagtggccctcccacactgacatcactcaatataccccccgggccttactcttccatgcacaaactgctggaaacccagtccacaggcgcttgccagtcatcatgcaaaatctcatctccctgtctaaaagctgatagtggcgcttgtggacccgacagctgcccctattgcgccagggccggggccggcgaggtggaactggctgacagggagatgccagactctgatagcgaagcagtgtacgagttcacacaggacgcacagcatagtgaccttagggacccacatagccggagacaacgttctttgggccccgacgcagagccatcatcagttttggcgttctggcgcctgatttgcgacaccttccgcaaaattgtcgactccaagtactttgggaggggcattatgattgcaatcctggtcaacacgcttagcatgggaattgaataccacgaacagcccgaggagcttaccaacgcacttgaaatttctaatatcgtattcacgagcctgttcgcattggagatgctgctgaaactgctggtgtacggcccctttggatacattaaaaatccatataacatttttgacggagtaattgtagtgatttctgtctgggaaatcgttggtcagcagggcgggggcctcagcgttctccgtacatttcggctgatgagggttctaaaactggtgagatttctgccagcccttcaacgtcaactggttgtactgatgaagactatggacaatgtagctaccttctgcatgctcctgatgttgttcatctttatcttctccattctgggcatgcatctctttggttgcaagttcgcttctgagagagatggcgacactttgccagataggaagaatttcgactcactgctgtgggctatcgtgaccgtattccaaattctgacccaggaggactggaacaaggttctatacaacgggatggcgtctacctcatcttgggctgccctgtacttcatcgctctgatgaccttcggcaactatgtattatttaacctgctggtggctatcctggtcgaaggatttcaggccgagggcgacgccaataagtctgaaagcgagcccgacttcttttccccaagcctagacggagacggcgatcgcaagaaatgtctggctctggtcagcctaggagagcatcctgaactaaggaaaagcctactgccccctctgattatacatacagccgccactccgatgagtctgccaaaatcaaccagtaccggcctaggagaagccctaggtccggcgtctcgccgaactagcagttccggatcagcggagcctggtgccgcacacgaaatgaagtccccgccttcagccaggagcagtccacactccccctggtctgctgcttcgtcctggacgtctagaagaagcagcaggaatagtctggggcgtgcccccagtttaaaacggaggtcccctagcggcgagcgacgttctctgctatctggggagggacaagagagtcaggacgaggaggagtcatccgaggaggagagggcctccccagccggaagcgatcatcgccatcgtggtagcttagaacgtgaggccaaatccagcttcgacctccccgacactctgcaggtgcctggtctccacagaacggcctccggaagagggagcgcctcagaacaccaagattgcaacggcaagtcagctagcggcaggttagcacgagctttgagaccagacgaccccccgctggatggagacgacgctgacgatgaaggaaatttgtctaaaggtgagcgcgtccgcgcctggattcgggccagactgcccgcatgttgcttagagcgggattcttggtctgcttatatattcccaccacagagccgattcagactattatgccatcggatcattacacacaaaatgttcgaccatgttgtgctcgtgatcattttcttaaattgtatcacaatcgccatggagcggcccaaaatcgatccccatagcgccgagcggatatttttaactctgtccaactatatcttcactgccgtattcctagcggaaatgacagtgaaggttgtggcactcggctggtgttttggagagcaggcctacctgagaagttcttggaatgttctggatggattgcttgtcctgataagcgtgatcgacattctagtgagtatggtgagtgattctggaactaagattctcggaatgctgagagtgcttcgattgttgcgaaccttgcggccattgcgtgttatctcaagggcacagggcttgaaactagttgtagagacacttatgagtagtttaaaaccaattggtaacattgtggttatatgttgtgcatttttcattatcttcggaattctgggtgtccaactgttcaaaggcaagttttttgtatgtcagggggaagacactaggaacattaccaacaagagtgattgcgctgaggcctcatacagatgggtaaggcacaagtacaacttcgataacttgggacaggctctcatgtccctgtttgtgctggcgtccaaggatgggtgggtggacatcatgtacgatggcttggatgctgtaggagttgaccagcagcccattatgaaccacaacccatggatgcttttgtacttcattagttttcttcttatcgtggcctttttcgtcctgaatatgtttgtaggggtagtggtggaaaactttcataaatgcaggcagcatcaagaagaagaggaggccaggcggcgcgaagagaagaggctacggcggctggagaagaagagaaggagtaaagagaagcaaatggctgaagcccagtgtaaaccctattattcagactatagcaggtttagacttcttgtacaccatttatgtacttcgcactatctggacctgttcattacaggagtaatcggcctgaatgttgtgaccatggctatggagcactaccagcaacctcagatcttggatgaggctctgaagatatgcaattacatctttaccgtcatcttcgttttagaatcagtattcaagctggtagccttcggatttaggcgcttttttcaagaccggtggaaccaacttgacctggcaatcgtgttactatcaatcatggggatcacactggaagaaatcgaagtgaacgcttccctgccaatcaaccctaccattattcgtatcatgagagtcctacgcatagccagagttttgaagcttttgaagatggcagtgggcatgcgagcccttttggacacagtcatgcaagcattgccgcaggtgggcaatctgggcctgctattcatgctgctcttttttatttttgccgctctgggtgtggaactgtttggagacctggaatgtgatgagacacacccttgcgaggggctggggaggcacgcaaccttccgcaattttggaatggccttcctgactctctttagggtcagcactggcgacaattggaatgggattatgaaagacacactgcgagactgcgaccaagaaagcacgtgctacaatactgtgatatcaccaatttacttcgtttctttcgtactgacagcacagtttgtgcttgtcaacgtggtgattgccgtgctgatgaagcacctcgaggagagtaacaaggaggctaaagaggaggctgaactcgaagccgagttggagttggagatgaagactctctctccgcagccacactctccactgggctccccgtttctctggcctggtgtagagggcccagattcacccgatagtccaaagcccggagcgcttcacccggccgcccacgctaggagcgcctcccacttttctctggaacaccccacagatcgccagctgttcgacacgatatccctcttaattcaaggctccctcgagtgggaacttaaattaatggacgagctagctggtccgggcggacaaccatctgcctttccatctgcaccgtcactgggcggtagtgacccccagattccactcgcggaaatggaagccctgtcactgacctctgaaatcgtgtcagagcccagttgttcactcgccctgacagatgacagccttccagatgacatgcatacgctcctcctcagtgctctggagtctaacatgcaaccccaccccacagaactgcctggccctgatctcctgactgtgaggaagtcaggcgtctcccgcactcattcactgcctaatgattcatacatgtgtaggcatgggtcaacagctgaaggccctctgggccaccgcgggtggggcctgccgaaggcgcagtccggctctgtgctgtccgtgcactcccagccagccgacacttcatatatccttcagctgccaaaggacgcaccacacctcctgcagccgcactccgcacctacctggggaacaatacccaagctgccgcctcccggacgcagccccttggcccagagacctctgagacgccaagccgccatccgaactgattcactcgacgtccagggcctgggatctcgggaagatctcctcgccgaggtgagcggacctagccccccactggcaagagcatacagcttctggggccagtcatctactcaagcccaacagcacagcagatctcactccaaaatcagcaagcatatgaccccacccgcgccctgtcctgggccagagccaaattggggtaaaggccccccagagacgaggagctcacttgagttagatactgagctttcctggatatcgggtgatttgcttcctcctggaggtcaggaagagcctccatcccctagggacctaaagaagtgctacagcgtcgaggcccagagttgtcagagaagacccaccagttggttggacgaacagagacgacattccattgccgtgtcgtgcctggactccggctctcaaccccatctcggaaccgacccctccaatcttggggggcaacctctgggcggaccaggatctcgacctaaaaaaaaactgagtcctcctagtattacaatagatccccctgagtcccaggggccacgaaccccaccaagtcctgggatctgtctgagaagaagggctccttctagcgacagtaaggatcccctcgctagtgggccacctgattcaatggccgcttcgccctcaccgaagaaggacgtcttgtcattaagcggcctgtcttcagaccccgccgacctcgatccatag

SEQ ID NO: 259818 - DNA, 7032 bp, Artificial Sequence
  derived and/or modified sequence
atggatgaggaggaggatggagctggagctgaggagagcggccagcccaggagcttcatgaggctgaatgacctgagcggggccggcggccggcccggccctggcagcgctgagaaggaccccggcagcgctgacagcgaggccgagggcctgccctacccagccctggcccctgtggtgttcttctacctgagccaggacagccggcccaggtcctggtgcctgaggacagtgtgcaacccctggtttgagcgcatctccatgctggtgatcctgctgaactgtgtgaccctgggcatgttccggccctgtgaagatattgcctgtgacagccagcgctgccgcatcctgcaggcctttgatgacttcatctttgccttctttgctgtggagatggtggtgaagatggtggccctgggcatctttgggaagaagtgctacctgggggacacctggaaccggctggacttcttcatcgtgattgctggcatgctggagtacagcctggacctgcagaatgtgtccttctctgctgtgaggacagtgcgggtgctgcggcccctgcgggccatcaacagagtgcccagcatgaggatcctggtgaccctgctgctggacaccctgcccatgctgggcaatgtgctgctgctgtgcttctttgtgttcttcatctttggaattgtgggcgtgcagctgtgggccggcctgctgaggaaccgctgcttcctgcctgagaacttcagcctgcccctgtctgtggacctggagcgctactaccagacagaaaatgaagatgagagccccttcatctgcagccagccccgggagaatggcatgaggagctgccgctctgtgcccaccctgcggggagatggcggcggcggccccccctgtggcctggactatgaggcctacaacagcagcagcaacaccacctgtgtgaactggaaccagtactacaccaactgcagcgctggggagcacaaccccttcaagggggccatcaactttgacaacatcggctacgcctggatcgccatcttccaggtgatcaccctggagggctgggtggacatcatgtactttgtgatggatgcccacagcttctacaacttcatctacttcatcctgctgatcatcgtgggcagcttcttcatgatcaacctgtgcctggtggtgattgccacccagttcagcgagaccaagcagcgggagagccagctgatgagggagcagagggtgcgcttcctgagcaatgccagcaccctggccagcttcagcgagcccggcagctgctatgaggagctgctgaagtacctggtgtacatcctgaggaaggccgcccggcggctggcccaggtgtccagagctgctggggtgcgggtgggcctgctgagcagccctgcccccctgggcggccaggagacccagcccagcagcagctgcagccgcagccaccggcggctgtctgtgcaccacctggtgcaccaccaccaccaccaccaccaccactaccacctgggcaatggcaccctgcgggccccccgggccagccctgagatccaggacagagatgccaacggcagccggcggctgatgctgcccccacccagcaccccagccctgagcggggcccctcctggaggagctgagagcgtgcacagcttctaccacgccgactgccacctggagcctgtgcgctgccaggcccccccacccaggagccccagcgaggccagcggccgcacagtgggcagcggcaaggtgtaccccaccgtgcacaccagccccccacctgagaccctgaaggagaaggccctggtggaggtggccgccagcagcggcccccccaccctgaccagcctgaacatccccccaggcccctacagctccatgcacaagctgctggagacccagagcactggagcctgccagagcagctgcaagatcagcagcccctgcctgaaggctgacagcggggcctgtggccctgacagctgcccctactgtgcccgggccggggccggggaggtggagctggccgaccgggagatgccagacagcgacagcgaggccgtgtatgagttcacccaggatgcccagcacagcgacctgcgggacccccacagccggcggcagaggagcctgggcccagatgctgagcccagctctgtgctggccttctggaggctcatctgtgacaccttcaggaagatcgtggacagcaagtacttcggccggggcatcatgattgccatcctggtgaacaccctgtccatgggcatcgagtaccacgagcagcctgaggagctgaccaatgccctggagatcagcaacatcgtgttcaccagcctgtttgccctggagatgctgctgaagctgctggtgtatggccccttcggctacatcaagaacccctacaacatctttgatggagtcatcgtggtgatctctgtgtgggagatcgtgggccagcagggcggcggcctgtctgtgctgcggaccttccggctgatgagggtgctgaagctggtgcgcttcctgcctgccctgcagaggcagctggtggtgctgatgaagaccatggacaacgtggccaccttctgcatgctgctgatgctgttcatcttcatcttcagcatcctgggcatgcacctgtttggctgcaagtttgccagcgagagagatggagacaccctgcctgacaggaagaactttgacagcctgctgtgggccatcgtgacagtgttccagatcctgacccaggaggactggaacaaggtgctgtacaacggcatggccagcaccagctcctgggccgccctgtacttcatcgccctgatgaccttcggcaactacgtgctcttcaacctgctggtggccatcctggtggagggcttccaggccgagggagatgccaacaagtctgagagcgagccagacttcttcagccccagcctggatggagatggagacaggaagaagtgcctggccctggtgtccctgggggagcaccctgagctgaggaagagcctgctgcccccactcatcatccacacagctgccacccccatgagcctgcccaagagcaccagcacaggcctgggggaggccctgggccctgccagcaggaggaccagcagcagcggcagcgctgagcccggggccgcccacgagatgaagagccccccatctgcccggagcagcccccacagcccctggagcgctgccagctcctggaccagcagaagaagcagcaggaacagcctgggccgggcccccagcctgaagaggaggagccccagcggggagaggaggagcctgctgagcggggagggccaggagagccaggatgaggaggagagcagcgaggaggagcgggccagccctgctggcagtgaccaccgccaccggggcagcctggagcgggaggccaagagcagctttgacctgcctgacaccctgcaggtgcccggcctgcacaggacagccagcggccggggcagcgccagcgagcaccaggactgcaatggcaagagcgccagcggccgcctggcccgggccctgcggccagatgacccccccctggatggagatgatgctgatgatgagggcaacctgagcaaaggagagcgggtgcgggcctggatccgggcccggctgcctgcctgctgcctggagcgggacagctggagcgcctacatcttccccccccagagccgcttccggctgctgtgccaccgcatcatcacccacaagatgtttgaccacgtggtgctggtgatcatcttcctgaactgcatcaccatcgccatggagcggcccaagattgacccccacagcgctgagcgcatcttcctgaccctgagcaactacatcttcaccgctgtgttcctggccgagatgacagtgaaggtggtggccctgggctggtgctttggagagcaggcctacctgcggagctcctggaatgtgctggatggcctgctggtgctgatcagcgtcatcgacatcctggtgtccatggtgtctgacagcggcaccaagatcctgggcatgctgcgggtgctgcggctgctgcggaccctgcggcccctgcgggtcatcagccgggcccagggcctgaagctggtggtggagaccctgatgagcagcctgaagcccatcggcaacatcgtggtgatctgctgtgccttcttcatcatcttcggcatcctgggcgtgcagctgttcaagggcaagttctttgtgtgccagggcgaggacaccaggaacatcaccaacaagagtgactgtgccgaggccagctaccgctgggtgcgccacaagtacaactttgacaacctgggccaggccctgatgagcctgtttgtgctggccagcaaggatggctgggtggacatcatgtatgatggcctggatgctgtgggcgtggaccagcagcccatcatgaaccacaacccctggatgctgctgtacttcatctccttcctgctgattgtggccttctttgtgctgaacatgtttgtgggcgtggtggtggagaacttccacaagtgccggcagcaccaggaggaggaggaggccaggagaagagaggagaagaggctgcggcggctggagaagaagaggaggagcaaggagaagcagatggccgaggcccagtgcaagccctactacagcgactacagccgcttccggctgctggtgcaccacctgtgcaccagccactacctggacctcttcatcaccggggtgattggcctgaatgtggtgaccatggccatggagcactaccagcagccccagatcctggatgaggccctgaagatctgcaactacatcttcaccgtcatctttgtgctggagagcgtcttcaagctggtggccttcggcttccgccgcttcttccaggaccgctggaaccagctggacctggccatcgtgctgctgagcatcatgggcatcaccctggaggagattgaggtgaatgccagcctgcccatcaaccccaccatcatccgcatcatgagggtgctgcgcatcgcccgggtgctgaagctgctgaagatggctgtgggcatgagggccctgctggacacagtgatgcaggccctgccccaggtgggcaacctgggcctgctcttcatgctgctcttcttcatctttgctgccctgggcgtggagctgtttggagacctggagtgtgatgagacccacccctgtgagggcctgggcagacatgccaccttcaggaactttggcatggccttcctgaccctcttccgggtgtccactggagacaactggaatggcatcatgaaggacaccctgcgggactgtgaccaggagagcacctgctacaacacagtcatcagccccatctactttgtgtcctttgtgctgacagcccagtttgtgctggtgaatgtggtgattgctgtgctgatgaagcacctggaggagagcaacaaggaggccaaggaggaggccgagctggaggccgagctggagctggagatgaagaccctgagcccccagccccacagccccctgggcagccccttcctgtggccaggagtggagggccctgacagcccagacagccccaagccaggggccctgcaccctgctgcccacgcccggagcgccagccacttcagcctggagcaccccacagaccggcagctgtttgacaccatcagcctgctgatccagggcagcctggagtgggagctgaagctgatggatgagctggccggccctgggggccagcccagcgccttccccagcgcccccagcctgggcggcagtgacccccagatccccctggccgagatggaggccctgagcctgaccagcgagatcgtgtctgagcccagctgcagcctggccctgacagatgacagcctgcctgatgacatgcacaccctgctgctgagcgccctggagagcaacatgcagccccaccccacagagctgcccggccctgacctgctgactgtgaggaagtctggagtgtccaggacccacagcctgcccaatgacagctacatgtgccgccacggcagcacagctgagggccccctgggccaccggggctggggcctgcccaaggcccagagcggctctgtgctgtctgtgcacagccagcctgctgacaccagctacatcctgcagctgcccaaggatgccccccacctgctgcagccccacagcgcccccacctggggcaccatccccaagctgcccccacctggccgcagccccctggcccagaggcccctgcggcggcaggccgccatcagaacagacagcctggatgtgcagggcctgggcagccgggaggacctgctggccgaggtgtctggccccagcccccccctggcccgggcctacagcttctggggccagagcagcacccaggcccagcagcacagccgcagccacagcaagatcagcaagcacatgaccccaccagccccctgccccggccctgagcccaactggggcaagggccccccagagaccaggagcagcctggagctggacacagagctgtcctggatcagcggggacctgctgcccccaggcggccaggaggagccccccagcccccgggacctgaagaagtgctacagcgtggaggcccagagctgccagaggcggcccacctcctggctggatgagcagaggaggcacagcattgctgtgtcctgcctggacagcggcagccagccccacctgggcacagaccccagcaacctgggcggccagcccctgggcggccctggcagccggcccaagaagaagctgagcccccccagcatcaccattgatcctcctgagagccagggccccaggaccccacccagccctggcatctgcctgcggcggcgggcccccagcagtgacagcaaggaccccctggccagcggccccccagacagcatggccgccagccccagccccaagaaggatgtgctgagcctgagcggcctgagcagtgaccctgctgacctggacccctag

SEQ ID NO: 259819 - DNA, 7032 bp, Artificial Sequence
  derived and/or modified sequence
atggacgaggaggaggacggcgccggcgccgaggagagcggccagccccgcagtttcatgcgcttgaatgacctcagcggcgccgggggccgtcctggccccggctctgccgagaaggaccctggctccgccgattcagaagcagagggactcccctatcctgcactggctcccgtcgtgtttttctatttgagccaggacagtagaccccgaagctggtgtctaaggactgtgtgcaacccctggtttgagcgcattagcatgctcgttattttactgaactgcgtcaccctgggtatgttccgcccctgcgaggacatagcctgtgactcgcagcgatgccgaatcctccaggcgtttgacgattttatctttgccttttttgccgtcgagatggtggtgaaaatggtggctctggggattttcggcaaaaagtgctaccttggagacacatggaatcgactggatttctttattgtcattgccggaatgctggagtactccctggatctgcagaatgtgtctttcagcgccgtaaggacagttagagtgctgaggccgttacgcgccatcaatagagttcctagcatgcggattttggttacactgctcctggacactctgcccatgctcggcaatgtgctgctgttatgtttttttgtgtttttcatattcggaatagtgggggtgcagctatgggcaggacttctgcgcaaccgctgcttccttcccgaaaacttctcactcccactttcggtggatctcgagcggtattaccagacagagaatgaggatgagtccccattcatatgctcgcagcccagagagaatggcatgcgcagttgccgaagtgtccctaccctgaggggagatgggggcggcggaccaccttgcggcctggactacgaggcatataactcctcgtccaatacaacgtgcgtgaattggaaccagtactacaccaactgtagcgctggcgagcataacccttttaagggcgctatcaattttgataacattggctatgcatggattgcgatcttccaggtcatcactctcgaaggctgggtcgatattatgtatttcgtcatggacgctcattccttctataacttcatctactttattctcctcataatcgttggttccttcttcatgattaatttgtgcctggtcgtaatagctacccagtttagcgaaacaaagcagcgggaatctcagctcatgagggagcagagagttcgctttctctcaaacgccagcacgctggcatcattctctgagccgggttcatgttatgaagaactgctgaaatatcttgtctacatcttgcgtaaggccgccaggcggctggcccaggtctcaagagctgctggggttagggttgggctgctctcgtcccccgccccgcttggtggtcaggaaacccagccttcttcatcctgttctagatctcaccgcagactgtccgttcatcacctggtgcaccatcatcatcatcaccaccaccactaccacctcgggaatggtactctgagagcacctagggccagtccagaaattcaagaccgggacgccaacggcagtaggcgactcatgctgcctccaccaagcacgccagctctttcaggggctccccctggcggcgccgagagtgtgcactcattctaccacgccgactgccacctagagcccgtcaggtgtcaggccccccctcctcgaagtcctagcgaagcttccggcagaaccgtaggttctggtaaggtgtatccaactgtacatacttcccctccaccagagactctaaaggagaaggcactggtggaggtggccgcgagtagcggtccccctactctgacctctctcaacatcccccctggtccttattcctctatgcataaactgctggagacccagtctacaggagcatgccagtctagctgtaagatctcgtccccctgccttaaggcagactccggtgcttgcggcccagacagctgcccctactgcgccagggccggtgctggtgaggtagaactggccgacagggaaatgccggacagcgactctgaggcagtgtacgaatttacacaggatgcccaacacagcgatctgagggacccacattcccgcaggcaacgctccctggggccggatgccgaaccgagttctgtgctggctttctggcggctcatctgcgacaccttccggaaaatagttgacagtaaatacttcggccgtggcatcatgattgcaattctcgtcaacacacttagcatggggatcgagtatcacgagcaacctgaggagctgactaacgctctggagatcagcaacattgttttcacatccctctttgccctggagatgcttctgaagctgctcgtgtacggcccttttgggtacattaagaacccgtataacatttttgatggagtcatcgttgtgatctctgtgtgggagatcgtgggccagcagggcggagggttgtctgttctgcgcacctttaggcttatgcgggtcctcaagcttgttcgatttctcccagcactgcagagacagctcgtagtgcttatgaaaacgatggataatgtggcaacattctgcatgctgctgatgctgttcatatttatctttagcatcttaggtatgcatctttttggctgcaaattcgcctcagagagggatggcgatacactgccagacagaaagaactttgattccttgctgtgggctattgtgactgtgtttcagattttaacacaggaagactggaataaggtcctgtataatggcatggctagcactagcagctgggccgcactttacttcatcgctcttatgacgtttggcaactacgtgctctttaacctgttggttgctatcttagtcgaaggttttcaagccgagggggacgctaacaagtccgagagcgaacctgactttttctccccttcattggatggggatggggaccggaaaaaatgcctcgctctcgtgtccttgggagaacacccagaactgcgcaaaagcctgctgcctcccctaattatacacaccgctgccacacctatgagtctacctaaatcgacttccaccggattgggcgaggctttgggacctgcgtccagacgaacatcctcttccggctctgcggaacctggcgccgcccatgagatgaaatcacctccatcggctaggtcatcaccccactctccttggagcgccgcgagttcctggaccagtaggcgaagcagccgtaactccttaggccgcgccccctccttaaagcgccgatcaccgtcaggggaacgacgctccctgttgtcgggcgagggacaagagtcccaggacgaagaggagtccagcgaggaggagcgagcctcccccgccggaagtgaccacagacataggggctctttggagcgggaggcgaaaagctcatttgacctgccagatactctgcaggtgcctggtctgcatcgaacagcctccggacggggaagtgcttctgagcatcaggattgtaacgggaagagcgctagcggacggctcgcgcgcgctctgagaccagatgatcccccactcgatggtgatgatgcagacgatgagggcaatctcagtaaaggagagagagtgcgggcctggattcgggctcgacttccagcctgctgtctggagagggattcttggtccgcctacatcttccctccccaatcgcgcttccgcctcctttgtcacaggatcatcactcacaaaatgtttgatcacgtggtgctcgttatcatctttttgaactgcattacgattgccatggagcggcctaagatcgatcctcattctgccgagcgcattttcctcacactgtcgaattacattttcaccgcagtctttctggccgaaatgacagtaaaagtagtagccttaggatggtgcttcggagagcaggcatatctgagaagtagttggaatgttcttgacggtctcctggtgttgatctccgtgatcgatatcctggtctccatggtttcggattcaggcaccaagatcctcgggatgttgagagtactacgcctgctgcgaacccttaggcccttaagggtgatcagccgtgcacagggtctcaaactggtggtggaaactttgatgtcttccctcaaacccatcggcaacatcgtggtcatctgttgcgctttcttcattatttttggaatcttgggcgtgcagctatttaagggtaagttttttgtgtgccagggggaggatacacgcaacatcaccaacaaatcagactgcgccgaggctagctatcgttgggtgcgccacaagtacaactttgataatcttggtcaagccttaatgagtttatttgttcttgcatccaaagacgggtgggtcgacataatgtacgacggcctggacgccgtgggcgtggatcagcaacccatcatgaatcacaacccctggatgttgctctacttcatctcctttcttctcatcgtggcctttttcgttctaaacatgttcgtcggtgtggttgtggaaaattttcacaaatgtcggcaacatcaggaagaggaggaggcccggcggcgcgaggaaaaacgactgcggaggctggaaaaaaaacggagatcgaaggagaaacagatggcagaagcgcagtgcaagccatactacagcgattacagccggtttcgtttgttggtgcatcacctatgtacatcgcattacctcgacctctttatcaccggagtgattgggctgaatgtagtaacaatggctatggaacattatcagcagccacaaatcttagacgaggcgctgaagatatgcaattatatctttacggtaatctttgttctcgagtccgtgtttaagttagtggcattcggattccgacgctttttccaggatcgctggaatcagctcgatctcgcaattgtacttctgagcatcatgggcattacactggaagaaattgaagttaatgcaagtcttccaatcaaccctaccattattaggattatgcgggtcctcaggatagctagagtcttaaagctgcttaaaatggccgtgggtatgcgcgccctgctggacactgtcatgcaggccctgcctcaggtcgggaatctgggactactattcatgctcttattctttatctttgctgccctgggcgtcgagctgttcggcgacctggagtgcgacgagacccatccatgcgaaggactgggacggcacgcgacgttcaggaatttcggtatggcattcctgaccttgtttagagttagcactggggataactggaatggaattatgaaagatacactgcgggactgtgatcaggaatccacctgctataacaccgttatatcgcctatttactttgtttccttcgtcctaaccgctcagtttgtgctggtgaacgtggtgatcgcagttttgatgaaacacttagaggagagtaacaaggaggcgaaggaagaagcggaattggaagccgagctagagttggagatgaaaacgttgtcgccgcagccccactcacccctgggctctccgtttctctggccaggagtggaaggtccagacagccctgacagccccaagccaggcgcgctgcacccggccgctcatgctaggtctgcgtcgcacttctccttagagcaccctaccgatcgccagctcttcgacacaattagtcttctgatacaaggcagtctagaatgggagcttaagctgatggatgagctggcaggaccaggcggccagccctctgcctttccctcagcaccaagcctaggagggagtgacccgcagatccccctggctgagatggaagcactttctttgacatctgaaattgtttctgagccctcatgttccttagcccttacagatgattccctgccagacgacatgcatacgctgctcctaagcgcactcgagagcaacatgcagccacaccccactgagctcccaggtcctgatttacttactgttaggaaatcgggtgtgtcgaggacccatagtctgcccaatgacagctacatgtgtcggcatggcagtactgccgaaggaccacttggacatcgcggatgggggctgcccaaagcccagagtggaagtgttctgtcggttcactcccagcccgctgacacaagctacatcctgcagcttcctaaggacgctccacatctcttgcagccgcattccgcccctacatgggggaccatccccaagttaccccctcccggtagatctccactggctcagcgaccattgcgtcgacaggctgccattagaaccgatagtctcgacgttcagggacttggatccagagaggatttgctggctgaagtatccggtccctcaccaccacttgctagagcatattccttctggggccagtcctcaacccaggcccagcagcacagccggagccattcaaaaattagtaaacatatgacccctccagccccatgcccaggtccagagcccaattggggcaagggcccacccgagaccagaagctcacttgagttggacacagagctttcatggatttctggagatctgctaccacctggtgggcaggaggagccccccagcccacgggatctaaaaaaatgttactcagtggaagcccagagttgtcaaaggcggcctacatcctggctggatgaacagcggagacattccattgctgtttcatgtctcgacagcggtagccaacctcacctgggcacagacccgagcaatctggggggacagcccctgggtggacctggctctcgccccaaaaagaagctgagcccacctagtattaccattgatccaccagagagccaagggcctagaacccccccttcccctgggatttgcttgcgacgccgcgctccttcttcagatagtaaggatcccttggcttctggcccaccagacagtatggcggccagccccagccctaaaaaggacgtgttgagtctgtcgggcctgagctccgaccctgccgaccttgatccgtag

SEQ ID NO: 259820 - DNA, 7031 bp, Artificial Sequence
  derived and/or modified sequence
atggacgaggaggaggatggtgctggagctgaggagtctggccagccacgcagcttcatgcgattaaatgatttgagcggggcaggcggtaggccaggtccaggtagcgccgagaaagatccaggcagcgccgatagcgaggcggaaggcctcccatacccagccttagcacctgtggtcttcttctacctgagccaggacagccgacccaggtcctggtgcctgcgaactgtatgcaacccttggttcgagcgtatctcaatgcttgtgatactccttaactgcgtcactctgggcatgtttcggccatgcgaagatattgcgtgtgacagtcaacgttgcaggatattgcaggcgttcgacgatttcattttcgctttttttgccgtggagatggtggtgaagatggtggccctcggcatttttggcaagaagtgctatctgggggacacatggaatcgcctagacttcttcatagtgattgctgggatgctagagtactccctggatctgcagaacgtctccttcagcgctgtcaggactgtgagggtcctgcggccactgagagccataaatagagtgccatccatgaggattctggtgaccctcctattggacacgctccccatgctggggaatgtgctcctgctgtgtttcttcgttttttttatcttcggcattgtcggggtccagctctgggccggactgctgcgcaatcgctgttttttacctgaaaacttctctctgcctctgtcagtcgatctggagcgctactaccagaccgaaaatgaggacgagtccccttttatctgtagtcagccccgtgagaacggcatgcgctcttgtaggagcgtgcctacgcttaggggggatggaggaggaggacctccctgtggactggattatgaagcatataattctagtagcaatactacatgcgtgaactggaaccagtattataccaattgttctgcgggtgagcacaatcccttcaaaggagccatcaactttgataatatcgggtatgcctggatcgccatttttcaggtcatcaccttggaaggttgggtcgacatcatgtatttcgtgatggacgcccactctttttataactttatatacttcattcttctgataatcgttggttctttctttatgataaacctgtgtctagtcgtcatcgccacccagttttccgagactaaacagcgcgagagccaactcatgagggaacagagagttaggttcctctcaaatgcatctaccctggcttctttttctgaacctggctcatgttacgaggagcttcttaaatacctcgtctacatactgcgcaaagctgccaggcgactggctcaggtctcacgagcagccggtgtgcgggtcggccttctgagtagtccggcacccctggggggacaggagactcagccttcttcgtcctgctccaggtcccataggcggttaagtgtgcaccacctggtccaccatcaccaccaccaccaccaccactaccatttggggaatgggactcttagggctccacgggcatctccagagatccaggacagagacgccaacggtagccgcaggctcatgttgcctcccccttccacccctgctttgtcgggcgctccaccgggaggtgccgagagtgtgcactctttttaccatgccgactgccaccttgagcctgtgcgttgtcaggctcccccaccacggtccccttctgaagcttctgggagaacggtggggtcaggcaaagtgtaccccactgtgcacacttccccaccccctgagaccctgaaagagaaggctctggtggaggtcgcagcaagcagtgggccaccgaccctcacaagcttaaacataccccctggcccttatagcagcatgcataagctccttgagacacagagcactggggcttgccagtcgagctgcaaaatcagttctccttgtctaaaagccgattctggagcctgtggcccagactcatgtccatactgtgctcgtgccggtgcgggagaggtggagttggccgatagagaaatgcctgactccgactccgaagcggtatacgaatttacccaggacgcccaacattccgatttgcgggatccccactccaggcggcagaggtctttgggcccagacgcagagccatcgtcggtactggctttctggcggctcatctgcgatacctttcgtaagatagttgattccaagtattttggacgcggtatcatgatcgctattctggtcaatacactgagtatgggcatcgaataccatgaacagcctgaggaactcactaacgcccttgagatttccaatatcgtcttcaccagcttattcgccctcgagatgctcctgaaactgctcgtgtatggtcccttcgggtacattaaaaatccatacaacatattcgacggagtcatcgttgttatcagcgtctgggaaatcgttggtcaacagggcggaggactgtccgtgttaagaaccttccgccttatgagggtgcttaaattggtgcgcttcctgccagcgctccaacgacagctggtggtgctcatgaagaccatggataatgtagcaacattttgcatgctcctcatgttatttatctttattttcagcatattggggatgcacctcttcggatgcaaattcgccagtgagagagatggagacacactgcctgatcgcaagaatttcgatagcttgttgtgggctatcgtgaccgtgttccagatacttacgcaggaggactggaacaaagtactgtacaacggcatggcatcaacctccagttgggcagccctatatttcatcgcgctaatgacatttggcaactatgtgttgtttaatctgcttgtcgctattctagtggagggttttcaggcagaaggagatgcaaacaagtccgagagtgagcccgattttttttctccaagcctcgacggggatggggaccgaaaaaagtgcctggccttagtctctttaggggagcatcccgagctgcgaaaatcccttctcccacccctcatcatacacaccgctgccacccccatgtccttgcccaaaagcaccagcacaggtctcggcgaggctctcgggccagcctccagacgcacttcctcttcaggctcggctgagcctggcgctgctcacgagatgaaaagtcccccttccgctcggagctctccccactctccatggagcgccgcaagttcgtggacatcccgacgtagcagtcgaaactctttggggagggcgcctagtctcaagcgcaggtcgcccagtggtgaacgcaggtcactactgtcaggcgaaggccaggagtctcaggacgaagaagagtctagcgaggaagagagggcctcaccagctgggtctgatcatcggcatcgtggttccctggagcgcgaagcaaagtcctcctttgacctcccggatacactgcaagtgcccggactgcaccgaaccgcctcggggcgtgggagtgcatccgagcaccaagactgtaacggcaagtctgcctctggcagactggcgagagccctgcgtcccgatgaccccccactcgacggggacgatgcggatgacgaaggaaatttatccaaaggtgagcgggtacgggcttggatccgggcacgccttccagcttgctgccttgagagagactcatggtccgcgtacatcttccctccacaaagccggttccgactgctgtgccataggatcatcactcacaaaatgttcgaccatgtggttttggtcatcatcttcttgaactgtatcaccatcgccatggaacgccctaagatcgacccacactctgccgagagaattttcctcaccctgtcgaactatattttcactgctgtgtttctggccgaaatgacagtcaaggtcgtggccctgggatggtgtttcggagagcaggcctatctgcgcagtagctggaatgtgcttgatggcctgttagttctgatctccgtgatcgatatcctagtgtctatggtgtccgacagcggcaccaaaattctcggtatgcttagggtcctgcgcctgctaagaacccttcgccctctccgcgttatctcaagagcccaggggttgaagctggttgtcgaaacattaatgagctctctgaagccgatagggaatatcgtcgtgatctgctgcgccttcttcatcatttttggtatattgggagtgcagttgttcaaaggaaagttcttcgtctgccagggtgaagacactcgcaatatcaccaataagagcgattgcgccgaagcatcttacagatgggttcgccataaatacaactttgacaatctggggcaggctctgatgagcctatttgttctcgccagtaaggatggttgggtggacattatgtacgacggactggacgctgtaggcgtcgaccaacagcctattatgaaccataatccttggatgctactttactttatctccttcctacttatcgttgcattctttgttttgaacatgtttgtgggagttgttgttgagaacttccataaatgcaggcagcatcaggaggaggaagaagccagacgtcgagaagagaagaggttacgcagactagagaagaagcgccgaagcaaagagaaacagatggctgaggctcagtgcaaaccctactactcagactatagcagattcagactgctggtccaccacttatgcactagccattatctggacctgtttatcacaggagtcattgggctgaacgttgtgacaatggccatggagcattatcagcagcctcagatcttggacgaggctcttaagatttgtaactacatctttactgtgatcttcgtcctagaatcagtcttcaaattggtggcttttggcttcaggagattcttccaggaccggtggaatcagcttgatttagccattgtgcttctgtcaatcatgggcatcaccctggaggagattgaagtgaatgcctctctgcccatcaaccccaccattatccgcataatgagggttctgcggatcgcccgtgtgctgaaactgctcaaaatggccgttggaatgagggcgttgctggatacagtcatgcaggctctgcctcaggtgggcaatctggggctcctgttcatgctcctgttcttcatctttgctgctctgggagtcgagctctttggagatctcgagtgcgacgagactcacccatgtgaaggacttggcagacatgcaacattccgcaacttcggtatggcgttcctgactctgtttagggtgtctacaggggacaattggaatggcataatgaaagacacactacgggactgcgaccaggagagcacatgttataacactgtaatcagtccgatttattttgtgtcatttgtgctcactgctcagtttgttcttgtgaacgttgtaatagcagtactgatgaagcacctagaagaatcaaacaaggaggcaaaagaagaagcggaacttgaggctgaactagaactggaaatgaagactctttccccccaaccccacagcccccttggctccccattcctttggccgggagtcgaggggccagactcacctgactcccccaagcctggggcactccacccagccgctcatgccagaagtgcgagtcatttctccttagagcacccaactgatcggcagctgtttgataccatttctcttctcatccagggttccctcgagtgggagctaaagttgatggatgagctggcaggtccaggcggacaacccagcgcttttccctccgctccctcattaggtggtagcgatccacagattccattggctgaaatggaagctctctctcttactagtgagattgtttcggagccatcatgcagtcttgccctgacagacgacagtctcccggatgacatgcacactttgctactgagtgcactcgaatctaacatgcagcctcacccaaccgagctgcctggtcccgatcttttaaccgttaggaagagcggagtgagcaggacccactccctgccgaatgattcctatatgtgtcgccacggcagtactgccgagggaccattggggcaccgcggatggggattgccaaaggcccagtctgggtcagtcctgagtgtccacagtcaaccagcggacacatcctatattttacagctccccaaggatgcgccacatctgctgcagccgcattccgcgccaacctggggaaccatacctaagctgccgcctccgggaagaagcccgttggctcaaaggcccttgaggaggcaggcagccatccgcaccgatagcctggacgtgcaggggttaggctcacgggaggatctcctagctgaagttagtgggccaagtccgcctctggccagagcctactctttctggggccaatcgtctacccaggctcaacagcacagccgaagccacagcaagatcagcaaacacatgacccctccagcgccatgtccaggccctgagccaaattggggcaagggcccacccgaaactcgctcatcactcgaacttgacactgagctatcctggatttctggcgacctgctgccccctggagggcaggaagaaccccctagccccagagacctaaaaaaatgttacagcgtggaagcacagtcatgccagagaagacctacctcttggttggacgagcagcgaagacactccatcgctgtcagttgcctggactcggggtcacagccccaccttgggactgatccatctaatctgggtggtcaacccctgggtgggccaggatcccgtcctaagaagaaattgagcccacctagcattaccatcgaccccccagaatctcagggtcctagaacacctcccagcccagggatttgcctgcggagaagggcaccttcatcagatagcaaggatcctctcgctagcggccctcctgatagcatggccgcaagtccatcgccaaaaaaggacgtgctctcactgagcggactatctagcgatccggcagacttggatcccta

SEQ ID NO: 259821 - DNA, 7834 bp, Artificial Sequence
  derived and/or modified sequence
ccttttcgttcgccctctcggggcggcttcgccgaaggtagcgccgaatccggcaaccggagcctgggcgcgaagcgaagaagccggaacaaagtgagggggagccggccggctggcccgggaagccccaggggcgcaggggaagcgggactcgcgccgggcggggtttccctgcgccccggcgccccgcgggcagcatgcccctgcgggcagggggagctgggctgaactggccctcccgggggctcagcttgcgccctagagcccaccagatgtgcccccgccggggcccccgggttgcgtgaggacacctcctctgaggggcgccgcttgcccctctccggatcgcccggggccccggctggccagaggatggacgaggaggaggatggagcgggcgccgaggagtcgggacagccccggagcttcatgcggctcaacgacctgtcgggggccgggggccggccggggccggggtcagcagaaaaggacccgggcagcgcggactccgaggcggaggggctgccgtacccggcgctggccccggtggttttcttctacttgagccaggacagccgcccgcggagctggtgtctccgcacggtctgtaacccctggtttgagcgcatcagcatgttggtcatccttctcaactgcgtgaccctgggcatgttccggccatgcgaggacatcgcctgtgactcccagcgctgccggatcctgcaggcctttgatgacttcatctttgccttctttgccgtggagatggtggtgaagatggtggccttgggcatctttgggaaaaagtgttacctgggagacacttggaaccggcttgactttttcatcgtcatcgcagggatgctggagtactcgctggacctgcagaacgtcagcttctcagctgtcaggacagtccgtgtgctgcgaccgctcagggccattaaccgggtgcccagcatgcgcatccttgtcacgttgctgctggatacgctgcccatgctgggcaacgtcctgctgctctgcttcttcgtcttcttcatcttcggcatcgtcggcgtccagctgtgggcagggctgcttcggaaccgatgcttcctacctgagaatttcagcctccccctgagcgtggacctggagcgctattaccagacagagaacgaggatgagagccccttcatctgctcccagccacgcgagaacggcatgcggtcctgcagaagcgtgcccacgctgcgcggggacgggggcggtggcccaccttgcggtctggactatgaggcctacaacagctccagcaacaccacctgtgtcaactggaaccagtactacaccaactgctcagcgggggagcacaaccccttcaagggcgccatcaactttgacaacattggctatgcctggatcgccatcttccaggtcatcacgctggagggctgggtcgacatcatgtactttgtgatggatgctcattccttctacaatttcatctacttcatcctcctcatcatcgtgggctccttcttcatgatcaacctgtgcctggtggtgattgccacgcagttctcagagaccaagcagcgggaaagccagctgatgcgggagcagcgtgtgcggttcctgtccaacgccagcaccctggctagcttctctgagcccggcagctgctatgaggagctgctcaagtacctggtgtacatccttcgtaaggcagcccgcaggctggctcaggtctctcgggcagcaggtgtgcgggttgggctgctcagcagcccagcacccctcgggggccaggagacccagcccagcagcagctgctctcgctcccaccgccgcctatccgtccaccacctggtgcaccaccaccaccaccatcaccaccactaccacctgggcaatgggacgctcagggccccccgggccagcccggagatccaggacagggatgccaatgggtcccgccggctcatgctgccaccaccctcgacgcctgccctctccggggccccccctggtggcgcagagtctgtgcacagcttctaccatgccgactgccacttagagccagtccgctgccaggcgccccctcccaggtccccatctgaggcatccggcaggactgtgggcagcgggaaggtgtatcccaccgtgcacaccagccctccaccggagacgctgaaggagaaggcactagtagaggtggctgccagctctgggcccccaaccctcaccagcctcaacatcccacccgggccctacagctccatgcacaagctgctggagacacagagtacaggtgcctgccaaagctcttgcaagatctccagcccttgcttgaaagcagacagtggagcctgtggtccagacagctgcccctactgtgcccgggccggggcaggggaggtggagctcgccgaccgtgaaatgcctgactcagacagcgaggcagtttatgagttcacacaggatgcccagcacagcgacctccgggacccccacagccggcggcaacggagcctgggcccagatgcagagcccagctctgtgctggccttctggaggctaatctgtgacaccttccgaaagattgtggacagcaagtactttggccggggaatcatgatcgccatcctggtcaacacactcagcatgggcatcgaataccacgagcagcccgaggagcttaccaacgccctagaaatcagcaacatcgtcttcaccagcctctttgccctggagatgctgctgaagctgcttgtgtatggtccctttggctacatcaagaatccctacaacatcttcgatggtgtcattgtggtcatcagcgtgtgggagatcgtgggccagcaggggggcggcctgtcggtgctgcggaccttccgcctgatgcgtgtgctgaagctggtgcgcttcctgccggcgctgcagcggcagctggtggtgctcatgaagaccatggacaacgtggccaccttctgcatgctgcttatgctcttcatcttcatcttcagcatcctgggcatgcatctcttcggctgcaagtttgcctctgagcgggatggggacaccctgccagaccggaagaattttgactccttgctctgggccatcgtcactgtctttcagatcctgacccaggaggactggaacaaagtcctctacaatggtatggcctccacgtcgtcctgggcggccctttatttcattgccctcatgaccttcggcaactacgtgctcttcaatttgctggtcgccattctggtggagggcttccaggcggagggagatgccaacaagtccgaatcagagcccgatttcttctcacccagcctggatggtgatggggacaggaagaagtgcttggccttggtgtccctgggagagcacccggagctgcggaagagcctgctgccgcctctcatcatccacacggccgccacacccatgtcgctgcccaagagcaccagcacgggcctgggcgaggcgctgggccctgcgtcgcgccgcaccagcagcagcgggtcggcagagcctggggcggcccacgagatgaagtcaccgcccagcgcccgcagctctccgcacagcccctggagcgctgcaagcagctggaccagcaggcgctccagccggaacagcctcggccgtgcacccagcctgaagcggagaagcccaagtggagagcggcggtccctgttgtcgggagaaggccaggagagccaggatgaagaggagagctcagaagaggagcgggccagccctgcgggcagtgaccatcgccacagggggtccctggagcgggaggccaagagttcctttgacctgccagacacactgcaggtgccagggctgcatcgcactgccagtggccgagggtctgcttctgagcaccaggactgcaatggcaagtcggcttcagggcgcctggcccgggccctgcggcctgatgaccccccactggatggggatgacgccgatgacgagggcaacctgagcaaaggggaacgggtccgcgcgtggatccgagcccgactccctgcctgctgcctcgagcgagactcctggtcagcctacatcttccctcctcagtccaggttccgcctcctgtgtcaccggatcatcacccacaagatgttcgaccacgtggtccttgtcatcatcttccttaactgcatcaccatcgccatggagcgccccaaaattgacccccacagcgctgaacgcatcttcctgaccctctccaattacatcttcaccgcagtctttctggctgaaatgacagtgaaggtggtggcactgggctggtgcttcggggagcaggcgtacctgcggagcagttggaacgtgctggacgggctgttggtgctcatctccgtcatcgacattctggtgtccatggtctctgacagcggcaccaagatcctgggcatgctgagggtgctgcggctgctgcggaccctgcgcccgctcagggtgatcagccgggcgcaggggctgaagctggtggtggagacgctgatgtcctcactgaaacccatcggcaacattgtagtcatctgctgtgccttcttcatcattttcggcatcttgggggtgcagctcttcaaagggaagtttttcgtgtgccagggcgaggataccaggaacatcaccaataaatcggactgtgccgaggccagttaccggtgggtccggcacaagtacaactttgacaaccttggccaggccctgatgtccctgttcgttttggcctccaaggatggttgggtggacatcatgtacgatgggctggatgctgtgggcgtggaccagcagcccatcatgaaccacaacccctggatgctgctgtacttcatctcgttcctgctcattgtggccttctttgtcctgaacatgtttgtgggtgtggtggtggagaacttccacaagtgtcggcagcaccaggaggaagaggaggcccggcggcgggaggagaagcgcctacgaagactggagaaaaagagaaggagtaaggagaagcagatggctgaagcccagtgcaaaccttactactccgactactcccgcttccggctcctcgtccaccacttgtgcaccagccactacctggacctcttcatcacaggtgtcatcgggctgaacgtggtcaccatggccatggagcactaccagcagccccagattctggatgaggctctgaagatctgcaactacatcttcactgtcatctttgtcttggagtcagttttcaaacttgtggcctttggtttccgtcggttcttccaggacaggtggaaccagctggacctggccattgtgctgctgtccatcatgggcatcacgctggaggaaatcgaggtcaacgcctcgctgcccatcaaccccaccatcatccgcatcatgagggtgctgcgcattgcccgagtgctgaagctgctgaagatggctgtgggcatgcgggcgctgctggacacggtgatgcaggccctgccccaggtggggaacctgggacttctcttcatgttgttgtttttcatctttgcagctctgggcgtggagctctttggagacctggagtgtgacgagacacacccctgtgagggcctgggccgtcatgccacctttcggaactttggcatggccttcctaaccctcttccgagtctccacaggtgacaattggaatggcattatgaaggacaccctccgggactgtgaccaggagtccacctgctacaacacggtcatctcgcctatctactttgtgtccttcgtgctgacggcccagttcgtgctagtcaacgtggtgatcgccgtgctgatgaagcacctggaggagagcaacaaggaggccaaggaggaggccgagctagaggctgagctggagctggagatgaagaccctcagcccccagccccactcgccactgggcagccccttcctctggcctggggtcgagggccccgacagccccgacagccccaagcctggggctctgcacccagcggcccacgcgagatcagcctcccacttttccctggagcaccccacggacaggcagctgtttgacaccatatccctgctgatccagggctccctggagtgggagctgaagctgatggacgagctggcaggcccagggggccagccctctgccttcccttctgcccccagcctgggaggctccgacccacagatccctctagctgagatggaggctctgtctctgacgtcagagattgtgtctgaaccgtcctgctctctagctctgacggatgactctttgcctgatgacatgcacacactcttacttagtgccctggagagcaatatgcagccccaccccacggagctgccaggaccagacttactgactgtgcggaagtctggggtcagccgaacgcactctctgcccaatgacagctacatgtgtcggcatgggagcactgccgaggggcccctgggacacaggggctgggggctccccaaagctcagtcaggctccgtcttgtccgttcactcccagccagcagataccagctacatcctgcagcttcccaaagatgcacctcatctgctccagccccacagcgccccaacctggggcaccatccccaaactgcccccaccaggacgctcccctttggctcagaggccactcaggcgccaggcagcaataaggactgactccttggacgttcagggtctgggcagccgggaagacctgctggcagaggtgagtgggccctccccgcccctggcccgggcctactctttctggggccagtcaagtacccaggcacagcagcactcccgcagccacagcaagatctccaagcacatgaccccgccagccccttgcccaggcccagaacccaactggggcaagggccctccagagaccagaagcagcttagagttggacacggagctgagctggatttcaggagacctcctgccccctggcggccaggaggagcccccatccccacgggacctgaagaagtgctacagcgtggaggcccagagctgccagcgccggcctacgtcctggctggatgagcagaggagacactctatcgccgtcagctgcctggacagcggctcccaaccccacctgggcacagacccctctaaccttgggggccagcctcttggggggcctgggagccggcccaagaaaaaactcagcccgcctagtatcaccatagacccccccgagagccaaggtcctcggaccccgcccagccctggtatctgcctccggaggagggctccgtccagcgactccaaggatcccttggcctctggcccccctgacagcatggctgcctcgccctccccaaagaaagatgtgctgagtctctccggtttatcctctgacccagcagacctggacccctgagtcctgccccactttcccactcacctttctccactgggtgccaagtcctagctcctcctcctgggctatattcctgacaaaagttccatatagacaccaaggaggcggaggcgctcctccctgcctcagtggctctgggtacctgcaagcagaacttccaaagagagttaaaagcagcagccccggcaactctggctccaggcagaaggagaggcccggtgcagctgaggttcccgacaccagaagctgttgggagaaagcaatacgtttgtgcagaatctctatgtatattctattttattaaattaattgaatctagtatatgcgggatgtacgacattttgtgactgaagagacttgtttccttctacttttatgtgtctcagaatatttttgaggcgaaggcgtctgtctcttggctattttaacc

SEQ ID NO: 259822 - protein, 388 aa, Artificial Sequence
  derived and/or modified sequence
MEALGKLKQFDAYPKTLEDFRVKTCGGATVTIVSGLLMLLLFLSELQYYLTTEVHPELYVDKSRGDKLKINIDVLFPHMPCAYLSIDAMDVAGEQQLDVEHNLFKQRLDKDGIPVSSEAERHELGKVEVTVFDPDSLDPDRCESCYGAEAEDIKCCNTCEDVREAYRRRGWAFKNPDTIEQCRREGFSQKMQEQKNEGCQVYGFLEVNKVAGNFHFAPGKSFQQSHVHVQGEEVHDLQSFGLDNINMTHYIQHLSFGEDYPGIVNPLDHTNVTAPQASMMFQYFVKVVPTVYMKVDGEVLRTNQFSVTRHEKVANGLLGDQGLPGVFVLYELSPMMVKLTEKHRSFTHFLTGVCAIIGGMFTVAGLIDSLIYHSARAIQKKIDLGKTT

SEQ ID NO: 259823 - protein, 388 aa, Artificial Sequence
  derived and/or modified sequence
MEALGKLKQFDAYPKTLEDFRVKTCGGATVTIVSGLLMLLLFLSELQYYLTTEVHPELYVDKSRGDKLKINIDVLFPHMPCAYLSIDAMDVAGEQQLDVEHNLFKQRLDKDGIPVSSEAERHELGKVEVTVFDPDSLDPDRCESCYGAEAEDIKCCNTCEDVREAYRRRGWAFKNPDTIEQCRREGFSQKMQEQKNEGCQVYGFLEVNKVAGNFHFAPGKSFQQSHVHVHAVEIHDLQSFGLDNINMTHYIQHLSFGEDYPGIVNPLDHTNVTAPQASMMFQYFVKVVPTVYMKVDGEVLRTNQFSVTRHEKVANGLLGDQGLPGVFVLYELSPMMVKLTEKHRSFTHFLTGVCAIIGGMFTVAGLIDSLIYHSARAIQKKIDLGKTT

SEQ ID NO: 259824 - DNA, 1167 bp, Artificial Sequence
  derived and/or modified sequence
atggaggccctgggcaagctgaagcagttcgacgcctaccccaagaccctggaggacttcagagtgaagacctgcggcggcgccaccgtgaccatcgtgagcggcctgctgatgctgctgctgttcctgagcgagctgcagtactacctgaccaccgaggtgcaccccgagctgtacgtggacaagagcagaggcgacaagctgaagatcaacatcgacgtgctgttcccccacatgccctgcgcctacctgagcatcgacgccatggacgtggccggcgagcagcagctggacgtggagcacaacctgttcaagcagagactggacaaggacggcatccccgtgagcagcgaggccgagagacacgagctgggcaaggtggaggtgaccgtgttcgaccccgacagcctggaccccgacagatgcgagagctgctacggcgccgaggccgaggacatcaagtgctgcaacacctgcgaggacgtgagagaggcctacagaagaagaggctgggccttcaagaaccccgacaccatcgagcagtgcagaagagagggcttcagccagaagatgcaggagcagaagaacgagggctgccaggtgtacggcttcctggaggtgaacaaggtggccggcaacttccacttcgcccccggcaagagcttccagcagagccacgtgcacgtgcagggcgaggaggtgcacgacctgcagagcttcggcctggacaacatcaacatgacccactacatccagcacctgagcttcggcgaggactaccccggcatcgtgaaccccctggaccacaccaacgtgaccgccccccaggccagcatgatgttccagtacttcgtgaaggtggtgcccaccgtgtacatgaaggtggacggcgaggtgctgagaaccaaccagttcagcgtgaccagacacgagaaggtggccaacggcctgctgggcgaccagggcctgcccggcgtgttcgtgctgtacgagctgagccccatgatggtgaagctgaccgagaagcacagaagcttcacccacttcctgaccggcgtgtgcgccatcatcggcggcatgttcaccgtggccggcctgatcgacagcctgatctaccacagcgccagagccatccagaagaagatcgacctgggcaagaccacctag

SEQ ID NO: 259825 - DNA, 1167 bp, Artificial Sequence
  derived and/or modified sequence
atggaggccctgggcaagctgaagcagttcgacgcctaccccaagaccctggaggacttcagagtgaagacctgcggcggcgccaccgtgaccatcgtgagcggcctgctgatgctgctgctgttcctgagcgagctgcagtactacctgaccaccgaggtgcaccccgagctgtacgtggacaagagcagaggcgacaagctgaagatcaacatcgacgtgctgttcccccacatgccctgcgcctacctgagcatcgacgccatggacgtggccggcgagcagcagctggacgtggagcacaacctgttcaagcagagactggacaaggacggcatccccgtgagcagcgaggccgagagacacgagctgggcaaggtggaggtgaccgtgttcgaccccgacagcctggaccccgacagatgcgagagctgctacggcgccgaggccgaggacatcaagtgctgcaacacctgcgaggacgtgagagaggcctacagaagaagaggctgggccttcaagaaccccgacaccatcgagcagtgcagaagagagggcttcagccagaagatgcaggagcagaagaacgagggctgccaggtgtacggcttcctggaggtgaacaaggtggccggcaacttccacttcgcccccggcaagagcttccagcagagccacgtgcacgtgcacgccgtggagatccacgacctgcagagcttcggcctggacaacatcaacatgacccactacatccagcacctgagcttcggcgaggactaccccggcatcgtgaaccccctggaccacaccaacgtgaccgccccccaggccagcatgatgttccagtacttcgtgaaggtggtgcccaccgtgtacatgaaggtggacggcgaggtgctgagaaccaaccagttcagcgtgaccagacacgagaaggtggccaacggcctgctgggcgaccagggcctgcccggcgtgttcgtgctgtacgagctgagccccatgatggtgaagctgaccgagaagcacagaagcttcacccacttcctgaccggcgtgtgcgccatcatcggcggcatgttcaccgtggccggcctgatcgacagcctgatctaccacagcgccagagccatccagaagaagatcgacctgggcaagaccacctag

SEQ ID NO: 259826 - DNA, 1313 bp, Artificial Sequence
  derived and/or modified sequence
ctttccggccggtccccatggaggcgctggggaagctgaagcagttcgatgcctaccccaagactttggaggacttccgggtcaagacctgcgggggcgccaccgtgaccattgtcagtggccttctcatgctgctactgttcctgtccgagctgcagtattacctcaccacggaggtgcatcctgagctctacgtggacaagtcgcggggagataaactgaagatcaacatcgatgtactttttccgcacatgccttgtgcctatctgagtattgatgccatggatgtggccggagaacagcagctggatgtggaacacaacctgttcaagcaacgactagataaagatggcatccccgtgagctcagaggctgagcggcatgagcttgggaaagtcgaggtgacggtgtttgaccctgactccctggaccctgatcgctgtgagagctgctatggtgctgaggcagaagatatcaagtgctgtaacacctgtgaagatgtgcgggaggcatatcgccgtagaggctgggccttcaagaacccagatactattgagcagtgccggcgagagggcttcagccagaagatgcaggagcagaagaatgaaggctgccaggtgtatggcttcttggaagtcaataaggtggccggaaacttccactttgcccctgggaagagcttccagcagtcccatgtgcacgtccagggggaggaagtccatgacttgcagagctttggccttgacaacatcaacatgacccactacatccagcacctgtcatttggggaggactatccaggcattgtgaaccccctggaccacaccaatgtcactgcgccccaagcctccatgatgttccagtactttgtgaaggtggtgcccactgtgtacatgaaggtggacggagaggtactgaggacaaatcagttctctgtgaccagacatgagaaggttgccaatgggctgttgggcgaccaaggccttcccggagtcttcgtcctctatgagctctcgcccatgatggtgaagctgacggagaagcacaggtccttcacccacttcctgacaggtgtgtgcgccatcattgggggcatgttcacagtggctggactcatcgattcgctcatctaccactcagcacgagccatccagaagaaaattgatctagggaagacaacgtagtcaccctcggtgcttcctctgtctcctctttctccctggcctgtggttgtcccccagcctctgccaccctccacctcctcggtcagccccagccccaggttgataaatctattgattgattgtgatagt

SEQ ID NO: 259827 - DNA, 1357 bp, Artificial Sequence
  derived and/or modified sequence
ggccggaagagggagtctgtaggggcgggccggctggcgtcccctttccggccggtccccatggaggcgctggggaagctgaagcagttcgatgcctaccccaagactttggaggacttccgggtcaagacctgcgggggcgccaccgtgaccattgtcagtggccttctcatgctgctactgttcctgtccgagctgcagtattacctcaccacggaggtgcatcctgagctctacgtggacaagtcgcggggagataaactgaagatcaacatcgatgtactttttccgcacatgccttgtgcctatctgagtattgatgccatggatgtggccggagaacagcagctggatgtggaacacaacctgttcaagcaacgactagataaagatggcatccccgtgagctcagaggctgagcggcatgagcttgggaaagtcgaggtgacggtgtttgaccctgactccctggaccctgatcgctgtgagagctgctatggtgctgaggcagaagatatcaagtgctgtaacacctgtgaagatgtgcgggaggcatatcgccgtagaggctgggccttcaagaacccagatactattgagcagtgccggcgagagggcttcagccagaagatgcaggagcagaagaatgaaggctgccaggtgtatggcttcttggaagtcaataaggtggccggaaacttccactttgcccctgggaagagcttccagcagtcccatgtgcacgtacatgctgtggagatccatgacttgcagagctttggccttgacaacatcaacatgacccactacatccagcacctgtcatttggggaggactatccaggcattgtgaaccccctggaccacaccaatgtcactgcgccccaagcctccatgatgttccagtactttgtgaaggtggtgcccactgtgtacatgaaggtggacggagaggtactgaggacaaatcagttctctgtgaccagacatgagaaggttgccaatgggctgttgggcgaccaaggccttcccggagtcttcgtcctctatgagctctcgcccatgatggtgaagctgacggagaagcacaggtccttcacccacttcctgacaggtgtgtgcgccatcattgggggcatgttcacagtggctggactcatcgattcgctcatctaccactcagcacgagccatccagaagaaaattgatctagggaagacaacgtagtcaccctcggtgcttcctctgtctcctctttctccctggcctgtggttgtcccccagcctctgccaccctccacctcctcggtcagccccagccccaggttgataaatctattgattgattgtgatagta

SEQ ID NO: 259828 - DNA, 1167 bp, Artificial Sequence
  derived and/or modified sequence
atggaagcactcggaaaactaaagcagttcgacgcgtaccctaagactctggaggattttagggtgaagacatgtggcggcgcaacagtaacaatcgtgtcgggactcctcatgcttctcctgtttctctctgagctgcaatactatttaaccacagaagttcaccccgagctgtatgtagacaaatcccgaggcgacaaactcaagataaacatcgatgtgttgttcccgcacatgccttgcgcatacctgagtattgatgcaatggacgtggccggggagcagcagctggacgtggagcacaacctgtttaaacagaggttggacaaagatggcatccctgtgtcctcagaggccgagcggcatgagttgggtaaagtggaggtgacagtcttcgaccctgattctctggaccctgaccggtgcgagtcatgctacggcgccgaggcggaagatataaaatgctgcaatacatgcgaggacgtccgtgaagcctaccgcagacgaggctgggcgttcaaaaacccagatacgatcgagcagtgcaggcgagagggcttttctcagaagatgcaagaacagaagaatgaggggtgccaggtgtacggctttttggaggtgaacaaggtggccgggaacttccattttgctccaggtaagagcttccaacagagccacgtgcatgtccagggagaggaggtgcacgacctgcaaagttttggccttgataacatcaatatgacacattatatccagcatttgagcttcggcgaagactatcccggaattgtgaatccattggatcacacaaacgtgaccgctccacaggccagcatgatgtttcagtacttcgtgaaggtcgttcccactgtttacatgaaagtcgacggagaggtgctcaggacgaatcagttctccgtcacacgccatgaaaaggtggctaacggtttactgggggaccaaggacttcccggagtttttgtcttatacgaattgagcccaatgatggtcaaactgacagaaaagcaccgcagtttcacgcacttcctcacaggggtgtgcgcaatcattgggggaatgtttacagtggccggtttaattgatagcttgatctatcattctgctagagcaatacagaagaagattgatctcggtaaaaccacttag

SEQ ID NO: 259829 - DNA, 1167 bp, Artificial Sequence
  derived and/or modified sequence
atggaagcccttggtaaactgaaacaatttgacgcttacccgaagaccctggaggacttccgcgtgaagacatgtggtggcgcgacagttaccatcgtatctggcttgctcatgttgctgctgttcctgagcgaactgcagtactatctgacgactgaggttcaccccgagctgtatgtcgacaaaagccggggtgacaaattgaaaattaatattgacgtgctcttcccccacatgccgtgcgcatatctgagcatcgatgctatggacgtagcgggggaacaacaactggatgtcgagcacaatttattcaagcagagactggataaagatggcatccccgtctctagcgaggcggagaggcacgagttggggaaggtagaagtaaccgtctttgatcctgactcactcgatcctgacaggtgcgagagctgttatggagccgaggctgaggatattaagtgttgtaatacctgcgaggatgttcgagaggcataccgacggcgtggatgggcttttaagaatccagataccatcgagcaatgcaggcgcgaagggtttagccagaaaatgcaagagcagaagaatgaggggtgccaggtgtatgggtttctcgaagtgaacaaggtcgcaggcaactttcacttcgcccccgggaagagttttcagcaaagccacgtgcacgtccacgcggtagagattcacgacctgcagagcttcgggcttgacaacattaacatgacacactatatccaacacttatccttcggagaggactacccaggcatcgtgaatcccctagaccacacaaacgtgacagccccgcaggccagcatgatgtttcagtattttgtaaaggtggtacctacggtgtacatgaaggttgacggagaagtgttgagaactaaccagttcagtgtgactaggcacgagaaagtggcaaacggcctgctgggagaccagggactgcctggggtcttcgtgctgtatgaattgagccccatgatggttaagctgacggagaagcacagatcttttactcattttctgactggtgtgtgcgcaatcattggcggcatgtttacagtggccggtctgatcgattcgttgatatatcacagtgcgcgagccatccagaaaaagatcgatctgggtaagacaacctag

SEQ ID NO: 259830 - DNA, 1167 bp, Artificial Sequence
  derived and/or modified sequence
atggaggccctgggcaagctgaagcagtttgatgcctaccccaagaccctggaggacttccgggtgaagacctgtggcggggccaccgtgaccatcgtgtctggcctgctgatgctgctgctcttcctgtctgagctgcagtactacctgaccacagaggtgcaccctgagctgtatgtggacaagagcagaggagacaagctgaagatcaacattgatgtgctcttcccccacatgccctgtgcctacctgagcattgatgccatggatgtggccggggagcagcagctggatgtggagcacaacctcttcaagcagaggctggacaaggatggcatccctgtgtcctctgaggccgagagacatgagctgggcaaggtggaggtgacagtgtttgatcctgacagcctggaccctgacagatgtgagagctgctacggggctgaggccgaggacatcaagtgctgcaacacctgtgaagatgtgcgggaggcctacagaagaagaggctgggccttcaagaacccagacaccatcgagcagtgcagaagagagggcttcagccagaagatgcaggagcagaagaatgaaggctgccaggtgtatggcttcctggaggtgaacaaggtggccggcaacttccactttgcccctgggaagagcttccagcagagccacgtgcacgtgcagggcgaggaggtgcatgacctgcagagctttggcctggacaacatcaacatgacccactacatccagcacctgagctttggagaggactacccaggcatcgtgaaccccctggaccacaccaacgtgacagccccccaggcctccatgatgttccagtactttgtgaaggtggtgcccaccgtgtacatgaaggtggatggagaggtgctgcggaccaaccagttctctgtgaccaggcatgagaaggtggccaacggcctgctgggggaccagggcctgcccggggtgtttgtgctgtatgagctgagccccatgatggtgaagctgacagagaagcaccgctccttcacccacttcctgactggagtgtgtgccatcattggaggcatgttcaccgtggccggcctgattgacagcctcatctaccacagcgcccgggccatccagaagaagattgacctgggcaagaccacctag

SEQ ID NO: 259831 - DNA, 1167 bp, Artificial Sequence
  derived and/or modified sequence
atggaggccctgggcaagctgaagcagtttgatgcctaccccaagaccctggaggacttccgggtgaagacctgtggcggggccaccgtgaccatcgtgtctggcctgctgatgctgctgctcttcctgtctgagctgcagtactacctgaccacagaggtgcaccctgagctgtatgtggacaagagcagaggagacaagctgaagatcaacattgatgtgctcttcccccacatgccctgtgcctacctgagcattgatgccatggatgtggccggggagcagcagctggatgtggagcacaacctcttcaagcagaggctggacaaggatggcatccctgtgtcctctgaggccgagagacatgagctgggcaaggtggaggtgacagtgtttgatcctgacagcctggaccctgacagatgtgagagctgctacggggctgaggccgaggacatcaagtgctgcaacacctgtgaagatgtgcgggaggcctacagaagaagaggctgggccttcaagaacccagacaccatcgagcagtgcagaagagagggcttcagccagaagatgcaggagcagaagaatgaaggctgccaggtgtatggcttcctggaggtgaacaaggtggccggcaacttccactttgcccctgggaagagcttccagcagagccacgtgcacgtgcatgctgtggagatccatgacctgcagagctttggcctggacaacatcaacatgacccactacatccagcacctgagctttggagaggactacccaggcatcgtgaaccccctggaccacaccaacgtgacagccccccaggcctccatgatgttccagtactttgtgaaggtggtgcccaccgtgtacatgaaggtggatggagaggtgctgcggaccaaccagttctctgtgaccaggcatgagaaggtggccaacggcctgctgggggaccagggcctgcccggggtgtttgtgctgtatgagctgagccccatgatggtgaagctgacagagaagcaccgctccttcacccacttcctgactggagtgtgtgccatcattggaggcatgttcaccgtggccggcctgattgacagcctcatctaccacagcgcccgggccatccagaagaagattgacctgggcaagaccacctag

SEQ ID NO: 259832 - DNA, 1167 bp, Artificial Sequence
  derived and/or modified sequence
atggaggccctgggcaagctgaagcagttcgacgcctaccccaagactctcgaagacttccgggttaaaacctgtggtggtgcaactgttaccatcgtgtctggccttctcatgttgctgctattcctgagtgaattacagtattatcttactacagaagttcaccccgaattgtacgtggataaatcccgtggggacaagctcaaaattaatatcgatgtcctgtttcctcacatgccctgcgcctacctgagcatagatgctatggatgtagcaggtgagcagcagttggatgttgaacataacctcttcaagcagagattggacaaagatggaattccagtttcttccgaggccgagcgccatgaacttgggaaggtagaagtgaccgtattcgatcctgacagcttggatcccgacagatgcgaatcctgctacggcgccgaagctgaagatatcaaatgctgcaacacctgcgaagatgtgcgggaggcttatcgcaggcgaggctgggcatttaaaaacccagacacaatagagcaatgcaggagagaagggtttagccagaagatgcaggaacagaagaatgagggatgtcaggtgtacggcttcctggaagtcaacaaggtagccggtaactttcatttcgccccaggcaagtctttccagcaaagtcacgtacacgtgcaaggggaagaagtccacgacttgcagagtttcggattagataatatcaacatgacgcactacatacagcacctgagctttggggaagactacccaggcatcgtgaaccccctggaccacactaatgtcactgcccctcaagcatcaatgatgtttcaatattttgtgaaggtggtgcccacagtgtacatgaaggttgacggggaagtgctaagaacaaaccagttctcagtcacccgacatgaaaaagtcgcaaacggactactaggagaccaagggttgccaggggtctttgtgctctacgaactcagcccaatgatggtaaagctgaccgagaagcaccggtcttttacccactttctcactggtgtttgtgccatcatcggaggcatgtttaccgtggccggcctaattgacagcttaatataccattccgccagggcaattcagaagaaaatcgatctgggaaagactacatag

SEQ ID NO: 259833 - DNA, 1167 bp, Artificial Sequence
  derived and/or modified sequence
atggaggccctgggcaagctgaagcagttcgacgcctaccccaagacgcttgaagattttcgtgtgaagacttgtggaggcgccaccgtcacaattgtgtcgggtctcctgatgctgctactcttcctttccgagctgcaatattatttaaccaccgaggtacatccagagttgtatgtggataaatctcgaggcgacaaactcaaaatcaatatcgatgtattatttccccatatgccctgcgcctatcttagcattgacgccatggatgtggccggcgagcagcagctcgatgtggagcacaatctcttcaaacaaaggttggataaggatgggatcccagtgtcgagtgaggctgaacgacacgaacttggcaaagtagaggtgacggtgttcgaccccgattccctcgatcctgatcgctgtgaatcatgctatggagcggaagcggaagacatcaagtgctgtaatacctgcgaggatgttcgagaggcctaccgccggagagggtgggcattcaaaaaccccgacaccatcgagcaatgccggagagaggggttcagccaaaaaatgcaggagcaaaaaaacgagggctgccaggtgtacggctttctggaggtaaacaaagtggctgggaacttccacttcgctccaggaaagagtttccagcagtcacatgtgcacgttcacgcagtggagattcatgacctgcaatctttcggcctggacaacataaacatgactcactacatacagcatctgtcatttggtgaggactaccctggaatcgtcaatcctttggaccataccaacgtaaccgcgccccaggcatccatgatgtttcagtattttgtgaaggtagttcccactgtttacatgaaagtcgacggcgaggtactgaggactaaccagtttagtgtaacccgacacgaaaaggtggccaacggtctcctgggcgatcagggtctacccggggtctttgttttgtatgaactgagtccaatgatggtcaagctgaccgagaagcacaggtcattcacccatttcctcacaggagtctgtgccattatcggaggcatgttcacggtagccggtctaatcgattcgctgatttaccactctgctcgggccattcaaaagaaaatcgatctgggaaagaccacatag

SEQ ID NO: 259834 - DNA, 1167 bp, Artificial Sequence
  derived and/or modified sequence
atggaggctctcggtaaactcaaacagttcgacgcttacccaaagacactggaggacttcagggttaagacctgcgggggagccacggtgactattgtttcaggcctgctgatgctgcttctgtttctgtcggagcttcagtactatcttaccaccgaggtccaccccgaactatatgtcgataaatcccgaggcgataagctcaagataaacattgatgttctcttccctcatatgccatgcgcctacctgtctattgacgcaatggacgtggctggtgagcagcagctcgacgtcgaacacaacctctttaagcagcgtctcgacaaggacggcatacccgtttcttctgaggccgagcgacatgaactggggaaggtcgaagttacagtgttcgatcctgactctttggacccggaccggtgcgaatcttgctatggcgcagaagccgaagatatcaagtgttgcaatacctgtgaagacgtacgcgaggcttatcgtagacgtgggtgggcattcaagaacccagacactatcgaacagtgtcgcagagaaggattcagccagaaaatgcaggaacaaaagaacgagggctgccaagtgtacggattccttgaggtgaataaagtagccggaaactttcacttcgcacctggaaaatcattccaacagtcccacgttcatgtgcagggcgaggaggtccatgaccttcaatccttcggattggacaacatcaatatgacccactacatccagcacctatcatttggtgaggattatccaggaatcgtgaaccccctggaccacacaaacgtaacagccccacaggcctctatgatgtttcagtacttcgtcaaggtggtgcccactgtgtatatgaaggtggatggcgaagtgctgaggactaaccagttctccgtgacacgacacgagaaggtggccaacggtctgctaggtgaccagggtctcccgggtgtctttgtcctttacgagttgagccccatgatggtgaaactgacagaaaagcaccggtcatttactcactttctcactggagtctgtgccattattggaggaatgttcaccgtggccggattaatagatagcctaatctatcactccgccagagcgatacagaagaaaatcgatttgggcaaaacaacttag

SEQ ID NO: 259835 - DNA, 1167 bp, Artificial Sequence
  derived and/or modified sequence
atggaggcactcgggaagttgaaacagtttgatgcctacccgaagacgttagaggacttcagggtgaaaacctgcggaggagcaactgttactatagtttctggtttactcatgttgttactcttcctgagcgagctacagtattatttgaccaccgaagtgcatcctgagctgtacgtcgataaaagtcggggagataaacttaagataaacattgacgtgctttttccccacatgccatgtgcttacctctctatcgacgctatggatgttgcaggcgaacaacagttagacgtcgaacataacttattcaaacagcgactcgataaagacggaatccctgtgagcagcgaggcagagcgccacgaactggggaaagttgaggttacagtctttgaccctgatagtctggaccccgatagatgtgagtcgtgctatggggcagaggctgaagacattaaatgttgtaacacctgcgaggacgtcagagaggcgtacaggaggaggggctgggcttttaagaaccctgatacaattgagcaatgccgcagagaaggatttagccagaaaatgcaggaacaaaaaaatgagggatgtcaagtgtacgggttcctcgaagtaaacaaagtggccggtaacttccattttgcgcctggaaaatcctttcagcagtctcacgtccatgtgcacgccgtggaaattcacgatttgcagtcatttggactggataatatcaatatgacacactatattcaacacttgtcgttcggagaagattacccaggtatcgttaatcctctggatcacactaatgtgacagctccacaagcttcaatgatgttccagtactttgtgaaggtagtccccacggtatatatgaaagtcgacggcgaagtccttcgcacaaaccagttcagcgtgacccgacacgagaaggtggcaaatggactgctgggcgaccagggattgcccggtgtttttgttctatatgaactgtctcccatgatggttaagctgactgaaaaacatagaagttttactcactttctgactggagtgtgtgctattataggtggcatgttcactgtcgctggactgattgatagcctcatataccactccgccagggctatccaaaagaaaatagatctgggcaagaccacatag

SEQ ID NO: 259836 - protein, 1247 aa, Artificial Sequence
  derived and/or modified sequence
MAQSLRLHFAARRSNTYPLSETSGDDLDSHVHMCFKRPTRISTSNVVQMKLTPRQTALAPLIKENVQSQERSSVPSSENVNKKSSCLQISLQPTRYSGYLQSSNVLADSDDASFTCILKDGIYSSAVVDNELNAVNDGHLVSSPAICSGSLSNFSTSDNGSYSSNGSDFGSCASITSGGSYTNSVISDSSSYTFPPSDDTFLGGNLPSDSTSNRSVPNRNTTPCEIFSRSTSTDPFVQDDLEHGLEIMKLPVSRNTKIPLKRYSSLVIFPRSPSTTRPTSPTSLCTLLSKGSYQTSHQFIISPSEIAHNEDGTSAKGFLSTAVNGLRLSKTICTPGEVRDIRPLHRKGSLQKKIVLSNNTPRQTVCEKSSEGYSCVSVHFTQRKAATLDCETTNGDCKPEMSEIKLNSDSEYIKLMHRTSACLPSSQNVDCQININGELERPHSQMNKNHGILRRSISLGGAYPNISCLSSLKHNCSKGGPSQLLIKFASGNEGKVDNLSRDSNRDCTNELSNSCKPGWVVLDQPDAACHLQQQQEPSPLPPGWEERQDILGRTYYVNHESRRTQWKRPTPQDNLTDAENGNIQLQAQRAFTTRRQISEETESVDNRESSENWEIIREDEATMYSNQAFPSPPPSSNLDVPTHLAEELNARLTIFGNSAVSQPASSSNHSSRRGSLQAYTFEEQPTLPVLLPTSSGLPPGWEEKQDERGRSYYVDHNSRTTTWTKPTVQATVETSQLTSSQSSAGPQSQASTSDSGQQVTQPSEIEQGFLPKGWEVRHAPNGRPFFIDHNTKTTTWEDPRLKIPAHLRGKTSLDTSNDLGPLPPGWEERTHTDGRIFYINHNIKRTQWEDPRLENVAITGPAVPYSRDYKRKYEFFRRKLKKQNDIPNKFEMKLRRATVLEDSYRRIMGVKRADFLKARLWIEFDGEKGLDYGGVAREWFFLISKEMFNPYYGLFEYSATDNYTLQINPNSGLCNEDHLSYFKFIGRVAGMAVYHGKLLDGFFIRPFYKMMLHKPITLHDMESVDSEYYNSLRWILENDPTELDLRFIIDEELFGQTHQHELKNGGSEIVVTNKNKKEYIYLVIQWRFVNRIQKQMAAFKEGFFELIPQDLIKIFDENELELLMCGLGDVDVNDWREHTKYKNGYSANHQVIQWFWKAVLMMDSEKRIRLLQFVTGTSRVPMNGFAELYGSNGPQSFTVEQWGTPEKLPRAHTCFNRLDLPPYESFEELWDKLQMAIENTQGFDGVD

SEQ ID NO: 259837 - DNA, 3744 bp, Artificial Sequence
  derived and/or modified sequence
atggcacagtctttacgactgcattttgccgccagaaggtctaatacttatcccctgtcggaaacttccggggacgatctagattctcatgtgcacatgtgtttcaagagacctacccggatatccacaagcaacgtcgtacagatgaaactgacccctaggcagactgcactggcgcccctaattaaggaaaacgtacagagccaggaacgctctagcgtgcctagctcagagaatgtcaataagaaaagcagctgtctgcagatctctcttcaacccacccgttatagtggctacctgcaatcctccaacgtgctggctgatagtgatgatgcgagcttcacatgtattttgaaggatggcatatatagctccgccgtcgtcgataacgagttgaatgcggtcaacgatggacatctcgtgtcgtctcccgccatctgctcagggagcttgagtaatttttccacatctgacaacggatcctacagcagcaatggttctgatttcggatcatgcgcttcaattacctctgggggcagctatacaaattcagtgatttccgactcctcatcttatactttcccacccagtgatgatacattcctgggcggcaatctgccttcggactcgacctctaatcggtctgtgcccaacagaaatactaccccctgtgagattttttcgaggtctactagcacagacccattcgtccaagatgatctggaacacgggctcgagattatgaagctccctgtaagtcggaacaccaagattcccttgaagcgttactcatccttggtcatttttcccaggtccccatcgactacacggcccacgagtcccacctccctctgtacccttctgtctaaaggtagctatcaaaccagccaccaattcattatctctccatcagaaatcgcccacaacgaagatggaacctccgctaaaggcttcctgagcacggctgttaacggtctgagactgtcgaaaactatctgcacccccggcgaggtgcgggatatccgtccattacatcgaaaaggtagtctccaaaagaaaatcgtgttgtctaataataccccacggcaaactgtctgcgagaagtcttctgagggctattcctgcgttagcgtgcatttcacccagagaaaagccgcaacactagattgcgagactactaacggtgattgcaaacctgagatgagcgaaatcaagctaaatagcgacagtgagtacattaaactgatgcaccgcacaagtgcctgtctgccaagttcacagaacgtcgattgccagatcaacatcaatggcgagctcgaaagaccacacagccagatgaataaaaaccatggcatcctgcggcggtctattagtctgggcggagcctaccctaatatctcctgcttaagctctctgaaacacaattgcagtaagggcggcccatctcaactgctcatcaagtttgcctccggaaacgagggaaaagtggataatcttagcagagattccaaccgggattgcacgaacgagctgtcaaattcctgcaaacccggatgggttgtcttggatcagccagatgctgcctgtcaccttcagcagcagcaggaacccagtccactgccccccgggtgggaagagcggcaggatattctgggcagaacatactacgtcaaccacgagagtagaagaactcagtggaaacgacccacaccccaagataacctgactgatgccgagaatggcaatattcagctgcaggcgcagagagccttcactaccagacgtcagataagtgaagagacagagtcagtggacaatcgcgagagtagcgaaaactgggaaatcattcgagaggatgaggctacaatgtactcaaaccaggccttccccagtccaccgccatctagtaatctggatgtccccactcatctcgccgaagaactgaatgcaaggttgactatcttcggcaattctgctgtgtctcagcccgcatcgagttctaatcattcaagccgtaggggatctcttcaagcgtatacgtttgaagaacagcccaccctgcctgtgctgttgcctactagttccggtttgcccccaggctgggaagaaaaacaagacgaaagggggaggtcatattatgtggaccacaatagcagaacgaccacctggacgaagcctaccgttcaggcgaccgttgagactagtcagttaacaagcagccagagctccgctggtccccaatctcaggcctctaccagtgactcaggacagcaagtcacacaacccagtgagattgaacagggtttcctgcccaagggctgggaagtgcgccacgcccctaacgggcgacctttcttcatcgatcacaacacaaagacaacgacgtgggaggacccacggctgaagatcccagcgcatttgagaggtaagacctcgctcgacacatctaacgatctggggcctctacctccaggctgggaagagcggacccacaccgatggccggatcttttatatcaatcataacatcaaacggactcagtgggaagatccccgtctagagaatgttgcaattactgggcctgctgtgccatattccagggattataagaggaaatatgaattcttcaggcggaaattgaaaaagcagaacgatatcccaaataagttcgagatgaaacttcgcagagcgaccgtgctcgaagactcctataggagaatcatgggggtcaagcgggccgacttcctgaaagcacgactgtggattgagtttgatggtgaaaagggccttgattacgggggcgtcgctagggagtggtttttcctgatctcaaaagaaatgtttaatccctattacggcttgttcgaatactctgctaccgacaattacactcttcagatcaacccgaacagcgggttatgcaacgaagatcacctatcctattttaaattcatcggaagggtcgcggggatggctgtgtaccacgggaagctcttggacggcttctttatcagaccgttctacaagatgatgcttcataagccaattacgcttcacgatatggagtcagtcgatagtgaatattacaattctctcaggtggatactggagaatgatcctaccgaactcgaccttcggttcatcatagacgaagaactgttcggccagacccaccaacacgagctaaaaaacggcggctcagagatagtggtcaccaataaaaataaaaaagagtatatatatctggtcatccaatggagatttgtgaatcgaatacagaagcagatggcagcttttaaggaggggttttttgagcttataccacaggacttgattaaaatcttcgatgagaatgagctcgaactgcttatgtgcggacttggagacgtggatgtcaacgactggagggagcacaccaagtacaagaatggctattccgcaaaccatcaggtcatccagtggttctggaaggcagtgctgatgatggatagcgagaaaagaatccggctgctgcagttcgtgaccggaacaagccgcgtgcctatgaacgggtttgctgaactgtacgggtccaatggaccgcaaagctttaccgtggaacaatggggcacacccgagaagctgccgcgagcgcatacctgctttaaccggcttgatctgcctccttacgagtcctttgaagaattgtgggacaaacttcaaatggccatcgagaatactcagggcttcgacggggtggactag

SEQ ID NO: 259838 - DNA, 3744 bp, Artificial Sequence
  derived and/or modified sequence
atggcccagagcctgcggctgcactttgctgcccggcgcagcaacacctaccccctgtctgagaccagcggagatgacctggacagccacgtgcacatgtgcttcaagaggcccacccgcatcagcaccagcaatgtggtgcagatgaagctgaccccccggcagacagccctggcccccctcatcaaggaaaatgtgcagagccaggagaggagctctgtgcccagcagtgaaaatgtgaacaagaagagcagctgcctgcagatcagcctgcagcccacccgctacagcggctacctgcagagcagcaatgtgctggccgacagtgatgatgccagcttcacctgcatcctgaaggatggcatctacagcagcgctgtggtggacaatgagctgaatgctgtgaatgatggccacctggtgagcagccctgccatctgcagcggcagcctgagcaacttcagcaccagtgacaatggcagctacagcagcaatggaagtgactttggcagctgtgccagcatcaccagcggcggcagctacaccaacagcgtcatcagtgacagcagcagctacaccttccccccatctgatgacaccttcctgggcggcaacctgcccagcgacagcaccagcaacagatctgtgcccaacagaaacaccaccccctgtgagatcttcagccgcagcaccagcacagacccctttgtgcaggatgacctggagcacggcctggagatcatgaagctgcctgtgtccaggaacaccaagatccccctgaagcgctacagcagcctggtgatcttccccaggagccccagcaccacccggcccaccagccccaccagcctgtgcaccctgctgagcaagggcagctaccagaccagccaccagttcatcatcagccccagcgagatcgcccacaatgaagatggcaccagcgccaagggcttcctgagcacagctgtgaatggcctgcggctgagcaagaccatctgcaccccaggagaggtgcgggacatccggcccctgcacaggaagggcagcctgcagaagaagatcgtgctgagcaacaacaccccccggcagacagtgtgtgagaagagcagcgagggctacagctgtgtgtctgtgcacttcacccagaggaaggccgccaccctggactgtgagaccaccaacggggactgcaagccagagatgtctgagatcaagctgaacagcgacagcgagtacatcaagctgatgcacaggaccagcgcctgcctgcccagcagccagaatgtggactgccagatcaacatcaacggggagctggagcggccccacagccagatgaacaagaaccacggcatcctgcggcgcagcatcagcctgggcggggcctaccccaacatcagctgcctgagcagcctgaagcacaactgcagcaagggcggccccagccagctgctgatcaagtttgccagcggaaatgaaggcaaggtggacaacctgagccgggacagcaacagagactgcaccaatgagctgagcaacagctgcaagccaggctgggtggtgctggaccagccagatgctgcctgccacctgcagcagcagcaggagcccagccccctgcccccaggctgggaggagcggcaggacatcctgggccgcacctactacgtgaaccacgagagcaggaggacccagtggaagaggcccaccccccaggacaacctgacagatgctgaaaatggaaacatccagctgcaggcccagagggccttcaccacccggcggcagatcagcgaggagacagaatctgtggacaaccgggagagcagcgagaactgggagatcatccgggaggatgaggccaccatgtacagcaaccaggccttccccagccccccacccagcagcaacctggatgtgcccacccacctggccgaggagctgaatgcccggctgaccatctttggaaacagcgctgtgtcccagcctgccagcagcagcaaccacagcagccggcggggcagcctgcaggcctacacctttgaggagcagcccaccctgcctgtgctgctgcccaccagcagcggcctgcccccaggctgggaggagaagcaggatgagcggggccgcagctactacgtggaccacaacagcaggaccaccacctggaccaagcccaccgtgcaggccaccgtggagaccagccagctgaccagcagccagagcagcgctggcccccagagccaggccagcaccagtgacagcggccagcaggtgacccagcccagcgagattgagcagggcttcctgcccaagggctgggaggtgagacatgccccaaatggccggcccttcttcatcgaccacaacaccaagaccaccacctgggaggacccccggctgaagatcccagcccacctgcggggcaagaccagcctggacaccagcaatgacctgggccccctgcccccaggctgggaggagaggacccacacagatggccgcatcttctacatcaaccacaacatcaagaggacccagtgggaggacccccggctggagaatgtggccatcactggacctgctgtgccctacagccgggactacaagaggaaatatgagttcttccggaggaagctgaagaagcagaatgacatccccaacaagtttgagatgaagctgcggcgggccaccgtgctggaggacagctaccgccgcatcatgggcgtgaagagagctgacttcctgaaggcccggctgtggattgaatttgatggagagaagggcctggactatggaggagtggcccgggagtggttcttcctgatcagcaaggagatgttcaacccctactacggcctgtttgagtacagcgccacagacaactacaccctgcagatcaaccccaacagcggcctgtgcaatgaagaccacctgagctacttcaagttcatcggccgggtggccggcatggctgtgtaccacggcaagctgctggatggcttcttcatccggcccttctacaagatgatgctgcacaagcccatcaccctgcatgacatggagagcgtggacagcgagtactacaacagcctgcgctggatcctggagaatgaccccacagagctggacctgcgcttcatcattgatgaggagctgtttggccagacccaccagcacgagctgaagaatggaggcagcgagatcgtggtgaccaacaagaacaagaaggagtacatctacctggtgatccagtggaggtttgtgaaccgcatccagaagcagatggccgccttcaaggagggcttctttgagctgatcccccaggacctgatcaagatctttgatgaaaatgagctggagctgctgatgtgtggcctgggagatgtggatgtgaatgactggagggagcacaccaagtacaagaatggctacagcgccaaccaccaggtgatccagtggttctggaaggctgtgctgatgatggacagcgagaagaggatccggctgctgcagtttgtgacaggcaccagccgggtgcccatgaatggatttgctgagctgtatggcagcaatggcccccagagcttcaccgtggagcagtggggcaccccagagaagctgccccgggcccacacctgcttcaaccggctggacctgcccccctatgagagctttgaggagctgtgggacaagctgcagatggccatcgagaacacccagggctttgatggagtggactag

SEQ ID NO: 259839 - DNA, 3744 bp, Artificial Sequence
  derived and/or modified sequence
atggcccagagcctgcggctgcacttcgccgcccggcggagcaacacttatcccctctctgaaacgagcggggacgatctggatagccacgtgcatatgtgctttaaacgtcccactaggataagcaccagcaacgtggtacaaatgaaactcacaccaaggcagactgccctcgcgccacttatcaaagagaacgtgcagagccaggaaagaagttctgtgccctcttctgagaacgtcaacaagaagagctcctgtttacagatcagcctacagcctaccagatacagtggatacttgcagtcctcgaacgtgctcgctgactccgacgatgccagcttcacatgcattctgaaggatggcatttattcttcggctgtggtagacaacgaactaaatgctgtgaatgacggccacctggtatccagccccgccatttgctctggcagcctttctaacttctctacaagtgataatgggagctattcctctaacggatctgactttggaagctgtgcaagtattactagcggcggatcgtacaccaactcagtcatcagcgactccagttcttatacgttccccccatccgatgataccttcttgggcggaaacctaccctccgactctacatcaaatcggtcagtgcccaatagaaacaccactccgtgcgagatcttttccagatctacttccactgacccattcgtccaggacgacctcgaacacgggttggaaattatgaagctgcccgtttcgcgcaacacaaagatccctctaaagaggtactcatcactcgttatcttccctagaagtccatccaccacacggcctactagtcccacaagtctatgcacgctcctctcaaaaggcagctaccagacctctcaccagtttattatttcaccttctgagatcgcacacaatgaggatgggacttccgcaaaaggattcttaagcacagctgttaacgggctgcgcttatctaaaaccatctgtactccgggagaagtgcgcgacattcgaccccttcacagaaaggggtctttgcagaaaaagatcgtactgagtaataacaccccacgccaaactgtctgtgagaagagcagcgaaggctatagctgcgtgtctgttcacttcactcaaaggaaggcagctactttggattgtgaaacaactaatggcgactgcaaacctgagatgagcgaaatcaaattgaactcggacagcgagtatatcaagctaatgcatcgaacgtctgcctgcctaccgagcagtcagaacgttgactgtcagattaacattaatggggagctggaaagacctcacagtcagatgaacaaaaaccacggaatcctgcgtagatctatctctctgggcggggcttaccccaacattagttgcctgtcttcattgaagcacaattgctcgaaagggggcccatctcagttactcattaagttcgcatctggcaatgagggtaaggtcgacaacctttcgagagactccaatcgagactgcacgaacgagctgtctaactcttgtaagcccgggtgggttgtgctggaccaaccggatgccgcctgccatctccagcagcaacaggagccttctcctttgcctccgggttgggaggagcgacaggacattctcggacggacttactacgtgaatcatgaatcacgcagaactcagtggaagagacctacccctcaggataacttaaccgatgccgaaaacgggaatatccagcttcaggcccagcgggccttcaccactcgacgccagattagcgaggagacagaaagcgtggacaatcgcgaatctagcgagaattgggaaatcatacgcgaagatgaggcaacgatgtacagtaatcaagccttccccagcccaccacccagttctaatctggacgtcccaacacatcttgccgaggaactgaatgctaggttaactatcttcggaaacagcgctgtgtcccagccagccagcagtagcaatcattcttcccgtagggggagtctccaagcttatacctttgaggagcagcctactctgcccgtcctgctccccacatccagcggactcccccccgggtgggaagaaaaacaagatgaaagaggcagaagctactacgtggaccacaattctaggacaaccacatggactaagccgaccgtccaggcgacagtggaaacttcccaattgacttcttctcaaagtagtgccggcccacagagccaggcctctacttctgacagcggccagcaagtgacacagccgagcgagatcgaacagggatttctacctaaaggatgggaagtccgccatgcccccaatggcaggccgttttttattgaccacaacacaaagactacaacatgggaggaccctcggttgaagatccccgcccatctgcgggggaagacttcgctggataccagcaacgatttgggtcctctgccgcctggatgggaggagcggacacatacagacgggaggattttctatattaaccataatattaaaagaacccagtgggaagacccacgcctggagaacgttgccatcaccggccccgccgtgccttatagccgggactacaagagaaagtatgaattcttcaggcggaaattgaagaaacaaaatgacataccaaacaaattcgagatgaaactgcgaagggctacagtgctcgaagattcgtacagaaggataatgggggtgaaaagagccgactttctcaaggctagactgtggatcgagttcgacggcgaaaagggcttagactatggaggggtcgccagggaatggttttttctcatcagcaaggaaatgttcaacccttattatggcctcttcgagtattcagctaccgacaactatacattgcaaatcaatccaaatagtggtctttgcaatgaagaccatctgtcttacttcaagttcatcgggcgggtagctgggatggcagtgtatcacggaaaactgttagacggattctttatcaggccattctataaaatgatgttacataaaccaattaccctgcacgatatggaaagcgtcgactccgagtattacaactctctcagatggatcctggaaaacgatccgaccgagctggatctgcgtttcatcatagatgaagaattgttcggccagacgcaccagcatgagctgaaaaatgggggatctgagatcgtggttactaataaaaataagaaagagtacatttatttagttattcagtggcggttcgtgaatagaatacagaagcagatggccgcattcaaggagggcttttttgaactgatcccacaagacttgatcaagatctttgatgagaacgaactggagctcctgatgtgcggacttggcgatgtggatgttaacgactggagagaacataccaaatataaaaatggatattcggcgaaccaccaggtaattcagtggttttggaaagccgtactgatgatggatagcgagaagagaatccgcctacttcaatttgtgacaggtacaagcagagtccccatgaacggtttcgctgaactatatggttcaaatgggccccagagcttcaccgtcgaacaatgggggacgcctgagaaacttccgcgagcccatacttgttttaacaggctggacctgccgccctacgaaagcttcgaggagctgtgggacaaactgcagatggctatcgagaatacccagggctttgatggagtggactag

SEQ ID NO: 259840 - DNA, 7019 bp, Artificial Sequence
  derived and/or modified sequence
gctgcagctgagctcagcttaaaggtcgctggaaatcaagtgctttgtaagtgaaggcattttgactacaagcgattcaagacattttggaaacgtcagtctctggaatgggtcgtctttttctttctatgatatctggtatctaatgttttacttaggataaagactactacttaatagctcttttaggcaccacaaatgattttttcttttgatgcagtgcagctgcttctagcctgtctacggacagagatctttgttatgactttcagcccttaacatgtttggaaatgagaacaaatggcacaaagcttacgattgcactttgcagccagaagaagcaatacttaccctttgtcagaaacctccggagatgacttggatagccatgttcacatgtgcttcaaaagaccaacacggatttcaacgtctaacgttgttcaaatgaagctgactcccagacagactgcactagctccgttaataaaggaaaacgttcagtctcaagaaagatcatctgttccctcatctgaaaatgttaataaaaagagcagctgtctacagatttcactacagccaacaaggtacagtggatatcttcagtctagcaatgtcttagctgatagtgatgatgcttcgtttacttgtatcttgaaggatggtatttacagtagtgctgtggtcgataatgaattgaatgctgtgaatgatggtcaccttgtaagcagtccagccatttgtagtggtagccttagtaacttttcaaccagtgataatgggtcttacagcagcaacggtagtgattttgggtcatgtgcaagtatcacaagtggaggttcatatactaacagtgtcatcagtgacagtagtagttatacttttccaccaagtgatgatacttttttgggtggaaacttaccttctgacagcacctccaatagaagtgtgccaaacaggaatactactccttgtgaaattttttcaagaagtacaagtacagatccttttgtccaggatgacttggaacatggattagagattatgaaattgccagtgagcaggaacacaaaaattccactaaaacgttactcctccttagtcatttttcctaggagtccttcaactacccgaccgacttctccaacaagtctgtgtactcttctgagcaaaggatcctatcaaacttcacaccagtttattatttctcctagtgaaattgcacataatgaggatggcactagtgctaaaggatttctttcaacagctgtcaatggacttcggttatctaaaacaatttgtacccccggagaagtaagagacatacggccgcttcacaggaagggctcgttacagaagaaaattgttctttcgaataatactcccagacagactgtctgtgaaaagtcatctgaaggatattcttgtgtttcagtgcatttcacccaacgaaaagcagctacattagactgtgaaacaacaaatggtgattgtaaaccagaaatgtcagaaattaagcttaattctgattcagagtatattaagctcatgcataggacatctgcatgtttgccatcctcccaaaatgtagattgtcaaataaatatcaatggagaattggaaagaccacattcacagatgaacaaaaaccatggtattttacgaagaagtatttcattgggaggagcttatccaaatatttcctgtctatccagccttaagcacaattgttctaaagggggaccatctcagttactcataaagtttgcatctggaaatgaaggtaaagtggataatttatcaagagacagcaacagagattgcacaaatgaactgtctaattcttgcaagcctggctgggttgttttggaccaaccagatgctgcttgccatttgcagcaacaacaagaaccttctcctctacctccagggtgggaagagaggcaggatatccttggaaggacctattatgtaaaccatgaatctagaagaacacagtggaaaagaccaacccctcaggacaacctaacagatgctgagaatggcaacattcaactgcaagcacaacgtgcatttaccaccaggcggcagatatccgaggaaacagaaagtgttgacaaccgagagtcttccgagaactgggaaattataagagaagatgaagccaccatgtatagcaaccaggccttcccatcacctccaccgtcaagtaacttggatgttccaactcatcttgcagaagaattgaatgccagactcaccatttttggaaattcagccgtgagccagccagcatcgagctcaaatcattccagcagaagaggcagcttacaagcctatacttttgaggaacaacctacacttcctgtgcttttgcctacttcatctggattaccaccaggttgggaagaaaaacaagatgaaagaggaagatcatattatgtagatcacaattccagaacgactacttggacaaagcccactgtacaggccacagtggagaccagtcagctgacctcaagccagagttctgcaggccctcaatcacaagcctccaccagtgattcaggccagcaggtgacccagccatctgaaattgagcaaggattccttcctaaaggctgggaagtccggcatgcaccaaatgggaggcctttctttattgaccacaacactaaaaccaccacctgggaagatccaagattgaaaattccagcccatctgagaggaaagacatcacttgatacttccaatgatctagggcctttacctccaggatgggaagagagaactcacacagatggaagaatcttctacataaatcacaatataaaaagaacacaatgggaagatcctcggttggagaatgtagcaataactggaccagcagtgccctactccagggattacaaaagaaagtatgagttcttccgaagaaagttgaagaagcagaatgacattccaaacaaatttgaaatgaaacttcgccgagcaactgttcttgaagactcttaccggagaattatgggtgtcaagagagcagacttcctgaaggctcgactgtggattgagtttgatggtgaaaagggattggattatggaggagttgccagagaatggttcttcctgatctcaaaggaaatgtttaacccttattatgggttgtttgaatattctgctacggacaattataccctacagataaatccaaactctggattgtgtaacgaagatcacctctcttacttcaagtttattggtcgggtagctggaatggcagtttatcatggcaaactgttggatggttttttcatccgcccattttacaagatgatgcttcacaaaccaataacccttcatgatatggaatctgtggatagtgaatattacaattccctaagatggattcttgaaaatgacccaacagaattggacctcaggtttatcatagatgaagaactttttggacagacacatcaacatgagctgaaaaatggtggatcagaaatagttgtcaccaataagaacaaaaaggaatatatttatcttgtaatacaatggcgatttgtaaaccgaatccagaagcaaatggctgcttttaaagagggattctttgaactaataccacaggatctcatcaaaatttttgatgaaaatgaactagagcttcttatgtgtggactgggagatgttgatgtgaatgactggagggaacatacaaagtataaaaatggctacagtgcaaatcatcaggttatacagtggttttggaaggctgttttaatgatggattcagaaaaaagaataagattacttcagtttgtcactggcacatctcgggtgcctatgaatggatttgctgaactatacggttcaaatggaccacagtcatttacagttgaacagtggggtactcctgaaaagctgccaagagctcatacctgttttaatcgcctggacttgccaccttatgaatcatttgaagaattatgggataaacttcagatggcaattgaaaacacccagggctttgatggagttgattagattacaaataacaatctgtagtgtttttactgccatagttttataaccaaaatcttgacttaaaattttccggggaactactaaaatgtggccactgagtcttcccagatcttgaagaaaatcatataaaaagcatttgaagaaatagtacgacaacttatttttaatcacttttaaataatgtgttgcatttacacagttgtttcatgctgtctttagagttaggtgcctgcctaaagccaggcaccaccacacctggctttagagttcacacaataggatataagtcctgtatgacttaaatagtgaattttgtccttaacatttacctcttgtatagtatctgccaggcagttttttcttaaactactgagatgataactgtgaaatatttgtgatacgtgtcatgtgtgaaaagtttgatgcattttgagatggaaaactgaaatttggaaaaagaaatactttactattgagtaaactacaatatatttagtgctactcgcagctatttattattttgtagacctgccttatgcaccttactgcctagatttttgggaaaaaactttggaaagtgtgttacctatatttctagccaactaactcacagaaaaactgtttacttcttcactttcgaagtatttggcttttgttaatatgcagttttactaaacagatggttcataagacatgtgaagcaaattcatatttgcaatgggtaaaaagtattaaagcctttctcttgcctgcatatcctattgaccattggtatagtcatcactttttcatattttagtgtagttagaagaattccttcttcaaacattaaagatccacaaagcagtatttctaaatatgccttgaagaactaaatgaagtgtatagcacttgcctttactagatattctttacacttgtacaattatgtagtaaatgtatgtttacagggtttatcatgtttacagattaagctaatttctgtagtcgcatttttatatttttagtatcactctagtaaaaaaaccaaataatttgtttaaaataaccaaagagttgttataatgcataatttgtattaaatttattactatttcttatgccttttaaaatactgtttactatgaagacaatgtttttaattacaaatccagaattctgtaggcaaaatgctacagttcatatcttcctttaaccaaactgaagtacataaagaccatgtacatgtattcatcaaacgtttattgaatgctgcgtgcctagcgctgtgctatgctctggggtaagagttgtcagcttcagagaagctgagtcctgatcctcaaggaacttgcaaatgtgtctatgaatttgtaaaacaatcaaaagtaggcgtaagcagaataaggcaaaagggaaagtgttctaggttccagcacacctgcaaagataaagtgtgccaagactgtatttatatttcatacttatattgtttcatccttatattggaatgattatatagaaaatgctcttaaaaagattaaacctatttctcagtatggtatcttggtgatttaggaataattgtaaatatatgttacgaatcttcttaaatatatatatatacacaccctgtgagaactgtaaaaagtacctctggttcttggtttaagtttgttggggtataacatgatgagtactcattagcacctgatagaaatctgaaatgtgacagtagcaaaaccactttctactttccaaacaccacagcatcagcatggtttaggggaagcaattcacagattaatgtaccctgcgttttgtcttcaccattgtcaaccagcagtcaaggatgagcaccaggtatagtcctggtttgatatctcaccagccatgtgaactgaagcagcttacttaacctctctggattcatatttcttcatctgtcaaatgagagtaatcatgcccaccctcattgtcatgccagattgtcagaagttccagacagatgagaaagcaaaaagtactttgtaaagtgttatacaatcagaaggtgctttgtgctgaccgtcagattgtgtcaagtcaggtgtgcaaattgaccacactcccaaagaatcatttaaaagtaaagtgacttctaagagacaaggaagtaggaacatttctgatattaaatatataaataatatggatacacatgtgtatatctgtatatggatcttaccatcataattcattttcttcatatcagcaaagtaatagtaatgtgggccaatgcattttggaaatgtcctcattatgtagaatggaatgtgaaaattatttttgttaaaacaggattttgccacaattatttaaatattatgtttgtgaactatctaagcatgagaaaatacaaagctttctttgtatctggctgatactcatttggatgattctgtgactcatagaacatgatgttaaatgagaccagactcaactgccaccagtccccagctgcagaccttcatccccttcatctcccactaggggctcgtggtctggaagaaacatctatcaagcaacacagccccttatcccagatagaaaagtgtctcaaatgcattctactgcgggacagtcagtaggatcattttcataaagcaaggacatcatatgtttctagaaattacaagcatataactttagcctacaatctcttattaaaaatttttaacaaaattgtattacaaatgcatttcatcagaactcaaatttaaatggtgtttgttttgggtttttatttataatgctgaagttattccatataagtatcaagttaaacacaattcattttgattataaactatttgactttttaaaatcttctgacacagtaaatatatatatcaagattgatgtatcaaaatttattgcacactttaaagtgtaaaatcattttttaaaatcttgaatccacaaataaagttctattctgattttaaaaaacaaaa

SEQ ID NO: 259841 - DNA, 3744 bp, Artificial Sequence
  derived and/or modified sequence
atggcccagagcctgcggctgcacttcgccgctcggagaagcaacacctatccgctgtccgagacgtctggagatgatcttgattcacacgtacacatgtgtttcaagagacctactagaataagcacctcaaacgttgtacaaatgaaactcacccctcgccagaccgccttggctccacttatcaaggagaatgtgcagtcgcaagaaagatcaagcgtgcccagtagcgaaaacgtgaacaaaaaaagttcttgtctccaaatatcactccagcctactaggtacagtggataccttcagtccagtaatgtgctggcagactctgacgacgcatcgttcacgtgtatccttaaagatggaatttattcttcagctgttgtggacaacgaacttaatgctgttaatgacgggcatctcgtgtcatcacctgcgatatgcagtggcagcctcagcaacttctcaactagcgataatggcagttacagctctaacggctctgacttcggcagttgtgcctcaatcacatccggcggaagttacacgaacagcgttatttccgattcctccagttacaccttccctccctccgatgacacatttcttgggggaaacctcccttctgatagcacctcaaaccgatccgtccctaacaggaatactaccccgtgcgagattttttcgaggtcgacttcaacagacccttttgtccaggatgacctggagcatggactcgagataatgaaactccccgttagccggaatacaaagattcctctgaagcgatacagttctttggtgatctttccccgtagcccaagcaccacgcggccaacctcccctaccagcctgtgcaccttgctgtcaaaggggagctaccagacttctcaccagtttatcatctctccctctgaaattgcacataacgaggacggcacatcagctaaaggatttctctcaaccgcagtcaacgggcttcgactgtcaaaaaccatttgtacgcccggtgaggttagggatatccgacctttgcataggaaagggagcctgcaaaagaaaattgtgctgagcaataacactcccagacagacagtctgcgagaagagttcagaggggtatagctgtgtttccgtacactttacccagcgcaaggctgccaccctagactgtgagacgactaatggagattgcaagcccgaaatgtctgaaatcaaacttaactccgactctgaatacatcaagctgatgcatcgaacctctgcgtgcttgccgtcttcacaaaatgttgattgtcagattaacattaatggggagctagagaggccacactctcagatgaataagaaccacggtatattaaggagaagtatttctctgggcggtgcttatcctaatatttcatgtctttcctctctgaaacataattgtagcaaagggggaccttcgcagctgctcattaagtttgcaagtggcaatgaaggcaaagtagacaatctctctcgcgattccaaccgcgattgcactaacgaattgagcaacagttgcaaaccaggatgggttgtgctcgatcagcccgatgctgcctgccacctgcagcaacagcaggagccttccccgctgcctccgggatgggaggaacgacaagatattctcggccgtacttattacgtgaatcacgaatcccgcaggactcagtggaaacgacctaccccacaagataatctcacggacgctgagaacggaaacatccagcttcaggcacagcgcgcatttacaacccgtaggcagatcagcgaagagaccgagtccgtggacaatcgcgaaagcagtgaaaattgggaaattataagagaagacgaagcaacgatgtactcaaatcaggcgttcccgtcaccgccacccagcagtaacctggacgtccccactcatctggccgaggaacttaacgcacgtctcaccattttcgggaactccgcggtttctcaacccgcatctagttcaaatcattcgagccgtcgcggttcactgcaggcttacaccttcgaggagcagcctacccttcctgtgctcctgcccacctcctctggcctcccccctgggtgggaagagaaacaggacgaacggggtcggtcatattatgtggaccacaattccaggacgacaacatggaccaaacctaccgttcaagccaccgtagagacatcacagctgaccagcagtcaatcctcagcgggaccgcagagtcaggccagcacttctgactcagggcagcaggtgactcagccaagcgaaatcgagcagggtttcctacctaaagggtgggaggtgcgccacgctcccaacggcaggccattctttattgaccacaatactaagactacgacgtgggaggatccaaggctgaagattcccgcacacctcagggggaaaacttcgctcgatacgtcaaacgacttggggcctctgccgcctggatgggaggagcgaacccataccgacggaagaattttctatatcaaccacaatataaagcgcactcaatgggaagatcccagattggaaaacgtcgccataacaggccctgccgtaccgtattcccgggactataagcgcaagtacgaatttttcaggcgaaagcttaaaaagcaaaacgacatacccaacaaattcgagatgaagctgcgtagagcgactgtccttgaggatagctacagacgtataatgggcgtcaagcgcgcagacttcctaaaggcgagattatggatagagtttgacggggaaaaaggccttgactacggtggagtggctagggaatggttcttcctgatctccaaagaaatgttcaacccttattacggtctcttcgagtattcagctaccgataattacacactgcaaataaacccaaacagcggactctgcaatgaggaccacctgagctactttaagttcatcgggagagtcgctggcatggctgtgtaccacgggaagttgctcgatggcttcttcatcagacccttttataagatgatgctacacaaacccataaccctgcatgatatggagagtgtggactcagaatactacaattctttgagatggattctagagaacgatccaactgagctagacttacgattcatcattgacgaggaactcttcggccaaacccaccagcacgaactgaagaatggaggttcggaaatcgtggttacaaataagaacaaaaaagaatacatctacctcgtgatccagtggaggtttgtgaaccgaatccaaaaacagatggccgcttttaaggaaggttttttcgaacttataccacaagatttgatcaagatctttgatgagaatgagcttgagttgctaatgtgcggcctcggggatgttgatgtgaatgactggagagagcacaccaagtacaagaatggatacagcgcaaaccatcaggttatacagtggttttggaaggcagttctgatgatggattccgaaaagaggattcgattgctgcaattcgttaccgggacctctcgtgttccaatgaacgggtttgccgagttatacggaagtaatggaccacagagtttcacagtggagcagtggggtacccccgaaaagttgccgagggcccacacctgttttaaccggctcgatttgccaccttacgagagcttcgaggaactgtgggacaagctgcagatggcgatcgaaaacacacagggcttcgacggcgtggattag

SEQ ID NO: 259842 - DNA, 3744 bp, Artificial Sequence
  derived and/or modified sequence
atggcccagagcctgagactgcacttcgccgccagaagaagcaacacctaccccctgagcgagaccagcggcgacgacctggacagccacgtgcacatgtgcttcaagagacccaccagaatcagcaccagcaacgtggtgcagatgaagctgacccccagacagaccgccctggcccccctgatcaaggagaacgtgcagagccaggagagaagcagcgtgcccagcagcgagaacgtgaacaagaagagcagctgcctgcagatcagcctgcagcccaccagatacagcggctacctgcagagcagcaacgtgctggccgacagcgacgacgccagcttcacctgcatcctgaaggacggcatctacagcagcgccgtggtggacaacgagctgaacgccgtgaacgacggccacctggtgagcagccccgccatctgcagcggcagcctgagcaacttcagcaccagcgacaacggcagctacagcagcaacggcagcgacttcggcagctgcgccagcatcaccagcggcggcagctacaccaacagcgtgatcagcgacagcagcagctacaccttcccccccagcgacgacaccttcctgggcggcaacctgcccagcgacagcaccagcaacagaagcgtgcccaacagaaacaccaccccctgcgagatcttcagcagaagcaccagcaccgaccccttcgtgcaggacgacctggagcacggcctggagatcatgaagctgcccgtgagcagaaacaccaagatccccctgaagagatacagcagcctggtgatcttccccagaagccccagcaccaccagacccaccagccccaccagcctgtgcaccctgctgagcaagggcagctaccagaccagccaccagttcatcatcagccccagcgagatcgcccacaacgaggacggcaccagcgccaagggcttcctgagcaccgccgtgaacggcctgagactgagcaagaccatctgcacccccggcgaggtgagagacatcagacccctgcacagaaagggcagcctgcagaagaagatcgtgctgagcaacaacacccccagacagaccgtgtgcgagaagagcagcgagggctacagctgcgtgagcgtgcacttcacccagagaaaggccgccaccctggactgcgagaccaccaacggcgactgcaagcccgagatgagcgagatcaagctgaacagcgacagcgagtacatcaagctgatgcacagaaccagcgcctgcctgcccagcagccagaacgtggactgccagatcaacatcaacggcgagctggagagaccccacagccagatgaacaagaaccacggcatcctgagaagaagcatcagcctgggcggcgcctaccccaacatcagctgcctgagcagcctgaagcacaactgcagcaagggcggccccagccagctgctgatcaagttcgccagcggcaacgagggcaaggtggacaacctgagcagagacagcaacagagactgcaccaacgagctgagcaacagctgcaagcccggctgggtggtgctggaccagcccgacgccgcctgccacctgcagcagcagcaggagcccagccccctgccccccggctgggaggagagacaggacatcctgggcagaacctactacgtgaaccacgagagcagaagaacccagtggaagagacccaccccccaggacaacctgaccgacgccgagaacggcaacatccagctgcaggcccagagagccttcaccaccagaagacagatcagcgaggagaccgagagcgtggacaacagagagagcagcgagaactgggagatcatcagagaggacgaggccaccatgtacagcaaccaggccttccccagccccccccccagcagcaacctggacgtgcccacccacctggccgaggagctgaacgccagactgaccatcttcggcaacagcgccgtgagccagcccgccagcagcagcaaccacagcagcagaagaggcagcctgcaggcctacaccttcgaggagcagcccaccctgcccgtgctgctgcccaccagcagcggcctgccccccggctgggaggagaagcaggacgagagaggcagaagctactacgtggaccacaacagcagaaccaccacctggaccaagcccaccgtgcaggccaccgtggagaccagccagctgaccagcagccagagcagcgccggcccccagagccaggccagcaccagcgacagcggccagcaggtgacccagcccagcgagatcgagcagggcttcctgcccaagggctgggaggtgagacacgcccccaacggcagacccttcttcatcgaccacaacaccaagaccaccacctgggaggaccccagactgaagatccccgcccacctgagaggcaagaccagcctggacaccagcaacgacctgggccccctgccccccggctgggaggagagaacccacaccgacggcagaatcttctacatcaaccacaacatcaagagaacccagtgggaggaccccagactggagaacgtggccatcaccggccccgccgtgccctacagcagagactacaagagaaagtacgagttcttcagaagaaagctgaagaagcagaacgacatccccaacaagttcgagatgaagctgagaagagccaccgtgctggaggacagctacagaagaatcatgggcgtgaagagagccgacttcctgaaggccagactgtggatcgagttcgacggcgagaagggcctggactacggcggcgtggccagagagtggttcttcctgatcagcaaggagatgttcaacccctactacggcctgttcgagtacagcgccaccgacaactacaccctgcagatcaaccccaacagcggcctgtgcaacgaggaccacctgagctacttcaagttcatcggcagagtggccggcatggccgtgtaccacggcaagctgctggacggcttcttcatcagacccttctacaagatgatgctgcacaagcccatcaccctgcacgacatggagagcgtggacagcgagtactacaacagcctgagatggatcctggagaacgaccccaccgagctggacctgagattcatcatcgacgaggagctgttcggccagacccaccagcacgagctgaagaacggcggcagcgagatcgtggtgaccaacaagaacaagaaggagtacatctacctggtgatccagtggagattcgtgaacagaatccagaagcagatggccgccttcaaggagggcttcttcgagctgatcccccaggacctgatcaagatcttcgacgagaacgagctggagctgctgatgtgcggcctgggcgacgtggacgtgaacgactggagagagcacaccaagtacaagaacggctacagcgccaaccaccaggtgatccagtggttctggaaggccgtgctgatgatggacagcgagaagagaatcagactgctgcagttcgtgaccggcaccagcagagtgcccatgaacggcttcgccgagctgtacggcagcaacggcccccagagcttcaccgtggagcagtggggcacccccgagaagctgcccagagcccacacctgcttcaacagactggacctgcccccctacgagagcttcgaggagctgtgggacaagctgcagatggccatcgagaacacccagggcttcgacggcgtggactag

SEQ ID NO: 259843 - protein, 254 aa, Artificial Sequence
  derived and/or modified sequence
MAAVAATAAAKGNGGGGGRAGAGDASGTRKKKGPGPLATAYLVIYNVVMTAGWLVIAVGLVRAYLAKGSYHSLYYSIEKPLKFFQTGALLEILHCAIGIVPSSVVLTSFQVMSRVFLIWAVTHSVKEVQSEDSVLLFVIAWTITEIIRYSFYTFSLLNHLPYLIKWARYTLFIVLYPMGVSGELLTIYAALPFVRQAGLYSISLPNKYNFSFDYYAFLILIMISYIPIFPQLYFHMIHQRRKILSHTEEHKKFE

SEQ ID NO: 259844 - DNA, 765 bp, Artificial Sequence
  derived and/or modified sequence
atggccgccgtggccgccaccgccgccgccaagggcaacggcggcggcggcggcagagccggcgccggcgacgccagcggcaccagaaagaagaagggccccggccccctggccaccgcctacctggtgatctacaacgtggtgatgaccgccggctggctggtgatcgccgtgggcctggtgagagcctacctggccaagggcagctaccacagcctgtactacagcatcgagaagcccctgaagttcttccagaccggcgccctgctggagatcctgcactgcgccatcggcatcgtgcccagcagcgtggtgctgaccagcttccaggtgatgagcagagtgttcctgatctgggccgtgacccacagcgtgaaggaggtgcagagcgaggacagcgtgctgctgttcgtgatcgcctggaccatcaccgagatcatcagatacagcttctacaccttcagcctgctgaaccacctgccctacctgatcaagtgggccagatacaccctgttcatcgtgctgtaccccatgggcgtgagcggcgagctgctgaccatctacgccgccctgcccttcgtgagacaggccggcctgtacagcatcagcctgcccaacaagtacaacttcagcttcgactactacgccttcctgatcctgatcatgatcagctacatccccatcttcccccagctgtacttccacatgatccaccagagaagaaagatcctgagccacaccgaggagcacaagaagttcgagtag

SEQ ID NO: 259845 - DNA, 765 bp, Artificial Sequence
  derived and/or modified sequence
atggcggccgtggccgctacagccgctgctaaaggcaacggtggggggggagggagggccggtgccggcgatgccagcgggacgcgcaaaaagaagggacccggtccactggcgaccgcctatttggtgatctataacgtcgtcatgactgccgggtggctggtgattgctgtgggtctagttcgggcatatctggctaagggatcataccatagcctgtactatagtatcgaaaaaccactcaaattcttccagactggagccctgctggaaattttacactgtgccatcgggattgtgccaagcagcgtggttctcaccagctttcaggtgatgtcccgcgtgtttttgatctgggctgtcacgcacagtgtgaaagaggtccaatcagaggactcggtcctgttgtttgtcattgcatggaccatcactgagattattcggtacagcttctacaccttcagtctcctgaatcacctcccctacctgatcaagtgggcacggtacacactgtttatcgtgctgtatccaatgggcgtttcgggagagttgctcacaatctacgcggctctacccttcgtgcggcaggcaggattatacagcatttcattgccaaataagtataatttttcgttcgactactacgctttcctgatcttgatcatgataagctatattcctatcttcccccaattatattttcatatgatccatcagcggagaaagattctctcccacacagaggagcataaaaagttcgaatag

SEQ ID NO: 259846 - DNA, 765 bp, Artificial Sequence
  derived and/or modified sequence
atggctgctgtggccgccacagctgctgccaagggaaatggaggcggcggcggccgggccggggctggagatgccagcggcaccaggaagaagaagggccctggccccctggccacagcctacctggtgatctacaacgtggtgatgacagctggctggctggtgattgctgtgggcctggtgcgggcctacctggccaagggcagctaccacagcctgtactacagcattgagaagcccctgaagttcttccagacaggagccctgctggagatcctgcactgtgccatcggcatcgtgcccagctctgtggtgctgaccagcttccaggtgatgagcagggtcttcctgatctgggccgtgacccacagcgtgaaggaggtgcagagtgaagattctgtgctgctgtttgtgattgcctggaccatcacagagatcatccgctacagcttctacaccttcagcctgctgaaccacctgccctacctgatcaagtgggcccgctacaccctcttcatcgtgctgtaccccatgggcgtgtctggagagctgctgaccatctatgctgccctgccctttgtgcggcaggccggcctgtacagcatcagcctgcccaacaagtacaacttctcctttgactactatgccttcctgatcctgatcatgatctcctacatccccatcttcccccagctgtacttccacatgatccaccagaggaggaagatcctgagccacacagaggagcacaagaagtttgaatag

SEQ ID NO: 259847 - DNA, 765 bp, Artificial Sequence
  derived and/or modified sequence
atggccgccgtggccgccaccgccgccgccaagggcaacggcggcgggggcggcagagccggggcaggggatgcctcaggcacacgaaaaaagaaaggccccggccccctagcaacagcctatctggtgatatacaatgttgtaatgaccgcgggctggctggtcattgccgtagggctggttcgcgcctatctggctaagggctcttatcacagcttatactatagtattgaaaagcccctgaagttctttcagacaggtgcacttctggaaattctgcattgtgcgatagggatcgtgccgtcttccgttgtgctgacttcttttcaggtgatgtctagggtcttcctaatctgggccgtcacccacagcgtgaaagaggtccagtccgaagactccgtgctgttgtttgtgatcgcttggactataactgagattattcgctatagtttttatacattctccctgctgaatcatcttccttatctcatcaagtgggcccggtatacactgtttattgttttatatccaatgggggtctccggcgagctgctgacaatatatgcggcactgcccttcgtccgacaggcaggcctgtactctatttccttgcctaataagtacaacttcagctttgattactacgccttccttattttaatcatgatctcttatattcccatctttccccaactttacttccatatgatacaccagagacgaaagatcctcagtcacacagaggaacacaaaaagtttgagtag

SEQ ID NO: 259848 - DNA, 4257 bp, Artificial Sequence
  derived and/or modified sequence
ctttgccctcagccaagatggcggctgccgtggaccctgtcccggctccgccccgcggccctggccccgcctgcccctcgtcccttcctccgccccctctcctcgcgtagtccggcccgagccgctcgcgctaggagagcgggcttcgggcacttgacatggcggcagtggcggcgactgcagcagcgaaggggaatgggggcggcggtggcagggccggggccggggacgccagcggcacgcggaagaagaagggcccggggcccctggccacggcgtacctggtcatctacaatgtggtgatgacagccgggtggctggttatagcggttggtctggtccgagcatacctggctaagggtagctaccatagcctttattattcaattgaaaagcctttgaaattctttcaaactggagccttattggagattttacattgtgctataggaattgttccatcttctgttgtcctgacttctttccaggtgatgtcaagagtttttctaatatgggcagtaacacatagcgtcaaagaggtacagagtgaagacagtgtcctcctgtttgttattgcatggacgatcacggaaatcatccgttactccttttatacattcagtctattaaaccatctgccttacctcatcaaatgggccaggtacacacttttcattgtgctgtacccaatgggagtgtcaggagaactgctcacaatatatgcagctctgccctttgtcagacaagctggcctatattccatcagtttacccaacaaatacaatttctcttttgactactatgcattcctgattctaataatgatctcctacattccaatttttccccagttatacttccacatgatacaccagagaagaaagatcctttctcatactgaagaacacaagaaatttgaatagttcctgctttctgcacctcccaccaaaacaaacttttcaatgatcaaaaaatgctgcagattttttgagttcccaatacgtttcatagaaaataagtaagaactatttttaaaatattcaaacaaaactaaaacaaaaatccagtgtcacatgggcctgagattttattttagaaaaaggttgttacataaaacaccctggccagttcatttcagcatgctctttcaaccagaagttcttaatatttatgatggcactagaaagggatttggcattttatgtccttctgtgtccttcatgtatctgatcaatgaagacctgtaacactaagtacttgagagttacagtctgaataatgaagtcgtaccagctgaatagcccagcttgcagtatagttatgtttcagtctgcagtgtgtttagcattcccttgtcaaagtgcttgactgcatgctggaaactttgtatttttgaagcggcaaactctgttctctggaatgctctgaagttatggctgggacctatcccctcacatctaatgaatgaattataaaatgtatatgtctatgaagcttcggggtagtgcctgtaatcagaaaacaacttagaacccttttgtttgtttccaattgagtcattactgcctgccactaagaaacgtgcttgaatctaataagtatgtgtgtaccgtaaagaatatatcttatctggagctcagcctcaatcatgtcttaacaaaatgacaggtctcagaaagggggagctcaatagctcaaaagtgacaagtccttttcacagcaccattctcagaacacctctgagtaacgtgtttgccagtagctattctcactgatgcactgatggccctgaagaagcggatccagtcacataggaaaggaggctgtgttagtgaaagcacatggaaggtgttgctttagaaaggtagtcaggaaaaacattcaggaatagatttatacaccattattgttttatttttaaattttcattcactcttctgtttggatacttttgctaattaacttcctatgttaatttccaccaagctataagtccatagtcagtaaaacattccccttgggctgtcatgagctaaaagcagtgtcatctccgcatgttggagcagccaagaaatagtttggtactaccgacattgtctaatccatgtcacatcctcatacaatttaattgctcaaccatgcatttaaaactcctcaagaaaggattggtactgcaactgtaggtaaactgaaaaaaaataagaaagaaagagttggatgaaaatgtgaaagcccaagtttagatgtgcattaagtattaaatagcacagtatcttcttcatggagccttttttcctcccccatcccctgcagctgcctttttttgggggcagggtgggggttgatgttgaactttaagagtttaaaagtttagcttattgagtagttgtcatttaaaatataattgcgaatatcagaaaactcatactggaaaactaaattttttttttctcttgagacggagtctcgctctgttgcccaggctggagtgcagtggcgcgatctcagctcactgcaagctccacctcccgggttcacgccatcctcctgcctcagcctcctgagtagctgggactacaggtgcctgccaccacacccagctaattttttttgtatttttagtagagacggggtttcaccgtgttagccaggatggtcttgatctcctgacctcgtgatccacccgcctcagcctcccaaagtgctgggattgcaggcatgagccactgcacccaacccctggaaaactaaatttttaagtgcttatttttatagaagtttgaaaatttaatgcaggcaggtgtgtaataaattatttttgaattgaacattaaaattctgcttcttaaagtcagcactcaacttggacatgttgaaattagaatctattcttgtatttgatagacaaaatatgtgggaaagattttttgcatgacttttctctcattttattcttccataatgtatttctactataaaatagaatcaacttgggttatatttgtcatttactttgttctgttagattttttcagttgtttttggaaaaattctagaaatcaggatgaaaaatgcagcttttccagggttgctggactgggggttttatttgggcctccttattataatttgtcactacttataaaaaacattctgttgcaaacagtggtgttgcattgaattgaactttggcaatgagaacacagcacacagctcccttttcaaaaagggtctcaaccccagtgtgtatttttgtacatcaacatttagaatacttatggcagataagtaaggcatgtcactgtgtccttcagtaacctctctcagtaactggtttctttatccctaacatgaattcatttctcctttgaagtcatttattattttataaattgagaacaaccacaccaccaaatgtcacaccttcttataaagtgtgaacaaggaaggtcatgtttttgtgggtattttgtcagacttagaggtttcatttcagggcatagtcaaaggcatcatcctcccaactacccacttgattatgtatttcagatccctccgtgggggccttcttctgacagagaattctttgaggtccgcagtagtgcttttgtcagcacagactgctaatctacatcttgctgcgttctgtttgctgaggttgggcttattcatttaacacataccaaccattatccagaggcaccatggagagttagtcatggaataaagcactgtccttgcagatgaaaaaagtctccagagcagacttctgacaggaaaggtttagatgctggagagttgaagaggtgtaagaagagatcgtgccctcatttttcacttatttttttggttattcatttataataaaaggttggcattgatatggtacaacctgcaaattacttgcagttctgagtttcagataaaacattataaaacattaaattcaatacatactgctcctttgaaatttgggtaaaaaattgtacaaccgtatatatagtcatttttgtattttttctatgttgtgaaaaccaaaattgtaattttataagtctttgattcactaaaattatataatttaaatgtattttttgtatatttagaaataaggagtccagagactacgcttaactttctatgcatgcatttgaaagctgtttttacctgataatgtagtaataagttgtattcataaaatactgatctgtgttgcatttcaaaataaactggtgtgtgctctgcctggatttgaaa

SEQ ID NO: 259849 - DNA, 765 bp, Artificial Sequence
  derived and/or modified sequence
atggcggcagttgcggcaaccgctgccgctaaggggaatgggggagggggaggcagggccggagccggtgacgccagcggcacacggaagaagaaaggccctggtccccttgcgacagcttatctcgtcatttacaacgtggtgatgacggccggatggctagtcattgccgtcggactcgtgcgtgcataccttgctaaaggcagttaccactcactctattatagcattgagaaacctctaaaattcttccagactggagcactcctggagatcctgcattgtgcgatcggtatagtacccagctctgtggtactgactagctttcaggtgatgagtcgggtgttccttatatgggccgtgactcattctgtgaaagaagtgcagtctgaggattctgtgttactattcgtcatagcctggaccataactgagatcattcgatacagcttctacactttttcccttctgaaccacctcccctatctcatcaagtgggctcgctacacgctgttcatcgtactatatccaatgggcgtaagtggagagttgcttacgatctatgcagcactgccttttgtgaggcaggccggactatacagcatctctctccctaataagtacaatttcagcttcgactattatgccttccttatcttgatcatgatcagttatatccccattttccctcagctttacttccacatgattcatcagcgcagaaaaatcctgtctcataccgaggagcacaagaagttcgagtag

SEQ ID NO: 259850 - protein, 246 aa, Artificial Sequence
  derived and/or modified sequence
MFAPRLLDFQKTKYARFMNHRVPAHKRYQPTEYEHAANCATHAFWIIPSILGSSNLYFLSDDDWETISAWIYGLGLCGLFVVSTVFHTISWKKSHLRMVEHCLHMFDRMVIYFFIAASYAPWLNLRELGPWASHMRWLVWIMASVGTIYVFFFHERYKLVELLCYVVMGFFPALVILSMPNTEGIWELVTGGVFYCLGMVFFKSDGRIPFAHAIWHLFVAFGAGTHYYAIWRYLYLPSTLQTKVSK

SEQ ID NO: 259851 - DNA, 741 bp, Artificial Sequence
  derived and/or modified sequence
atgtttgccccccgcctcctcgactttcagaaaaccaaatatgcacgttttatgaaccatagagtgccggcccacaaacgatatcaacctactgagtatgaacacgccgccaactgtgcaactcacgctttctggattattccatcaatactcggctcttcaaacttatatttcctgtcagatgacgattgggagactatctctgcatggatctacggtcttggactgtgcggactctttgtggtgtcaacggtgttccacacaatttcctggaaaaaaagtcacctgcggatggtcgagcactgtctgcacatgttcgaccggatggtcatctatttcttcatcgccgctagctacgccccttggttaaacctgcgcgaactcggaccttgggcgtctcacatgaggtggctcgtatggatcatggcttctgtcggaaccatctacgtattctttttccatgagcgctacaagctggtggaactgttgtgctacgttgtgatgggcttttttcccgcactggtgattctgtccatgcctaacaccgagggaatctgggagctggtgactggtggtgtcttttactgcttagggatggtgttctttaaaagtgatggccgaatccccttcgcgcatgccatatggcacctgtttgtggccttcggagcaggaacccactactatgccatctggcgatatctttacctaccaagcacgctgcaaactaaagtgtccaagtag

SEQ ID NO: 259852 - DNA, 741 bp, Artificial Sequence
  derived and/or modified sequence
atgtttgccccccggctgctggacttccagaagaccaagtatgcccgcttcatgaaccaccgggtgcctgcccacaagcgctaccagcccacagaatatgaacatgctgccaactgtgccacccacgccttctggatcatccccagcatcctgggcagcagcaacctgtacttcctgagtgatgatgactgggagaccatcagcgcctggatctacggcctgggcctgtgtggcctgtttgtggtgtccaccgtcttccacaccatctcctggaagaagagccacctgaggatggtggagcactgcctgcacatgtttgacaggatggtgatctacttcttcatcgccgccagctatgccccctggctgaacctgcgggagctgggcccctgggccagccacatgcgctggctggtgtggatcatggcctctgtgggcaccatctacgtgttcttcttccacgagcgctacaagctggtggagctgctgtgctacgtggtgatgggcttcttccctgccctggtgatcctgtccatgcccaacacagagggcatctgggagctggtgactggaggagtcttctactgcctgggcatggtgttcttcaagagtgatggccgcatcccctttgcccacgccatctggcacctgtttgtggcctttggagctggcacccactactatgccatctggagatacctgtacctgcccagcaccctgcagaccaaggtgtccaagtag

SEQ ID NO: 259853 - DNA, 2335 bp, Artificial Sequence
  derived and/or modified sequence
gctcgggatttggcgtcggcggctccgggcgcctccagctccggctcgggctccggctccggctccgggcgccgaccaggtccccttggcccccgccgcgcgccctccaacctgctgctgccgccgccgcgccccccaggctctgccagctacccgcgctctgagcccggggccagattcccatggaagcgccgcgatgttcgccccccggctgctggatttccagaagacgaaatacgcgaggttcatgaaccaccgagtccctgcccacaagaggtaccagcccacagagtatgaacatgcggccaactgtgccacccatgctttctggatcatccccagcatcctgggcagctccaacctctacttcctgtcggacgatgactgggagaccatctctgcctggatctacggcctcggcctctgcggcctcttcgtggtgtccactgtgtttcacaccatctcctggaagaagagccacctcaggatggtggaacactgtctacacatgttcgaccggatggtcatctatttcttcatagcggcttcctacgcaccctggctgaaccttcgggagctgggcccctgggcctcccacatgcgctggctggtctggattatggcttccgtgggcaccatctatgtcttcttcttccatgagcggtacaagcttgtggagcttctctgctacgtcgtaatgggcttcttccccgccctggtcatcctctccatgcccaacaccgagggcatctgggagctggtgaccggaggggtcttctactgcctgggcatggtcttcttcaagagtgacgggaggatcccctttgcccacgccatctggcatctctttgtagcatttggtgctggtacccactactatgccatctggaggtacctctatctgcccagcaccctgcagaccaaggtgtccaaatgaggtgacccagacttgagaggtcgtttgggctttaggagtggagcacgtttctgtgaacgttaacccagagcacagcgccaaggcctgtcttccctttattgggtagagttcttgatggctccaaggtgacttctggtgacagccagatcatccctcgagtccccagcgagaaagaaagcatttagccattcttacagaggagaaattaaccctgtaatgtgtttctattttagatgagtgtttcctaatacaagcaacattaacatcttcagaaaaggaagcaggcatggtcctggaaaattggggaatgacgggccaatctgtgtttcctaaggtcctgaagaatctggcaaagagtcctgtgggttgtttatacctgggtggccagggcctccctctctgttaccaaagtccaggctggcgaattgtctctggttcagggaaaggggacagcccagcttgaagatgagggatggtgaatggctgtgaccatggcagacatcaccaatcaagtgcagcacatgggtgatgtcagaattcttcccagcacagtgttctgggcagccagtaccaatcaatttggcactcatgatgggacctctttgcccttcctgtctggtgtgctctgaaatgggataatggccagagtagctgaaaatctccaaatgggcatttgcatgcctatctcctcatctccccctcccttttgggaaactcctggagtaggcagtttgggggcggtagagggaaactgaggcgcacacccatgcagcccctgatgttctgttccaccgtagttgattctcagtagagttgggaatgaggatgctgttacttggccatttcttcccatctccaaaaatccagagacattacgagagctattcattcataagatggggcaaacagcccccaggcacttgctccctgctccatacttaaggtttgtgatgccaacatttggattctctcttggtgccaatcagtggctgttagaggctactcaggtgtaccccaaacagaaggcacatggatctggggcgactgttccaggtcctcccaacctctgaagtgctcagtagcccaacaacaaggctgctgggggcctgttcttcagcccccgtcagggcggggccagcctctctgtccaatgctgcctggacatttactggggaggtgagtagcaggcccagctccaggatctgaattggaatctcagattctctggataaagaatctgtctcaagtcaggaggtcctcattctgcgactcccaaccagggtggagtgggcacagacaggatgccttatgcttatctctagcacattccagggggttccagggttcctgcacctggaatccagtgtgtccaagccagtattaaattatctcaacaca

SEQ ID NO: 259854 - DNA, 2372 bp, Artificial Sequence
  derived and/or modified sequence
ctccgggcgcctccagctccggctcgggctccggctccggctccgggcgccgaccaggtccccttggcccccgccgcgcgccctccaacctgctgctgccgccgccgcgccccccaggctctgccagctacccgcgctctgagcccggggccagattcccatggaagcgccgcgatgttcgccccccggctgctggatttccagaagacgaaatacgcgaggttcatgaaccaccgagtccctgcccacaagaggtaccagcccacagagtatgaacatgcggccaactgtgccacccatgctttctggatcatccccagcatcctgggcagctccaacctctacttcctgtcggacgatgactgggagaccatctctgcctggatctacggcctcggcctctgcggcctcttcgtggtgtccactgtgtttcacaccatctcctggaagaagagccacctcaggatggtggaacactgtctacacatgttcgaccggatggtcatctatttcttcatagcggcttcctacgcaccctggctgaaccttcgggagctgggcccctgggcctcccacatgcgctggctggtctggattatggcttccgtgggcaccatctatgtcttcttcttccatgagcggtacaagcttgtggagcttctctgctacgtcgtaatgggcttcttccccgccctggtcatcctctccatggcggggaaactgaggcctggcatgacttgtctaaagaggcagtaggccagcccaacaccgagggcatctgggagctggtgaccggaggggtcttctactgcctgggcatggtcttcttcaagagtgacgggaggatcccctttgcccacgccatctggcatctctttgtagcatttggtgctggtacccactactatgccatctggaggtacctctatctgcccagcaccctgcagaccaaggtgtccaaatgaggtgacccagacttgagaggtcgtttgggctttaggagtggagcacgtttctgtgaacgttaacccagagcacagcgccaaggcctgtcttccctttattgggtagagttcttgatggctccaaggtgacttctggtgacagccagatcatccctcgagtccccagcgagaaagaaagcatttagccattcttacagaggagaaattaaccctgtaatgtgtttctattttagatgagtgtttcctaatacaagcaacattaacatcttcagaaaaggaagcaggcatggtcctggaaaattggggaatgacgggccaatctgtgtttcctaaggtcctgaagaatctggcaaagagtcctgtgggttgtttatacctgggtggccagggcctccctctctgttaccaaagtccaggctggcgaattgtctctggttcagggaaaggggacagcccagcttgaagatgagggatggtgaatggctgtgaccatggcagacatcaccaatcaagtgcagcacatgggtgatgtcagaattcttcccagcacagtgttctgggcagccagtaccaatcaatttggcactcatgatgggacctctttgcccttcctgtctggtgtgctctgaaatgggataatggccagagtagctgaaaatctccaaatgggcatttgcatgcctatctcctcatctccccctcccttttgggaaactcctggagtaggcagtttgggggcggtagagggaaactgaggcgcacacccatgcagcccctgatgttctgttccaccgtagttgattctcagtagagttgggaatgaggatgctgttacttggccatttcttcccatctccaaaaatccagagacattacgagagctattcattcataagatggggcaaacagcccccaggcacttgctccctgctccatacttaaggtttgtgatgccaacatttggattctctcttggtgccaatcagtggctgttagaggctactcaggtgtaccccaaacagaaggcacatggatctggggcgactgttccaggtcctcccaacctctgaagtgctcagtagcccaacaacaaggctgctgggggcctgttcttcagcccccgtcagggcggggccagcctctctgtccaatgctgcctggacatttactggggaggtgagtagcaggcccagctccaggatctgaattggaatctcagattctctggataaagaatctgtctcaagtcaggaggtcctcattctgcgactcccaaccagggtggagtgggcacagacaggatgccttatgcttatctctagcacattccagggggttccagggttcctgcacctggaatccagtgtgtccaagccagtattaaattatctcaacacattccacaga

SEQ ID NO: 259855 - DNA, 741 bp, Artificial Sequence
  derived and/or modified sequence
atgttcgccccccggctgctggacttccagaagaccaagtacgccaggttcatgaaccacagagttccagcccacaagaggtatcaacccactgagtacgagcacgccgccaattgcgcaacccatgcgttttggataattccctccatcctggggtcttcaaacctgtacttcctcagcgatgacgattgggagacgatttcagcgtggatctacggtctcggcctctgtggcttatttgtggtcagcaccgtgttccacacaatcagctggaagaagagccatctgaggatggtggagcactgtcttcacatgttcgatcggatggtgatttacttctttatcgccgcgagttatgctccatggctcaacctccgcgagctgggcccgtgggctagccacatgcgctggcttgtgtggataatggccagcgttggaacgatatacgttttcttctttcacgaacggtataaacttgtcgaactcctctgttacgtcgtcatggggttctttcccgcactggtgatcttgagcatgcctaacaccgaggggatatgggaactggtgaccggaggcgtgttttactgcctgggaatggtcttctttaagtccgacggacgcattccattcgcgcacgccatatggcatctgttcgttgcatttggcgcaggcactcactattatgccatttggagatacctctatctgccatccactctgcagactaaggtttctaagtag

SEQ ID NO: 259856 - DNA, 741 bp, Artificial Sequence
  derived and/or modified sequence
atgttcgcgcctagactgctggactttcaaaagaccaaatatgcaaggtttatgaaccatagggtgcccgcacacaaacgttaccagccaaccgagtacgagcacgctgccaattgtgcgacgcatgctttctggatcattccttcgatcctgggtagttccaacctctacttcctgagtgacgacgattgggagacgatttccgcgtggatctacgggctgggactgtgcggcctctttgttgtatccacagtgtttcacacgatctcctggaaaaagagccacctgcggatggtggagcattgccttcatatgttcgatcgcatggtgatctatttctttatagctgcctcttacgccccatggttgaatctcagagaactcggcccatgggcaagccacatgagatggctggtgtggatcatggccagcgttggtacaatttatgtgttcttcttccacgaacgctacaagctggttgaattgctttgttatgtcgtgatggggttctttccggctctggtgatcctgtctatgccgaacaccgaagggatttgggagctcgtaacagggggagtgttctactgcttggggatggtattcttcaagtcggatggtcgaattccatttgcacacgctatatggcatttattcgtggcgttcggcgctggcacccactattacgcaatctggaggtatttgtatctgccctccacacttcagactaaggtatccaagtag

SEQ ID NO: 259857 - DNA, 741 bp, Artificial Sequence
  derived and/or modified sequence
atgttcgcccccagactgctggacttccagaagaccaagtacgccagattcatgaaccacagagtgcccgcccacaagagataccagcccaccgagtacgagcacgccgccaactgcgccacccacgccttctggatcatccccagcatcctgggcagcagcaacctgtacttcctgagcgacgacgactgggagaccatcagcgcctggatctacggcctgggcctgtgcggcctgttcgtggtgagcaccgtgttccacaccatcagctggaagaagagccacctgagaatggtggagcactgcctgcacatgttcgacagaatggtgatctacttcttcatcgccgccagctacgccccctggctgaacctgagagagctgggcccctgggccagccacatgagatggctggtgtggatcatggccagcgtgggcaccatctacgtgttcttcttccacgagagatacaagctggtggagctgctgtgctacgtggtgatgggcttcttccccgccctggtgatcctgagcatgcccaacaccgagggcatctgggagctggtgaccggcggcgtgttctactgcctgggcatggtgttcttcaagagcgacggcagaatccccttcgcccacgccatctggcacctgttcgtggccttcggcgccggcacccactactacgccatctggagatacctgtacctgcccagcaccctgcagaccaaggtgagcaagtag

SEQ ID NO: 259858 - protein, 366 aa, Artificial Sequence
  derived and/or modified sequence
MWNATPSEEPGFNLTLADLDWDASPGNDSLGDELLQLFPAPLLAGVTATCVALFVVGIAGNLLTMLVVSRFRELRTTTNLYLSSMAFSDLLIFLCMPLDLVRLWQYRPWNFGDLLCKLFQFVSESCTYATVLTITALSVERYFAICFPLRAKVVVTKGRVKLVIFVIWAVAFCSAGPIFVLVGVEHENGTDPWDTNECRPTEFAVRSGLLTVMVWVSSIFFFLPVFCLTVLYSLIGRKLWRRRRGDAVVGASLRDQNHKQTVKMLAVVVFAFILCWLPFHVGRYLFSKSFEPGSLEIAQISQYCNLVSFVLFYLSAAINPILYNIMSKKYRVAVFRLLGFEPFSQRKLSTLKDESSRAWTESSINT

SEQ ID NO: 259859 - DNA, 1101 bp, Artificial Sequence
  derived and/or modified sequence
atgtggaacgcaacccctagcgaagagcccggcttcaacctcaccctggcagacctagattgggacgcttcgccaggtaatgatagcctgggagacgagctcttgcagctattccctgccccccttcttgccggcgtaactgctacatgcgtcgcattgtttgttgtaggcatcgccggtaatctgcttaccatgctggtagtatctcgctttagggaactgcgcactacgactaatctttacctgtctagtatggcttttagcgacttattaattttcctttgtatgcctctggatcttgtgaggctatggcaataccgtccctggaattttggtgacttactgtgtaagttgttccagtttgtgagcgagtcctgtacctatgcaaccgtgctgacaattacggcgttatccgtggagagatactttgcaatttgttttcctttgagagcaaaggtcgtggtgactaaaggcagggttaaactggttatttttgtgatctgggccgtggccttttgttcagcaggtcctatattcgtcctggtgggagttgagcacgagaacggtacggatccatgggacacgaatgagtgcagaccaacagaattcgccgtgagaagtggcctgctcacggtcatggtctgggttagtagtattttcttcttcctgcctgttttttgcctgacggtgctatacagcctgattggtaggaaactctggaggaggcgacgaggtgatgccgtcgtgggtgcttccctgagagatcaaaaccataaacagaccgtgaaaatgctggcagtggtcgtgtttgcgttcatcctgtgttggctgccattccacgtaggacggtatctgttctctaaatccttcgaacctggcagtcttgagattgctcagatcagccagtattgcaatctggtctcctttgtgctcttttacctgtccgctgccattaatccaatcctctataacatcatgtctaagaagtaccgggtcgcagtctttagattgctgggttttgaaccctttagccagcgcaaattaagtactctgaaagatgaatcctctcgcgcttggaccgaaagctctattaatacttag

SEQ ID NO: 259860 - DNA, 1172 bp, Artificial Sequence
  derived and/or modified sequence
cagcgcagtcacgtcccagagcctgttcagctgagccggcagcatgtggaacgcgacgcccagcgaagagccggggttcaacctcacactggccgacctggactgggatgcttcccccggcaacgactcgctgggcgacgagctgctgcagctcttccccgcgccgctgctggcgggcgtcacagccacctgcgtggcactcttcgtggtgggcatcgctggcaacctgctcaccatgctggtggtgtcgcgcttccgcgagctgcgcaccaccaccaacctctacctgtccagcatggccttctccgatctgctcatcttcctctgcatgcccctggacctcgttcgcctctggcagtaccggccctggaacttcggcgacctcctctgcaaactcttccaattcgtcagtgagagctgcacctacgccacggtgctcaccatcacagcgctgagcgtcgagcgctacttcgccatctgcttcccactccgggccaaggtggtggtcaccaaggggcgggtgaagctggtcatcttcgtcatctgggccgtggccttctgcagcgccgggcccatcttcgtgctagtcggggtggagcacgagaacggcaccgacccttgggacaccaacgagtgccgccccaccgagtttgcggtgcgctctggactgctcacggtcatggtgtgggtgtccagcatcttcttcttccttcctgtcttctgtctcacggtcctctacagtctcatcggcaggaagctgtggcggaggaggcgcggcgatgctgtcgtgggtgcctcgctcagggaccagaaccacaagcaaaccgtgaaaatgctggctgtagtggtgtttgccttcatcctctgctggctccccttccacgtagggcgatatttattttccaaatcctttgagcctggctccttggagattgctcagatcagccagtactgcaacctcgtgtcctttgtcctcttctacctcagtgctgccatcaaccccattctgtacaacatcatgtccaagaagtaccgggtggcagtgttcagacttctgggattcgaacccttctcccagagaaagctctccactctgaaagatgaaagttctcgggcctggacagaatctagtattaatacatgacctagcacattgcgagtacagtcaccgc

SEQ ID NO: 259861 - DNA, 1101 bp, Artificial Sequence
  derived and/or modified sequence
atgtggaatgccaccccatctgaggagcccggcttcaacctgaccctggccgacctggactgggatgccagccctggaaatgacagcctgggagatgagctgctgcagctgtttcctgcccccctgctggccggcgtgacagccacctgtgtggccctgtttgtggtgggcattgctggcaacctgctgaccatgctggtggtgagccgcttccgggagctgcggaccaccaccaacctgtacctgagctccatggccttcagtgacctgctgatcttcctgtgcatgcccctggacctggtgcggctgtggcagtaccggccctggaactttggagacctgctgtgcaagctgttccagtttgtgtctgagagctgcacctacgccaccgtgctgaccatcacagccctgtctgtggagcgctactttgccatctgcttccccctgcgggccaaggtggtggtgaccaagggccgggtgaagctggtgatctttgtgatctgggccgtggccttctgcagcgctggccccatctttgtgctggtgggcgtggagcatgaaaatggaacagacccctgggacaccaatgaatgtcggcccacagaatttgctgtgcgcagcggcctgctgactgtgatggtgtgggtgagcagcatcttcttcttcctgcccgtcttctgcctgactgtgctgtacagcctgattggaaggaagctgtggaggagaagaagaggagatgctgtggtgggcgccagcctgcgggaccagaaccacaagcagacagtgaagatgctggccgtggtggtgtttgccttcatcctgtgctggctgcccttccacgtgggccgctacctgttcagcaagagctttgagcccggcagcctggagatcgcccagatcagccagtactgcaacctggtgtcctttgtgctcttctacctgtctgctgccatcaaccccatcctgtacaacatcatgagcaagaagtacagagtggccgtgttccggctgctgggctttgagcccttcagccagaggaagctgagcaccctgaaggatgagagcagccgggcctggacagagagcagcatcaacacctag

SEQ ID NO: 259862 - DNA, 1101 bp, Artificial Sequence
  derived and/or modified sequence
atgtggaacgccacccccagcgaggagcccggcttcaacctgaccctcgctgacctagactgggacgccagccccggtaacgacagcctgggcgatgagctcctgcagctgttcccagcccccctattagcaggggtgaccgctacatgcgttgcacttttcgtcgtcggcatagcaggtaatctcctgacgatgttggtggtatcgagattcagagagctccgtacgacgacaaatctctatctctcgtctatggcattttccgacctgctgatatttctatgtatgcctttggatctcgttaggctctggcagtaccggccatggaatttcggggatctactttgcaagttatttcagttcgtgtcagagtcttgtacttacgctaccgtgctgactattactgcgctgtctgtagagcggtactttgcgatctgctttcccctaagggcgaaggtggtggtcaccaaaggcagggtaaagctggtgatttttgttatctgggccgttgccttctgcagtgccggaccaatttttgttctcgtaggcgttgagcacgagaatggaaccgacccatgggataccaacgagtgtagacccaccgaatttgccgtgcgcagcggcctgttgactgtgatggtgtgggttagctctatcttttttttccttccagtattttgtctgacagttctgtattcccttatagggagaaagttgtggagacgtcgccgcggagatgccgtggtgggcgcctccttgagggatcagaatcacaagcagaccgtcaaaatgttagcagtggtggtattcgcattcatcctgtgttggctccctttccacgtgggtcggtacttattttctaagagcttcgagccaggttccctagagattgctcagattagccaatattgtaacctcgtgagctttgtgttgttctatctttccgccgctattaaccccattttgtacaacattatgtccaagaagtaccgggtcgccgtgttcaggttgctgggattcgaaccattcagccaacgcaagctatctaccctcaaggacgagtccagccgagcctggaccgaatcatcaatcaatacatag

SEQ ID NO: 259863 - DNA, 1101 bp, Artificial Sequence
  derived and/or modified sequence
atgtggaacgccacgccgtctgaagaaccaggctttaatctgactctagctgacctcgattgggatgcctcacccggaaacgactcactgggtgacgaactgttacagttgttccccgctcctctacttgccggtgtcactgctacctgcgtggccctcttcgtggttggtatcgcaggaaacctcttaactatgttggtcgtgagccgatttcgagagctaaggacaaccacaaatctatacctgtcgagcatggctttctccgacctgctcattttcttgtgtatgcctttggatctggtcagactgtggcaatatcgcccttggaacttcggtgatcttctctgtaagcttttccagtttgtctcggagtcctgcacttacgccaccgtgcttacgatcaccgcgctttcagtagagcggtacttcgccatatgttttcccctgcgcgcaaaggtggttgtcactaaaggcagagtcaagctcgttatcttcgtgatctgggccgtcgccttttgctctgccggtccaattttcgtgttggtgggcgtggagcatgagaacggcactgacccgtgggatacaaatgagtgcaggcctactgaattcgctgtgcggtcagggctattgacagtcatggtctgggtttcctccatttttttttttcttccggtcttctgcctgacagtactgtattctctgattggcagaaaactgtggcggagacgaaggggcgacgccgtggtgggggctagcttgcgtgatcagaaccacaaacagacggtgaagatgttagccgtggttgttttcgcattcatattatgttggctaccttttcatgtcgggaggtacctctttagtaagagttttgaaccaggctctctggagatcgcgcagatatcacagtactgcaacctcgtgagttttgtgctgttctacctgagtgcagccatcaatccgatcctgtacaacattatgtccaaaaaataccgcgtggccgtatttcgcctgttaggatttgaaccattcagccagcgtaaactgtccaccctgaaggacgagagtagtagggcctggacagagagttctatcaatacctag

SEQ ID NO: 259864 - DNA, 1101 bp, Artificial Sequence
  derived and/or modified sequence
atgtggaacgccacccccagcgaggagcccggcttcaacctgaccctggccgacctggactgggacgccagccccggcaacgacagcctgggcgacgagctgctgcagctgttccccgcccccctgctggccggcgtgaccgccacctgcgtggccctgttcgtggtgggcatcgccggcaacctgctgaccatgctggtggtgagcagattcagagagctgagaaccaccaccaacctgtacctgagcagcatggccttcagcgacctgctgatcttcctgtgcatgcccctggacctggtgagactgtggcagtacagaccctggaacttcggcgacctgctgtgcaagctgttccagttcgtgagcgagagctgcacctacgccaccgtgctgaccatcaccgccctgagcgtggagagatacttcgccatctgcttccccctgagagccaaggtggtggtgaccaagggcagagtgaagctggtgatcttcgtgatctgggccgtggccttctgcagcgccggccccatcttcgtgctggtgggcgtggagcacgagaacggcaccgacccctgggacaccaacgagtgcagacccaccgagttcgccgtgagaagcggcctgctgaccgtgatggtgtgggtgagcagcatcttcttcttcctgcccgtgttctgcctgaccgtgctgtacagcctgatcggcagaaagctgtggagaagaagaagaggcgacgccgtggtgggcgccagcctgagagaccagaaccacaagcagaccgtgaagatgctggccgtggtggtgttcgccttcatcctgtgctggctgcccttccacgtgggcagatacctgttcagcaagagcttcgagcccggcagcctggagatcgcccagatcagccagtactgcaacctggtgagcttcgtgctgttctacctgagcgccgccatcaaccccatcctgtacaacatcatgagcaagaagtacagagtggccgtgttcagactgctgggcttcgagcccttcagccagagaaagctgagcaccctgaaggacgagagcagcagagcctggaccgagagcagcatcaacacctag

SEQ ID NO: 259865 - protein, 515 aa, Artificial Sequence
  derived and/or modified sequence
MAQLFLPLLAALVLAQAPAALADVLEGDSSEDRAFRVRIAGDAPLQGVLGGALTIPCHVHYLRPPPSRRAVLGSPRVKWTFLSRGREAEVLVARGVRVKVNEAYRFRVALPAYPASLTDVSLALSELRPNDSGIYRCEVQHGIDDSSDAVEDSQLYPIQTPREACYGDMDGFPGVRNYGVVDPDDLYDVYCYAEDLNGELFLGDPPEKLTLEEARAYCQERGAEIATTGQLYAAWDGGLDHCSPGWLADGSVRYPIVTPSQRCGGGLPGVKTLFLFPNQTGFPNKHSRFNVYCFRGSTCLLPSLRPPTQPPTQDGLEAIVTVTETLEELQLPQEATESESRGAIYSIPIMEDGGGGSSTPEDPAEAPRTLLEFETQSMVPPTGFSEEEGKALEEEEKYEDEEEKEEEEEEEEVEDEALWAWPSELSSPGPEASLPTEPAAQEESLSQAPARAVLQPGASPLPDGESEASRPPRVHGPPTETLPTPRERNLASPSPSTLVEAREVGEATGGPELSG

SEQ ID NO: 259866 - protein, 671 aa, Artificial Sequence
  derived and/or modified sequence
MAQLFLPLLAALVLAQAPAALADVLEGDSSEDRAFRVRIAGDAPLQGVLGGALTIPCHVHYLRPPPSRRAVLGSPRVKWTFLSRGREAEVLVARGVRVKVNEAYRFRVALPAYPASLTDVSLALSELRPNDSGIYRCEVQHGIDDSSDAVEVKVKGVVFLYREGSARYAFSFSGAQEACARIGAHIATPEQLYAAYLGGYEQCDAGWLSDQTVRYPIQTPREACYGDMDGFPGVRNYGVVDPDDLYDVYCYAEDLNGELFLGDPPEKLTLEEARAYCQERGAEIATTGQLYAAWDGGLDHCSPGWLADGSVRYPIVTPSQRCGGGLPGVKTLFLFPNQTGFPNKHSRFNVYCFRDSAQPSAIPEASNPASNPASDGLEAIVTVTETLEELQLPQEATESESRGAIYSIPIMEDGGGGSSTPEDPAEAPRTLLEFETQSMVPPTGFSEEEGKALEEEEKYEDEEEKEEEEEEEEVEDEALWAWPSELSSPGPEASLPTEPAAQEESLSQAPARAVLQPGASPLPDGESEASRPPRVHGPPTETLPTPRERNLASPSPSTLVEAREVGEATGGPELSGVPRGESEETGSSEGAPSLLPATRAPEGTRELEAPSEDNSGRTAPAGTSVQAQPVLPTDSASRGGVAVVPASGNSAQGSTALSILLLFFPLQLWVT

SEQ ID NO: 259867 - protein, 231 aa, Artificial Sequence
  derived and/or modified sequence
MAQLFLPLLAALVLAQAPAALADVLEGDSSGIYRCEVQHGIDDSSDAVEVKVKGVVFLYREGSARYAFSFSGAQEACARIGAHIATPEQLYAAYLGGYEQCDAGWLSDQTVRYPIQTPREACYGDMDGFPGVRNYGVVDPDDLYDVYCYAEDLNGELFLGDPPEKLTLEEARAYCQERGAEIATTGQLYAAWDGGLDHCSPGWLADGSVRYPIVTPSQRCGGGLPGVKTLF

SEQ ID NO: 259868 - protein, 145 aa, Artificial Sequence
  derived and/or modified sequence
MAQLFLPLLAALVLAQAPAALADVLEGDSSEDRAFRVRIAGDAPLQGVLGGALTIPCHVHYLRPPPSRRAVLGSPRVKWTFLSRGREAEVLVARGVRVKVNEAYRFRVALPAYPASLTDVSLALSELRPNDSGIYRCEVQHGIDD

SEQ ID NO: 259869 - protein, 213 aa, Artificial Sequence
  derived and/or modified sequence
MAQLFLPLLAALVLAQAPAALADVLEGDSSEDRAFRVRIAGDAPLQGVLGGALTIPCHVHYLRPPPSRRAVLGSPRVKWTFLSRGREAEVLVARGVRVKVNEAYRFRVALPAYPASLTDVSLALSELRPNDSGIYRCEVQHGIDDSSDAVEVKVKGVVFLYREGSARYAFSFSGAQEACARIGAHIATPEQLYAAYLGGYEQCDAGWLSDQTV

SEQ ID NO: 259870 - DNA, 1548 bp, Artificial Sequence
  derived and/or modified sequence
atggcgcagctcttcttacccctgcttgccgctctggtgctggcacaggctccagccgcactcgccgacgtcctggaaggggatagtagcgaagatcgcgcttttagagtaagaatcgctggcgatgcgcctttacagggggtgctcggaggcgcactcaccatcccatgtcatgtgcactatctcaggccacctccctccaggagagccgtgttggggtccccaagggtgaaatggacctttctctcacgcggacgggaggccgaagtgctggtagcccgaggggtacgagtaaaggttaacgaggcctatcgcttccgggtcgccctacccgcttaccccgcttccctgactgacgtgagtctcgcactgtctgagctacgccctaatgattccggtatttacaggtgcgaggtccaacacggaatagacgatagttccgatgcagtagaagattcccagctgtaccctatacagacaccacgcgaagcctgctatggggatatggacgggtttcccggtgtaaggaactacggcgtcgtggatccagacgatctctacgatgtgtactgttacgctgaggacttaaacggggaactctttttgggcgaccccccagaaaaactgacactcgaggaagcacgcgcatactgccaggagcgtggtgcagaaatcgccaccacaggccaactctacgccgcttgggatggcggactcgatcattgttcacctgggtggctggctgacggaagcgtgagatacccaatcgttactcctagccaaaggtgtggtggtggactcccgggagttaaaacactgttcctttttccaaatcagacaggttttccaaataaacacagtcgctttaacgtctactgttttagggggagtacctgccttcttcccagcttacgtcccccaacccagccgcctacacaggatggcctcgaggccattgtaactgtgaccgagactctggaggaactacaactcccacaggaggccacagagtccgagtctcgcggtgccatttactccatcccaatcatggaggacggcggaggcggatcttctacgcctgaggacccagctgaagccccaagaacactgctagaatttgagacccagtctatggtcccccctacagggttttctgaagaagaggggaaggctttggaagaggaagagaagtacgaggatgaggaggagaaggaagaagaggaagaggaagaagaggtggaagatgaggcactgtgggcttggccgtctgaactgtcttcgcccggacctgaagccagcttacccactgaacccgcagcccaagaggagtcactgagccaggcccctgctagggccgtgcttcaacctggtgcaagtccactgcctgatggtgaaagtgaggcctccagacctccccgtgtccatggaccccctactgaaacgctccccaccccgagggagcgaaatttagcgtctccaagccccagtaccttggtcgaagcacgggaagtgggtgaagctaccggtggtccagagcttagtggttag

SEQ ID NO: 259871 - DNA, 2016 bp, Artificial Sequence
  derived and/or modified sequence
atggctcagctgtttctccccctgctagcagcactggtccttgcccaggctcccgcagcccttgctgatgtgctcgagggagattcctcggaggatagggcctttcgggtgcgcattgctggggatgcccctctgcagggggttcttgggggtgccctaacgatcccctgccacgtacactaccttcgcccacctcctagccgtcgggctgtgctgggatcccccagagtgaagtggaccttcctctcgcgcggacgcgaggccgaggtgttggtagccaggggcgtcagggtgaaggtgaacgaagcgtatcgcttccgtgtggcactaccggcatatcccgcttcattgacggacgtctcacttgcacttagtgagctccgcccaaacgactccggtatatatcgttgtgaagtgcagcacggcatcgacgacagctctgacgcagttgaggtgaaggttaagggcgttgtgttcctgtaccgggaaggatctgccagatacgccttctcattctcgggggcacaggaggcttgtgcaagaatcggagcccatattgcaacacccgagcaattatacgccgcttacctcgggggttacgaacagtgcgacgccggatggctatccgaccaaaccgtgcgctatccaattcagaccccgagggaggcctgttatggggatatggatggatttcccggagtcagaaactacggggtggtggaccccgatgacctttacgacgtctattgttacgctgaggatcttaatggcgaactgtttcttggcgacccgcctgaaaagttgacactggaagaagctagggcctactgccaggagcgaggcgctgagatagcaactacaggacagttgtatgctgcttgggacgggggacttgaccactgttcccccggatggctggccgatggctctgtgcgatatcccattgtgaccccgagccagaggtgtggcggagggttgccaggagtgaaaaccttattcttgttccccaaccagaccggttttcccaacaaacacagtaggttcaatgtgtactgtttccgggactcagctcagccctccgctatccctgaggcttccaacccagcctccaatcctgctagtgacggtctggaggccatcgtgaccgtgacggaaaccctggaggagttgcagttgccccaagaagccaccgaaagcgagtcacgcggagctatctacagtattccaatcatggaggacggcggtggtggctctagcactcccgaagacccggctgaggcaccacgaacgctcctcgaatttgaaacccagagcatggtccccccaacaggcttttcagaggaggagggaaaggccttggaggaggaagagaagtacgaagatgaagaggagaaggaggaggaggaagaggaagaggaggttgaagatgaagctctgtgggcctggcctagcgaactaagcagtcccggaccagaagccagcctgcccacggaacctgccgctcaggaagagagcctgtctcaggcacccgcacgcgctgtgctccaaccaggggcatctcccctgcctgatggggagtctgaagcaagccgccctccccgtgttcatggacctccgactgagaccctacctactcctcgggagcgaaaccttgcctccccctccccaagcaccctcgtggaagcgagggaagtaggcgaagcaactggtggccctgaactttccggcgtgcctcggggagaatcggaagagacgggcagcagcgagggcgctccttccctactgcccgcaacacgagcaccggaggggactagggagctggaggcgccaagcgaggacaacagcggccgaacagctccagctggcacaagcgtccaagctcagcctgtcctgccaactgactcggcttcccgcggaggtgttgccgttgtccccgcttcaggcaacagtgctcagggaagtacggccctgagtattctgctgctttttttcccattgcaactgtgggtgacctag

SEQ ID NO: 259872 - DNA, 696 bp, Artificial Sequence
  derived and/or modified sequence
atggctcagctgtttctcccccttcttgctgccctggtcctggctcaggctccagccgcactggctgatgtgctcgaaggcgattcaagtggaatctacagatgtgaagtgcagcacggtatagacgattccagcgatgcagtggaggtgaaagtgaagggcgtggtattcctgtatagagaaggtagtgccagatacgccttcagcttctctggtgcacaggaggcttgtgcaagaatcggggctcatatcgccactcctgagcagctctacgccgcttacttgggaggttatgaacagtgcgatgccggatggcttagcgatcagaccgttagatatcccattcagacacctagggaggcctgttatggcgacatggacggcttcccgggtgtgcgcaactacggtgtagtggaccccgacgacctgtatgacgtttactgttacgctgaggacctcaatggagagttgtttctgggagaccctcctgagaagttaaccctcgaagaagcccgagcttattgccaagagagaggggctgaaatagcgactaccggccaactttacgcagcctgggatggtggtctggatcactgctccccaggttggcttgcggatggttctgtgcgttatcctatcgttaccccgtcacaacggtgcggtggcggtctccctggtgtgaaaacattattctag

SEQ ID NO: 259873 - DNA, 438 bp, Artificial Sequence
  derived and/or modified sequence
atggcgcagctattcttgccactcctggccgcactcgtcctggctcaggcccctgccgcactggccgatgtactagaaggcgattcaagcgaggaccgggcattccgggtgcggatcgctggcgacgcccctctacagggtgtgctcggcggagcactcactatcccctgccacgtgcattacttgcgccctccaccgagtcggagggccgtactgggcagtccccgtgtgaaatggacattcctgtccagaggacgtgaggctgaagtcttggtggccagaggggttagagtaaaggtaaacgaagcttatcgatttcgcgtagccctgccggcataccccgcatcccttacagacgtgagcctggcactgagtgaactgcggcctaatgattctggaatatatagatgcgaagtacagcatggaatcgatgactag

SEQ ID NO: 259874 - DNA, 642 bp, Artificial Sequence
  derived and/or modified sequence
atggcccaactgttccttccactactcgccgcactggttctggcccaagccccagctgccctcgccgacgttttagagggcgatagctcggaagaccgagcgttccgtgtgagaatcgcaggagacgcaccactgcagggagttctgggtggggcactaaccatcccttgtcacgtccactacctcagacctcccccttcgcggagggctgttctggggtccccaagggttaagtggacctttctgagcagggggcgagaagctgaagtgctcgtggccaggggtgtgcgagttaaggtgaatgaagcgtatcgttttcgggtcgccctgcccgcatatccagcgagtctgactgacgtgtcactggcattgtctgaattgcggccaaatgactctgggatctaccgctgcgaagtccaacacgggatagacgacagttcagatgctgtggaagtgaaggtaaaaggggtcgtgttcctttatcgcgaaggctcagcgaggtatgccttttcatttagtggtgcccaagaagcgtgtgcaaggatcggggcacatatagcaacccccgagcagctgtacgcggcttatctaggtggctatgagcaatgcgatgcgggatggctgtcagaccaaactgtgtag

SEQ ID NO: 259875 - DNA, 1548 bp, Artificial Sequence
  derived and/or modified sequence
atggcccagctttttctcccattgctggccgctcttgtcttagcacaggccccagctgccctggctgacgtgcttgagggcgacagctctgaggatcgcgccttcagggtgaggatcgccggcgacgccccccttcaaggcgtgttaggcggtgccctgacgattccctgccacgtgcattacctcaggcccccacctagtagacgtgcagtgctaggttctccacgggtgaagtggacgttcttgagtcgggggagagaggctgaggtactcgtggccagaggcgtgcgcgtgaaagtgaacgaagcatatcgatttagggtcgctttgcccgcatatcccgccagccttacagacgtctcattggcgcttagcgagttacggcccaacgattcaggcatctacaggtgcgaggtgcagcacggcattgatgactcatccgatgcagttgaagacagccagctctacccaatccagacacctcgcgaagcctgctacggagacatggacggatttcctggcgtacgcaattacggcgtggtcgatcccgatgatttgtacgacgtgtactgttatgctgaggacttgaatggtgagttgttcttaggtgaccctcccgagaaactgaccctggaagaggcccgagcatattgtcaggaaagaggagctgagatcgcgacaaccggacagctctacgcggcctgggatgggggtctggatcactgcagtcctggttggctcgctgatggctcagttcgataccccatcgtcacaccaagccagaggtgcggcggcggtctgcctggggtcaagactctgtttctgttccccaaccagactggatttcctaacaaacactctcggttcaatgtgtattgcttcaggggctccacatgcttacttccatcgctgcgacctccaactcagcctccaactcaagatggtctcgaggcaattgtaactgtcacagaaaccttggaagagctgcagctgcctcaggaggcaactgagagcgagagtagaggcgccatctatagtatcccaataatggaagacggcgggggcggcagctccacccctgaggacccagccgaggcacctcgtacattgttggaattcgaaacccaaagtatggtgccgccaacaggattttcagaggaggaaggaaaggcacttgaagaagaggagaaatatgaggacgaggaagagaaagaggaggaagaagaagaagaagaagtcgaagatgaggctctctgggcctggccatcagaactgtcaagtcccggccccgaggcttcactcccaactgagcctgccgcccaggaggagtctctgtcacaggcccctgcccgggctgttctccagcctggggcgtcccccttgcctgatggggagtccgaagcctcccgtccgccgagagttcatggaccgccgacagagaccctcccgaccccgcgcgaacggaatttggcttccccctcaccaagcacactggtcgaggcacgcgaagtgggggaggccactggcggtccggagctcagtggctag

SEQ ID NO: 259876 - DNA, 844 bp, Artificial Sequence
  derived and/or modified sequence
cctgcggccccagcctctcctcacgctcgcgcagtctccgccgcagtctcagctgcagctgcaggactgagccgtgcacccggaggagacccccggaggaggcgacaaacttcgcagtgccgcgacccaaccccagccctggcctgcagcatggcccagctgttcctgcccctgctggcagccctggtcctggcccaggctcctgcagctttagcagatgttctggaaggagacagctcaggtatctatcgctgtgaggtccagcacggcatcgatgacagcagcgacgctgtggaggtcaaggtcaaaggggtcgtctttctctaccgagagggctctgcccgctatgctttctccttttctggggcccaggaggcctgtgcccgcattggagcccacatcgccaccccggagcagctctatgccgcctaccttgggggctatgagcaatgtgatgctggctggctgtcggatcagaccgtgaggtatcccatccagaccccacgagaggcctgttacggagacatggatggcttccccggggtccggaactatggtgtggtggacccggatgacctctatgatgtgtactgttatgctgaagacctaaatggagaactgttcctgggtgaccctccagagaagctgacattggaggaagcacgggcgtactgccaggagcggggtgcagagattgccaccacgggccaactgtatgcagcctgggatggtggcctggaccactgcagcccagggtggctagctgatggcagtgtgcgctaccccatcgtcacacccagccagcgctgtggtgggggcttgcctggtgtcaagactctcttcc

SEQ ID NO: 259877 - DNA, 2016 bp, Artificial Sequence
  derived and/or modified sequence
atggctcagctgttcctgcccttgctcgccgcgctggtgctcgcacaggcaccagcagcactcgccgatgtactggaaggagattcttccgaggaccgtgcattccgagtgcgcattgcaggggacgcaccgctgcagggcgtcctcggcggcgcactgactataccttgccacgttcactatttgcgccccccgccaagccgaagggctgtgctgggttccccacgagtgaaatggactttcttaagccgcgggcgggaagcggaggtcttggtggcacggggagttcgagtgaaagttaatgaagcctatcgctttagagtggcgttgcctgcataccctgcgtccctgactgacgtctctctggccctttcagaactgcgacctaatgacagtggcatctaccgttgcgaagtccagcacggtatcgatgactcttctgacgctgttgaagtgaaggttaaaggagtggtattcttgtatagagagggatcagctcggtacgcattctccttttctggggctcaggaggcatgcgccaggataggagcccatatcgccactccagaacagctgtacgccgcttatctgggtggatacgagcagtgcgacgctgggtggctatctgaccagactgtccggtacccgatccaaacccccagggaagcatgttacggtgacatggacggatttcccggggtgcgcaactacggagtagtggatccagacgacctttacgacgtgtactgttatgccgaggacctaaatggtgagttgtttctgggggacccgccagaaaagctgaccctggaggaggcacgcgcctattgccaggagagaggagctgaaatcgcaaccacgggacagctgtacgccgcctgggacggcgggctggatcattgcagccctggctggctggccgatgggtctgttagataccccatcgtcactccatcacagaggtgtgggggaggtcttcccggagtgaaaaccctcttcctgttcccaaatcaaacaggcttccccaacaaacactcaagatttaacgtgtactgttttcgtgactcagcgcagccttcagccatccccgaagcaagcaaccccgctagtaacccagcaagcgatggactggaagccatcgtgaccgtgacggagaccctggaggagctccagctgccccaggaagctaccgagtcagagagtcgtggcgcgatttactctatccctattatggaagacggaggaggtggaagctctacacccgaagaccccgccgaggccccacgtaccctccttgaatttgagacccagtcaatggttccccctacgggcttctctgaggaagaaggcaaagctctcgaggaagaggaaaaatatgaagacgaagaggagaaagaggaagaagaggaagaggaggaagtcgaagacgaggccttatgggcctggcctagtgaactttcctcaccgggacccgaagcgagcctacctacagaacccgcagcgcaggaggaatctctgtctcaagcacccgcaagggctgtgttacaacctggtgcctcacccctcccagacggagaaagcgaggcctctagacctccaagggtgcacggccccccaacagaaacactgccaaccccgagagagagaaatttggcctccccatctcctagtactctcgtagaagccagggaagtcggcgaggctacaggtgggccagagctctccggagtcccgagaggcgaaagtgaagagaccggaagctctgagggagccccgtcactcctgcccgcaaccagggccccagaaggaacgagagaactggaagcccctagcgaggacaactccggccgtaccgcccctgccggcacctccgtgcaggctcagcccgtcctgcctacagattcagcctccaggggaggggtggccgtcgtgcccgctagcgggaattctgcccaaggttctaccgccctgtcaatattattactattttttcctttacagctctgggttacctag

SEQ ID NO: 259878 - DNA, 696 bp, Artificial Sequence
  derived and/or modified sequence
atggcccaattatttcttccgctgctggctgctctggtcttggcacaggctcctgctgctcttgcagacgtgctggagggagattcatcaggtatctacagatgtgaagtccagcatggcatagacgattcaagcgacgcagtagaggtaaaggtgaaaggcgtcgtctttttataccgcgagggctcagctcgctacgccttcagtttttcgggtgcccaggaggcgtgcgcacgaatcggcgcccacatcgcaacgcccgaacagctctatgcagcttaccttgggggctatgaacaatgcgacgctggctggctctccgaccaaaccgttaggtaccccattcagactcctagagaagcctgttacggagacatggatggctttccaggcgtgcggaactacggagtcgtagatcccgacgatctctatgatgtgtactgctatgctgaagacctcaatggtgagttattcttgggtgatcccccagagaaattgaccctggaggaggcccgtgcctactgtcaggagaggggagccgaaattgcaactacaggacaactttacgctgcatgggacgggggtctcgaccactgctctccaggatggctcgctgatgggtccgtacggtacccaattgtcaccccaagccaacgctgtggaggcgggctcccaggagtaaagacgctgttctag

SEQ ID NO: 259879 - DNA, 438 bp, Artificial Sequence
  derived and/or modified sequence
atggcgcaactgttcctaccactcctagccgctctggttttggcccaggctcccgccgccctggcagacgttctagaaggggacagtagtgaagatcgggccttcagggttagaattgccggtgacgccccattgcagggcgtgctgggtggtgcactgacaatcccgtgccacgtacactaccttaggccacccccaagccgaagggccgtactcggatctcctcgggtcaagtggacattcctttctcgtgggagagaggccgaagtccttgtagccagaggcgtgcgcgtcaaagtgaatgaggcctaccgatttcgcgtggccctcccggcttatccagcatccctgaccgatgtcagcctggcacttagcgaactacgccctaacgatagcgggatctatagatgtgaggtccagcatggaatcgacgattag

SEQ ID NO: 259880 - DNA, 642 bp, Artificial Sequence
  derived and/or modified sequence
atggctcagctgttcttgccactacttgccgctcttgtgcttgctcaggcccctgccgccctagccgatgtcttagaaggggacagttcggaggacagggcttttcgagttagaatcgcgggagatgccccgcttcagggcgttctgggtggtgctctcaccattccatgtcatgtgcattacttgcgaccccccccatcccgacgagcagtgctcggctcaccccgggtcaaatggaccttcctgtctcgcggcagagaggccgaggtgttggtggcccgtggagtgagagtcaaagttaacgaagcgtatcggtttagggtggccttgccagcttacccagcatcactcaccgacgttagtctcgccctcagtgagctcaggcctaacgatagtggtatttatcgatgtgaggtgcaacacgggatcgatgattcttcagacgcagtagaggtcaaggttaagggggttgtttttctgtaccgcgagggctctgcacgctacgccttctcattctcaggcgctcaggaagcatgcgcacgcatcggagctcacatcgccactcccgaacaactctatgccgcctacctgggcggttacgaacagtgtgacgccggatggttaagcgaccagacagtatag

SEQ ID NO: 259881 - DNA, 600 bp, Artificial Sequence
  derived and/or modified sequence
ggctcccagcaacgcctgcattttgcacattggtttgcatgactgtctccgccgcagtctcagctgcagctgcaggactgagccgtgcacccggaggagacccccggaggaggcgacaaacttcgcagtgccgcgacccaaccccagccctgggtagcctgcagcatggcccagctgttcctgcccctgctggcagccctggtcctggcccaggctcctgcagctttagcagatgttctggaaggagacagctcagaggaccgcgcttttcgcgtgcgcatcgcgggcgacgcgccactgcagggcgtgctcggcggcgccctcaccatcccttgccacgtccactacctgcggccaccgccgagccgccgggctgtgctgggctctccgcgggtcaagtggactttcctgtcccggggccgggaggcagaggtgctggtggcgcggggagtgcgcgtcaaggtgaacgaggcctaccggttccgcgtggcactgcctgcgtacccagcgtcgctcaccgacgtctccctggcgctgagcgagctgcgccccaacgactcaggtatctatcgctgtgaggtccagcacggcatcgatgac

SEQ ID NO: 259882 - DNA, 1548 bp, Artificial Sequence
  derived and/or modified sequence
atggcccagcttttcttgcctcttctggcagcactggtgctggcccaggcccccgccgcattggccgatgttctggagggagattcaagtgaggacagagcctttcgcgtgaggattgcaggggacgcacctctacagggcgtccttggaggagcactgaccattccatgccacgttcattacctacgacccccacctagcaggagagcggtacttggcagcccacgggtgaaatggacttttctgagccgtggtagggaagccgaggttttggtcgcccgcggagtcagagtgaaggtgaacgaagcatatcgatttagggtcgctttgcccgcatatcccgccagccttacagacgtctcattggcgcttagcgagttacggcccaacgattcaggcatctacaggtgcgaggtgcagcacggcattgatgactcatccgatgcagttgaagacagccagctctacccaatccagacacctcgcgaagcctgctacggagacatggacggatttcctggcgtacgcaattacggcgtggtcgatcccgatgatttgtacgacgtgtactgttatgctgaggacttgaatggtgagttgttcctgggcgaccccccagagaagctcacactcgaggaagcaagagcttattgccaggagcgtggcgctgaaatcgccactaccggacaactgtatgctgcttgggacgggggccttgatcattgttcccccggttggttggccgacggaagtgtcagatacccaatcgtcacaccgtcacagcgatgcggcggcggtctacccggagtcaagactttgtttctgttcccaaaccagaccgggttccccaacaagcactcccgattcaacgtctactgctttcgtggtagtacatgcctgttgcccagcctgcgaccccccacccagcccccaactcaagacggactcgaggcaatcgttacagtgaccgagaccttggaggagttgcaattgccgcaggaggctacagaatccgaatctcggggagctatctattcaatacccattatggaggatggcggagggggatcaagtacaccagaggatcctgccgaggccccgagaacgctgcttgaatttgagacgcaatccatggtgccccctacaggctttagtgaagaggaagggaaggctctggaggaggaggaaaaatacgaggacgaggaagaaaaagaggaagaagaagaagaggaggaggtagaggatgaggctctgtgggcctggccttctgaactgagtagtccgggtccagaagcttccctccccactgagccagctgcccaagaggagtctctctcacaggcccccgctagagcagtgctacaacccggcgcgtctcctttgccagatggagaatctgaggctagtagaccaccgagggttcatggaccaccaaccgagacgctcccaacaccccgggaacgaaacctagctagtccttccccaagtaccttggttgaagccagggaggttggggaggccaccggaggaccagagttgagcggatag

SEQ ID NO: 259883 - DNA, 2016 bp, Artificial Sequence
  derived and/or modified sequence
atggcacaattgttcctccccctgttagctgccctggtcttagcccaggcgcccgcagccctcgccgacgttcttgaaggggattccagtgaagacagggcatttcgcgtgcggattgccggtgatgcacccctacagggagtcctgggtggggcactcaccataccatgccacgttcactatctgaggccgccgccgtctcgcagggccgtcttgggtagcccacgcgtcaaatggaccttcttgtcccgaggaagagaggcagaggtgttagtagcgagaggtgtaagagtcaaagtcaatgaggcgtataggtttcgagtcgcccttcctgcatatcccgcttccctgactgacgttagtctagccctgagtgaattgaggccgaacgattctggaatttacagatgcgaagtacaacacggcatagacgatagttccgacgcagtggaggttaaggtaaaaggtgtcgtattcctgtatagagaaggatctgcccgctacgccttctcatttagcggcgcccaagaggcttgtgctagaattggggcccatatagccaccccagaacagctttacgcagcctatttgggcggctatgagcagtgtgatgctggttggcttagcgaccagacagtgagataccccatccagacacccagagaagcatgttacggagacatggatgggtttcccggagtgcggaactatggcgtggtcgatcctgatgacctctatgacgtctattgctacgctgaggatctcaacggggagctttttttaggcgaccctccggaaaaacttacactcgaagaagcacgtgcatattgccaggagaggggagctgaaatcgccacaactggccaactttacgccgcctgggatggaggactagatcactgctccccaggatggctggccgacggcagtgtgcgctacccaatagtaacgccatcccagcgttgcggcggaggactcccaggcgtgaagactctctttttatttcctaaccagacaggattcccaaataaacacagccgatttaacgtgtactgtttccgagattcagcacaaccaagcgcgatccctgaagcttccaatcctgcaagcaatccagcttccgacggcctcgaggcgatcgtgacagtcaccgagacccttgaagaactccagcttccacaggaagcgaccgagagtgagagtcgtggcgcgatttactctatccctattatggaagacggaggaggtggaagctctacacccgaagaccccgccgaggccccacgtaccctccttgaatttgagacccagtcaatggttccccctacgggcttctctgaggaagaaggcaaagctctcgaggaagaggaaaaatatgaagacgaagaggagaaagaggaagaagaggaagaggaggaagtcgaagacgaggccttatgggcctggcctagtgaactttcctcaccgggacccgaagcgagcctacctacagaacccgcagcccaggaggagagtttgagccaggcccccgcccgcgctgtccttcaaccaggcgcatccccattacccgacggggagtcagaagcgtcccgaccacctagggtgcacgggcctcctactgagacactgccaacgcctagagagcgtaacttggcctctccatcccctagtacattagtggaagcgagggaagtgggagaagctaccggtggtcccgaactgtccggcgtacctcgtggggaatccgaagagaccggaagctcagaaggagcaccaagcttgctgccagccacacgagcacccgaaggaactagggagttggaggccccatccgaggataattccggccgaactgccccagctggcaccagcgtacaggctcagcccgtcctgccaacggatagcgcgtctcgtggtggagtcgctgtggttccagcttccggcaatagcgctcagggaagcaccgcattgtctatactgttattgttcttccccttacagttgtgggtgacttag

SEQ ID NO: 259884 - DNA, 969 bp, Artificial Sequence
  derived and/or modified sequence
gctctcgccgctgctgccggagccgaagcagagaaggcagcgggtcccgtgaccgtcccgagagccccgcgctcccgaccagggggcgggggcggccccggggagggcggggcaggggcggggggaagaaagggggttttgtgctgcgccgggagggccggcgccctcttccgaatgtcctgcggccccagcctctcctcacgctcgcgcagtctccgccgcagtctcagctgcagctgcaggactgagccgtgcacccggaggagacccccggaggaggcgacaaacttcgcagtgccgcgacccaaccccagccctggcctgcagcatggcccagctgttcctgcccctgctggcagccctggtcctggcccaggctcctgcagctttagcagatgttctggaaggagacagctcagaggaccgcgcttttcgcgtgcgcatcgcgggcgacgcgccactgcagggcgtgctcggcggcgccctcaccatcccttgccacgtccactacctgcggccaccgccgagccgccgggctgtgctgggctctccgcgggtcaagtggactttcctgtcccggggccgggaggcagaggtgctggtggcgcggggagtgcgcgtcaaggtgaacgaggcctaccggttccgcgtggcactgcctgcgtacccagcgtcgctcaccgacgtctccctggcgctgagcgagctgcgccccaacgactcaggtatctatcgctgtgaggtccagcacggcatcgatgacagcagcgacgctgtggaggtcaaggtcaaaggggtcgtctttctctaccgagagggctctgcccgctatgctttctccttttctggggcccaggaggcctgtgcccgcattggagcccacatcgccaccccggagcagctctatgccgcctaccttgggggctatgagcaatgtgatgctggctggctgtcggatcagaccgtgag

SEQ ID NO: 259885 - DNA, 696 bp, Artificial Sequence
  derived and/or modified sequence
atggcacagctgttcctgcccttgctggccgccctcgtgttggctcaggcccccgccgcacttgcggacgtcctggaaggcgacagttcagggatctatagatgcgaggtacaacatggcattgacgactcatctgacgccgtggaagttaaagtgaagggagttgtgttcctctacagagaagggtccgcacgctacgcttttagtttcagcggagctcaggaagcctgtgctagaattggtgctcacatcgccacaccagaacaactttacgccgcttatcttggaggctatgagcagtgtgatgctggctggctgtcggatcagacggtgcgatatccaatccagaccccgagagaagcctgttatggcgatatggatggtttccctggcgtgaggaattacggtgtagtagatccagacgatttatacgacgtgtactgttatgctgaagatctgaacggtgaactgtttctgggcgacccccccgagaaacttactctggaagaggcccgagcctattgtcaagaacgaggggctgagattgcaactacgggacagctttacgccgcctgggatggaggactagaccattgtagccccggatggctcgcagacggctccgtaagataccccattgtcacccccagccaaagatgcggtggaggattgccaggcgtaaaaacgctgttttag

SEQ ID NO: 259886 - DNA, 438 bp, Artificial Sequence
  derived and/or modified sequence
atggctcagctgttcctcccactgctcgcagccttagtgctcgcacaggctcctgctgcacttgctgacgtgttagaaggggattcttcagaggatcgcgctttccgtgttcgaatcgctggcgatgcacctctacagggagtgctcggaggcgcgctcaccattccctgccatgtccactacttgcgaccacctccttcaaggagggccgttctagggtcacccagggtcaagtggactttcctgtctcgtggccgagaagccgaagttctggtagctcgaggcgtacgtgtcaaagtgaatgaagcctacagattccgcgttgctcttccagcctatcccgcatccctgactgacgtttccctggcccttagcgaacttcgacccaatgacagtggcatttatagatgcgaagtgcagcatggtattgacgattag

SEQ ID NO: 259887 - DNA, 642 bp, Artificial Sequence
  derived and/or modified sequence
atggctcaactcttcctgcctctccttgcagccttggtgctggcccaagcaccagccgctctcgctgatgtgctggaaggcgactcaagtgaagaccgggcattccgcgtgagaatcgccggtgacgctcctctgcagggtgtgctagggggggcgttaacaattccctgccatgtgcactatcttagaccccctccttctcgccgagctgttcttggatcaccacgcgtgaaatggacatttctctcccgcggacgtgaggccgaggtgctggtggctagaggcgtgcgcgtgaaagtaaacgaagcgtatcgatttagagtggccttgcccgcttaccctgcaagtcttaccgatgtttcactggctttgtccgagctccggcccaatgactctggtatctaccggtgcgaggtacagcatggaattgacgatagcagcgatgccgtggaggtgaaagttaaaggggttgtgtttctctatcgcgaagggagtgctcggtacgcctttagtttttccggggcacaggaagcatgtgctagaattggcgctcatatcgccacaccagagcagctctacgcagcatacctgggcggatatgaacaatgcgacgctggctggctttctgatcaaaccgtttag

SEQ ID NO: 259888 - DNA, 1548 bp, Artificial Sequence
  derived and/or modified sequence
atggcccagctgttcctgcccctgctggccgccctggtgctggcccaggcccccgccgccctggccgacgtgctggagggcgacagcagcgaggacagagccttcagagtgagaatcgccggcgacgcccccctgcagggcgtgctgggcggcgccctgaccatcccctgccacgtgcactacctgagacccccccccagcagaagagccgtgctgggcagccccagagtgaagtggaccttcctgagcagaggcagagaggccgaggtgctggtggccagaggcgtgagagtgaaggtgaacgaggcctacagattcagagtggccctgcccgcctaccccgccagcctgaccgacgtgagcctggccctgagcgagctgagacccaacgacagcggcatctacagatgcgaggtgcagcacggcatcgacgacagcagcgacgccgtggaggacagccagctgtaccccatccagacccccagagaggcctgctacggcgacatggacggcttccccggcgtgagaaactacggcgtggtggaccccgacgacctgtacgacgtgtactgctacgccgaggacctgaacggcgagctgttcctgggcgacccccccgagaagctgaccctggaggaggccagagcctactgccaggagagaggcgccgagatcgccaccaccggccagctgtacgccgcctgggacggcggcctggaccactgcagccccggctggctggccgacggcagcgtgagataccccatcgtgacccccagccagagatgcggcggcggcctgcccggcgtgaagaccctgttcctgttccccaaccagaccggcttccccaacaagcacagcagattcaacgtgtactgcttcagaggcagcacctgcctgctgcccagcctgagaccccccacccagccccccacccaggacggcctggaggccatcgtgaccgtgaccgagaccctggaggagctgcagctgccccaggaggccaccgagagcgagagcagaggcgccatctacagcatccccatcatggaggacggcggcggcggcagcagcacccccgaggaccccgccgaggcccccagaaccctgctggagttcgagacccagagcatggtgccccccaccggcttcagcgaggaggagggcaaggccctggaggaggaggagaagtacgaggacgaggaggagaaggaggaggaggaggaggaggaggaggtggaggacgaggccctgtgggcctggcccagcgagctgagcagccccggccccgaggccagcctgcccaccgagcccgccgcccaggaggagagcctgagccaggcccccgccagagccgtgctgcagcccggcgccagccccctgcccgacggcgagagcgaggccagcagaccccccagagtgcacggcccccccaccgagaccctgcccacccccagagagagaaacctggccagccccagccccagcaccctggtggaggccagagaggtgggcgaggccaccggcggccccgagctgagcggctag

SEQ ID NO: 259889 - DNA, 2016 bp, Artificial Sequence
  derived and/or modified sequence
atggcccagctgttcctgcccctgctggccgccctggtgctggcccaggcccccgccgccctggccgacgtgctggagggcgacagcagcgaggacagagccttcagagtgagaatcgccggcgacgcccccctgcagggcgtgctgggcggcgccctgaccatcccctgccacgtgcactacctgagacccccccccagcagaagagccgtgctgggcagccccagagtgaagtggaccttcctgagcagaggcagagaggccgaggtgctggtggccagaggcgtgagagtgaaggtgaacgaggcctacagattcagagtggccctgcccgcctaccccgccagcctgaccgacgtgagcctggccctgagcgagctgagacccaacgacagcggcatctacagatgcgaggtgcagcacggcatcgacgacagcagcgacgccgtggaggtgaaggtgaagggcgtggtgttcctgtacagagagggcagcgccagatacgccttcagcttcagcggcgcccaggaggcctgcgccagaatcggcgcccacatcgccacccccgagcagctgtacgccgcctacctgggcggctacgagcagtgcgacgccggctggctgagcgaccagaccgtgagataccccatccagacccccagagaggcctgctacggcgacatggacggcttccccggcgtgagaaactacggcgtggtggaccccgacgacctgtacgacgtgtactgctacgccgaggacctgaacggcgagctgttcctgggcgacccccccgagaagctgaccctggaggaggccagagcctactgccaggagagaggcgccgagatcgccaccaccggccagctgtacgccgcctgggacggcggcctggaccactgcagccccggctggctggccgacggcagcgtgagataccccatcgtgacccccagccagagatgcggcggcggcctgcccggcgtgaagaccctgttcctgttccccaaccagaccggcttccccaacaagcacagcagattcaacgtgtactgcttcagagacagcgcccagcccagcgccatccccgaggccagcaaccccgccagcaaccccgccagcgacggcctggaggccatcgtgaccgtgaccgagaccctggaggagctgcagctgccccaggaggccaccgagagcgagagcagaggcgccatctacagcatccccatcatggaggacggcggcggcggcagcagcacccccgaggaccccgccgaggcccccagaaccctgctggagttcgagacccagagcatggtgccccccaccggcttcagcgaggaggagggcaaggccctggaggaggaggagaagtacgaggacgaggaggagaaggaggaggaggaggaggaggaggaggtggaggacgaggccctgtgggcctggcccagcgagctgagcagccccggccccgaggccagcctgcccaccgagcccgccgcccaggaggagagcctgagccaggcccccgccagagccgtgctgcagcccggcgccagccccctgcccgacggcgagagcgaggccagcagaccccccagagtgcacggcccccccaccgagaccctgcccacccccagagagagaaacctggccagccccagccccagcaccctggtggaggccagagaggtgggcgaggccaccggcggccccgagctgagcggcgtgcccagaggcgagagcgaggagaccggcagcagcgagggcgcccccagcctgctgcccgccaccagagcccccgagggcaccagagagctggaggcccccagcgaggacaacagcggcagaaccgcccccgccggcaccagcgtgcaggcccagcccgtgctgcccaccgacagcgccagcagaggcggcgtggccgtggtgcccgccagcggcaacagcgcccagggcagcaccgccctgagcatcctgctgctgttcttccccctgcagctgtgggtgacctag

SEQ ID NO: 259890 - DNA, 696 bp, Artificial Sequence
  derived and/or modified sequence
atggcccagctgttcctgcccctgctggccgccctggtgctggcccaggcccccgccgccctggccgacgtgctggagggcgacagcagcggcatctacagatgcgaggtgcagcacggcatcgacgacagcagcgacgccgtggaggtgaaggtgaagggcgtggtgttcctgtacagagagggcagcgccagatacgccttcagcttcagcggcgcccaggaggcctgcgccagaatcggcgcccacatcgccacccccgagcagctgtacgccgcctacctgggcggctacgagcagtgcgacgccggctggctgagcgaccagaccgtgagataccccatccagacccccagagaggcctgctacggcgacatggacggcttccccggcgtgagaaactacggcgtggtggaccccgacgacctgtacgacgtgtactgctacgccgaggacctgaacggcgagctgttcctgggcgacccccccgagaagctgaccctggaggaggccagagcctactgccaggagagaggcgccgagatcgccaccaccggccagctgtacgccgcctgggacggcggcctggaccactgcagccccggctggctggccgacggcagcgtgagataccccatcgtgacccccagccagagatgcggcggcggcctgcccggcgtgaagaccctgttctag

SEQ ID NO: 259891 - DNA, 438 bp, Artificial Sequence
  derived and/or modified sequence
atggcccagctgttcctgcccctgctggccgccctggtgctggcccaggcccccgccgccctggccgacgtgctggagggcgacagcagcgaggacagagccttcagagtgagaatcgccggcgacgcccccctgcagggcgtgctgggcggcgccctgaccatcccctgccacgtgcactacctgagacccccccccagcagaagagccgtgctgggcagccccagagtgaagtggaccttcctgagcagaggcagagaggccgaggtgctggtggccagaggcgtgagagtgaaggtgaacgaggcctacagattcagagtggccctgcccgcctaccccgccagcctgaccgacgtgagcctggccctgagcgagctgagacccaacgacagcggcatctacagatgcgaggtgcagcacggcatcgacgactag

SEQ ID NO: 259892 - DNA, 642 bp, Artificial Sequence
  derived and/or modified sequence
atggcccagctgttcctgcccctgctggccgccctggtgctggcccaggcccccgccgccctggccgacgtgctggagggcgacagcagcgaggacagagccttcagagtgagaatcgccggcgacgcccccctgcagggcgtgctgggcggcgccctgaccatcccctgccacgtgcactacctgagacccccccccagcagaagagccgtgctgggcagccccagagtgaagtggaccttcctgagcagaggcagagaggccgaggtgctggtggccagaggcgtgagagtgaaggtgaacgaggcctacagattcagagtggccctgcccgcctaccccgccagcctgaccgacgtgagcctggccctgagcgagctgagacccaacgacagcggcatctacagatgcgaggtgcagcacggcatcgacgacagcagcgacgccgtggaggtgaaggtgaagggcgtggtgttcctgtacagagagggcagcgccagatacgccttcagcttcagcggcgcccaggaggcctgcgccagaatcggcgcccacatcgccacccccgagcagctgtacgccgcctacctgggcggctacgagcagtgcgacgccggctggctgagcgaccagaccgtgtag

SEQ ID NO: 259893 - DNA, 1548 bp, Artificial Sequence
  derived and/or modified sequence
atggcccagttatttctgcctctactcgccgcgctggtccttgctcaggcaccagctgcacttgcagacgttctggagggggactcttctgaggatagagcctttcgagttaggatcgctggtgatgccccgctacagggcgttcttggaggagccctgaccataccctgtcacgtgcactatttgaggccccccccctctcgcagagctgtcttaggaagtccccgggtcaagtggacgttcctcagtagagggcgggaggccgaggtactagttgccaggggggtgagagtgaaagttaacgaagcgtacaggttccgcgtggcattacccgcctatcccgcatctctcacagacgtctccctggcactttctgagctgcgccctaacgatagcgggatttacagatgtgaagttcagcatggcatcgacgattcatccgacgctgtggaagacagtcaactataccctatccagactccaagggaagcttgttatggggacatggatggctttcccggagtgaggaactacggggtggtggatccggacgacctgtatgatgtgtattgctacgctgaggatcttaatggggagttgttcctcggagatccgcccgaaaaactgaccctggaggaggcccgtgcttactgtcaagagcgtggtgccgaaatcgctaccactgggcagctctacgccgcgtgggacggcggcctggaccactgctcacctgggtggctggcagacggatctgtaaggtaccctatagtgaccccaagccagcggtgcggcggcggcctgccaggggtgaaaaccctgtttctgtttccaaatcagaccggtttccccaataagcacagccgtttcaacgtttactgcttccgcgggtcaacctgcttactgccctcactgcgccccccaacgcaaccacctacacaggacggcttggaggccatagttaccgttacagaaaccctggaagagctccaactgccgcaagaagccacagaatccgaatcacggggggccatatactccatcccaatcatggaagacggaggagggggaagctccacacctgaagatcccgccgaggcacccagaacgctcttggaatttgagactcaatccatggtcccacccaccgggttcagtgaggaagaaggcaaggccttggaagaagaggagaagtacgaggacgaagaggagaaagaagaggaggaggaagaggaggaggtcgaggacgaagccctgtgggcatggccttcagagctctcctcacctggtcctgaggcctctctgcccaccgaaccagcagctcaggaagagagcctctcacaagcgccagcgagagcggtgcttcaacctggagccagccccctgcctgacggcgagtccgaggcttcacgtccaccccgcgtacacgggcctcccactgagaccctccctacgccaagggaacgaaacctcgccagtccttcaccctctacactcgtggaggcaagggaagtgggcgaagcgacgggcggtcctgaactttcaggatag

SEQ ID NO: 259894 - DNA, 2016 bp, Artificial Sequence
  derived and/or modified sequence
atggctcagttgtttctgcccctcctagccgcactggttttggcccaggccccggccgcgctggcggatgtactggagggcgattcttcagaagacagagcctttcgggtccggatagctggtgatgccccacttcagggcgtgctcgggggagccttgaccatcccctgccatgttcattatctgcggccccctccatcccgccgggctgtgctaggttcccctcgcgtgaagtggacatttctaagccgcggtagggaggcggaagtgcttgttgcaagaggagtgcgggtcaaggttaacgaggcatatagatttagagttgccctccctgcttaccccgcctctctgactgatgtttctctcgctctgtctgagctgcggcctaacgatagtggtatctatcgatgcgaggttcagcatgggatcgacgacagcagcgatgccgtggaggtaaaagtgaagggcgtggtgtttctgtacagagaaggatctgcgaggtatgcatttagcttttccggcgcccaggaggcatgcgctcggataggcgcacatatagctacaccagaacaactttacgctgcatacctcggcggttatgagcaatgcgacgccggatggctgtcagaccaaacggttcgctacccaatacagaccccacgcgaagcatgttatggcgatatggatggctttcccggcgtgaggaactatggcgtagtcgaccccgatgatctctatgacgtctattgctacgctgaggatctgaacggagagctgtttctgggtgatccgcccgagaaactgacattggaggaggctagggcttactgtcaagagcgcggcgccgagattgcaacaacaggacaactttacgcggcttgggatggcggcttggaccactgttctccgggttggctggctgacggaagtgttaggtacccaattgtcacaccctcacagaggtgtggaggcggcttgccaggcgtgaagaccttatttctgtttccaaatcagactggatttcccaacaaacacagtcggttcaacgtgtactgtttcagagacagtgcacagccttccgcaattcctgaagctagcaaccctgcttcaaaccccgccagcgacgggctagaagcgattgttacggttacagagacactggaggaactgcagctgcctcaggaggcgaccgagtcagaatctaggggcgcgatttatagcatccccattatggaagatggcgggggtggctcttccactccggaagaccctgctgaagcacctcgaacactgctggagttcgagacacagtctatggttccacctaccgggttttcggaagaggagggtaaggccctggaagaagaggaaaaatatgaagatgaggaagagaaggaggaggaggaggaagaggaagaggtggaggacgaagccctgtgggcctggccatccgagctgagctcacctgggccagaggccagcttacctacggagccagcggcacaggaggagtccctgagccaagcaccggcaagggctgtacttcaaccaggcgcatcccccctaccggacggcgaaagtgaagcctcccgccccccccgtgtgcacggaccccctaccgagacactccctacgccacgggagcgaaacctcgcatccccctctccctccactttggtagaagctcgcgaagtcggggaggcaaccggggggcctgagcttagcggagtgccgcgcggggagtctgaggagaccgggagcagcgagggggcaccaagtttgcttcccgccactagagcccctgaaggcacgcgtgaacttgaagctcctagtgaggacaacagtggtagaactgcacccgcaggcacgtccgtccaagcccagcccgtgctgcctacagactctgctagccgtggtggggtggctgtggtaccggcctccgggaacagcgctcaaggctcaactgcactgtcaatcctgctgctgttctttccactgcaattgtgggtcacgtag

SEQ ID NO: 259895 - DNA, 696 bp, Artificial Sequence
  derived and/or modified sequence
atggcccaattattcctgccactgctggccgcactggtgctcgcccaagcgccagccgctctggctgacgtcctcgaaggagacagctctggtatttaccgatgcgaagtccagcacggaatcgacgactcttccgacgccgtagaagttaaagtgaagggggtggtctttctgtatcgcgaaggctcggcgagatatgcgttcagcttcagcggagctcaagaagcgtgtgctagaatcggcgcacatatcgccacccctgaacagctgtatgccgcttatctgggtggttacgagcagtgtgacgccgggtggttgtcagatcagaccgtacgttaccccatacagactccaagggaagcctgttatggcgacatggacgggttcccaggagtccggaactacggcgttgttgatcccgacgacctttacgatgtgtactgttatgctgaagacttgaatggtgagctttttctcggcgaccctcctgagaagctgacgctagaggaagcacgcgcctactgccaagaaagaggtgctgaaatcgctacgactggacagctttatgccgcctgggacggaggcctggaccactgttccccaggatggctggcggacggatctgtgagatacccaatcgtaaccccttctcagagatgcggaggcggcttaccaggtgtcaaaaccctgttctag

SEQ ID NO: 259896 - DNA, 438 bp, Artificial Sequence
  derived and/or modified sequence
atggctcaattgtttctgccattactagcagctctggtcctggcccaggcccctgctgctttagctgatgtgcttgagggcgattccagtgaggaccgggccttcagggtgcggatcgctggagatgcacctctccaaggagtactgggaggggcccttacaatcccctgtcacgtgcattatctgaggccacctccctcacgaagggccgtcctcggctcgccccgggtcaaatggacattcctgtctcgtggccgcgaggcggaagtactcgtggcacgcggagtaagagtcaaagtaaatgaggcttatcgctttcgggtggctcttcccgcttatcccgcttccttgacggacgtgtctttagcactgtccgaactgaggccaaacgattccggcatctatcgctgtgaggtgcagcatggaattgacgattag

SEQ ID NO: 259897 - DNA, 642 bp, Artificial Sequence
  derived and/or modified sequence
atggcccaactgttcctacccttactggctgcactagtgctcgcccaggcccctgcagcactggccgatgtcctggaaggggactccagtgaagaccgtgccttcagagtcagaatagctggggatgctccccttcagggggtactcgggggggccctgaccatcccatgccatgtacattaccttcgtccaccgcccagcaggagagccgtattaggaagtccacgcgtaaagtggactttcctgtccagggggcgcgaggcagaagttcttgttgcccggggggtgagagtgaaagtgaacgaggcttatagattccgggtggcccttccagcttacccagcatctttgacagatgtgtccctggctttgagcgagctcaggcccaacgactctggaatttaccgctgtgaagtgcaacatggcatcgacgactctagtgatgcagtcgaagtgaaagtcaaaggcgttgttttcttgtatagggagggcagtgcacgatacgccttttccttctctggagcccaggaggcctgtgcacggataggagcacacatcgcgacccctgaacagctctacgctgcctacctgggcgggtacgaacagtgtgatgccgggtggcttagcgaccagactgtgtag

SEQ ID NO: 259898 - DNA, 2563 bp, Artificial Sequence
  derived and/or modified sequence
gcagtgccgcgacccaaccccagccctgggtagcctgcagcatggcccagctgttcctgcccctgctggcagccctggtcctggcccaggctcctgcagctttagcagatgttctggaaggagacagctcagaggaccgcgcttttcgcgtgcgcatcgcgggcgacgcgccactgcagggcgtgctcggcggcgccctcaccatcccttgccacgtccactacctgcggccaccgccgagccgccgggctgtgctgggctctccgcgggtcaagtggactttcctgtcccggggccgggaggcagaggtgctggtggcgcggggagtgcgcgtcaaggtgaacgaggcctaccggttccgcgtggcactgcctgcgtacccagcgtcgctcaccgacgtctccctggcgctgagcgagctgcgccccaacgactcaggtatctatcgctgtgaggtccagcacggcatcgatgacagcagcgacgctgtggaggtcaaggtcaaaggggtcgtctttctctaccgagagggctctgcccgctatgctttctccttttctggggcccaggaggcctgtgcccgcattggagcccacatcgccaccccggagcagctctatgccgcctaccttgggggctatgagcaatgtgatgctggctggctgtcggatcagaccgtgaggtatcccatccagaccccacgagaggcctgttacggagacatggatggcttccccggggtccggaactatggtgtggtggacccggatgacctctatgatgtgtactgttatgctgaagacctaaatggagaactgttcctgggtgaccctccagagaagctgacattggaggaagcacgggcgtactgccaggagcggggtgcagagattgccaccacgggccaactgtatgcagcctgggatggtggcctggaccactgcagcccagggtggctagctgatggcagtgtgcgctaccccatcgtcacacccagccagcgctgtggtgggggcttgcctggtgtcaagactctcttcctcttccccaaccagactggcttccccaataagcacagccgcttcaacgtctactgcttccgagactcggcccagccttctgccatccctgaggcctccaacccagcctccaacccagcctctgatggactagaggctatcgtcacagtgacagagaccctggaggaactgcagctgcctcaggaagccacagagagtgaatcccgtggggccatctactccatccccatcatggaggacggaggaggtggaagctccactccagaagacccagcagaggcccctaggacgctcctagaatttgaaacacaatccatggtaccgcccacggggttctcagaagaggaaggtaaggcattggaggaagaagagaaatatgaagatgaagaagagaaagaggaggaagaagaagaggaggaggtggaggatgaggctctgtgggcatggcccagcgagctcagcagcccgggccctgaggcctctctccccactgagccagcagcccaggaggagtcactctcccaggcgccagcaagggcagtcctgcagcctggtgcatcaccacttcctgatggagagtcagaagcttccaggcctccaagggtccatggaccacctactgagactctgcccactcccagggagaggaacctagcatccccatcaccttccactctggttgaggcaagagaggtgggggaggcaactggtggtcctgagctatctggggtccctcgaggagagagcgaggagacaggaagctccgagggtgccccttccctgcttccagccacacgggcccctgagggtaccagggagctggaggccccctctgaagataattctggaagaactgccccagcagggacctcagtgcaggcccagccagtgctgcccactgacagcgccagccgaggtggagtggccgtggtccccgcatcaggtaattctgcccaaggctcaactgccctctctatcctactccttttcttccccctgcagctctgggtcacctgacctgtagtcctttaacccaccatcatcccaaactctcctgtcctttgccttcattctcttacccacctctacctatgggtctccaatctcggatatccaccttgtgggtatctcagctctccgcgtctttaccctgtgatcccagccccgccactgaccatctgtgacccttccctgccattgggccctccacctgtggctcacatctcgccagccccacagagcatcctcaggcctctccaagggtcctcatcacctattgcagccttcagggctcggcctattttccactactcccttcatccgcctgtgtgccgtcccctttagctgcctcctattgatctcagggaagcctgggagtcccttctcacccctcaacctccggagtccaggagaacccgtacccccacagagccttaagcaactacttctgtgaagtattttttgactgtttcatggaaaacaagccttggaaataaatctctattaaaccgctttgtaaccaa

SEQ ID NO: 259899 - DNA, 1548 bp, Artificial Sequence
  derived and/or modified sequence
atggcccagctgttcctgcccctgctggccgccctggtgctggcccaggccccagctgccctggctgatgtgctggagggggacagcagtgaagatcgggccttccgggtgagaattgctggagatgcccccctgcagggcgtgctgggcggggccctgaccatcccctgccacgtgcactacctgcggcccccacccagccggcgggctgtgctgggcagcccccgggtgaagtggaccttcctgagccggggccgggaggccgaggtgctggtggcccggggcgtgcgggtgaaggtgaatgaggcctaccgcttccgggtggccctgcctgcctacccagccagcctgacagatgtgtccctggccctgtctgagctgcggcccaatgacagcggcatctaccgctgtgaggtgcagcacggcattgatgacagcagtgatgctgtggaggacagccagctgtaccccatccagaccccccgggaggcctgctacggggacatggatggcttccctggggtgaggaactacggcgtggtggaccctgatgacctgtatgatgtgtactgctacgccgaggacctgaatggagagctgttcctgggggaccccccagagaagctgaccctggaggaggcccgggcctactgccaggagagaggagctgagatcgccaccaccggccagctgtatgctgcctgggatggcggcctggaccactgcagccctggctggctggctgatggctctgtgcgctaccccatcgtgacccccagccagagatgtggcggcggcctgcccggggtgaagaccctcttcctgttccccaaccagacaggcttccccaacaagcacagccgcttcaacgtgtactgcttccggggcagcacctgcctgctgcccagcctgcggccccccacccagccccccacccaggacggcctggaggccatcgtgacagtgacagagaccctggaggagctgcagctgccccaggaggccacagagagcgagagcagaggagccatctacagcatccccatcatggaggatggcggcggcggcagcagcaccccagaagatcctgctgaggcccccaggaccctgctggagtttgagacccagagcatggtgccccccaccggcttcagcgaggaggagggcaaggccctggaggaggaggagaagtatgaagatgaggaggagaaggaggaggaggaggaggaggaggaggtggaggatgaggccctgtgggcctggcccagcgagctgagcagccctggccctgaggccagcctgcccacagagcctgctgcccaggaggagagcctgagccaggccccagcccgggctgtgctgcagcccggggccagccccctgcctgatggagagagcgaggccagcaggcctccccgggtgcacggccccccaacagagaccctgcccaccccccgggagaggaacctggccagccccagccccagcaccctggtggaggcccgggaggtgggggaggccaccggcggccctgagctgagcggctag

SEQ ID NO: 259900 - DNA, 2016 bp, Artificial Sequence
  derived and/or modified sequence
atggcccagctgttcctgcccctgctggccgccctggtgctggcccaggccccagctgccctggctgatgtgctggagggggacagcagtgaagatcgggccttccgggtgagaattgctggagatgcccccctgcagggcgtgctgggcggggccctgaccatcccctgccacgtgcactacctgcggcccccacccagccggcgggctgtgctgggcagcccccgggtgaagtggaccttcctgagccggggccgggaggccgaggtgctggtggcccggggcgtgcgggtgaaggtgaatgaggcctaccgcttccgggtggccctgcctgcctacccagccagcctgacagatgtgtccctggccctgtctgagctgcggcccaatgacagcggcatctaccgctgtgaggtgcagcacggcattgatgacagcagtgatgctgtggaggtgaaggtgaagggcgtggtgttcctgtaccgggagggcagcgcccgctatgccttctccttcagcggggcccaggaggcctgtgcccgcatcggggcccacatcgccaccccagagcagctgtatgctgcctacctgggcggctatgagcagtgtgatgctggctggctgagtgaccagacagtgcgctaccccatccagaccccccgggaggcctgctatggagacatggatggcttccctggggtgagaaattatggagtggtggaccctgatgacctgtatgatgtgtactgctacgccgaggacctgaatggagagctgttcctgggggaccccccagagaagctgaccctggaggaggcccgggcctactgccaggagagaggagctgagatcgccaccaccggccagctgtatgctgcctgggatggcggcctggaccactgcagccctggctggctggctgatggctctgtgcgctaccccatcgtgacccccagccagagatgtggcggcggcctgcccggggtgaagaccctcttcctgttccccaaccagacaggcttccccaacaagcacagccgcttcaacgtgtactgcttccgggacagcgcccagcccagcgccatccctgaggccagcaacccagccagcaacccagccagtgatggcctggaggccatcgtgacagtgacagagaccctggaggagctgcagctgccccaggaggccacagaaagtgagagcagaggagccatctacagcatccccatcatggaggatggcggcggcggcagcagcaccccagaggaccctgctgaggcccccaggaccctgctggagtttgagacccagagcatggtgcccccaacaggcttcagcgaggaggagggcaaggccctggaggaggaggagaagtatgaagatgaggaggagaaggaggaggaggaggaggaggaggaggtggaggatgaggccctgtgggcctggcccagcgagctgagcagccctggccctgaggccagcctgcccacagagcctgctgcccaggaggagagcctgagccaggccccagcccgggctgtgctgcagcccggggccagccccctgcctgatggagagagcgaggccagccggcccccccgggtgcacggccccccaacagagaccctgcccaccccccgggagaggaacctggccagccccagccccagcaccctggtggaggcccgggaggtgggggaggccactggaggccctgagctgtctggagtgcccagaggagagagcgaggagaccggcagcagcgagggcgcccccagcctgctgcctgccacccgggcccctgagggcacccgggagctggaggcccccagcgaggacaacagcggccgcacagccccagctggcacctctgtgcaggcccagcctgtgctgcccacagattctgccagcagaggaggagtggccgtggtgcctgccagcggcaacagcgcccagggcagcacagccctgagcatcctgctgctcttcttccccctgcagctgtgggtgacctag

SEQ ID NO: 259901 - DNA, 696 bp, Artificial Sequence
  derived and/or modified sequence
atggcccagctgttcctgcccctgctggccgccctggtgctggcccaggccccagctgccctggctgatgtgctggagggggacagcagcggcatctaccgctgtgaggtgcagcacggcattgatgacagcagtgatgctgtggaggtgaaggtgaagggcgtggtgttcctgtaccgggagggcagcgcccgctatgccttctccttcagcggggcccaggaggcctgtgcccgcatcggggcccacatcgccaccccagagcagctgtatgctgcctacctgggcggctatgagcagtgtgatgctggctggctgagtgaccagacagtgcgctaccccatccagaccccccgggaggcctgctatggagacatggatggcttccctggggtgagaaattatggagtggtggaccctgatgacctgtatgatgtgtactgctacgccgaggacctgaatggagagctgttcctgggggaccccccagagaagctgaccctggaggaggcccgggcctactgccaggagagaggagctgagatcgccaccaccggccagctgtatgctgcctgggatggcggcctggaccactgcagccctggctggctggctgatggctctgtgcgctaccccatcgtgacccccagccagagatgtggcggcggcctgcccggggtgaagaccctcttctag

SEQ ID NO: 259902 - DNA, 438 bp, Artificial Sequence
  derived and/or modified sequence
atggcccagctgttcctgcccctgctggccgccctggtgctggcccaggccccagctgccctggctgatgtgctggagggggacagcagtgaagatcgggccttccgggtgagaattgctggagatgcccccctgcagggcgtgctgggcggggccctgaccatcccctgccacgtgcactacctgcggcccccacccagccggcgggctgtgctgggcagcccccgggtgaagtggaccttcctgagccggggccgggaggccgaggtgctggtggcccggggcgtgcgggtgaaggtgaatgaggcctaccgcttccgggtggccctgcctgcctacccagccagcctgacagatgtgtccctggccctgtctgagctgcggcccaatgacagcggcatctaccgctgtgaggtgcagcacggcattgatgactag

SEQ ID NO: 259903 - DNA, 642 bp, Artificial Sequence
  derived and/or modified sequence
atggcccagctgttcctgcccctgctggccgccctggtgctggcccaggccccagctgccctggctgatgtgctggagggggacagcagtgaagatcgggccttccgggtgagaattgctggagatgcccccctgcagggcgtgctgggcggggccctgaccatcccctgccacgtgcactacctgcggcccccacccagccggcgggctgtgctgggcagcccccgggtgaagtggaccttcctgagccggggccgggaggccgaggtgctggtggcccggggcgtgcgggtgaaggtgaatgaggcctaccgcttccgggtggccctgcctgcctacccagccagcctgacagatgtgtccctggccctgtctgagctgcggcccaatgacagcggcatctaccgctgtgaggtgcagcacggcattgatgacagcagtgatgctgtggaggtgaaggtgaagggcgtggtgttcctgtaccgggagggcagcgcccgctatgccttctccttcagcggggcccaggaggcctgtgcccgcatcggggcccacatcgccaccccagagcagctgtatgctgcctacctgggcggctatgagcagtgtgatgctggctggctgagtgaccagacagtgtag

SEQ ID NO: 259904 - DNA, 1548 bp, Artificial Sequence
  derived and/or modified sequence
atggcccagctgttcctgcccctgctggccgccctggtgctggcccaggccccagctgctttggcagacgtgctggaaggagacagctctgaagacagagcatttcgcgtacgtattgcaggcgatgccccactccaaggggttcttggcggcgcactgacaattccttgccacgtacactatctgagaccaccccctagccgacgggccgtgttggggtctcccagggttaaatggacttttcttagccggggcagagaggcagaggtgcttgttgcaaggggcgtgcgagtaaaggttaatgaggcctatcggttccgagtcgccctgccagcgtatcccgcctctcttacggatgtgtcattggctctttctgagctgcgacccaatgacagcggaatctatcgctgtgaggtccagcacggcatagatgattctagtgatgctgtggaggattcacagctgtatcccatccagacccctcgggaggcttgctacggcgacatggatggatttcccggcgtgcgcaactatggcgtggtcgatccagatgacttgtatgatgtgtattgctacgctgaagacctgaacggcgagttattcctgggcgacccccccgaaaagctcacacttgaagaagccagagcttattgtcaggaacgcggagctgagattgcaactacgggtcagttatacgcggcctgggatggcgggctcgaccattgttcgccaggatggctcgctgatggctcagtaaggtatcccatcgtaaccccgtctcaaagatgcggaggaggcttgcctggcgttaaaaccctgttcttgttcccaaaccagactggcttccccaacaagcatagccgctttaatgtgtactgcttccgtggatcgacttgcctcctcccttctctcaggccaccaacccaacctcctacccaggacggcctggaagccattgtgaccgtgacagagactctcgaggaacttcagctgccacaagaggcaacagagtccgagagccgtggtgcgatctactccatccccatcatggaagacggcggcggagggtcctcgactcccgaagatcctgctgaggccccaagaacactcctcgagtttgagacccagtccatggtgcccccgacagggttctccgaagaggagggaaaagcactggaagaagaggagaagtacgaagacgaggaagagaaagaggaagaagaagaagaggaagaggtagaggatgaggctctttgggcatggcccagcgaattgagttcacctggaccggaggcctccctccccactgagcccgccgctcaagaagaatctctgagccaggcgcccgcgcgggctgtccttcagccgggtgcctcccctctgcctgatggcgagagcgaagcatcaagaccgcctagagtacacggcccacctactgaaacactccctacacccagagagcgtaatctggcaagtccctcccccagtaccctggttgaagcacgtgaggtaggggaggccaccggtggacctgaactgtccggctag

SEQ ID NO: 259905 - DNA, 2016 bp, Artificial Sequence
  derived and/or modified sequence
atggcccagctgttcctgcccctgctggccgccctggtgctggcccaggccccagcagccctggcggacgtcttggagggcgacagttccgaggaccgtgcctttcgagttaggattgccggggatgccccactgcaaggagttctgggcggggcgttgacaatcccttgccatgtccactacctgcgtccccctccatccagacgcgccgttctgggctcaccacgtgtcaaatggacatttctgtccaggggaagagaagctgaagtcctggttgcccgcggggtcagagtgaaagttaatgaagcttataggttccgggtcgcattgcctgcgtacccagcctcgctgaccgacgtgtccttggccctgagcgagcttagaccgaatgattccggaatttatcgatgtgaggtgcagcacgggatcgatgacagtagtgacgcagtagaggtcaaggtgaagggcgtggtgttcttgtatagagaggggagtgcacggtatgctttctcattctcaggagctcaggaagcctgtgccagaatcggcgcccatattgccacccctgagcagctgtatgctgcttacctaggcggctatgagcagtgcgacgccggctggctgagcgaccagacggttcggtacccaatccagacaccccgtgaagcctgttacggggatatggatgggttccctggggtgagaaactacggagttgtcgaccctgatgatctgtacgacgtctattgctacgctgaagacctcaatggcgagctgttcttgggagatccacccgaaaaattaaccctcgaggaggcaagagcttactgccaggaaaggggagctgagatagccaccactgggcaattatacgcagcctgggacggaggcctagaccactgcagcccagggtggttggcggatggaagtgtccgctatcccattgtaacaccttcccagcgatgcggggggggcttgcctggcgttaagaccctatttctctttcctaatcaaactgggtttccaaataaacacagtagatttaacgtttattgtttcagggactctgcgcagcccagcgctatccctgaggccagcaacccagcaagcaacccagcgagcgacggactggaagcaatcgtgacagtgactgagaccttggaagaactgcagttgccacaggaggccactgagtccgagagtaggggggcgatctattccataccaataatggaggatgggggcggggggtccagcactccagaagatccagccgaagcccctcgcactctgctggaattcgagacacagtcaatggttccacctacaggcttctcagaggaggaaggcaaggcgctagaagaggaggagaaatacgaggatgaggaggagaaggaggaggaggaggaggaggaagaggtcgaggatgaggcgctatgggcatggcctagtgaactgtcctcccctgggcccgaagcctctcttccaacggagccagccgcccaggaggaatccctcagtcaggcgccggccagagctgtactgcaacctggtgctagcccactgcccgacggagaatctgaggcatcaaggccgcctagggttcatggcccaccgactgaaaccctgccaacacctagggagagaaacctagcgtcgccgagccctagcaccctggtggaggccagggaggtaggcgaggccaccggcggacctgagctatctggggttcctcgaggcgagagcgaagaaacaggatcctccgaaggggcaccctctttactgcctgcgacccgagcccccgaaggcacccgagagcttgaagcccccagtgaggacaacagtggacgtaccgccccggccggaacaagtgtgcaagctcagccagtgctgccaaccgacagtgcgtccaggggaggggtggccgtggtccccgcgtcaggtaattccgcacagggctccactgctctcagtatccttctgctcttttttcctctccagctgtgggtgacttag

SEQ ID NO: 259906 - DNA, 696 bp, Artificial Sequence
  derived and/or modified sequence
atggcccagctgttcctgcccctgctggccgccctggtgctggcccaggcgccagccgccctggccgatgtcttagagggggattccagtggcatctataggtgcgaagtgcaacacggcatcgacgatagctccgacgccgtggaggtcaaggttaaaggggtcgtcttcctgtatagagagggaagcgctcggtatgcattttctttctccggcgcccaagaggcatgcgcccggataggggcacatattgcaacccccgagcaactgtacgccgcgtacttgggcggttacgagcagtgcgacgcaggctggctgagcgaccagacggtgaggtatcctatccagacacctagggaggcttgttacggagatatggatgggttcccaggggtgagaaactacggggtggtcgatcccgacgacctgtatgatgtatactgctatgccgaggacctgaatggcgaactgttcctcggtgatcctccagagaagctgaccctcgaagaggctcgggcatattgccaggagcggggagctgagatcgctacaacaggacaactgtatgcagcctgggacggtggccttgaccattgcagtcctggctggctggctgacgggagcgtacggtatccaatcgtcactcccagccagagatgcggcggaggattaccaggcgtgaaaactctgttttag

SEQ ID NO: 259907 - DNA, 438 bp, Artificial Sequence
  derived and/or modified sequence
atggcccagctgttcctgcccctgctggccgccctggtgctggcccaagctcctgctgccctggccgacgtgctggagggtgatagttctgaagatcgcgcctttagggtccgcattgccggggatgcacccctgcagggagtcctgggcggagccctgacgatcccatgccacgtgcattatctgcggccgcctccatctcgaagggcagtacttggcagccctagagttaagtggacttttctgtcccgcgggcgcgaggccgaagtgctcgtcgctcgtggggtgcgtgttaaggttaacgaggcttataggttccgagttgccctgccggcatatccagcctctctgacagatgtcagcttggcgctgtctgaactgcggcccaatgattccgggatatatcgctgtgaagtgcaacacggcatcgacgactag

SEQ ID NO: 259908 - DNA, 642 bp, Artificial Sequence
  derived and/or modified sequence
atggcccagctgttcctgcccctgctggccgccctggtgctggcccaggccccggcagctctagcagacgtgcttgaaggggattcctctgaagatcgtgccttcagagtaaggatcgcaggggatgccccactgcaaggagtcctaggaggtgctcttacaatcccatgccatgtccactatctcaggcccccccctagtcgacgggccgtgctgggttcccctcgggtcaagtggacattcctttctcgcggcagggaggcagaagtgctggtggccaggggggtcagagtcaaggtgaacgaggcatatagatttcgagtcgcactccctgcatacccagcatccctcaccgatgtgtccttggcattaagcgaattgaggcctaacgactccggtatttataggtgcgaggttcagcacggtatcgacgattcctcagatgccgtggaagtgaaggttaagggtgttgtttttctgtaccgggaaggctccgcccggtatgctttctcctttagcggggcccaggaggcctgtgccaggatcggagcacacattgccactcctgaacagttgtacgcagcctatctggggggctacgagcagtgcgatgcgggctggctcagcgaccagaccgtgtag

SEQ ID NO: 259909 - DNA, 402 bp, Artificial Sequence
  derived and/or modified sequence
atggtgagcgtgggattcggcgaccgggcaggcctgggctctagctgtagatgctcccagatcactccagatatggcttccgcagtggccactcggtatgtgctgggacactggccacgcgaccacatctgcggctgtggtagccaccaactcagctcttggcgggccgagcctgacggcggcgtgggcatgccccacactttgagcgagcccccgtccggcctaaccggtatttgggccggggctctggtgagtcccgagaagcaaatgaaagaaaatttgcgtagtaatgattctgaacctcggcttccaggatttgagtcatgcctgatccattctcttgcagtgtggccatgggctagcaatttcgccagtctcggtccatcagttaacaaagggtag

SEQ ID NO: 259910 - RNA, 1548 nt, Artificial Sequence
  derived and/or modified sequence
auggcccagcuuuuucucccauugcuggccgcucuugucuuagcacaggccccagcugcccuggcugacgugcuugagggcgacagcucugaggaucgcgccuucagggugaggaucgccggcgacgccccccuucaaggcguguuaggcggugcccugacgauucccugccacgugcauuaccucaggcccccaccuaguagacgugcagugcuagguucuccacgggugaaguggacguucuugagucgggggagagaggcugagguacucguggccagaggcgugcgcgugaaagugaacgaagcauaucgauuuagggucgcuuugcccgcauaucccgccagccuuacagacgucucauuggcgcuuagcgaguuacggcccaacgauucaggcaucuacaggugcgaggugcagcacggcauugaugacucauccgaugcaguugaagacagccagcucuacccaauccagacaccucgcgaagccugcuacggagacauggacggauuuccuggcguacgcaauuacggcguggucgaucccgaugauuuguacgacguguacuguuaugcugaggacuugaauggugaguuguucuuaggugacccucccgagaaacugacccuggaagaggcccgagcauauugucaggaaagaggagcugagaucgcgacaaccggacagcucuacgcggccugggaugggggucuggaucacugcaguccugguuggcucgcugauggcucaguucgauaccccaucgucacaccaagccagaggugcggcggcggucugccuggggucaagacucuguuucuguuccccaaccagacuggauuuccuaacaaacacucucgguucaauguguauugcuucaggggcuccacaugcuuacuuccaucgcugcgaccuccaacucagccuccaacucaagauggucucgaggcaauuguaacugucacagaaaccuuggaagagcugcagcugccucaggaggcaacugagagcgagaguagaggcgccaucuauaguaucccaauaauggaagacggcgggggcggcagcuccaccccugaggacccagccgaggcaccucguacauuguuggaauucgaaacccaaaguauggugccgccaacaggauuuucagaggaggaaggaaaggcacuugaagaagaggagaaauaugaggacgaggaagagaaagaggaggaagaagaagaagaagaagucgaagaugaggcucucugggccuggccaucagaacugucaagucccggccccgaggcuucacucccaacugagccugccgcccaggaggagucucugucacaggccccugcccgggcuguucuccagccuggggcgucccccuugccugauggggaguccgaagccucccguccgccgagaguucauggaccgccgacagagacccucccgaccccgcgcgaacggaauuuggcuucccccucaccaagcacacuggucgaggcacgcgaagugggggaggccacuggcgguccggagcucaguggcuag

SEQ ID NO: 259911 - RNA, 2016 nt, Artificial Sequence
  derived and/or modified sequence
auggcucagcuguuccugcccuugcucgccgcgcuggugcucgcacaggcaccagcagcacucgccgauguacuggaaggagauucuuccgaggaccgugcauuccgagugcgcauugcaggggacgcaccgcugcagggcguccucggcggcgcacugacuauaccuugccacguucacuauuugcgccccccgccaagccgaagggcugugcuggguuccccacgagugaaauggacuuucuuaagccgcgggcgggaagcggaggucuugguggcacggggaguucgagugaaaguuaaugaagccuaucgcuuuagaguggcguugccugcauacccugcgucccugacugacgucucucuggcccuuucagaacugcgaccuaaugacaguggcaucuaccguugcgaaguccagcacgguaucgaugacucuucugacgcuguugaagugaagguuaaaggagugguauucuuguauagagagggaucagcucgguacgcauucuccuuuucuggggcucaggaggcaugcgccaggauaggagcccauaucgccacuccagaacagcuguacgccgcuuaucuggguggauacgagcagugcgacgcuggguggcuaucugaccagacuguccgguacccgauccaaacccccagggaagcauguuacggugacauggacggauuucccggggugcgcaacuacggaguaguggauccagacgaccuuuacgacguguacuguuaugccgaggaccuaaauggugaguuguuucugggggacccgccagaaaagcugacccuggaggaggcacgcgccuauugccaggagagaggagcugaaaucgcaaccacgggacagcuguacgccgccugggacggcgggcuggaucauugcagcccuggcuggcuggccgaugggucuguuagauaccccaucgucacuccaucacagaggugugggggaggucuucccggagugaaaacccucuuccuguucccaaaucaaacaggcuuccccaacaaacacucaagauuuaacguguacuguuuucgugacucagcgcagccuucagccauccccgaagcaagcaaccccgcuaguaacccagcaagcgauggacuggaagccaucgugaccgugacggagacccuggaggagcuccagcugccccaggaagcuaccgagucagagagucguggcgcgauuuacucuaucccuauuauggaagacggaggagguggaagcucuacacccgaagaccccgccgaggccccacguacccuccuugaauuugagacccagucaaugguucccccuacgggcuucucugaggaagaaggcaaagcucucgaggaagaggaaaaauaugaagacgaagaggagaaagaggaagaagaggaagaggaggaagucgaagacgaggccuuaugggccuggccuagugaacuuuccucaccgggacccgaagcgagccuaccuacagaacccgcagcgcaggaggaaucucugucucaagcacccgcaagggcuguguuacaaccuggugccucaccccucccagacggagaaagcgaggccucuagaccuccaagggugcacggccccccaacagaaacacugccaaccccgagagagagaaauuuggccuccccaucuccuaguacucucguagaagccagggaagucggcgaggcuacaggugggccagagcucuccggagucccgagaggcgaaagugaagagaccggaagcucugagggagccccgucacuccugcccgcaaccagggccccagaaggaacgagagaacuggaagccccuagcgaggacaacuccggccguaccgccccugccggcaccuccgugcaggcucagcccguccugccuacagauucagccuccaggggagggguggccgucgugcccgcuagcgggaauucugcccaagguucuaccgcccugucaauauuauuacuauuuuuuccuuuacagcucuggguuaccuag

SEQ ID NO: 259912 - RNA, 696 nt, Artificial Sequence
  derived and/or modified sequence
auggcccaauuauuucuuccgcugcuggcugcucuggucuuggcacaggcuccugcugcucuugcagacgugcuggagggagauucaucagguaucuacagaugugaaguccagcauggcauagacgauucaagcgacgcaguagagguaaaggugaaaggcgucgucuuuuuauaccgcgagggcucagcucgcuacgccuucaguuuuucgggugcccaggaggcgugcgcacgaaucggcgcccacaucgcaacgcccgaacagcucuaugcagcuuaccuugggggcuaugaacaaugcgacgcuggcuggcucuccgaccaaaccguuagguaccccauucagacuccuagagaagccuguuacggagacauggauggcuuuccaggcgugcggaacuacggagucguagaucccgacgaucucuaugauguguacugcuaugcugaagaccucaauggugaguuauucuugggugaucccccagagaaauugacccuggaggaggcccgugccuacugucaggagaggggagccgaaauugcaacuacaggacaacuuuacgcugcaugggacgggggucucgaccacugcucuccaggauggcucgcugauggguccguacgguacccaauugucaccccaagccaacgcuguggaggcgggcucccaggaguaaagacgcuguucuag

SEQ ID NO: 259913 - RNA, 438 nt, Artificial Sequence
  derived and/or modified sequence
auggcgcaacuguuccuaccacuccuagccgcucugguuuuggcccaggcucccgccgcccuggcagacguucuagaaggggacaguagugaagaucgggccuucaggguuagaauugccggugacgccccauugcagggcgugcuggguggugcacugacaaucccgugccacguacacuaccuuaggccacccccaagccgaagggccguacucggaucuccucgggucaaguggacauuccuuucucgugggagagaggccgaaguccuuguagccagaggcgugcgcgucaaagugaaugaggccuaccgauuucgcguggcccucccggcuuauccagcaucccugaccgaugucagccuggcacuuagcgaacuacgcccuaacgauagcgggaucuauagaugugagguccagcauggaaucgacgauuag

SEQ ID NO: 259914 - RNA, 642 nt, Artificial Sequence
  derived and/or modified sequence
auggcucagcuguucuugccacuacuugccgcucuugugcuugcucaggccccugccgcccuagccgaugucuuagaaggggacaguucggaggacagggcuuuucgaguuagaaucgcgggagaugccccgcuucagggcguucuggguggugcucucaccauuccaugucaugugcauuacuugcgaccccccccaucccgacgagcagugcucggcucaccccgggucaaauggaccuuccugucucgcggcagagaggccgagguguugguggcccguggagugagagucaaaguuaacgaagcguaucgguuuaggguggccuugccagcuuacccagcaucacucaccgacguuagucucgcccucagugagcucaggccuaacgauagugguauuuaucgaugugaggugcaacacgggaucgaugauucuucagacgcaguagaggucaagguuaaggggguuguuuuucuguaccgcgagggcucugcacgcuacgccuucucauucucaggcgcucaggaagcaugcgcacgcaucggagcucacaucgccacucccgaacaacucuaugccgccuaccugggcgguuacgaacagugugacgccggaugguuaagcgaccagacaguauag

SEQ ID NO: 259915 - RNA, 1548 nt, Artificial Sequence
  derived and/or modified sequence
auggcccagcuuuucuugccucuucuggcagcacuggugcuggcccaggcccccgccgcauuggccgauguucuggagggagauucaagugaggacagagccuuucgcgugaggauugcaggggacgcaccucuacagggcguccuuggaggagcacugaccauuccaugccacguucauuaccuacgacccccaccuagcaggagagcgguacuuggcagcccacgggugaaauggacuuuucugagccgugguagggaagccgagguuuuggucgcccgcggagucagagugaaggugaacgaagcauaucgauuuagggucgcuuugcccgcauaucccgccagccuuacagacgucucauuggcgcuuagcgaguuacggcccaacgauucaggcaucuacaggugcgaggugcagcacggcauugaugacucauccgaugcaguugaagacagccagcucuacccaauccagacaccucgcgaagccugcuacggagacauggacggauuuccuggcguacgcaauuacggcguggucgaucccgaugauuuguacgacguguacuguuaugcugaggacuugaauggugaguuguuccugggcgaccccccagagaagcucacacucgaggaagcaagagcuuauugccaggagcguggcgcugaaaucgccacuaccggacaacuguaugcugcuugggacgggggccuugaucauuguucccccgguugguuggccgacggaagugucagauacccaaucgucacaccgucacagcgaugcggcggcggucuacccggagucaagacuuuguuucuguucccaaaccagaccggguuccccaacaagcacucccgauucaacgucuacugcuuucgugguaguacaugccuguugcccagccugcgaccccccacccagcccccaacucaagacggacucgaggcaaucguuacagugaccgagaccuuggaggaguugcaauugccgcaggaggcuacagaauccgaaucucggggagcuaucuauucaauacccauuauggaggauggcggagggggaucaaguacaccagaggauccugccgaggccccgagaacgcugcuugaauuugagacgcaauccauggugcccccuacaggcuuuagugaagaggaagggaaggcucuggaggaggaggaaaaauacgaggacgaggaagaaaaagaggaagaagaagaagaggaggagguagaggaugaggcucugugggccuggccuucugaacugaguaguccggguccagaagcuucccuccccacugagccagcugcccaagaggagucucucucacaggcccccgcuagagcagugcuacaacccggcgcgucuccuuugccagauggagaaucugaggcuaguagaccaccgaggguucauggaccaccaaccgagacgcucccaacaccccgggaacgaaaccuagcuaguccuuccccaaguaccuugguugaagccagggagguuggggaggccaccggaggaccagaguugagcggauag

SEQ ID NO: 259916 - RNA, 2016 nt, Artificial Sequence
  derived and/or modified sequence
auggcacaauuguuccucccccuguuagcugcccuggucuuagcccaggcgcccgcagcccucgccgacguucuugaaggggauuccagugaagacagggcauuucgcgugcggauugccggugaugcaccccuacagggaguccuggguggggcacucaccauaccaugccacguucacuaucugaggccgccgccgucucgcagggccgucuuggguagcccacgcgucaaauggaccuucuugucccgaggaagagaggcagagguguuaguagcgagagguguaagagucaaagucaaugaggcguauagguuucgagucgcccuuccugcauaucccgcuucccugacugacguuagucuagcccugagugaauugaggccgaacgauucuggaauuuacagaugcgaaguacaacacggcauagacgauaguuccgacgcaguggagguuaagguaaaaggugucguauuccuguauagagaaggaucugcccgcuacgccuucucauuuagcggcgcccaagaggcuugugcuagaauuggggcccauauagccaccccagaacagcuuuacgcagccuauuugggcggcuaugagcagugugaugcugguuggcuuagcgaccagacagugagauaccccauccagacacccagagaagcauguuacggagacauggauggguuucccggagugcggaacuauggcguggucgauccugaugaccucuaugacgucuauugcuacgcugaggaucucaacggggagcuuuuuuuaggcgacccuccggaaaaacuuacacucgaagaagcacgugcauauugccaggagaggggagcugaaaucgccacaacuggccaacuuuacgccgccugggauggaggacuagaucacugcuccccaggauggcuggccgacggcagugugcgcuacccaauaguaacgccaucccagcguugcggcggaggacucccaggcgugaagacucucuuuuuauuuccuaaccagacaggauucccaaauaaacacagccgauuuaacguguacuguuuccgagauucagcacaaccaagcgcgaucccugaagcuuccaauccugcaagcaauccagcuuccgacggccucgaggcgaucgugacagucaccgagacccuugaagaacuccagcuuccacaggaagcgaccgagagugagagucguggcgcgauuuacucuaucccuauuauggaagacggaggagguggaagcucuacacccgaagaccccgccgaggccccacguacccuccuugaauuugagacccagucaaugguucccccuacgggcuucucugaggaagaaggcaaagcucucgaggaagaggaaaaauaugaagacgaagaggagaaagaggaagaagaggaagaggaggaagucgaagacgaggccuuaugggccuggccuagugaacuuuccucaccgggacccgaagcgagccuaccuacagaacccgcagcccaggaggagaguuugagccaggcccccgcccgcgcuguccuucaaccaggcgcauccccauuacccgacggggagucagaagcgucccgaccaccuagggugcacgggccuccuacugagacacugccaacgccuagagagcguaacuuggccucuccauccccuaguacauuaguggaagcgagggaagugggagaagcuaccgguggucccgaacuguccggcguaccucguggggaauccgaagagaccggaagcucagaaggagcaccaagcuugcugccagccacacgagcacccgaaggaacuagggaguuggaggccccauccgaggauaauuccggccgaacugccccagcuggcaccagcguacaggcucagcccguccugccaacggauagcgcgucucgugguggagucgcugugguuccagcuuccggcaauagcgcucagggaagcaccgcauugucuauacuguuauuguucuuccccuuacaguugugggugacuuag

SEQ ID NO: 259917 - RNA, 696 nt, Artificial Sequence
  derived and/or modified sequence
auggcacagcuguuccugcccuugcuggccgcccucguguuggcucaggcccccgccgcacuugcggacguccuggaaggcgacaguucagggaucuauagaugcgagguacaacauggcauugacgacucaucugacgccguggaaguuaaagugaagggaguuguguuccucuacagagaaggguccgcacgcuacgcuuuuaguuucagcggagcucaggaagccugugcuagaauuggugcucacaucgccacaccagaacaacuuuacgccgcuuaucuuggaggcuaugagcagugugaugcuggcuggcugucggaucagacggugcgauauccaauccagaccccgagagaagccuguuauggcgauauggaugguuucccuggcgugaggaauuacgguguaguagauccagacgauuuauacgacguguacuguuaugcugaagaucugaacggugaacuguuucugggcgacccccccgagaaacuuacucuggaagaggcccgagccuauugucaagaacgaggggcugagauugcaacuacgggacagcuuuacgccgccugggauggaggacuagaccauuguagccccggauggcucgcagacggcuccguaagauaccccauugucacccccagccaaagaugcgguggaggauugccaggcguaaaaacgcuguuuuag

SEQ ID NO: 259918 - RNA, 438 nt, Artificial Sequence
  derived and/or modified sequence
auggcucagcuguuccucccacugcucgcagccuuagugcucgcacaggcuccugcugcacuugcugacguguuagaaggggauucuucagaggaucgcgcuuuccguguucgaaucgcuggcgaugcaccucuacagggagugcucggaggcgcgcucaccauucccugccauguccacuacuugcgaccaccuccuucaaggagggccguucuagggucacccagggucaaguggacuuuccugucucguggccgagaagccgaaguucugguagcucgaggcguacgugucaaagugaaugaagccuacagauuccgcguugcucuuccagccuaucccgcaucccugacugacguuucccuggcccuuagcgaacuucgacccaaugacaguggcauuuauagaugcgaagugcagcaugguauugacgauuag

SEQ ID NO: 259919 - RNA, 642 nt, Artificial Sequence
  derived and/or modified sequence
auggcucaacucuuccugccucuccuugcagccuuggugcuggcccaagcaccagccgcucucgcugaugugcuggaaggcgacucaagugaagaccgggcauuccgcgugagaaucgccggugacgcuccucugcagggugugcuagggggggcguuaacaauucccugccaugugcacuaucuuagacccccuccuucucgccgagcuguucuuggaucaccacgcgugaaauggacauuucucucccgcggacgugaggccgaggugcugguggcuagaggcgugcgcgugaaaguaaacgaagcguaucgauuuagaguggccuugcccgcuuacccugcaagucuuaccgauguuucacuggcuuuguccgagcuccggcccaaugacucugguaucuaccggugcgagguacagcauggaauugacgauagcagcgaugccguggaggugaaaguuaaagggguuguguuucucuaucgcgaagggagugcucgguacgccuuuaguuuuuccggggcacaggaagcaugugcuagaauuggcgcucauaucgccacaccagagcagcucuacgcagcauaccugggcggauaugaacaaugcgacgcuggcuggcuuucugaucaaaccguuuag

SEQ ID NO: 259920 - protein, 887 aa, Artificial Sequence
  derived and/or modified sequence
MSLFKARDWWSTILGDKEEFDQGCLCLANVDNSGNGQDKIIVGSFMGYLRIFSPHPAKTGDGAQAEDLLLEVDLRDPVLQVEVGKFVSGTEMLHLAVLHSRKLCVYSVSGTLGNVEHGNQCQMKLMYEHNLQRTACNMTYGSFGGVKGRDLICIQSMDGMLMVFEQESYAFGRFLPGFLLPGPLAYSSRTDSFLTVSSCQQVESYKYQVLAFATDADKRQETEQQKLGSGKRLVVDWTLNIGEQALDICIVSFNQSASSVFVLGERNFFCLKDNGQIRFMKKLDWSPSCFLPYCSVSEGTINTLIGNHNNMLHIYQDVTLKWATQLPHIPVAVRVGCLHDLKGVIVTLSDDGHLQCSYLGTDPSLFQAPNVQSRELNYDELDVEMKELQKIIKDVNKSQGVWPMTEREDDLNVSVVVSPNFDSVSQATDVEVGTDLVPSVTVKVTLQNRVILQKAKLSVYVQPPLELTCDQFTFEFMTPDLTRTVSFSVYLKRSYTPSELEGNAVVSYSRPTDRNPDGIPRVIQCKFRLPLKLICLPGQPSKTASHKITIDTNKSPVSLLSLFPGFASQSDDDQVNVMGFHFLGGARITVLASKTSQRYRIQSEQFEDLWLITNELILRLQEYFEKQGVKDFACSFSGSIPLQEYFELIDHHFELRINGEKLEELLSERAVQFRAIQRRLLARFKDKTPAPLQHLDTLLDGTYKQVIALADAVEENQGNLFQSFTRLKSATHLVILLIALWQKLSADQVAILEAAFLPLQEDTQELGWEETVDAAISHLLKTCLSKSSKEQALNLNSQLNIPKDTSQLKKHITLLCDRLSKGGRLCLSTDAAAPQTMVMPGGCTTIPESDLEERSVEQDSTELFTNHRHLTAETPRPEVSPLQGVSE

SEQ ID NO: 259921 - protein, 887 aa, Artificial Sequence
  derived and/or modified sequence
MSLFKARDWWSTILGDKEEFDQGCLCLANVDNSGNGQDKIIVGSFMGYLRIFSPHPAKTGDGAQAEDLLLEVDLRDPVLQVEVGKFVSGTEMLHLAVLHSRKLCVYSVSGTLGNVEHGNQCQMKLMYEHNLQRTACNMTYGSFGGVKGRDLICIQSMDGMLMVFEQESYAFGRFLPGFLLPGPLAYSSRTDSFLTVSSCQQVESYKYQVLAFATDADKRQETEQQKLGSGKRLVVDWTLNIGEQALDICIVSFNQSASSVFVLGERNFFCLKDNGQIRFMKKLDWSPSCFLPYCSVSEGTINTLIGNHNNMLHIYQDVTLKWATQLPHIPVAVRVGCLHDLKGVIVTLSDDGHLQCSYLGTDPSLFQAPNVQSRELNYDELDVEMKELQKIIKDVNKSQGVWPMTEREDDLNVSVVVSPNFDSVSQATDVEVGTDLVPSVTVKVTLQNRVILQKAKLSVYVQPPLELTCDQFTFEFMTPDLTRTVSFSVYLKRSYTPSELEGNAVVSYSRPTVQNSLGIPRVIQCKFRLPLKLICLPGQPSKTASHKITIDTNKSPVSLLSLFPGFASQSDDDQVNVMGFHFLGGARITVLASKTSQRYRIQSEQFEDLWLITNELILRLQEYFEKQGVKDFACSFSGSIPLQEYFELIDHHFELRINGEKLEELLSERAVQFRAIQRRLLARFKDKTPAPLQHLDTLLDGTYKQVIALADAVEENQGNLFQSFTRLKSATHLVILLIALWQKLSADQVAILEAAFLPLQEDTQELGWEETVDAAISHLLKTCLSKSSKEQALNLNSQLNIPKDTSQLKKHITLLCDRLSKGGRLCLSTDAAAPQTMVMPGGCTTIPESDLEERSVEQDSTELFTNHRHLTAETPRPEVSPLQGVSE

SEQ ID NO: 259922 - DNA, 2664 bp, Artificial Sequence
  derived and/or modified sequence
atgagtctatttaaggccagggactggtggagcaccattctgggggataaggaggaatttgaccaggggtgtttgtgtttggcaaacgtcgacaactccgggaacggccaggacaaaatcattgtcggatccttcatggggtaccttcgcattttctctccccacccagccaagactggagacggtgctcaggcggaagacttactgctagaagttgacctgagagatcccgtgcttcaggtagaagttgggaaattcgtctcaggaacggagatgctgcacctcgccgttttgcattcgcgaaaactgtgcgtttactcagtgtcgggaactctcggtaatgtcgaacatggcaatcagtgtcaaatgaagctaatgtacgaacacaaccttcagcgaactgcttgcaacatgacctatgggagcttcggtggagtcaagggaagggatctaatctgcattcagtccatggatggaatgctcatggtgttcgaacaggaaagctatgctttcgggcggtttttgcctggcttcctgttgcctggaccgctcgcctatagctcccgtactgatagcttcctcacagtgagcagttgccaacaggtggagagctacaagtatcaagtgctagcgttcgctactgacgctgacaagaggcaggagaccgaacagcagaagcttggatccgggaagcggctggtcgtggactggactcttaacattggcgaacaggccctcgatatttgcatcgtcagtttcaatcagtcagccagtagtgtatttgttctgggggagcgaaacttcttttgcctgaaggacaatggccagatccgattcatgaagaaattggactggtccccctcgtgtttcttaccctactgctctgtgagcgagggcaccatcaatacgctcataggtaatcataataacatgcttcacatataccaggatgtcacactaaaatgggcaacgcagctaccacatattccagtggctgtccgcgtaggctgcttgcatgacctgaagggcgttatcgtcactttgtcggacgatggccatctccaatgcagctacctaggcacagatccatctctattccaggctcctaacgtgcaatcacgagaactcaactacgacgaactggacgttgaaatgaaggagctgcaaaagattatcaaggacgtgaacaaatctcagggcgtctggcccatgacggagcgggaggacgaccttaatgtgtccgtggtcgtctctccaaacttcgacagcgtgtcacaggctaccgatgtggaggtgggaacagatcttgtcccatccgttacagtgaaagtcacactacagaatagggtaatccttcagaaagccaaactgtcagtatatgtgcagcctcccctagaactgacatgcgaccaatttacttttgagttcatgaccccagatctgacccggacagtttctttcagcgtttacctcaagaggtcatacactccaagcgagctcgaaggcaacgctgtggtgtcctatagccggcctactgatcgcaacccagacggcatcccccgagtgatacagtgtaaatttcggctccccctgaagctgatatgtctccccggtcagccatccaagacggcatcacataagatcactatcgacacaaacaagtccccagtcagtctcctttctctttttcctgggtttgcaagccaatccgatgacgatcaagttaatgttatgggtttccatttcttgggcggggcccgcataaccgtattagcgtccaagacttcacaaaggtatcgtatccaatccgagcaattcgaggatctgtggctcatcacaaatgagctgatactaagactccaggagtacttcgagaagcagggcgttaaggacttcgcttgctcctttagcgggagtatccctctgcaggagtattttgagctgattgaccatcattttgaattgcggatcaatggagaaaagctggaggagctgttgagcgaaagagctgtgcagttcagggccatacagaggagattgctggcccgcttcaaggataagactccggcacctttgcagcacctggacacccttctagatggaacctataaacaggtcattgcccttgccgatgctgtagaggagaatcagggcaatctttttcagagtttcacgagattgaaatctgcaacccacctcgtgattttgcttattgctctatggcagaaattatcagctgatcaagtcgccatcctggaggcagcctttctgccgctccaggaggatacccaagagctgggctgggaggagaccgtggacgcggccatcagtcacctgcttaagacctgtctgagcaaaagcagtaaagaacaggccctaaacctgaattcacaactgaacatccccaaagacaccagtcagctcaagaagcatatcaccctgttatgcgaccgcctcagcaagggaggtagactgtgcctgtccaccgacgctgctgcccctcaaacaatggttatgccgggtgggtgcacaactatcccggagagcgatctggaggagaggtcagtggagcaggattccacggaattgtttaccaatcataggcacctgactgccgaaactcctcggcccgaagtcagcccactccaaggcgtgtccgaatag

SEQ ID NO: 259923 - DNA, 2664 bp, Artificial Sequence
  derived and/or modified sequence
atgtctctgttcaaagctagggattggtggtccaccatcctgggcgacaaggaggaatttgaccagggatgcctgtgcctcgccaatgttgacaacagcggaaacggacaggacaagattatcgtcggctcttttatggggtacttgcgcatcttctccccccacccagctaagactggggacggggcccaggctgaagacctgcttctcgaagtcgacctccgggaccccgtgctgcaggtcgaagtgggcaaattcgtaagtggcacagaaatgctgcatttggcggtccttcattctagaaaactgtgcgtgtatagcgtgtcagggacgttagggaacgtggagcatggaaaccagtgtcagatgaagctcatgtacgagcacaatcttcagcggacagcttgcaatatgacctatggcagcttcgggggtgtgaagggacgagacctaatctgtatccagtccatggacggtatgctgatggtgtttgaacaggagagctacgctttcggacgttttctgccaggttttctgctgccaggccccttggcctactcaagcaggactgattccttcctaacagtctcatcatgtcagcaggtcgaaagctataaataccaagtgcttgcttttgccactgatgctgataaaagacaagaaacagagcaacagaagctggggtccggcaagcgtcttgtggtggactggacactcaacatcggcgagcaggccctcgatatttgcatcgtcagtttcaatcagtcagccagctctgttttcgtgttaggcgaacggaattttttttgcctgaaggataatggccagatcaggtttatgaaaaagttagattggtccccttcttgcttcctgccttactgctctgtttctgaaggcactattaacacgctgatcggcaatcataacaatatgctgcacatctaccaggatgtgaccctcaagtgggcaactcagctcccacatatccctgttgcggttcgtgtgggatgcttgcacgacctaaagggcgtgattgttacacttagcgatgacggccaccttcagtgctcctatctgggaacagacccatcattatttcaagcgcctaatgtacagtctcgcgagttaaactacgatgagttggacgtcgagatgaaggaattgcagaaaatcatcaaggatgtgaacaagtcacaaggcgtctggcccatgacagagcgggaggacgatttaaatgtgagtgtggtggtgtcgcctaacttcgacagcgtgtctcaggcgaccgatgtggaggtggggaccgacttggtcccgagcgttacggttaaagtgacccttcagaaccgagtgatcctccaaaaagctaaactgtcagtgtatgtccagcctccgctggagcttacatgcgatcaatttaccttcgaattcatgacacctgatctaacaaggaccgtctcctttagcgtataccttaaacggagctatactccatcggagctggaagggaacgccgtggtgtcctacagcagacccactgttcagaatagtttagggatcccaagagtgattcagtgcaagttcagactgccccttaagctgatttgcctgccaggacagccttccaagaccgcatcccacaaaattacaatcgatacaaataaatcacctgtttccttactgagtttgtttcctggcttcgcctcacagtctgatgacgaccaggtgaatgtcatgggatttcactttctaggcggtgcacgcatcaccgtattagcgtcaaaaaccagtcagaggtacagaatacagagcgaacaattcgaagacttgtggcttattacaaatgagctgatcctcagacttcaggagtactttgaaaagcagggcgtgaaggatttcgcttgctcattcagtggtagcatcccgctccaagagtacttcgagctaattgaccaccatttcgagctgaggataaacggtgagaaactggaagaactactgtccgaaagagcagtccagtttcgggcgattcagaggcgcctactcgctcgctttaaagacaagactccagctccactgcaacacctcgacacactcttagatgggacgtacaaacaggtcatagctttggccgatgcagtagaggagaatcagggcaacctgttccagtctttcacacggttgaagtccgccacgcacctggtaatcttgctaatcgctttatggcagaagctgtccgccgaccaggtggcaattctcgaagcagcctttctgccactacaggaggatacgcaggagctcggatgggaagagacagtggacgctgccatttctcatctcttgaagacttgcctgtctaagtcttcaaaggagcaggccctcaacctgaacagccagctcaacattcctaaggacacttcacaactgaaaaaacatataaccctgctgtgcgacagactgtccaaaggagggaggctgtgcctcagcacagacgccgcagcaccacagaccatggtgatgccaggcggttgtaccactatacccgagtccgacctggaggaacgcagtgtggaacaagattccacagaactttttacaaaccataggcaccttacggctgagaccccaagaccagaagtgtcccccctacagggggtgtccgagtag

SEQ ID NO: 259924 - DNA, 2664 bp, Artificial Sequence
  derived and/or modified sequence
atgagcctcttcaaggcccgggactggtggagcaccatcctgggggacaaggaggagtttgaccagggctgcctgtgcctggccaacgtggacaacagcggaaatggccaggacaagatcatcgtgggcagcttcatgggctacctgcgcatcttcagcccccacccagccaagacaggagatggagcccaggccgaggacctgctgctggaggtggacctgcgggaccctgtgctgcaggtggaggtgggcaagtttgtgtctggaacagagatgctgcacctggccgtgctgcacagcaggaagctgtgtgtgtacagcgtgtctggcaccctgggcaatgtggagcacggcaaccagtgccagatgaagctgatgtatgagcacaacctgcagaggacagcctgcaacatgacctacggcagctttggaggagtgaagggccgggacctgatctgcatccagagcatggatggcatgctgatggtgtttgagcaggagagctatgccttcggccgcttcctgcccggcttcctgctgcccggccccctggcctacagcagcaggacagacagcttcctgactgtgagcagctgccagcaggtggagagctacaagtaccaggtgctggcctttgccacagatgctgacaagaggcaggagacagagcagcagaagctgggcagcggcaagaggctggtggtggactggaccctgaacattggagagcaggccctggacatctgcatcgtgtccttcaaccagagcgccagctctgtgtttgtgctgggggagaggaacttcttctgcctgaaggacaatggccagatccgcttcatgaagaagctggactggagccccagctgcttcctgccctactgcagcgtgtctgagggcaccatcaacaccctgattggcaaccacaacaacatgctgcacatctaccaggatgtgaccctgaagtgggccacccagctgccccacatccctgtggccgtgcgggtgggctgcctgcatgacctgaagggcgtgattgtgaccctgagtgatgatggccacctgcagtgcagctacctgggcacagaccccagcctcttccaggcccccaacgtgcagagccgggagctgaactatgatgagctggatgtggagatgaaggagctgcagaagatcatcaaggatgtgaacaagagccagggcgtgtggcccatgacagagcgggaggatgacctgaatgtgtctgtggtggtgagccccaactttgattctgtgtcccaggccacagatgtggaggtgggcacagacctggtgcccagcgtgacagtgaaggtgaccctgcagaacagagtcatcctgcagaaggccaagctgtctgtgtatgtgcagccccccctggagctgacctgtgaccagttcacctttgagttcatgaccccagacctgaccaggacagtgtccttctctgtgtacctgaagaggagctacacccccagcgagctggagggcaatgctgtggtgtcctacagccggcccacagacaggaacccagatggcatccccagggtcatccagtgcaagttccggctgcccctgaagctgatctgcctgcccggccagcccagcaagacagccagccacaagatcaccatcgacaccaacaagagccctgtgtccctgctgagcctcttccctggctttgccagccagagtgatgatgaccaggtgaatgtgatgggcttccacttcctgggcggggcccgcatcaccgtgctggccagcaagaccagccagcgctaccgcatccagagcgagcagtttgaggacctgtggctgatcaccaatgagctgatcctgcggctgcaggagtactttgagaagcagggcgtgaaggactttgcctgcagcttcagcggcagcatccccctgcaggagtactttgagctgattgaccaccactttgagctgcgcatcaacggggagaagctggaggagctgctgtctgaaagagctgtgcagttccgggccatccagaggcggctgctggcccgcttcaaggacaagaccccagcccccctgcagcacctggacaccctgctggatggcacctacaagcaggtgattgccctggctgatgctgtggaggagaaccagggcaacctcttccagagcttcacccggctgaagagcgccacccacctggtgatcctgctgattgccctgtggcagaagctgtctgctgaccaggtggccatcctggaggccgccttcctgcccctgcaggaggacacccaggagctgggctgggaggagaccgtggatgctgccatcagccacctgctgaagacctgcctgagcaagagcagcaaggagcaggccctgaacctgaacagccagctgaacatccccaaggacaccagccagctgaagaagcacatcaccctgctgtgtgaccggctgagcaaaggaggccgcctgtgcctgagcacagatgctgctgccccccagaccatggtgatgcctgggggctgcaccaccatccctgagagtgacctggaggagaggtctgtggagcaggacagcacagagctgttcaccaaccaccgccacctgacagctgagacccccaggcctgaggtgagccccctgcagggcgtgtctgagtag

SEQ ID NO: 259925 - DNA, 2664 bp, Artificial Sequence
  derived and/or modified sequence
atgagcctcttcaaggcccgggactggtggagcaccatcctgggggacaaggaggagtttgaccagggctgcctgtgcctggccaacgtggacaacagcggaaatggccaggacaagatcatcgtgggcagcttcatgggctacctgcgcatcttcagcccccacccagccaagacaggagatggagcccaggccgaggacctgctgctggaggtggacctgcgggaccctgtgctgcaggtggaggtgggcaagtttgtgtctggaacagagatgctgcacctggccgtgctgcacagcaggaagctgtgtgtgtacagcgtgtctggcaccctgggcaatgtggagcacggcaaccagtgccagatgaagctgatgtatgagcacaacctgcagaggacagcctgcaacatgacctacggcagctttggaggagtgaagggccgggacctgatctgcatccagagcatggatggcatgctgatggtgtttgagcaggagagctatgccttcggccgcttcctgcccggcttcctgctgcccggccccctggcctacagcagcaggacagacagcttcctgactgtgagcagctgccagcaggtggagagctacaagtaccaggtgctggcctttgccacagatgctgacaagaggcaggagacagagcagcagaagctgggcagcggcaagaggctggtggtggactggaccctgaacattggagagcaggccctggacatctgcatcgtgtccttcaaccagagcgccagctctgtgtttgtgctgggggagaggaacttcttctgcctgaaggacaatggccagatccgcttcatgaagaagctggactggagccccagctgcttcctgccctactgcagcgtgtctgagggcaccatcaacaccctgattggcaaccacaacaacatgctgcacatctaccaggatgtgaccctgaagtgggccacccagctgccccacatccctgtggccgtgcgggtgggctgcctgcatgacctgaagggcgtgattgtgaccctgagtgatgatggccacctgcagtgcagctacctgggcacagaccccagcctcttccaggcccccaacgtgcagagccgggagctgaactatgatgagctggatgtggagatgaaggagctgcagaagatcatcaaggatgtgaacaagagccagggcgtgtggcccatgacagagcgggaggatgacctgaatgtgtctgtggtggtgagccccaactttgattctgtgtcccaggccacagatgtggaggtgggcacagacctggtgcccagcgtgacagtgaaggtgaccctgcagaacagagtcatcctgcagaaggccaagctgtctgtgtatgtgcagccccccctggagctgacctgtgaccagttcacctttgagttcatgaccccagacctgaccaggacagtgtccttctctgtgtacctgaagaggagctacacccccagcgagctggagggcaatgctgtggtgtcctacagccggcccaccgtgcagaacagcctgggcatccccagggtcatccagtgcaagttccggctgcccctgaagctgatctgcctgcccggccagcccagcaagacagccagccacaagatcaccatcgacaccaacaagagccctgtgtccctgctgagcctcttccctggctttgccagccagagtgatgatgaccaggtgaatgtgatgggcttccacttcctgggcggggcccgcatcaccgtgctggccagcaagaccagccagcgctaccgcatccagagcgagcagtttgaggacctgtggctgatcaccaatgagctgatcctgcggctgcaggagtactttgagaagcagggcgtgaaggactttgcctgcagcttcagcggcagcatccccctgcaggagtactttgagctgattgaccaccactttgagctgcgcatcaacggggagaagctggaggagctgctgtctgaaagagctgtgcagttccgggccatccagaggcggctgctggcccgcttcaaggacaagaccccagcccccctgcagcacctggacaccctgctggatggcacctacaagcaggtgattgccctggctgatgctgtggaggagaaccagggcaacctcttccagagcttcacccggctgaagagcgccacccacctggtgatcctgctgattgccctgtggcagaagctgtctgctgaccaggtggccatcctggaggccgccttcctgcccctgcaggaggacacccaggagctgggctgggaggagaccgtggatgctgccatcagccacctgctgaagacctgcctgagcaagagcagcaaggagcaggccctgaacctgaacagccagctgaacatccccaaggacaccagccagctgaagaagcacatcaccctgctgtgtgaccggctgagcaaaggaggccgcctgtgcctgagcacagatgctgctgccccccagaccatggtgatgcctgggggctgcaccaccatccctgagagtgacctggaggagaggtctgtggagcaggacagcacagagctgttcaccaaccaccgccacctgacagctgagacccccaggcctgaggtgagccccctgcagggcgtgtctgagtag

SEQ ID NO: 259926 - DNA, 2664 bp, Artificial Sequence
  derived and/or modified sequence
atgagcctgttcaaggcccgggactggtggagcaccatcctgggcgacaaagaggagtttgatcaagggtgcctgtgtctggctaatgtggataactccggaaacggtcaagataagatcatagtaggctccttcatggggtaccttcggattttttccccacatcctgccaagactggagacggcgctcaggctgaggatctcctactggaggtggacctgcgagacccagtcttgcaggtagaagtgggaaagttcgtgtccgggactgaaatgctgcatctcgccgtcctccattcacgtaagttatgcgtgtactcagttagcgggacattgggcaatgtggaacacggaaaccagtgccaaatgaagttgatgtatgagcataatttgcaacgtacagcttgcaatatgacatacggctcctttggcggcgtgaaggggcgcgatctcatctgtattcagtccatggacggaatgctaatggtgtttgaacaggagagctacgctttcggcaggttcctccccggcttcctcttaccaggcccactcgcctactcttccaggacggactcattcctaactgtgtcatcatgccagcaggtggagtcctacaagtatcaggtgttggcctttgctacagacgccgataaacgccaagagacagaacagcaaaaactggggtccggaaaaagactcgtcgttgattggaccctgaacattggtgaacaggctctggatatttgtatagtgagcttcaatcagagcgccagctctgtcttcgtgttgggtgagcggaacttcttctgcctgaaggataacgggcaaatccgcttcatgaaaaagctagactggtctccttcgtgcttcctaccctattgtagcgtctctgaaggaaccattaataccctaatcggcaaccacaataacatgttacatatttatcaggacgtcaccttgaagtgggccactcagttacctcacatacctgtggcagtgcgggttggctgtctgcacgatctgaagggagtgattgtgacgctttccgatgatggccacctacaatgcagctaccttggaacagatccatccctgttccaagcgcccaatgtgcaatcacgggaactcaactacgatgaacttgatgtcgagatgaaagaattacagaaaatcataaaagacgtgaacaagtcccagggcgtgtggccaatgacagagcgggaggatgatctgaatgtctcagttgtggtgtcgcccaacttcgactctgtctctcaagccaccgacgtcgaggtgggaactgaccttgtcccatcagtaacagtgaaggttaccctgcagaatcgtgtaatcctacagaaggctaagttatcggtttacgtccagccccccctagagttgacttgcgaccaatttacattcgagttcatgaccccagacctcactcggacggtgtccttctcggtgtacctgaaacgtagctataccccgtcggagctcgaagggaatgctgtggtgagctactcaagaccaactgacaggaacccagatggtattccccgggtaattcaatgcaagtttcgtttacctctgaagctcatttgcctgcctggccagcctagcaaaacagccagccacaaaataactattgacaccaacaagtcccctgttagcctgctgtcactgtttcccggattcgctagtcaatctgacgacgaccaggtcaatgtgatgggatttcactttctgggtggtgccagaatcacggtcttggcgagcaagactagccaaaggtacagaattcaaagcgagcagtttgaggatctctggctgatcaccaatgaattaatactgagactccaggagtacttcgagaagcaaggggtgaaggacttcgcatgctcgtttagcggctcgataccgctgcaagaatacttcgaactgatcgaccatcactttgagctgcgaatcaacggcgagaaactagaagagctgctctccgagagggcagtacagttccgggcaatccagcgccgactactggcacggttcaaagacaagacacctgcaccactgcaacatcttgatacacttctggacggcacttacaagcaggtgatagccctagctgatgcagtggaagagaaccagggcaacctctttcagtcttttacacggctcaagagtgccacccatctggtgattcttttaatagctctttggcagaaattgtcagctgatcaggtagctatactcgaagccgcctttctgccactgcaggaggatacgcaagagctcgggtgggaggagactgtcgacgcagctatctcccacctgctgaaaacttgtctgtcaaagtcgagcaaggaacaggcattgaatcttaatagccagctcaatattccgaaggacacaagtcaactgaaaaaacacatcactctgctctgtgacagactgtcaaagggcggacgtctgtgtctcagcacagatgccgctgctccccaaacaatggtgatgcccggcggctgcacaaccattcctgagagcgacctggaggagcggtcagtggagcaagactctacggagctgttcacaaaccaccgacatctcaccgccgagactccccggcccgaggtctcaccactgcaaggcgtctccgagtag

SEQ ID NO: 259927 - DNA, 2664 bp, Artificial Sequence
  derived and/or modified sequence
atgagcctgttcaaggcccgggactggtggagcaccatcctgggcgataaagaagagttcgatcagggctgtttgtgcctagcaaatgtggataattcaggcaacggccaggataagataatcgtgggctcctttatggggtatctaaggattttctcccctcaccccgccaagacaggagatggcgcccaagcagaggaccttctgcttgaggtggatctgcgggatccagtcctgcaggtggaagtaggaaagtttgtctccgggacagagatgctgcatctggccgtgcttcactcgcgaaagctgtgtgtatattcggtttccggcacacttggcaatgttgaacatggcaaccagtgccaaatgaaactgatgtatgagcacaatctgcagcgcacggcctgcaacatgacctacggatctttcggcggcgtgaaaggccgggacctgatctgcatacagtctatggatgggatgctcatggtcttcgaacaggaaagttacgccttcggcagatttttgcctggatttctgctgcccggccccttggcttatagcagccggacggattctttcttaaccgtgtccagttgccagcaagtggaaagctataagtaccaggtgctggcctttgcaacagatgcagataagcgtcaggagaccgagcaacagaagcttggcagcggtaaacggctggtcgttgactggacccttaacataggagaacaggccctcgatatctgtatcgtttcctttaatcagtccgcttcatctgtgtttgtccttggagaacgtaatttcttctgccttaaggataacggccagatccggtttatgaagaagctggattggtcaccaagctgcttcctaccatactgtagtgtctccgagggaaccattaacaccctgatcgggaaccataacaacatgctccacatttaccaggatgtgactttaaaatgggcaactcagctcccccacattccggtggcagtacgcgtgggctgtctccacgaccttaagggcgttatagtaacactcagcgatgatggtcatctgcagtgtagttatcttggaaccgatccaagtctattccaagcccctaacgtgcagtcgcgggagctaaattacgatgaactcgatgtcgagatgaaggaactgcaaaagatcatcaaagacgtgaataaatctcaaggtgtatggccaatgacagagcgggaggatgatcttaacgtgagcgtggtggtctcacctaacttcgactctgtcagtcaagcgaccgacgtagaggttggaacagacctggtgccctcagtgaccgtgaaagtaactctccagaaccgcgtgatccttcagaaggctaagctcagcgtctacgttcagcctccattggagttgacctgcgaccagttcacctttgagttcatgaccccagatctgaccagaaccgttagtttttccgtttacctcaagagatcttatactccctccgaactggagggaaatgccgttgtgtcctattcccgaccaactgttcagaacagtctgggtattccgcgggtgattcagtgcaaatttagactgccccttaagttgatctgtctaccaggtcaacctagtaagacagccagccataaaatcaccatagacacgaacaaaagtccagtatctctgctctctctgtttccagggttcgcttctcaaagcgacgacgatcaggttaatgtgatgggtttccactttctgggcggcgcccgaataactgtgctggcatccaagacatcccagcgttataggatccagtctgaacaattcgaagatttatggctgatcacaaacgagttgatacttagattgcaggagtatttcgaaaagcaaggcgtgaaagatttcgcgtgcagcttttccggtagcatccctttgcaagagtattttgagctgattgatcatcattttgaactcaggattaacggggaaaaactggaggaattgctctctgagagggccgtgcagttccgtgctatccagagaaggcttctcgctaggtttaaagataaaaccccagctccccttcagcacctggacactctgctggatggcacctataaacaggtgattgccctggccgacgccgtggaggaaaaccagggcaacctcttccagtcctttacccggctcaagagtgcaacccatcttgtcattctgctcatcgccctgtggcagaaactctccgccgaccaggtagccattctggaagcagcctttctgccattacaggaagatacccaggaattgggctgggaagaaacagtggacgcagccataagccatctgcttaagacttgcctcagtaagtccagcaaagagcaagcgctgaacctgaactcccaattgaatatccctaaggatacctcacaacttaaaaagcacattactttgctctgtgatcggctgtctaagggggggcgattatgcctgagtactgatgccgccgcacctcaaacaatggtgatgccagggggatgcactacaatacccgaaagtgacctggaggagcgaagcgttgagcaggactccaccgagctgtttacaaaccacaggcaccttaccgcagaaaccccgcgcccggaggtgagtcccctccagggcgtttccgagtag

SEQ ID NO: 259928 - DNA, 2664 bp, Artificial Sequence
  derived and/or modified sequence
atgtcactcttcaaggccagggattggtggagtacaatcctcggggacaaagaagaatttgatcaaggctgcctgtgcctggcaaacgttgataattcaggcaatggtcaggataagattatagtgggaagctttatggggtacctgcgcatattcagcccgcaccctgctaagaccggtgacggtgctcaggccgaggacctccttctggaagtcgacctaagagacccagtacttcaagttgaagtcggaaagtttgtgtccggtaccgaaatgctgcacttggcagtcctccattctagaaaactgtgtgtgtacagcgtgtctggaacattaggcaacgtcgagcatggaaaccagtgccagatgaagcttatgtatgaacacaatttgcagcggactgcctgcaacatgacctatgggagttttggcggtgtgaaaggaagggacctgatttgcatccaatcaatggatggaatgctgatggtgttcgagcaggagagctatgcgtttgggcgattcttgccagggtttctcctgcccggtccactcgcctatagctctcggacagacagttttctgacggtgtcatcatgccagcaagttgagagttacaagtatcaggttctggcctttgccacagatgccgataaaaggcaggaaacagaacagcagaagttggggagcgggaagcgcttagtcgttgattggaccctcaacattggcgagcaggctttagatatctgcatcgtctcctttaaccagtctgcctcctcggtcttcgtactaggcgaaagaaactttttctgccttaaagataacggtcaaattcggtttatgaaaaagctagattggtcacctagttgtttcctaccttattgtagcgtgtccgaggggacgatcaatactctaattggaaaccacaataacatgctccacatctatcaagacgtgactctgaaatgggccactcagctccctcatatacccgtggcagtgcgcgttggctgcttacatgatttgaagggggtgatcgtaacactcagtgatgacgggcacctgcaatgcagttatctcggtacggatccatcactgttccaagctcccaatgtgcagagcagggagctcaactatgacgaactggacgtggaaatgaaggaattacagaagatcataaaagatgttaataagagccagggagtgtggccaatgaccgaacgtgaagatgatctgaatgtgagtgtggtcgtttcccctaactttgatagcgtaagtcaggcaaccgacgttgaagttgggacagacctggtgccaagtgtgactgtaaaggtgaccttacagaacagggtcatcttgcagaaggccaaattatccgtgtatgtgcagcccccattggagctcacatgtgatcaattcacatttgagttcatgaccccagatctgacaagaactgtcagcttcagcgtgtatttaaagaggagctacacgccgagtgagctcgaaggtaatgcagtagttagctactctaggcccactgatcgtaaccctgatggaattccccgagtgattcagtgcaagtttcggctgcccctgaagctgatatgcctgcctggacagccgagtaaaactgccagtcacaagattaccattgatacaaataagtctcccgtctcactgttaagcctgtttccaggcttcgcctctcagtccgacgatgaccaggtcaacgttatgggatttcacttcctgggaggggctcggattacagtgctggcttccaaaacttcccagagatatagaattcagtccgagcagttcgaagatttgtggttgatcactaatgagttgatcttacggctgcaggaatattttgagaagcaaggcgttaaggactttgcgtgctctttctcagggagcatccctctgcaggagtatttcgagcttatcgaccaccactttgaactccgaattaatggtgagaagctggaagaactgctaagcgagcgagcagttcaattcagggccatacaacggcgactgctggccaggttcaaggacaaaacacccgctcctcttcagcacctggacacgctgctggacggtacctataagcaggtgatagccctcgccgacgctgtggaggagaatcaggggaatctttttcaatcgttcacacgcctgaaaagcgccactcatctggttatccttttaattgccctctggcaaaaattgagcgcagatcaagtcgcaattctggaagccgctttcctaccattgcaggaggatacccaggaactgggctgggaagagacggtcgacgccgcaatatcacacctgctaaagacctgtctgagcaagagtagtaaggagcaagccttgaacttgaactctcagttaaatattcctaaggatactagtcagttgaagaagcacataacactgctgtgcgacaggctgtcaaagggaggtaggctgtgtttgagtactgatgctgcagcgcctcagacaatggtgatgccaggaggctgcaccacgatccccgaaagcgatctggaggaaaggtccgtggagcaggactcaaccgagctgtttactaatcaccgtcacttgactgcagagaccccccgacccgaagtctccccgctccagggtgtctccgagtag

SEQ ID NO: 259929 - DNA, 2664 bp, Artificial Sequence
  derived and/or modified sequence
atgtcgctctttaaggcgagggactggtggagtacaattctgggagacaaggaagagttcgaccaaggctgcctttgcctggcaaacgtggataatagcggaaatggccaggacaaaatcatcgtaggctcattcatgggttacctccgcattttcagtccccatccagctaagaccggggacggcgctcaggccgaggacctgctcttggaggtagacctccgcgacccagtcttgcaagtggaagtcggaaagttcgttagtgggaccgagatgctgcatctagccgtcctccatagcagaaagttgtgcgtgtactccgtgtctgggactctcgggaatgtggagcacggtaatcagtgtcagatgaaactgatgtacgagcacaatctgcaacgcacagcatgtaatatgacttacggttcttttgggggtgtaaaagggcgagatctcatatgcatccaaagcatggatggaatgctgatggtgttcgagcaggagagttacgccttcggccgtttccttccgggattcctgctccctgggccactagcttacagtagccggactgactcattcctgactgtcagctcatgccagcaggtggagtcgtataagtatcaggtccttgccttcgcaaccgatgcagacaagagacaagaaaccgagcagcagaaacttggctcgggcaaacggctggtggtagattggacattaaatattggagagcaagctttggatatctgcattgtttccttcaaccagtcggcttccagtgttttcgtgcttggcgaacgcaactttttttgtctgaaggacaacggacagatcagatttatgaagaaactggattggtcgccctcatgctttctgccatattgctcagtttccgagggaacaatcaatacactgattggtaaccataataacatgctgcacatctatcaggacgtcaccctgaaatgggcgactcaactacctcacatacctgtggccgttcgcgtagggtgtcttcacgaccttaaaggcgtaatagtgactctaagcgacgatgggcacttacagtgtagttacctcggaaccgaccccagcttgtttcaagctcccaatgtgcagtccagagagctgaactacgacgaacttgacgtggaaatgaaagaactgcagaagattattaaagacgttaataaaagccagggtgtttggccaatgaccgaacgggaagacgatttgaatgtgtccgtggttgtgtctcccaactttgatagcgtttcacaggcaaccgacgtcgaggtgggaaccgacctagtgcccagtgtgactgtgaaagtgactctgcagaaccgagtcattctccaaaaggccaagctctccgtctacgtacaaccgccattggagctcacctgcgaccagtttacgttcgagttcatgacaccggatcttacccgtacagtctctttctccgtctacctaaaacgaagttacactccatccgaattggaaggtaacgccgttgtgagttatagcagacctacggtgcagaactcactcgggatccccagggttattcaatgcaagttccgcctacctttaaaattaatttgcctgcctggccagcccagcaaaaccgccagtcataagattactatagatacaaacaagtctccagtatctctcctttccctgttcccgggatttgcctctcaatctgacgacgaccaggtcaacgtgatgggctttcactttttgggcggtgctcgcattaccgtactagctagcaagacgtctcagaggtatagaattcaatccgaacagttcgaagacctgtggttaataacaaatgagctgattctccggctgcaagaatactttgagaaacaaggcgttaaggactttgcctgctctttctctgggtctatcccactgcaggagtactttgaacttatcgatcatcattttgagctccgaatcaacggagaaaagctggaagagcttctgagtgagagggccgtgcagtttcgcgctatccaacgacgccttctggccagattcaaggacaagacacccgctcctttgcaacacttagacacacttctggacggcacatacaaacaggtgatcgcactggccgacgcagtggaggagaatcaaggcaaccttttccagtcttttaccaggcttaagagcgctacccatctggtgatactgctgatcgccctgtggcaaaagctgtctgccgatcaggtggctattttggaggcggctttcctccccctacaagaagacacacaggaactcggttgggaggagaccgttgacgccgctatcagccaccttctgaagacatgcctaagtaagagctcgaaagaacaagctctgaatctgaactcccagctgaatattcccaaagacacttcccagctgaagaaacatatcaccctactatgtgaccggctgtctaagggcggacggctgtgtctatccacagacgcagccgcaccacagaccatggtaatgcctgggggatgcacaaccattccagagtccgatctggaagaacggtccgtggaacaagactctaccgagttgtttacgaaccaccgacatttgacagccgagactcctcgacctgaagtgagtcctcttcaaggagtgagcgaatag

SEQ ID NO: 259930 - DNA, 4027 bp, Artificial Sequence
  derived and/or modified sequence
acctgcgcagtggcgtccgttgtaagtgctatgacaacagggcgaagatggctcagagttaggctggagaggggaggtgtcccttccgctgcggccgtcgggtttctgctacatcccattcaccgcctcctccatcctttcctcctcggtgtgagcagcaggacttgcatttgttctcgcctgcctagtgtcttccaagggatagatgccgtttcctctgctggtctctgggggtgacggggggcgcaggggagcttcttgggggaatcactccaactctgtggagctggtggtgctgcctggtggggctctctctttgcccgggacgtggaacaactttcagctggaggacgagagggaatagtgaagctaaaggttgcttttctctgcaccgtccgttcttgctccctctgctccatcactgggaccttgtcaggcgttcataaagcaaaatttgccgaacgagggttcgcagaaaggtggggcagagctcatctgacgtggcatcagtgtgaaagaaaatgtctttatttaaagcccgtgattggtggtctactattctgggagataaagaagaatttgatcaaggctgtttgtgtctggctaatgttgacaatagtggaaatggacaagataaaataattgtgggtagctttatgggatacctaaggatctttagcccccatcctgcaaaaacaggagatggagctcaagccgaagatttgcttctagaagtggatctacgagatccagtacttcaagtggaagtaggaaagtttgtttcaggtaccgaaatgctacatttggctgtgttacattctagaaaactttgtgtctactctgtctcaggaaccttgggtaatgtggaacatgggaaccaatgtcagatgaaattgatgtatgaacataatcttcagagaacagcctgcaatatgacctatggatcatttggtggtgtaaaaggtcgagatttaatttgcatccagtctatggatgggatgctgatggtatttgagcaggagagctatgcttttggaagatttctccctggctttcttctgcctggtcctcttgcctacagttcccgtacagattccttccttactgtctcttcctgccaacaagtggaaagttataagtaccaggtacttgcttttgcaacagatgcagataaaaggcaggagactgaacagcaaaaacttggttctggaaaaagactagttgtggattggactctaaatattggagagcaagcccttgacatatgtattgtctctttcaatcagtcggcatcctctgtttttgttcttggtgagagaaactttttttgccttaaggataatggacaaattcgattcatgaagaagcttgattggagcccaagttgttttctgccatattgctcagtttctgaaggaacaataaatactttgattggaaatcataataacatgctgcatatttatcaagatgtgacactgaagtgggccacccaacttccccacattcctgtagcagtaagagtgggctgtttgcatgatttaaagggagtgatagtcactctgagtgatgatggtcacttgcagtgttcatacctggggacagatccttctctgttccaagctccaaacgttcaatctcgagaactaaactatgatgaacttgatgtagaaatgaaagaacttcagaaaatcatcaaagatgttaacaaatcacaaggtgtttggcccatgactgagagagaagatgacttgaacgtttctgtcgtggtttctcctaactttgattcagtttctcaagcgaccgatgttgaggtgggaactgaccttgtcccttctgtcacggtgaaggtcacactgcagaacagagtgatattgcaaaaagccaaattatcagtctacgtgcaaccaccattagaattgacttgtgatcagttcacctttgaatttatgacaccagatttgactagaacagtaagcttttctgtttatctgaaaagaagttatacaccatcagaattggaaggaaatgctgttgtttcttattccagaccaacagatcgaaatcctgatggcattccgcgagttatccaatgtaaatttagacttcccctaaagttaatttgcctaccaggtcagccttcaaaaactgcaagccacaaaattactattgataccaacaaatctccagtcagtcttcttagtctcttcccaggttttgccagtcagtcagatgatgatcaggtgaatgtaatgggttttcacttcttaggaggtgctcgaattactgttcttgcttccaaaacttctcaacgatatcgcattcagagtgaacaatttgaagatctttggctcataaccaatgagcttattcttcgccttcaagaatattttgaaaaacagggagtcaaagattttgcatgttctttttcgggatctataccccttcaagaatattttgagttgattgatcatcattttgagctacggataaatggtgaaaaattagaagaactcttatctgagagagctgtacaatttcgggccattcaacgccggctactagcaagattcaaagataaaactcctgcccctcttcaacacctggacaccttgttagatggaacctacaagcaggtaattgctctagcagatgcagtggaggaaaaccaaggcaatctgttccagtcattcaccaggctgaagagtgccacccatttggtgattctgctgatcgcgctgtggcagaagcttagtgctgaccaggttgctattctggaagcggcatttctgccgctacaagaagacactcaagaattgggctgggaagaaacggtggatgccgccatttcccacctgttgaagacttgcctgtcgaagagttctaaggagcaggctttgaacctcaacagccagctgaacatacccaaagacacaagccaactgaagaaacatatcaccttgctctgcgatagattatccaaaggtggccgtctctgcctaagtaccgatgcagcagccccacagaccatggtcatgccaggtggttgtactacaatcccagagtcagacctagaagaaagatcagtagaacaagactctacagaactgtttaccaaccacagacatctcactgcagagacacccaggcctgaagtttcacccctccaaggagtctcggaataattcaagtagagttgtttggttgagaggaacatccccatctcaaggccgaacctgtgtgaacctcatgccaagcacagatatagggctggcgcaggtgcttcctaaagctcaccttcctggagatgacatgcatagaaagaggggttgggactttttacttcactaggagaacttgtaacaccatggggaagtcagctgaaacttgtcttgttttgccaggaaaggaagtagttgcctttggtcatccatctgctaatagtcacagaatacagtgaaatgacatagttttgggttagattttataatgcaaagattcagatccaaaataatttcataccccattttttcacagaattcttatatagtaaatgtatcaagtttaataaagcatctcattgtcaaataatatcttggattttatttataattagagggatttatgagtgattgctctacattatttcttcaaaggaaaggaaaggaattgaagactttgctactctctggtaagacttgaatgtgattattttataaataaaagaaccactatgaaactttcatgtgatttgttctattaagctaaacgtggaagaagggaagttttctagtattgtatgaaaatgtttaaatattttcaaggaagctagtacattaacatccccttttcattaccccattgggtggcaccttttaaaaatccaggttattaaaggattcacactttattacagttaaaatttaaggtttttatgtgtaagaagtgaaagaaactttgctaatttcaagttcgaattacagttgtgagattgatttatttaaataaaaatatgcctttgccagtt

SEQ ID NO: 259931 - DNA, 4019 bp, Artificial Sequence
  derived and/or modified sequence
agtggcgtccgttgtaagtgctatgacaacagggcgaagatggctcagagttaggctggagaggggaggtgtcccttccgctgcggccgtcgggtttctgctacatcccattcaccgcctcctccatcctttcctcctcggtgtgagcagcaggacttgcatttgttctcgcctgcctagtgtcttccaagggatagatgccgtttcctctgctggtctctgggggtgacggggggcgcaggggagcttcttgggggaatcactccaactctgtggagctggtggtgctgcctggtggggctctctctttgcccgggacgtggaacaactttcagctggaggacgagagggaatagtgaagctaaaggttgcttttctctgcaccgtccgttcttgctccctctgctccatcactgggaccttgtcaggcgttcataaagcaaaatttgccgaacgagggttcgcagaaaggtggggcagagctcatctgacgtggcatcagtgtgaaagaaaatgtctttatttaaagcccgtgattggtggtctactattctgggagataaagaagaatttgatcaaggctgtttgtgtctggctaatgttgacaatagtggaaatggacaagataaaataattgtgggtagctttatgggatacctaaggatctttagcccccatcctgcaaaaacaggagatggagctcaagccgaagatttgcttctagaagtggatctacgagatccagtacttcaagtggaagtaggaaagtttgtttcaggtaccgaaatgctacatttggctgtgttacattctagaaaactttgtgtctactctgtctcaggaaccttgggtaatgtggaacatgggaaccaatgtcagatgaaattgatgtatgaacataatcttcagagaacagcctgcaatatgacctatggatcatttggtggtgtaaaaggtcgagatttaatttgcatccagtctatggatgggatgctgatggtatttgagcaggagagctatgcttttggaagatttctccctggctttcttctgcctggtcctcttgcctacagttcccgtacagattccttccttactgtctcttcctgccaacaagtggaaagttataagtaccaggtacttgcttttgcaacagatgcagataaaaggcaggagactgaacagcaaaaacttggttctggaaaaagactagttgtggattggactctaaatattggagagcaagcccttgacatatgtattgtctctttcaatcagtcggcatcctctgtttttgttcttggtgagagaaactttttttgccttaaggataatggacaaattcgattcatgaagaagcttgattggagcccaagttgttttctgccatattgctcagtttctgaaggaacaataaatactttgattggaaatcataataacatgctgcatatttatcaagatgtgacactgaagtgggccacccaacttccccacattcctgtagcagtaagagtgggctgtttgcatgatttaaagggagtgatagtcactctgagtgatgatggtcacttgcagtgttcatacctggggacagatccttctctgttccaagctccaaacgttcaatctcgagaactaaactatgatgaacttgatgtagaaatgaaagaacttcagaaaatcatcaaagatgttaacaaatcacaaggtgtttggcccatgactgagagagaagatgacttgaacgtttctgtcgtggtttctcctaactttgattcagtttctcaagcgaccgatgttgaggtgggaactgaccttgtcccttctgtcacggtgaaggtcacactgcagaacagagtgatattgcaaaaagccaaattatcagtctacgtgcaaccaccattagaattgacttgtgatcagttcacctttgaatttatgacaccagatttgactagaacagtaagcttttctgtttatctgaaaagaagttatacaccatcagaattggaaggaaatgctgttgtttcttattccagaccaacagtgcaaaatagtttaggcattccgcgagttatccaatgtaaatttagacttcccctaaagttaatttgcctaccaggtcagccttcaaaaactgcaagccacaaaattactattgataccaacaaatctccagtcagtcttcttagtctcttcccaggttttgccagtcagtcagatgatgatcaggtgaatgtaatgggttttcacttcttaggaggtgctcgaattactgttcttgcttccaaaacttctcaacgatatcgcattcagagtgaacaatttgaagatctttggctcataaccaatgagcttattcttcgccttcaagaatattttgaaaaacagggagtcaaagattttgcatgttctttttcgggatctataccccttcaagaatattttgagttgattgatcatcattttgagctacggataaatggtgaaaaattagaagaactcttatctgagagagctgtacaatttcgggccattcaacgccggctactagcaagattcaaagataaaactcctgcccctcttcaacacctggacaccttgttagatggaacctacaagcaggtaattgctctagcagatgcagtggaggaaaaccaaggcaatctgttccagtcattcaccaggctgaagagtgccacccatttggtgattctgctgatcgcgctgtggcagaagcttagtgctgaccaggttgctattctggaagcggcatttctgccgctacaagaagacactcaagaattgggctgggaagaaacggtggatgccgccatttcccacctgttgaagacttgcctgtcgaagagttctaaggagcaggctttgaacctcaacagccagctgaacatacccaaagacacaagccaactgaagaaacatatcaccttgctctgcgatagattatccaaaggtggccgtctctgcctaagtaccgatgcagcagccccacagaccatggtcatgccaggtggttgtactacaatcccagagtcagacctagaagaaagatcagtagaacaagactctacagaactgtttaccaaccacagacatctcactgcagagacacccaggcctgaagtttcacccctccaaggagtctcggaataattcaagtagagttgtttggttgagaggaacatccccatctcaaggccgaacctgtgtgaacctcatgccaagcacagatatagggctggcgcaggtgcttcctaaagctcaccttcctggagatgacatgcatagaaagaggggttgggactttttacttcactaggagaacttgtaacaccatggggaagtcagctgaaacttgtcttgttttgccaggaaaggaagtagttgcctttggtcatccatctgctaatagtcacagaatacagtgaaatgacatagttttgggttagattttataatgcaaagattcagatccaaaataatttcataccccattttttcacagaattcttatatagtaaatgtatcaagtttaataaagcatctcattgtcaaataatatcttggattttatttataattagagggatttatgagtgattgctctacattatttcttcaaaggaaaggaaaggaattgaagactttgctactctctggtaagacttgaatgtgattattttataaataaaagaaccactatgaaactttcatgtgatttgttctattaagctaaacgtggaagaagggaagttttctagtattgtatgaaaatgtttaaatattttcaaggaagctagtacattaacatccccttttcattaccccattgggtggcaccttttaaaaatccaggttattaaaggattcacactttattacagttaaaatttaaggtttttatgtgtaagaagtgaaagaaactttgctaatttcaagttcgaattacagttgtgagattgatttatttaaataaaaatatgcctttgccagtt

SEQ ID NO: 259932 - DNA, 2664 bp, Artificial Sequence
  derived and/or modified sequence
atgagcctgttcaaggccagagactggtggagcaccatcctgggcgacaaggaggagttcgaccagggctgcctgtgcctggccaacgtggacaacagcggcaacggccaggacaagatcatcgtgggcagcttcatgggctacctgagaatcttcagcccccaccccgccaagaccggcgacggcgcccaggccgaggacctgctgctggaggtggacctgagagaccccgtgctgcaggtggaggtgggcaagttcgtgagcggcaccgagatgctgcacctggccgtgctgcacagcagaaagctgtgcgtgtacagcgtgagcggcaccctgggcaacgtggagcacggcaaccagtgccagatgaagctgatgtacgagcacaacctgcagagaaccgcctgcaacatgacctacggcagcttcggcggcgtgaagggcagagacctgatctgcatccagagcatggacggcatgctgatggtgttcgagcaggagagctacgccttcggcagattcctgcccggcttcctgctgcccggccccctggcctacagcagcagaaccgacagcttcctgaccgtgagcagctgccagcaggtggagagctacaagtaccaggtgctggccttcgccaccgacgccgacaagagacaggagaccgagcagcagaagctgggcagcggcaagagactggtggtggactggaccctgaacatcggcgagcaggccctggacatctgcatcgtgagcttcaaccagagcgccagcagcgtgttcgtgctgggcgagagaaacttcttctgcctgaaggacaacggccagatcagattcatgaagaagctggactggagccccagctgcttcctgccctactgcagcgtgagcgagggcaccatcaacaccctgatcggcaaccacaacaacatgctgcacatctaccaggacgtgaccctgaagtgggccacccagctgccccacatccccgtggccgtgagagtgggctgcctgcacgacctgaagggcgtgatcgtgaccctgagcgacgacggccacctgcagtgcagctacctgggcaccgaccccagcctgttccaggcccccaacgtgcagagcagagagctgaactacgacgagctggacgtggagatgaaggagctgcagaagatcatcaaggacgtgaacaagagccagggcgtgtggcccatgaccgagagagaggacgacctgaacgtgagcgtggtggtgagccccaacttcgacagcgtgagccaggccaccgacgtggaggtgggcaccgacctggtgcccagcgtgaccgtgaaggtgaccctgcagaacagagtgatcctgcagaaggccaagctgagcgtgtacgtgcagccccccctggagctgacctgcgaccagttcaccttcgagttcatgacccccgacctgaccagaaccgtgagcttcagcgtgtacctgaagagaagctacacccccagcgagctggagggcaacgccgtggtgagctacagcagacccaccgacagaaaccccgacggcatccccagagtgatccagtgcaagttcagactgcccctgaagctgatctgcctgcccggccagcccagcaagaccgccagccacaagatcaccatcgacaccaacaagagccccgtgagcctgctgagcctgttccccggcttcgccagccagagcgacgacgaccaggtgaacgtgatgggcttccacttcctgggcggcgccagaatcaccgtgctggccagcaagaccagccagagatacagaatccagagcgagcagttcgaggacctgtggctgatcaccaacgagctgatcctgagactgcaggagtacttcgagaagcagggcgtgaaggacttcgcctgcagcttcagcggcagcatccccctgcaggagtacttcgagctgatcgaccaccacttcgagctgagaatcaacggcgagaagctggaggagctgctgagcgagagagccgtgcagttcagagccatccagagaagactgctggccagattcaaggacaagacccccgcccccctgcagcacctggacaccctgctggacggcacctacaagcaggtgatcgccctggccgacgccgtggaggagaaccagggcaacctgttccagagcttcaccagactgaagagcgccacccacctggtgatcctgctgatcgccctgtggcagaagctgagcgccgaccaggtggccatcctggaggccgccttcctgcccctgcaggaggacacccaggagctgggctgggaggagaccgtggacgccgccatcagccacctgctgaagacctgcctgagcaagagcagcaaggagcaggccctgaacctgaacagccagctgaacatccccaaggacaccagccagctgaagaagcacatcaccctgctgtgcgacagactgagcaagggcggcagactgtgcctgagcaccgacgccgccgccccccagaccatggtgatgcccggcggctgcaccaccatccccgagagcgacctggaggagagaagcgtggagcaggacagcaccgagctgttcaccaaccacagacacctgaccgccgagacccccagacccgaggtgagccccctgcagggcgtgagcgagtag

SEQ ID NO: 259933 - DNA, 2664 bp, Artificial Sequence
  derived and/or modified sequence
atgagcctgttcaaggccagagactggtggagcaccatcctgggcgacaaggaggagttcgaccagggctgcctgtgcctggccaacgtggacaacagcggcaacggccaggacaagatcatcgtgggcagcttcatgggctacctgagaatcttcagcccccaccccgccaagaccggcgacggcgcccaggccgaggacctgctgctggaggtggacctgagagaccccgtgctgcaggtggaggtgggcaagttcgtgagcggcaccgagatgctgcacctggccgtgctgcacagcagaaagctgtgcgtgtacagcgtgagcggcaccctgggcaacgtggagcacggcaaccagtgccagatgaagctgatgtacgagcacaacctgcagagaaccgcctgcaacatgacctacggcagcttcggcggcgtgaagggcagagacctgatctgcatccagagcatggacggcatgctgatggtgttcgagcaggagagctacgccttcggcagattcctgcccggcttcctgctgcccggccccctggcctacagcagcagaaccgacagcttcctgaccgtgagcagctgccagcaggtggagagctacaagtaccaggtgctggccttcgccaccgacgccgacaagagacaggagaccgagcagcagaagctgggcagcggcaagagactggtggtggactggaccctgaacatcggcgagcaggccctggacatctgcatcgtgagcttcaaccagagcgccagcagcgtgttcgtgctgggcgagagaaacttcttctgcctgaaggacaacggccagatcagattcatgaagaagctggactggagccccagctgcttcctgccctactgcagcgtgagcgagggcaccatcaacaccctgatcggcaaccacaacaacatgctgcacatctaccaggacgtgaccctgaagtgggccacccagctgccccacatccccgtggccgtgagagtgggctgcctgcacgacctgaagggcgtgatcgtgaccctgagcgacgacggccacctgcagtgcagctacctgggcaccgaccccagcctgttccaggcccccaacgtgcagagcagagagctgaactacgacgagctggacgtggagatgaaggagctgcagaagatcatcaaggacgtgaacaagagccagggcgtgtggcccatgaccgagagagaggacgacctgaacgtgagcgtggtggtgagccccaacttcgacagcgtgagccaggccaccgacgtggaggtgggcaccgacctggtgcccagcgtgaccgtgaaggtgaccctgcagaacagagtgatcctgcagaaggccaagctgagcgtgtacgtgcagccccccctggagctgacctgcgaccagttcaccttcgagttcatgacccccgacctgaccagaaccgtgagcttcagcgtgtacctgaagagaagctacacccccagcgagctggagggcaacgccgtggtgagctacagcagacccaccgtgcagaacagcctgggcatccccagagtgatccagtgcaagttcagactgcccctgaagctgatctgcctgcccggccagcccagcaagaccgccagccacaagatcaccatcgacaccaacaagagccccgtgagcctgctgagcctgttccccggcttcgccagccagagcgacgacgaccaggtgaacgtgatgggcttccacttcctgggcggcgccagaatcaccgtgctggccagcaagaccagccagagatacagaatccagagcgagcagttcgaggacctgtggctgatcaccaacgagctgatcctgagactgcaggagtacttcgagaagcagggcgtgaaggacttcgcctgcagcttcagcggcagcatccccctgcaggagtacttcgagctgatcgaccaccacttcgagctgagaatcaacggcgagaagctggaggagctgctgagcgagagagccgtgcagttcagagccatccagagaagactgctggccagattcaaggacaagacccccgcccccctgcagcacctggacaccctgctggacggcacctacaagcaggtgatcgccctggccgacgccgtggaggagaaccagggcaacctgttccagagcttcaccagactgaagagcgccacccacctggtgatcctgctgatcgccctgtggcagaagctgagcgccgaccaggtggccatcctggaggccgccttcctgcccctgcaggaggacacccaggagctgggctgggaggagaccgtggacgccgccatcagccacctgctgaagacctgcctgagcaagagcagcaaggagcaggccctgaacctgaacagccagctgaacatccccaaggacaccagccagctgaagaagcacatcaccctgctgtgcgacagactgagcaagggcggcagactgtgcctgagcaccgacgccgccgccccccagaccatggtgatgcccggcggctgcaccaccatccccgagagcgacctggaggagagaagcgtggagcaggacagcaccgagctgttcaccaaccacagacacctgaccgccgagacccccagacccgaggtgagccccctgcagggcgtgagcgagtag

SEQ ID NO: 259934 - DNA, 618 bp, Artificial Sequence
  derived and/or modified sequence
atggcctggcagggcctggccgccgagttcctgcaggtgcccgccgtgaccagagcctacaccgccgcctgcgtgctgaccaccgccgccgtgcagctggagctgctgagccccttccagctgtacttcaacccccacctggtgttcagaaagttccaggtgtggagactggtgaccaacttcctgttcttcggccccctgggcttcagcttcttcttcaacatgctgttcgtgttcagatactgcagaatgctggaggagggcagcttcagaggcagaaccgccgacttcgtgttcatgttcctgttcggcggcgtgctgatgaccctgctgggcctgctgggcagcctgttcttcctgggccaggccctgatggccatgctggtgtacgtgtggagcagaagaagccccagagtgagagtgaacttcttcggcctgctgaccttccaggcccccttcctgccctgggccctgatgggcttcagcctgctgctgggcaacagcatcctggtggacctgctgggcatcgccgtgggccacatctactacttcctggaggacgtgttccccaaccagcccggcggcaagagactgctgcagacccccggcttcctgtag

SEQ ID NO: 259935 - DNA, 618 bp, Artificial Sequence
  derived and/or modified sequence
atggcatggcaaggactggctgcggagtttttacaagtacctgcggtaacgcgcgcatatactgctgcgtgcgtcctcacgaccgccgctgtccagctggaactgctgtcacctttccagctctacttcaacccccatctggtgttccggaagttccaagtttggcggctcgtaaccaacttcttattcttcgggccacttggcttctctttctttttcaacatgctgtttgtgtttaggtattgcagaatgctcgaagagggctctttccggggacgcaccgctgactttgtttttatgttcttatttggaggtgtgttgatgactttactcggcctactaggtagtctgttcttcctcggacaagccctcatggctatgcttgtgtacgtttggtcgagacgatctccaagggtgcgggtgaacttctttgggctactgacctttcaggcaccttttctgccatgggctcttatgggcttctcgctcctactcgggaactccatccttgtggatctccttgggattgcggtggggcacatctactatttcctcgaagatgttttccccaatcagccgggtggcaagcggcttttacagacacctggttttctctag

SEQ ID NO: 259936 - DNA, 618 bp, Artificial Sequence
  derived and/or modified sequence
atggcctggcagggcctggccgctgagttcctgcaggtgcctgctgtgacccgggcctacacagctgcctgtgtgctgaccacagctgctgtgcagctggagctgctgagccccttccagctgtacttcaacccccacctggtgttcaggaagttccaggtgtggaggctggtgaccaacttcctgttcttcggccccctgggcttctccttcttcttcaacatgctgtttgtgttccgctactgcaggatgctggaggagggcagcttccggggccgcacagctgactttgtgttcatgttcctgtttggaggagtgctgatgaccctgctgggcctgctgggcagcctcttcttcctgggccaggccctgatggccatgctggtgtatgtgtggagccgccgcagcccccgggtgcgggtgaacttcttcggcctgctgaccttccaggcccccttcctgccctgggccctgatgggcttcagcctgctgctgggcaacagcatcctggtggacctgctgggcattgctgtgggccacatctactacttcctggaggatgtgttccccaaccagcccggcggcaagaggctgctgcagaccccaggcttcctgtag

SEQ ID NO: 259937 - DNA, 618 bp, Artificial Sequence
  derived and/or modified sequence
atggcctggcagggcctggccgccgagttcctgcaggtgcccgccgtgactcgcgcatatactgcggcatgcgtcctgacaacagctgcagtgcaattagaactcttgtccccattccaactgtacttcaacccacacctggtgttcagaaaattccaggtgtggcgcttagtgacgaacttcttattctttggaccactgggattctctttctttttcaatatgctgttcgttttccgatactgccgtatgttagaagaagggagttttcgaggccggacagcagatttcgtattcatgtttctattcggaggggttctgatgactctgctggggttgcttggcagtctattttttttgggccaggcactgatggccatgttggtgtatgtctggagccggcgcagccccagagtccgggtcaacttcttcggcctactcacgttccaggccccttttctcccctgggctttgatggggtttagtctcctgctggggaactccatactggtggacctactgggaattgccgtcggtcatatttattatttcctagaagatgttttccctaaccagcctggcggaaaaaggctcctgcagacacccggatttctatag

SEQ ID NO: 259938 - DNA, 618 bp, Artificial Sequence
  derived and/or modified sequence
atggcctggcagggcctggccgctgaattcctgcaggttcctgcagtcactagagcctatactgctgcctgcgtcctgaccaccgcagccgtgcagcttgagctgctgagtccatttcagctctattttaaccctcatctcgtgttcagaaagtttcaggtgtggcgcctcgtgaccaactttctcttctttgggcctttaggatttagcttcttttttaatatgctcttcgtgttcaggtattgtcggatgttagaagagggctcttttagaggcaggactgctgacttcgtgttcatgtttctcttcggcggtgtcctcatgaccctcctcggcttgctgggctccctttttttcctgggtcaggcgctcatggcaatgcttgtctatgtctggtcccggagaagcccgcgagtccgcgtcaatttctttgggcttctcaccttccaagcgcctttcttaccttgggcccttatgggattcagcctcttgctgggtaactctatcctagtggacctcctcggcattgccgtcggccacatttattactttctagaagacgtgttccccaaccaacctggtgggaagcgacttctgcagacccccggttttctgtag

SEQ ID NO: 259939 - protein, 132 aa, Artificial Sequence
  derived and/or modified sequence
MISITEWQKIGVGITGFGIFFILFGTLLYFDSVLLAFGNLLFLTGLSLIIGLRKTFWFFFQRHKLKGTSFLLGGVVIVLLRWPLLGMFLETYGFFSLFKGFFPVAFGFLGNVCNIPFLGALFRRLQGTSSMV

SEQ ID NO: 259940 - DNA, 399 bp, Artificial Sequence
  derived and/or modified sequence
atgatcagcatcaccgagtggcagaagatcggcgtgggcatcaccggcttcggcatcttcttcatcctgttcggcaccctgctgtacttcgacagcgtgctgctggccttcggcaacctgctgttcctgaccggcctgagcctgatcatcggcctgagaaagaccttctggttcttcttccagagacacaagctgaagggcaccagcttcctgctgggcggcgtggtgatcgtgctgctgagatggcccctgctgggcatgttcctggagacctacggcttcttcagcctgttcaagggcttcttccccgtggccttcggcttcctgggcaacgtgtgcaacatccccttcctgggcgccctgttcagaagactgcagggcaccagcagcatggtgtag

SEQ ID NO: 259941 - DNA, 399 bp, Artificial Sequence
  derived and/or modified sequence
atgataagcatcacagagtggcagaagatcggcgtcggaatcactggattcggtattttcttcattctgtttggaaccctcctctattttgactcagtgctcctggcctttggaaatttgctgtttctgaccggcttgtcactgatcattggcttgcgaaagacgttttggtttttcttccaaaggcataagctcaaagggacctcatttttactcgggggggttgtgattgtgctcctacgctggcctttactcggcatgtttctggagacttatggctttttttctctgttcaaaggcttctttcctgtggcctttgggttcctggggaatgtgtgtaacataccattcctaggggctctattcagaagacttcaagggacgtccagtatggtatag

SEQ ID NO: 259942 - DNA, 883 bp, Artificial Sequence
  derived and/or modified sequence
agtagaagcacctgcgtggtgtgcgggggtggagcgggggctggagggagagttaatgatttgccacaggctcatttcgcaacttaaccaagggtcagcttcccgtgaccatgtaccagctgcgtcctctgggccacgctccacttgcccgcttccacccggaaagccccccaggctgagtgcggcatgatctccatcaccgaatggcagaagattggtgtggggatcaccggtttcggcatcttcttcatcctctttggaacactcctgtactttgattccgtgctcctggcctttggaaacctgctgttcctgacgggcctgtccctcatcattggcctgaggaagaccttttggttcttcttccaacggcacaaactcaagggaaccagcttcctcctggggggtgtggttatcgtgctcctacgctggcccctcctcggcatgttcctggaaacctacggattcttcagcctctttaagggctttttccctgtcgccttcggcttcctgggcaatgtctgcaacatccccttcctgggtgcgctgttccggagacttcaaggcactagctcgatggtctgaaaaacagagatgagctccttgaacttggatcattggttgagggggctagagggagaatgggaaccaccccctcagtcccctgcactgactcactccccgacatatccggacctccccaagtccagaaggaaggaatggagctgagcaactgacgtcaaatccccaagtcgactcaagaggctgccaggaagcagagatgcagaccccaaggagactgggctggggctggtatcacaccctcactctatatttatgggaggaaaagtgaagattaaattcccaagttgtgcgtgtgtct

SEQ ID NO: 259943 - DNA, 399 bp, Artificial Sequence
  derived and/or modified sequence
atgatcagcatcacagagtggcagaagattggagtgggcatcactggatttggcatcttcttcatcctgtttggcaccctgctgtactttgacagcgtgctgctggcctttggaaacctgctcttcctgaccggcctgagcctcatcatcggcctgaggaagaccttctggttcttcttccagaggcacaagctgaagggcaccagcttcctgctgggcggcgtggtgattgtgctgctgcgctggcccctgctgggcatgttcctggagacctacggcttcttcagcctcttcaagggcttcttccctgtggccttcggcttcctgggcaatgtgtgcaacatccccttcctgggcgccctcttccggcggctgcagggcaccagctccatggtgtag

SEQ ID NO: 259944 - DNA, 399 bp, Artificial Sequence
  derived and/or modified sequence
atgatcagcatcaccgagtggcagaagatcggcgtgggcatcaccggctttggcatttttttcatccttttcggaacactcctgtattttgactctgttcttctcgcatttggcaaccttttatttctgacaggcctgtccttaattatcggactgcggaagactttttggttttttttccaacgacataagcttaaagggacatcctttctgctcggcggagtcgtgattgtcctgctccggtggcctttgttgggcatgtttctcgagacatatggctttttttccctctttaaagggttttttccggtcgctttcggcttcctggggaacgtctgtaacatcccatttctgggcgcactgttcagaaggctccagggcacaagctccatggtgtag

SEQ ID NO: 259945 - DNA, 399 bp, Artificial Sequence
  derived and/or modified sequence
atgatttctattacggagtggcagaaaatcggcgtggggatcacgggttttgggatcttctttatcctgttcggtacactcctgtatttcgactcagtgctgttggcttttggtaacctgctgtttctgacaggtttatcattgatcatcggtcttagaaaaaccttttggtttttttttcagagacataaactgaagggcactagctttctgctgggcggagtggtgattgtcctgcttcgctggccactgctgggcatgttcttggagacctacggattttttagcctgtttaagggatttttccccgttgcattcggattcctcggcaacgtatgcaacattccttttctgggtgccctgttccgacggctccagggcacctcttccatggtgtag

SEQ ID NO: 259946 - protein, 327 aa, Artificial Sequence
  derived and/or modified sequence
MRALPGLLEARARTPRLLLLQCLLAAARPSSADGSAPDSPFTSPPLREEIMANNFSLESHNISLTEHSSMPVEKNITLERPSNVNLTCQFTTSGDLNAVNVTWKKDGEQLENNYLVSATGSTLYTQYRFTIINSKQMGSYSCFFREEKEQRGTFNFKVPELHGKNKPLISYVGDSTVLTCKCQNCFPLNWTWYSSNGSVKVPVGVQMNKYVINGTYANETKLKITQLLEEDGESYWCRALFQLGESEEHIELVVLSYLVPLKPFLVIVAEVILLVATILLCEKYTQKKKKHSDEGKEFEQIEQLKSDDSNGIENNVPRHRKNESLGQ

SEQ ID NO: 259947 - DNA, 984 bp, Artificial Sequence
  derived and/or modified sequence
atgagagccctgcccggcctgctggaggccagagccagaacccccagactgctgctgctgcagtgcctgctggccgccgccagacccagcagcgccgacggcagcgcccccgacagccccttcaccagcccccccctgagagaggagatcatggccaacaacttcagcctggagagccacaacatcagcctgaccgagcacagcagcatgcccgtggagaagaacatcaccctggagagacccagcaacgtgaacctgacctgccagttcaccaccagcggcgacctgaacgccgtgaacgtgacctggaagaaggacggcgagcagctggagaacaactacctggtgagcgccaccggcagcaccctgtacacccagtacagattcaccatcatcaacagcaagcagatgggcagctacagctgcttcttcagagaggagaaggagcagagaggcaccttcaacttcaaggtgcccgagctgcacggcaagaacaagcccctgatcagctacgtgggcgacagcaccgtgctgacctgcaagtgccagaactgcttccccctgaactggacctggtacagcagcaacggcagcgtgaaggtgcccgtgggcgtgcagatgaacaagtacgtgatcaacggcacctacgccaacgagaccaagctgaagatcacccagctgctggaggaggacggcgagagctactggtgcagagccctgttccagctgggcgagagcgaggagcacatcgagctggtggtgctgagctacctggtgcccctgaagcccttcctggtgatcgtggccgaggtgatcctgctggtggccaccatcctgctgtgcgagaagtacacccagaagaagaagaagcacagcgacgagggcaaggagttcgagcagatcgagcagctgaagagcgacgacagcaacggcatcgagaacaacgtgcccagacacagaaagaacgagagcctgggccagtag

SEQ ID NO: 259948 - DNA, 4281 bp, Artificial Sequence
  derived and/or modified sequence
gcataactgatggagggccgggcgcggtaagagcgtctcgggggagtggggcaaggcggccgggcccctcccattccgccttttcttcagcgtcctacccgcggcactggctgcgagcgccgggccacctgcgagtgtgcgcagggactctggacacccgcggcggcgagctgagggagcagtctccacgaggacccaggcggaccctctggcgccatgcgcgccctccccggcctgctggaggccagggcgcgtacgccccggctgctcctcctccagtgccttctcgctgccgcgcgcccaagctcggcggacggcagtgccccagattcgccttttacaagtccacctctcagagaagaaataatggcaaataacttttccttggagagtcataacatatcactgactgaacattctagtatgccagtagaaaaaaatatcactttagaaaggccttctaatgtaaatctcacatgccagttcacaacatctggggatttgaatgcagtaaatgtgacttggaaaaaagatggtgaacaacttgagaataattatcttgtcagtgcaacaggaagcaccttgtatacccaatacaggttcaccatcattaatagcaaacaaatgggaagttattcttgtttctttcgagaggaaaaggaacaaaggggaacatttaatttcaaagtccctgaacttcatgggaaaaacaagccattgatctcttacgtaggggattctactgtcttgacatgtaaatgtcaaaattgttttcctttaaattggacctggtacagtagtaatgggagtgtaaaggttcctgttggtgttcaaatgaataaatatgtgatcaatggaacatatgctaacgaaacaaagctgaagataacacaacttttggaggaagatggggaatcttactggtgccgtgcactattccaattaggcgagagtgaagaacacattgagcttgtggtgctgagctatttggtgcccctcaaaccatttcttgtaatagtggctgaggtgattcttttagtggccaccattctgctttgtgaaaagtacacacaaaagaaaaagaagcactcagatgaggggaaagaatttgagcagattgaacagctgaaatcagatgatagcaatggtatagaaaataatgtccccaggcatagaaaaaatgagtctctgggccagtgaatacaaaacatcatgtcgagaatcattggaagatatacagagttcgtatttcagctttgtttatccttcctgttaagagcctctgagtttttagttttaaaaggatgaaaagcttatgcaacatgctcagcaggagcttcatcaacgatatatgtcagatctaaaggtatattttcattctgtaattatgttacataaaagcaatgtaaatcagaataaatatgttagaccagaataaaattaattatattctggtcttcaaaggacacacagaacagatatcagcagaatcacttaatacttcatagaacaaaaatcactcaaaacctgtttataaccaaagaattcatgaaaaagaaagcctttgccatttgtcttagaaagttattttttaaaaaaaaatcatacttactattagtatctatggaagtatatgtaacaatttttatgtaaaggtcatctttctgtgatagtgaaaaaatatgtctttactaagttgaaatgaatactttctgcctttgctaatgatagttattctacaatctccacaagaaaaatataccttttatccggaaatattggtttaaggcaaataaataaaactgtgcttgctctaaagctctgcactacaaaagcaaattttccagtctttattccactcataaccactgctttccccaccaggctaaagtgcttcttagtcttaaatagggtttttaacttcataaggtacaccattgtttatgttttagggtgcaggtccatatagtcgtaatacttaaaacactgctacactgatgcttttgtggctcatggtttcctggttctttgatttaacacctggcttcctggtatctatggctggttaaatatctaaacctgcattattagtgctttacaataataattcccttgactgaagtccagaaatactaaagcacttcttttttattgctgtgaatgccttagacttatcttccaaaataggatacttcgtttctattgcatatataactgaaatattttataaactcactgtaatcaaatcttataaaatctgaatcaacatgaaaagttgtcaatgcttgaatgaatactaaaatcataccacaagatactagataacataaatgaccatgaagtgtcccactgctcaaagggcaacaactttaagaacagaagcaaagagtggtggtgtggaacccaagattcttggcgactagggaatttaaaggttggggaggaggaattcaatgatttgacaagaaatactttataaaaatttgctccatgtattggctaagaaaaatataataaaattttggtagtgaaaattgtatcactaatgtttaccaatattactagtatgaataatacacataaggtagtgacttggaagctgctcaatactttgttgctataacaaaatgcaatattttgttgtaaagcatcttaactacacatataagtttgctgaacttgaatacatcccggtaatggcaaacttcattttattcttggttttcattttattctggtctcagggccatacatttattttagtttaattaattattattttgacaacattacttgggtaatatctatataatggtagataaccaatcagttagcttaattaatctaagctatttgaattcagggaaatattagtcaaatctgctgtttgactaaatacaattcaaagcagtgtatttgtgacttggaatatagaacacaaacaaatgtgtaacccatctgcagtatgcattcttccattttaccaccactaaccattgaggctcatacaattttcaagcaacaagcattgcttcccaaaggtaaaataatcaggaatatttctatagtaaatggagtttttaattggcaatactgtttatttttttctagcaaagacaatttatctcagtaaccttaaataggaaaagtactcaaaaattaaagttgacttttggctttttgtagtctctctggaggacttccagaaaattaccactgttggattttaatctgcttccattaaccaatcttacagagatgataaatgaattaactaatattgaccaaatataaattgactgcaaataataagccgcataaaagttgaagtaggaaaactactccaagtttatatattaggcaccttggggaattctcttagtctttccagctaacaaggattttcagcataataagtagatttaatgatggcataaaattcccagatactttcatatacattttttgccaaagtgtaaatcttctccttttgcagtctttttgttattatcccaacatctagctgctcaggccctaatttagaactcattctgatattttcttcttctgtattaattaatacttatgggtcatgaatccctgctcctttgacctttttaatagctcatgaatccatcccattgcctccccaactctgcccacacctgctgcaacactaatgccttgattttcctacctcagtctccttttctattaatccctcttttgcgtggctgcctgagtccactttctcaaacacaaacctcactatgcaactttggaatctctgtaggctcacctttgccatttcttaatattgcattctccaaattgctaatctctatccagtctcttgaactagacttggcacatggagattccgctcagaaagtgctcttcacacttctacctgcttgactaaccccagattatctttcaagactttaatctgatcttgtgtcttagagaagcccccatacctggtagagcatgtaccatcttacatgcttaaataactccacatttatttgtgtttattactctgtgttataaatatacatttgttggtctctctcttggattattttgtttctttgtcctgtaactaccactgaaagggtgcaatacagctttcttgaaatgtgtattgaacggatgaatgtataaataaaaattaaattttgtaaatttctgcttattcttagaaaaagaatctaaattgtgacaaatcagaattgaaaaaagtattctaataaagaaaaacaagcttttataacttca

SEQ ID NO: 259949 - DNA, 984 bp, Artificial Sequence
  derived and/or modified sequence
atgagggctctccctggcctgctggaagcacgcgcccgcacaccgcgattgctgctcttgcagtgcctgttagctgcagccaggccttcgagcgcggacggctcggccccagattccccatttacctccccaccgttaagggaagaaattatggcgaataacttcagcctggaaagccacaatatttcgctgacggaacactcaagcatgcctgtggagaaaaatataacccttgaaaggcctagtaatgtaaaccttacatgccaatttactaccagtggcgatctcaatgcagtgaatgttacatggaaaaaggatggcgaacagctcgagaacaactacctggtgagcgctactggttctactttgtatacacagtaccgatttacaattatcaacagcaagcagatgggctcttacagctgtttctttcgcgaagagaaggagcaaagaggcacattcaatttcaaggttcccgaactgcacggcaaaaataaaccgctcatctcctacgtcggggactctacagtgttgacctgcaagtgccagaattgtttccccttaaattggacttggtattccagcaatggttccgttaaggtgcccgtgggtgtacagatgaataagtacgtcatcaatgggacctatgccaacgaaaccaagctgaaaatcactcagctgttagaggaggacggtgagtcttactggtgcagagctctctttcagcttggggagtctgaggagcatatagaattagtcgtattgtcctatctcgtaccgttgaagccatttctggttattgttgcggaggtcatcctcttggtggctacaatactcctctgtgagaaatatactcaaaagaagaagaaacactccgatgaaggtaaagaattcgagcaaatcgagcaactgaagtccgatgattccaacggcatagagaataacgtcccacggcaccggaaaaatgagtccttgggtcaatag

SEQ ID NO: 259950 - DNA, 984 bp, Artificial Sequence
  derived and/or modified sequence
atgagggccctgcccggcctgctggaggcccgggcccggaccccccggctgctgctgctgcagtgcctgctggccgccgcccggcccagcagcgcagatggcagcgccccagacagccccttcaccagcccccccctgcgggaggagatcatggccaacaacttcagcctggagagccacaacatcagcctgacagagcacagctccatgcctgtggagaagaacatcaccctggagcggcccagcaatgtgaacctgacctgccagttcaccaccagcggggacctgaatgctgtgaatgtgacctggaagaaggatggagagcagctggagaacaactacctggtgtctgccaccggcagcaccctgtacacccagtaccgcttcaccatcatcaacagcaagcagatgggcagctacagctgcttcttccgggaggagaaggagcagaggggcaccttcaacttcaaggtgcctgagctgcacggcaagaacaagcccctcatctcctatgtgggggacagcacagtgctgacctgcaagtgccagaactgcttccccctgaactggacctggtacagcagcaatggatctgtgaaggtgcctgtgggcgtgcagatgaacaagtatgtgatcaatggcacctacgccaatgagaccaagctgaagatcacccagctgctggaggaggatggagagagctactggtgccgggccctcttccagctgggggagagcgaggagcacatcgagctggtggtgctgagctacctggtgcccctgaagcccttcctggtgattgtggccgaggtgatcctgctggtggccaccatcctgctgtgtgagaagtacacccagaagaagaagaagcacagtgatgagggcaaggagtttgagcagatcgagcagctgaagagtgatgacagcaatggaattgaaaataatgtgcccaggcacaggaagaatgaaagcctgggccagtag

SEQ ID NO: 259951 - DNA, 984 bp, Artificial Sequence
  derived and/or modified sequence
atgcgggccctgcccggcctgctggaggcccgggcccggaccccccgactgctactgctgcagtgcctgctcgcagctgcgaggccctcatctgctgacggaagcgccccagactcacctttcacatctccccccttgcgtgaagagatcatggccaacaatttcagcctagagtctcataacatcagcctgacggagcattctagcatgcctgttgagaagaacattaccctggagcggccatccaatgttaaccttacatgtcagttcacaacctctggcgacctgaatgccgtgaatgtgacctggaagaaagatggagaacagttggaaaataactacctcgtaagcgctacgggctccacattgtatacgcagtaccgcttcaccataatcaatagcaagcaaatgggctcctacagctgtttttttagggaagagaaggaacagcggggtaccttcaattttaaggtgcccgaactgcacgggaaaaacaaacctttaataagctacgtaggagattctactgtcctgacatgtaaatgccagaactgcttcccgctgaactggacctggtattcctcgaatggtagcgtcaaggtgccagttggcgtccagatgaacaagtacgtcattaatggaacatatgcgaacgagacgaaactgaagatcacccagcttctcgaggaggacggagagtcgtactggtgtagagccctgttccagttaggagagagtgaagagcatattgagctagtggtgctctcctacctggtgcccctgaagcccttcctcgttatcgtcgccgaagtgatcctcctagtggcaactattctgctatgcgagaagtatacccaaaaaaaaaagaagcattcagacgaagggaaggagtttgagcagatcgagcagctgaagtcagatgacagcaacggcattgagaataacgtaccgagacacagaaagaacgagtctctcggccagtag

SEQ ID NO: 259952 - DNA, 984 bp, Artificial Sequence
  derived and/or modified sequence
atgcgtgccctgccgggacttttggaagctcgggctagaacccctcggttgctcttgctccagtgcttattggccgctgcacgccctagctccgcagacgggtctgctcctgactcccctttcacttctccgccacttcgggaagaaattatggccaataatttttcgctggaatcccataacatcagcctcaccgaacacagttcaatgcctgtggaaaagaacatcacactggagaggccatctaacgttaacctcacctgtcagtttacaacatccggggacttgaacgcagtgaacgtcacttggaaaaaagacggcgagcagttagaaaacaactaccttgtgagcgctaccggttctacactgtacacacagtacaggtttaccatcattaattctaaacagatggggagttacagttgtttcttcagagaagagaaggagcagcgcggaacctttaactttaaggtgcctgagctgcatggaaaaaacaaaccacttatatcgtacgtgggagacagcaccgtgctcacctgtaagtgtcaaaactgcttccccctgaactggacttggtatagttccaatggctccgtgaaagtccccgtcggagtgcagatgaataaatatgtgattaacggcacttacgccaatgagactaagctgaaaataacccagttgttagaggaggacggcgagtcctattggtgccgggctttgtttcaattaggggaatcagaggaacacatcgaactggtggtcctctcttatcttgtgccactgaaacccttcctcgttattgttgctgaagtcatcctgctagtagccacgatactgctatgtgaaaagtacacccaaaaaaagaaaaaacactctgatgaagggaaagaattcgagcaaatcgaacagctcaaatcagacgatagcaacgggattgagaataatgtccccaggcatcgaaagaatgagtccttgggacagtag

SEQ ID NO: 259953 - protein, 311 aa, Artificial Sequence
  derived and/or modified sequence
MDLKLKDCEFWYSLHGQVPGLLDWDMRNELFLPCTTDQCSLAEQILAKYRVGVMKPPEMPQKRRPSPDGDGPPCEPNLWMWVDPNILCPLGSQEAPKPSGKEDLTNISPFPQPPQKDEGSNCSEDKVVESLPSSSSEQSPLQKQGIHSPSDFELTEEEAEEPDDNSLQSPEMKCYQSQKLWQINNQEKSWQRPPLNCSHLIALALRNNPHCGLSVQEIYNFTRQHFPFFWTAPDGWKSTIHYNLCFLDSFEKVPDSLKDEDNARPRSCLWKLTKEGHRRFWEETRVLAFAQRERIQECMSQPELLTSLFDL

SEQ ID NO: 259954 - DNA, 936 bp, Artificial Sequence
  derived and/or modified sequence
atggatttaaagctgaaggactgcgagttctggtacagcctacatggccaggtgcccggactcctggactgggacatgagaaacgagctattcctcccctgtactactgatcagtgctcgctcgccgagcagatcctggccaagtaccgtgttggagtaatgaaacctcctgagatgcctcagaagcgacgaccatctccagacggtgacgggccgccttgcgaaccgaacctctggatgtgggtcgaccccaacatcctgtgtccccttgggagccaagaggccccaaaaccatcagggaaagaggacctgaccaacatttctcccttccctcagccccctcaaaaagacgaagggtctaattgcagtgaagacaaggtagtggagtcactacccagcagtagttcggaacagtcccctctgcaaaagcagggaattcactcaccctccgacttcgagctgacagaggaggaggcagaggaaccggacgacaatagtctgcagtcgcctgaaatgaaatgttaccagtctcagaagctgtggcagatcaacaatcaggaaaagtcatggcagcggccaccattgaattgcagccacctcatcgctttagcccttcgaaacaatccacattgtggattgtctgtacaggaaatctataatttcacccgacagcactttccctttttctggacagcgcccgacggctggaagtctactatccactataatctttgttttctcgacagctttgaaaaagtgcctgatagtctaaaagacgaagacaatgcccgcccaaggagttgcttatggaaattgacgaaggaaggtcatcggcgattctgggaggagacccgggtgctcgccttcgctcagagggagcggattcaggaatgtatgagccagcccgagctgctgacctccctgtttgacctgtag

SEQ ID NO: 259955 - DNA, 936 bp, Artificial Sequence
  derived and/or modified sequence
atggacctgaagctgaaggactgtgagttctggtacagcctgcacggccaggtgcccggcctgctggactgggacatgagaaatgagctgttcctgccctgcaccacagaccagtgcagcctggccgagcagatcctggccaagtacagagtgggcgtgatgaagcccccagagatgccccagaagagaagacccagcccagatggagatggccccccctgtgagcccaacctgtggatgtgggtggaccccaacatcctgtgccccctgggcagccaggaggcccccaagcccagcggcaaggaggacctgaccaacatcagccccttcccccagcccccccagaaggatgagggcagcaactgcagcgaggacaaggtggtggagagcctgcccagcagcagcagcgagcagagccccctgcagaagcagggcatccacagccccagcgactttgagctgacagaggaggaggccgaggagccagatgacaacagcctgcagagccctgagatgaagtgctaccagagccagaagctgtggcagatcaacaaccaggagaagtcctggcagaggcctcccctgaactgcagccacctgattgccctggccctgaggaacaacccccactgcggcctgtctgtgcaggagatctacaacttcacccggcagcacttccccttcttctggacagccccagatggctggaagagcaccatccactacaacctgtgcttcctggacagctttgagaaggtgcctgacagcctgaaggatgaggacaatgcccggcccaggagctgcctgtggaagctgaccaaggagggccaccggcgcttctgggaggagaccagggtgctggcctttgcccagcgggagcgcatccaggagtgcatgagccagcctgagctgctgaccagcctgtttgacctgtag

SEQ ID NO: 259956 - DNA, 936 bp, Artificial Sequence
  derived and/or modified sequence
atggacctgaagctgaaggactgcgagttctggtacagcctgcacggacaggtgcccgggctcctcgactgggatatgagaaatgaactgttcctgccctgcacaacagaccaatgctctctggctgagcagatcctagccaaataccgtgtgggcgtcatgaagcctccagagatgccccagaaacggcgcccttcacccgacggcgatggtcctccatgcgagccgaatttatggatgtgggtggatccaaacattctatgtccccttggaagtcaagaggcccccaagccatcaggcaaagaagatctgacaaacatcagcccgtttccccagccaccccagaaagacgagggatcaaattgttctgaggacaaggtggtggagagtctaccctcttcctcttccgagcagtcacccctgcagaaacagggcatccatagccccagtgatttcgagttgacggaggaggaggccgaggagcctgacgacaactctctgcagagccccgagatgaagtgttaccagtcgcagaagctttggcagattaataaccaggagaagtcatggcagaggccaccactcaactgtagccatctgatcgctctcgccctgcgaaataacccccattgtgggctctcagttcaggaaatctataactttacccgtcaacatttcccgttcttctggactgcccccgacggatggaaatctacaatccactacaatttatgctttctggatagcttcgaaaaggtccctgactctctgaaggacgaggataacgctcggccacgtagttgcctctggaagttaacaaaagagggacacagacggttctgggaagagactcgggtcctggctttcgcacagcgggaacggattcaggagtgcatgagtcaacccgagctgctgactagtctgttcgacctgtag

SEQ ID NO: 259957 - DNA, 936 bp, Artificial Sequence
  derived and/or modified sequence
atggacctgaaattaaaggattgcgagttctggtactcgctgcacggccaggtgcctgggttgctcgactgggatatgaggaacgagctgttcttgccgtgtacgacggaccaatgcagcctggcagaacagattttggctaagtacagggtcggcgtcatgaagccacccgagatgccacagaagcgtagaccatctcctgatggagatggcccaccatgcgagccaaacttatggatgtgggtcgaccccaacatcctttgccctctcggtagccaagaagcacccaaaccatctggaaaagaggatctgacgaacattagccctttcccgcagcccccacaaaaggatgaaggatccaactgcagtgaagacaaagtagttgagtccctgcctagttcctcgtctgagcagtcacccttgcagaagcaaggcattcacagtccatctgatttcgagttaaccgaagaagaggccgaggaacctgacgacaacagcttgcaatcacccgagatgaaatgctatcaaagtcagaaactgtggcagatcaacaaccaggaaaaatcttggcagaggccaccactgaattgttcccatttgatcgccctggctttaagaaacaacccgcattgtggattgtcagtccaggagatttacaatttcacgcgccagcattttccctttttctggacagcccctgacggttggaaatccaccatccactacaacttgtgttttctcgatagttttgagaaggtgcccgattcactgaaagatgaggacaatgctcgtccccgtagctgcctgtggaagctcacaaaggagggtcacaggcgcttttgggaagagactagggtgctcgctttcgcacaaagagagcgcattcaggaatgcatgtcacagcctgaactattaacctctctgtttgatctgtag

SEQ ID NO: 259958 - DNA, 2789 bp, Artificial Sequence
  derived and/or modified sequence
ttcctcttgaagtgactttctgcttccaatcaaagctcaagaattccacctaaaaatgtttttctgctcaaaagctcttttttattacttccatgttttgagccttgttccagaaagctgaggtttctccaggtctgaccactaatcagtgagacattggtgcctctttcttcagtgcttctagcaggcctactgataagctccctagatgagatacactgcataaaaaaatgatgcccaaaggacagctttaagtgcctgctagatatctgttctttcagaagtctctctccacctatctctccagtaaagatggacttaaaactaaaagactgtgaattttggtatagtctccatggccaggtcccagggctgctggactgggacatgaggaatgagttatttctgccttgtaccacagaccagtgctctttagctgagcaaatccttgccaaatacagagtcggagtaatgaagcccccagaaatgcctcagaagaggagacccagtcctgatggagatggtcctccctgtgaacccaatctgtggatgtgggtggaccccaatatcctgtgcccccttggcagccaggaggccccaaagcccagtggaaaagaggatctgacaaacatttctcctttccctcagcccccacaaaaagacgaagggtctaactgctcagaggacaaagtggtagagtctctgccatcttcctccagtgagcagtctcctttacagaagcagggtatccattcccccagtgactttgagctcacagaagaggaggctgaggaaccagacgacaactccctccagtcccctgaaatgaaatgttaccagagccagaaactatggcaaatcaacaaccaagagaagtcctggcaaaggccccctctcaattgtagccaccttattgccctagcattaagaaacaacccccactgtggcctcagtgtgcaggagatctacaatttcacccgacagcatttcccctttttctggacagctccggatggctggaagagcaccattcattacaacctctgcttcctggacagctttgagaaggtgccagacagccttaaggatgaagataatgcaagacctcgctcttgcctttggaagctcactaaggaggggcaccgccgcttttgggaggagactcgtgtcttagcctttgctcaaagggagagaatccaagagtgcatgagtcagccagagttgttgacctctctctttgatctttgaaatgccattgctcccttttggaacactgccttccttactgtgcctacttatcccctgacattcattaatctctaaacttacccagcctggttggtgccaagtctgtctttagctactgttacaataatggtgttaagtaaagttagaggtgggtacaggggagacagaacttaaatccaggtggagagtcatggaaagtcgcacgaggagagtggctgttgttccaaattttgagcaaaggaaaagaaatcctagaaacaatggcatagaaactaaggaaagaagggtgtgttttgtgaaagaaaggaattttgtttatagagagtattttcacacatgaaagtgaacagtggaatataaagcataaaaggcaggatggagccgagccatggagaacctcgagtgccatgtgaagagaatttgacttgtgatgaagaatcaagtttccccttctaccattcatcagctacatctcctttttaagtaacccattttatccttcagaacctcacttttctatttctggccctggacttctaagccttgtttctttgtcatccaattccaatattgacaaataattctaaacagctacttttagtttgtatgtttaacgtcctgtgaaatattcctgtattaaccccaagccttttgatgataaagctttattttctattatttttagttctcaagattttattgaggatatgctaatgtgtcaaggtccatcttagatgctgaggataaaaagctgagggatactagtgggagacatatttataatgtaaatatgatgaaacagatgtgagaaattgacatggaaatggggagacattcttcctgggaaagacatgaaagggcattggaaaaaatacattttgagctagttttgaagaataaatggcaaactggagtagaggcattacagagacaacaatgtgaacaaagtggatggagtgtttgggggaatggcatgaagttcagtgtgacttaactacatgaggaccgtgagtgactaagagaaaactattaggtgtttggacttcatcttgtgggtttttaggagccaagagacatcagtggagttttgctaaaaaacaaaaaaagaaacaagccagcagcaacaacaaacactacagcatttgtttttctaatttcaaaattatctttaacatcttttctatgcaaataaacttttgtttatcagatttaagcatagctttttgcttcaatgatattaacatatatccaggagaaaatagatttttaggtataaatttagttgcaaaaccttcataatgggggtacaaaaacgcctgtaagctacaaaagcaattaattcaatataattgtaactattttcaaagttcacatttttataatgatgtattatacctcatacaaaattgtatatttaggttaaatcacaaaacaacatatgcaaacagtattttttgaaaaaaattgtaaatgctacttctgtatcataaggcaaagaccaagttaacagaataccttggaattaataaaatattctgcat

SEQ ID NO: 259959 - DNA, 936 bp, Artificial Sequence
  derived and/or modified sequence
atggacctgaagctgaaggactgcgagttctggtacagcctgcacggccaggtgcccggcctgctggactgggacatgagaaacgagctgttcctgccctgcaccaccgaccagtgcagcctggccgagcagatcctggccaagtacagagtgggcgtgatgaagccccccgagatgccccagaagagaagacccagccccgacggcgacggccccccctgcgagcccaacctgtggatgtgggtggaccccaacatcctgtgccccctgggcagccaggaggcccccaagcccagcggcaaggaggacctgaccaacatcagccccttcccccagcccccccagaaggacgagggcagcaactgcagcgaggacaaggtggtggagagcctgcccagcagcagcagcgagcagagccccctgcagaagcagggcatccacagccccagcgacttcgagctgaccgaggaggaggccgaggagcccgacgacaacagcctgcagagccccgagatgaagtgctaccagagccagaagctgtggcagatcaacaaccaggagaagagctggcagagaccccccctgaactgcagccacctgatcgccctggccctgagaaacaacccccactgcggcctgagcgtgcaggagatctacaacttcaccagacagcacttccccttcttctggaccgcccccgacggctggaagagcaccatccactacaacctgtgcttcctggacagcttcgagaaggtgcccgacagcctgaaggacgaggacaacgccagacccagaagctgcctgtggaagctgaccaaggagggccacagaagattctgggaggagaccagagtgctggccttcgcccagagagagagaatccaggagtgcatgagccagcccgagctgctgaccagcctgttcgacctgtag

SEQ ID NO: 259960 - DNA, 390 bp, Artificial Sequence
  derived and/or modified sequence
atgggttgctgtggttgctcgggtggctgtgggtccggctgtggaggatgcgggagcggctgcgggggctgcgggtcttcctgctgcgtgccgatctgttgctgcaagccagtgtgctgctgcgtccctgcgtgcagctgtacctcctgcggctcctgtggaggctcaaagggctgttgtggctcgtgcgggggaagcaaggggggttgtggcagctgcggcggatctaagggcggatgtggttcttgcggctgttctcagtgttcttgttgtaaaccctgctattgctcctctggttgcgggagctcctgctgccagtccagttgttgtaagccatgttgttctcaagcctcatgttgcgtgcccatatgttgccagtgtaaaatctag

SEQ ID NO: 259961 - DNA, 411 bp, Artificial Sequence
  derived and/or modified sequence
atgcctgggaagaaggccaggaagaatgcccagcccagccctgcccgggccccagctggccctgctggaacagctggaacagcccgggaccaggccggctttgccatcggcatgcagctgcgcttcacccggggcaagaagctgctgagcagcagcctgagcagcagccccctggccctgccccggggccacgaggagcaggtgcaggtggccggcagccgggtgtgctacagcacccaggagatctggaggcagacagagctgcctgctgagaccagcgagagtgacatccagaccctgctgctgaggaacctgacagccagcaagacctgcatgaggggcctgctgcagaagagcttcctgcggcgctgcaccttccaccagtttgaggagcggctgcactgcaactag

SEQ ID NO: 259962 - DNA, 231 bp, Artificial Sequence
  derived and/or modified sequence
atgtctgccagctgtgatggctgtgtgggcagcaggcctcctgtgcacctggccagcggctacagcctggccgacctgctggtgctggagatgggcatgggcacccagtgctggacagaggaccagaggcgctggagcagcctgtggccctggagccacctgagcagtgaccccagcctgcccaacgtgcaggtgacccggctgaccctgctgtctgagcaggccccctag

SEQ ID NO: 259963 - DNA, 480 bp, Artificial Sequence
  derived and/or modified sequence
atggagcaggactggcagcccggcgaggaggtgacccccggccccgagccctgcagcaagggccaggcccccctgtaccccatcgtgcacgtgaccgagctgaagcacaccgaccccaacttccccagcaacagcaacgccgtgggcaccagcagcggctggaacagaatcggcaccggctgcagccacacctgggactggagattcagctgcacccagcaggccctgctgcccctgctgggcgcctgggagtggagcatcgacaccgaggccggcggcggcagaagagagcagagccagaagccctgcagcaacggcggccccgccgccgccggcgagggcagagtgctgcccagcccctgcttcccctggagcacctgccaggccgccatccacaaggtgtgcagatggcagggctgcaccagacccgccctgctggcccccagcctggccaccctgaaggagcacagctacccctag

SEQ ID NO: 259964 - DNA, 495 bp, Artificial Sequence
  derived and/or modified sequence
atgggccagaagaagaccatgggcaccgagagaagcagaggcggcaagagaggcccccagcccggcgccgagagacccgaggagcccggcgccaccttcagcaagaagccccccgagggcgccagagcccccagatgcctgagcagacccaccgcccccaagagcggcgcctgcctggccagaagaagaccccccggcagcccctgcagcatcagagacgcccccttccacaccggcgacgacagattcctggccagagagaacttccccaacgtgctgcagcccctgcccagaatgttcgccgtgcagcaggccgccgacttcgagagccagtgccccagaagatgggacagcagaaagagacccagcgagggcctgcccagcgccggctggggcagatggagaggcagacccatccacctgggcctgtgggtgagcggcagcgtgagaagaaaggtgagcggcagccacgtgagcagaagcctgcacctgtag

SEQ ID NO: 259965 - DNA, 480 bp, Artificial Sequence
  derived and/or modified sequence
atggaacaagactggcaacccggcgaggaggtcacccccggaccagagccttgtagtaagggccaggccccactatatcctatcgtgcacgtcactgagttgaagcacacagacccaaactttccctctaattcaaatgcggtcggtacgtcatcagggtggaacaggattgggactgggtgttctcatacctgggattggagattttcttgtacccagcaggccttattgcccctgttaggcgcctgggaatggtccatcgacacagaggcaggtgggggccgtcgcgagcagtctcagaaaccctgtagcaacggaggcccggccgctgcaggagaagggcgcgtcctccccagtccctgttttccttggtcaacatgtcaggccgcaattcacaaagtatgtaggtggcaggggtgtaccagaccagcactgctggccccctctctggccacattgaaagagcacagctacccctag

SEQ ID NO: 259966 - DNA, 480 bp, Artificial Sequence
  derived and/or modified sequence
atggaacaggattggcagccaggggaagaggttacccctggaccagagccgtgctccaaggggcaggccccactgtacccaatcgtccacgtcactgagctcaaacacacagatcctaacttcccaagcaactctaatgccgtgggcactagctctggctggaatcgcattgggacaggctgcagccacacgtgggactggagatttagctgtacgcagcaagccctcttgcctttgctgggcgcctgggaatggtccatcgacacggaggccgggggagggaggagagaacaatcacagaaaccctgcagcaatggcggaccagccgcagctggggagggacgcgtcctgccatccccctgtttcccgtggagcacatgtcaggccgcaatccacaaggtctgccgttggcagggatgtacccgcccggcgttgctggctcctagcctggctacccttaaggagcactcctatccctag

SEQ ID NO: 259967 - DNA, 297 bp, Artificial Sequence
  derived and/or modified sequence
atgagggtggtcatggcgcggctgctgtctgagggcgagcaaggcattcccacggcttgcgctgcattcgcccagcaaccagccggccccagacggggtctagccggcgtgggggaaggcgggcctcagtgtagttgggtcaactataggtgcaccctggagttcctggtctctctgttagggaccgatttagcacgagggcggggtaatagcgcctcagggccaaccgctcctgccgacagtaaacagctgtcatgcaaaacttttatcgctgtgctgtccctcagcaaggaatag

SEQ ID NO: 259968 - DNA, 495 bp, Artificial Sequence
  derived and/or modified sequence
atgggccagaagaagaccatgggcacagagaggagccggggcggcaagaggggcccccagcctggagctgagaggcctgaggagcccggggccaccttcagcaagaagcccccagagggcgcccgggccccccgctgcctgagccggcccacagcccccaagagcggggcctgcctggcccggcggcggcccccaggcagcccctgcagcatcagagatgcccccttccacactggagatgaccgcttcctggcccgggagaacttccccaacgtgctgcagcccctgcccaggatgtttgctgtgcagcaggccgctgactttgagagccagtgcccccggcgctgggacagcaggaagaggccttctgagggcctgcccagcgctggctggggccgctggaggggccggcccatccacctgggcctgtgggtgtctggctctgtgcggaggaaggtgtctggcagccacgtgagccgcagcctgcacctgtag

SEQ ID NO: 259969 - DNA, 303 bp, Artificial Sequence
  derived and/or modified sequence
agaccattttgttgccacacaccctgttgccagccctcctgctgtgtgcccagctgctgccagccttgctgccacccaacttgctgtcaaaacacctgctgcaggaccacctgctgccagcccacttgtgtggccagctgctgccagccttcctgctgcagcacaccctgctgccagcccacctgctgtggccaaacctgcaatgagtccagctattgtctgccttgctgccgtcccacctgctgccagaccacctgctacaggaccacctgttgccgccccagctgttgctgcagtccttgc

SEQ ID NO: 259970 - DNA, 495 bp, Artificial Sequence
  derived and/or modified sequence
atgggccagaagaagaccatgggcaccgagcggagccggggcggcaaaaggggaccacaacccggagccgaaagacctgaagaaccgggtgcgacattctctaaaaaacctccagaaggcgcccgagcccctcgatgtctgtcgcggccaactgcaccaaaatccggagcgtgcctcgcccgccggagaccccccggatcaccttgctccatccgagacgctcccttccacacaggtgacgatagattcctggcgagagaaaatttccctaatgtgctacagccactgcctcgtatgtttgctgtacagcaggcggctgatttcgagtctcagtgtcccaggcggtgggactctcgaaagagacctagcgaaggactcccctccgcaggttgggggagatggagagggagacccattcatctgggcctatgggtttccggcagcgtgcggagaaaagtcagcggttctcacgtttccaggtctctgcatctctag

SEQ ID NO: 259971 - DNA, 432 bp, Artificial Sequence
  derived and/or modified sequence
atgctgcgaaaaacctgcggcggtcagcaagaggattcacgaggtatgggccctcacctacccagggtgcctgacggagttgtactcggagtggaggaacccgagggtaaagcacaagggcgagtgcggggagaactatgtccaggagccctagcacggatccacatgggtcactcttgtacgaggctgtctgcggagggaattgccatgctcctgggaaccgccggtccaagcaggctccccgctgccccagatgcctcacaggctcctttacgatccccttgggcactgtccgtggctgctgccctgtgcagcccggtgagctgtcatccctgcggccgtcatgttgtgacttttggccattgccccgcacaaggcccttggggtcttggcacgttcggtcactccttttttgggtgtttatgtaaatag

SEQ ID NO: 259972 - DNA, 531 bp, Artificial Sequence
  derived and/or modified sequence
atgtccttaaactgcgggcaaatgtggctcctggccccccggggcctggccagagtgacgcttgcatggtcaccatggggatgtctcggcaatctgacaacggggcatttggccctcttgacacaaaattgttacaacccaaaggctctcgcgccacaaggccccaaggcctcaggcgaccagcctgtaacccagttgctaccagcaaacccagcctgccggtgtacctgcctccccctgcaagaaacgttcctctctgttctgcaccttcctgggtggcaacagtggcggtgtgcggcttcaccggggcccagaggagctgcagctctagggcccgagcagcaagaggggccatctgttgaacgcccaccctccgcacctggctggttttctcattgcctgctaacatccacttggcagcttcacagctgcggtcttgggccctgcgagcttccttgtggactagtgggatgtcaggacaatgaaatcttacagcatttgtggttgacaaatctgttcctccaaaagtag

SEQ ID NO: 259973 - DNA, 531 bp, Artificial Sequence
  derived and/or modified sequence
atgagcctgaactgtggccagatgtggctgctggccccccggggcctggcccgggtgaccctggcctggagcccctggggctgcctgggcaacctgaccaccggccacctggccctgctgacccagaactgctacaaccccaaggccctggccccccagggccccaaggccagcggggaccagcctgtgacccagctgctgcctgccaacccagcctgccgctgcacctgcctgcccctgcaggagaccttcctgtctgtgctgcacctgcccggctggcagcagtggaggtgtgccgccagccctggccccagaggagctgctgccctgggccctgagcagcaggagggccccagcgtggagaggcctccttctgcccctggctggttcagccactgcctgctgaccagcacctggcagctgcacagctgtggcctgggcccctgtgagctgccctgtggcctggtgggctgccaggacaatgagatcctgcagcacctgtggctgaccaacctcttcctgcagaagtag

SEQ ID NO: 259974 - DNA, 531 bp, Artificial Sequence
  derived and/or modified sequence
atgagcctgaactgcggccagatgtggctgctggccccccggggcctggcccgcgtgacactggcctggtcaccttggggttgtttgggaaatctcactacaggacacctggcattattgactcagaattgttataatccgaaggccctcgcaccgcagggccctaaggcctccggcgaccagcctgtgactcagctgctgccagctaatcctgcgtgtcgttgcacatgtctgcccctccaagaaaccttcctgtctgtgttgcatcttccaggatggcagcagtggcgttgtgctgcttcacccgggccgcgtggtgccgccgctctggggcccgagcagcaggaagggccaagtgtcgagcgcccaccctccgcccccggttggttttcgcattgcctcttaacttctacttggcagttgcattcttgtggtctgggcccttgtgagctgccttgtggactggtcgggtgccaggacaacgaaattctccaacacctctggctgacaaatctgttcctgcaaaaatag

SEQ ID NO: 259975 - DNA, 531 bp, Artificial Sequence
  derived and/or modified sequence
atgagcctaaactgtggccaaatgtggcttctggcccctcgcggtttggccagagtgaccttggcttggtctccctgggggtgcctggggaacttaacgacaggccatctcgccttattaacacaaaactgctacaatccgaaggcactcgcccctcaaggacccaaggcctccggggatcagcctgtcacacagctgctgcccgcaaatccggcatgccggtgcacatgcctcccactccaagaaacttttctgagcgtgctccacctcccagggtggcaacagtggaggtgtgccgctagccccggtcccaggggcgctgctgccttagggcctgagcaacaggaggggcctagcgtcgagaggccccctagcgcacccggttggttctcacactgcttattaacatccacatggcagctccacagctgcggcttgggtccatgtgagcttccctgcgggctagtgggttgccaggacaacgagatcctgcaacacctgtggctaactaatctgtttttacagaaatag

SEQ ID NO: 259976 - DNA, 531 bp, Artificial Sequence
  derived and/or modified sequence
atgagcctgaactgcggccagatgtggctgctggcccccagaggcctggccagagtgaccctggcctggagcccctggggctgcctgggcaacctgaccaccggccacctggccctgctgacccagaactgctacaaccccaaggccctggccccccagggccccaaggccagcggcgaccagcccgtgacccagctgctgcccgccaaccccgcctgcagatgcacctgcctgcccctgcaggagaccttcctgagcgtgctgcacctgcccggctggcagcagtggagatgcgccgccagccccggccccagaggcgccgccgccctgggccccgagcagcaggagggccccagcgtggagagaccccccagcgcccccggctggttcagccactgcctgctgaccagcacctggcagctgcacagctgcggcctgggcccctgcgagctgccctgcggcctggtgggctgccaggacaacgagatcctgcagcacctgtggctgaccaacctgttcctgcagaagtag

SEQ ID NO: 259977 - DNA, 1140 bp, Artificial Sequence
  derived and/or modified sequence
cacgcgcccgcccccagcttcgcgcccagatcgtcgcctatcctgcttgcgcagccgctatcgcgtctgcccaccgacgaagcatgggtgtccagggcttccaagagttcctggagaagcgctgtcccggggccgtggtgcccgtggacctcctaaaactcgcgcgcacggtctcgcgccagcagcagcagcagcacttgcaccgccagctgccgccgactgcagccctagcgcccggggctccacgcgccgccaggggctccgtgcctctgcaaccgccgcttccgcccgctgccttgggtgcctactccgggggcgcggggccgattcggcaccatcaccccgctcaccacttccaccatcatggccaagcgcagcccgggctgcaccctccgctgccgccgccgccgccccctcagctgcccggggcccgggtgctggtggacgccggctcggcgctgccgcggctctatggcggctaccagacggattgggtgtgtggcggccaatggaacgccatgctgggctacttgtcagcgctgtgccaggcttgtgcctatcctggcggcgacggcctggagctcgtggtcatgttcccggggggcctgggcaaggaccggctggccgagtggggccgtcggtgccaggccgagcggcagacagcgcaactgatcgtgggacacgtgggcaacaagggcacccctccaccgcgggcctggttcctgccaccggcctgcctgagccactgcgtgaggctagcactcatccgcttccgggtcaagcaagctgccatgttgtgagctgccctatggagaggcccacaggaaaagaaactgagggaagcctccaaccaacactcagtgaggaactgaggccctcagtccaactacagcctgcaaggaactgaattgctgccaacagccacgtacgtgagtgagcttggaagcggatccttccccaggcaagccttgagatgactgcagccctggctggcaccttgattgaagcctgtaggagaccttgagccagaggacccagctaagccatgcctacagatactatgagataataaatgttgttttaagccactaagtttgggggctactttgttacacagaaatagataactgaaacaccatt

SEQ ID NO: 259978 - DNA, 717 bp, Artificial Sequence
  derived and/or modified sequence
atgggggtgcagggctttcaggagtttctggagaagagatgtcccggagcagtggtgcccgtcgaccttctcaagttggctcgcacagtctcccggcagcagcagcagcagcatttgcacaggcagctgccacccacagcagcactagcaccaggcgctcctcgggctgcccgtgggagcgtacctctccagccgcctctgcccccagcagcccttggggcttattctggcggtgctggccccatccgccatcaccatcccgctcaccattttcatcaccacggacaagcccagcctgggctccaccctccactgcctccacccccccctccccagttgccaggagcacgtgtactagtggacgccggctctgccttgccccgcctgtacggaggataccaaacggactgggtgtgcggcggccagtggaatgccatgcttggttacctcagtgcactgtgccaggcttgcgcttaccctggaggcgatgggctcgagctggtcgttatgttccctggaggattggggaaagatcggttagctgagtgggggaggagatgtcaggccgaacgccagactgctcagcttatagtgggccacgtgggaaacaaaggcactccccctccaagagcgtggttcttgcctcctgcctgtctctcccattgtgtgaggctcgccttgattcgtttccgcgtgaaacaggcagccatgctgtag

SEQ ID NO: 259979 - DNA, 717 bp, Artificial Sequence
  derived and/or modified sequence
atgggcgtgcagggcttccaggagttcctggagaagcgctgccctggagctgtggtgcctgtggacctgctgaagctggccaggacagtgtcccggcagcagcagcagcagcacctgcaccggcagctgcccccaacagctgccctggcccctggggccccccgggccgcccggggctctgtgcccctgcagccccccctgcccccagctgccctgggcgcctacagcggcggggccggccccatccgccaccaccacccagcccaccacttccaccaccacggccaggcccagcccggcctgcacccccccctgcccccacctcctccaccccagctgcccggggcccgggtgctggtggatgctggcagcgccctgccccggctgtatggaggctaccagacagactgggtgtgtggcggccagtggaatgccatgctgggctacctgagcgccctgtgccaggcctgtgcctacccaggaggagatggcctggagctggtggtgatgtttcctgggggcctgggcaaggaccggctggccgagtggggccgccgctgccaggccgagcggcagacagcccagctgattgtgggccacgtgggcaacaagggcaccccaccaccccgggcctggttcctgcccccagcctgcctgagccactgtgtgcggctggccctgatccgcttccgggtgaagcaggccgccatgctgtag

SEQ ID NO: 259980 - DNA, 717 bp, Artificial Sequence
  derived and/or modified sequence
atgggcgtgcagggcttccaggagttcctggagaagcggtgccccggtgctgtggttccggtagatctgttaaagctcgcaaggacagtgagccgccagcagcagcagcagcacctgcacaggcagctgcctcctacagcggctctggcgcccggcgccccacgggccgcccgtggtagcgttccactgcagcctccattaccaccagctgctcttggagcttactcaggaggcgctggccctattaggcaccaccatcctgctcaccactttcaccaccacgggcaggcacaacccgggctgcaccccccgctgccacccccgcccccaccacagctaccaggggcacgggtcctggtcgatgccggatcagctttgcctagactctatggtgggtatcagaccgactgggtgtgtggggggcaatggaatgcgatgctcggctatttatccgcactctgtcaagcctgcgcctatcccggaggggacggtcttgagcttgtagtgatgtttccgggcggcctgggaaaagatcggctagccgaatggggacggaggtgtcaggcagagagacaaactgcccagctgattgtgggtcacgtcggcaacaagggcacaccgccaccccgtgcgtggtttttgcctcctgcctgcttaagccattgcgtaagactagccttgatcagattccgcgtcaaacaggccgccatgctttag

SEQ ID NO: 259981 - DNA, 717 bp, Artificial Sequence
  derived and/or modified sequence
atgggcgtgcaagggttccaggaatttctcgagaagcggtgtccaggagctgtcgtgcctgttgacctgctgaagctggcccgaactgttagtcgccagcaacaacaacaacatttacaccggcagttgccccctacggctgctttagcaccgggagcacccagagccgcacggggatcggttcctttgcagccccctctgccccctgctgccctcggtgcctacagtggcggagctgggccaatcaggcatcaccacccagcgcatcactttcaccatcacggacaggcgcagccgggactgcaccccccactgcctccaccccctcctccccagctccctggtgctagagttttggtggatgccggatcagccttgcctcgtctgtacgggggttatcagacagactgggtatgtggcggacaatggaacgctatgcttggttacctcagtgcactatgccaggcctgcgcctacccgggaggagatggactcgagctcgttgtgatgttccccggagggctaggtaaggaccggctggccgaatggggcagacgctgtcaggcagagaggcagaccgctcagttgattgtgggacacgtgggcaataagggcactccccctccaagagcctggtttctgcctcctgcctgtctgagccattgtgtcaggctggccttgatcagatttcgcgttaaacaggcagccatgttgtag

SEQ ID NO: 259982 - DNA, 717 bp, Artificial Sequence
  derived and/or modified sequence
atgggcgtgcagggcttccaggagttcctggagaagagatgccccggcgccgtggtgcccgtggacctgctgaagctggccagaaccgtgagcagacagcagcagcagcagcacctgcacagacagctgccccccaccgccgccctggcccccggcgcccccagagccgccagaggcagcgtgcccctgcagccccccctgccccccgccgccctgggcgcctacagcggcggcgccggccccatcagacaccaccaccccgcccaccacttccaccaccacggccaggcccagcccggcctgcacccccccctgcccccccccccccccccccagctgcccggcgccagagtgctggtggacgccggcagcgccctgcccagactgtacggcggctaccagaccgactgggtgtgcggcggccagtggaacgccatgctgggctacctgagcgccctgtgccaggcctgcgcctaccccggcggcgacggcctggagctggtggtgatgttccccggcggcctgggcaaggacagactggccgagtggggcagaagatgccaggccgagagacagaccgcccagctgatcgtgggccacgtgggcaacaagggcacccccccccccagagcctggttcctgccccccgcctgcctgagccactgcgtgagactggccctgatcagattcagagtgaagcaggccgccatgctgtag

SEQ ID NO: 259983 - protein, 563 aa, Artificial Sequence
  derived and/or modified sequence
MIKRKIWCNLCIDLVAFTSEIFKGAVFQSLDGIVVSANCKLRKIFTLKSKPQDTADKDAVYGVPFSTDEPTDIIPRSCQLMTDVPHVTQLLNMTKLRQTEIKFGGHPLRSAESDQFINRGTSITRNSKNQDVCHIAFGSKVLGPPPLSGRRNNMKISSETVRSVGSKNNRSCQPSTVEKCVNGTEMSALLIPESEEQGNKENIHQIKQTVPIHAANLHIMHPHPPQEPSADKNNNRRRLRLKSTSRERTETPSGSSSGNNRIEDKASTILTTVSQQGAELLNSGTLGPQSPDQSDEWIFPENADHISYLASSRQSLLLGDDSCNPSHLWLEASKESEHDQQAEESQSVPKDIFTFSSRPRSAPHGKTQTMSPEELSFILDLKEDNSVTSRDTQSEDDFYGGDSSEEEYDWRNYQPSQMSESELQMLASLRWQQNEELEDAGTSHGLSASQVDNCNVSISTSSDDTTTWNSCLPPPVNQGRHYQKEMNPPSPSNPRDWLNMLSPPIVPPSQQPAEQRPDSCESLSVQGEEDLSVEEDEEVLTLLYDPCLNCYFDPQTGKYYELV

SEQ ID NO: 259984 - protein, 352 aa, Artificial Sequence
  derived and/or modified sequence
MLLFSVLLLLSLVTGTQLGPRTPLPEAGVAILGRARGAHRPQPPHPPSPVSECGDRSIFEGRTRYSRITGGMEAEVGEFPWQVSIQARSEPFCGGSILNKWWILTAAHCLYSEELFPEELSVVLGTNDLTSPSMEIKEVASIILHKDFKRANMDNDIALLLLASPIKLDDLKVPICLPTQPGPATWRECWVAGWGQTNAADKNSVKTDLMKAPMVIMDWEECSKMFPKLTKNMLCAGYKNESYDACKGDSGGPLVCTPEPGEKWYQVGIISWGKSCGEKNTPGIYTSLVNYNLWIEKVTQLEGRPFNAEKRRTSVKQKPMGSPVSGVPEPGSPRSWLLLCPLSHVLFRAILY

SEQ ID NO: 259985 - DNA, 1059 bp, Artificial Sequence
  derived and/or modified sequence
atgctgctgttcagcgtgctgctgctgctgagcctggtgaccggcacccagctgggccccagaacccccctgcccgaggccggcgtggccatcctgggcagagccagaggcgcccacagaccccagcccccccacccccccagccccgtgagcgagtgcggcgacagaagcatcttcgagggcagaaccagatacagcagaatcaccggcggcatggaggccgaggtgggcgagttcccctggcaggtgagcatccaggccagaagcgagcccttctgcggcggcagcatcctgaacaagtggtggatcctgaccgccgcccactgcctgtacagcgaggagctgttccccgaggagctgagcgtggtgctgggcaccaacgacctgaccagccccagcatggagatcaaggaggtggccagcatcatcctgcacaaggacttcaagagagccaacatggacaacgacatcgccctgctgctgctggccagccccatcaagctggacgacctgaaggtgcccatctgcctgcccacccagcccggccccgccacctggagagagtgctgggtggccggctggggccagaccaacgccgccgacaagaacagcgtgaagaccgacctgatgaaggcccccatggtgatcatggactgggaggagtgcagcaagatgttccccaagctgaccaagaacatgctgtgcgccggctacaagaacgagagctacgacgcctgcaagggcgacagcggcggccccctggtgtgcacccccgagcccggcgagaagtggtaccaggtgggcatcatcagctggggcaagagctgcggcgagaagaacacccccggcatctacaccagcctggtgaactacaacctgtggatcgagaaggtgacccagctggagggcagacccttcaacgccgagaagagaagaaccagcgtgaagcagaagcccatgggcagccccgtgagcggcgtgcccgagcccggcagccccagaagctggctgctgctgtgccccctgagccacgtgctgttcagagccatcctgtactag

SEQ ID NO: 259986 - DNA, 1059 bp, Artificial Sequence
  derived and/or modified sequence
atgctcctgttctctgtcttgctcctgctctcactcgtcacaggaactcagctgggcccaagaactcccttgcccgaagcaggcgtggctattttgggtagagcacggggggcacaccgtccgcagccccctcatccaccttcacccgtgtccgaatgcggagatcggtccatctttgagggacggacgagatattctaggatcactgggggaatggaggccgaagtcggtgaatttccatggcaggtgtccattcaggccagatcagaacccttctgtggaggatccattttgaacaaatggtggattctcacagccgcccactgtttatactcagaggaactgttcccagaggagctctcagtcgtgctgggaactaacgacctgacctcacccagtatggaaattaaagaagtcgcttctattattttgcacaaggacttcaagagggccaacatggacaatgacatcgccctgctcctgttagccagcccaataaagctggacgacctaaaggtcccaatttgcctgccaactcaaccgggtcccgccacatggcgggaatgttgggttgctggctggggccagactaatgccgcagacaaaaactccgttaaaactgatttgatgaaagcccctatggtaatcatggattgggaagagtgctcaaaaatgtttccgaaactgactaaaaatatgctgtgtgcaggctacaagaatgagagctatgatgcgtgtaagggagacagcggtggacctttagtgtgcaccccagagcccggagagaaatggtaccaggtgggtatcatcagctgggggaagtcttgtggcgagaagaacactcccggaatatacacatccttggtgaactataacctctggattgaaaaggttacacagctggaggggcgaccattcaacgctgaaaaacgcaggacttcagtgaagcaaaaacctatgggctctccggtgagcggcgttcccgaacccgggtcaccaagatcatggctgctcctgtgtccactttcccacgtactctttagagctattctctactag

SEQ ID NO: 259987 - DNA, 1059 bp, Artificial Sequence
  derived and/or modified sequence
atgctgctcttctctgtgctgctgctgctgagcctggtgacaggcacccagctgggccccaggacccccctgcctgaggccggcgtggccatcctgggccgggcccggggggcccaccggccccagcccccccacccccccagccctgtgtctgaatgtggggacaggagcatctttgagggccgcacccgctacagccgcatcactggaggcatggaggccgaggtgggggagttcccctggcaggtgtccatccaggcccggtctgagcccttctgtggcggcagcatcctgaacaagtggtggatcctgacagctgcccactgcctgtacagcgaggagctgtttcctgaggagctgtctgtggtgctgggcaccaatgacctgaccagccccagcatggagatcaaggaggtggccagcatcatcctgcacaaggacttcaagagggccaacatggacaatgacatcgccctgctgctgctggccagccccatcaagctggatgacctgaaggtgcccatctgcctgcccacccagcccggccctgccacctggagggagtgctgggtggccggctggggccagaccaatgctgctgacaagaacagcgtgaagacagacctgatgaaggcccccatggtgatcatggactgggaggagtgcagcaagatgttccccaagctgaccaagaacatgctgtgtgccggctacaagaatgaaagctatgatgcctgcaagggggacagcggcggccccctggtgtgcaccccagagcccggggagaagtggtaccaggtgggcatcatctcctggggcaagagctgtggggagaagaacaccccaggcatctacaccagcctggtgaactacaacctgtggattgagaaggtgacccagctggagggccggcccttcaatgctgagaagaggaggacctctgtgaagcagaagcccatgggcagccctgtgtctggagtgcctgagcccggcagccccaggtcctggctgctgctgtgccccctgagccacgtgctcttccgggccatcctgtactag

SEQ ID NO: 259988 - DNA, 1059 bp, Artificial Sequence
  derived and/or modified sequence
atgctgctgttcagcgtgctgctgctgctgagcctggtgaccggcacgcagttaggaccacgtaccccactgccagaagccggtgtcgccattctcggccgcgcccgcggtgcccacaggccgcagccccctcatccccccagtcccgtctccgagtgcggcgacagaagtatctttgagggccgtacccggtatagcagaatcacaggtggaatggaggccgaggtcggcgagttcccttggcaggtctcaattcaagctaggtccgaaccattttgcggggggtcgatccttaacaagtggtggatcctcacagcagctcattgtctgtacagtgaggaactattcccagaggaactgagtgtggtcctaggaaccaatgacttgaccagcccaagtatggaaattaaggaggtggcatccatcattctccacaaggactttaagagagccaacatggataatgacatagccctccttctgttagcttctcccattaagctggacgatcttaaagttccaatatgcttgccaacgcagccaggccctgcgacctggagggagtgctgggtcgctgggtggggacaaacaaacgctgctgacaaaaattcagttaagaccgacctgatgaaggccccaatggttatcatggattgggaggaatgtagcaagatgtttccaaaattaaccaagaatatgctttgcgctggctacaagaatgagtcatacgatgcctgtaaaggagacagtgggggtccgctggtgtgcacccccgagcccggcgagaagtggtatcaggtagggattatctcctggggtaaaagctgcggtgaaaagaatacaccaggaatctacacctctcttgtcaactacaacctgtggatagagaaggttactcaactggaggggcgaccctttaatgctgaaaagcgccggactagcgtgaaacagaagcccatgggttcccctgtcagtggcgtccctgagccaggatccccacggtcctggctgctattatgtccactctcgcacgtactgttcagagcgatactgtactag

SEQ ID NO: 259989 - DNA, 1124 bp, Artificial Sequence
  derived and/or modified sequence
ggcctctgtcacccccgggcccacagcacagcccagggccatgctcctgttctcagtgttgctgctcctgtccctggtcacgggaactcagctcggtccacggactcctctcccagaggctggagtggctatcctaggcagggctaggggagcccaccgccctcagccccctcatccccccagcccagtcagtgaatgtggtgacagatctattttcgagggaagaactcggtattccagaatcacaggggggatggaggcggaggtgggtgagtttccgtggcaggtgagtattcaggcaagaagtgaacctttctgtggcggctccatcctcaacaagtggtggattctcactgcggctcactgcttatattccgaggagctgtttccagaagaactgagtgtcgtgctggggaccaacgacttaactagcccatccatggaaataaaggaggtcgccagcatcattcttcacaaagactttaagagagccaacatggacaatgacattgccttgctgctgctggcttcgcccatcaagctcgatgacctgaaggtgcccatctgcctccccacgcagcccggccctgccacatggcgcgaatgctgggtggcaggttggggccagaccaatgctgctgacaaaaactctgtgaaaacggatctgatgaaagcgccaatggtcatcatggactgggaggagtgttcaaagatgtttccaaaacttaccaaaaatatgctgtgtgccggatacaagaatgagagctatgatgcctgcaagggtgacagtggggggcctctggtctgcaccccagagcctggtgagaagtggtaccaggtgggcatcataagctggggaaagagctgtggagagaagaacaccccagggatatacacctcgttggtgaactacaacctctggatcgagaaagtgacccagctagagggcaggcccttcaatgcagagaaaaggaggacttctgtcaaacagaaacctatgggctccccagtctcgggagtcccagagccaggcagccccagatcctggctcctgctctgtcccctgtcccatgtgttgttcagagctattttgtactgataataaaatagaggctattctttca

SEQ ID NO: 259990 - DNA, 1059 bp, Artificial Sequence
  derived and/or modified sequence
atgctactgtttagtgtgttactgctgctcagcttggtcaccgggacgcagctgggacccaggacccctctgccagaagcaggagtggcaattctcggacgcgcaaggggtgctcacaggcctcagccccctcaccccccatcaccagtgtccgagtgtggcgaccgctcaatcttcgagggacggactcggtatagcaggataactggaggcatggaagcggaagtgggggagttcccgtggcaggtttccatacaagccaggtcagaacccttctgtggaggctccattttaaacaagtggtggatattgactgccgcacattgtttatattccgaagagctgtttcccgaggaactgagtgtggtgctgggcacaaacgatttgaccagcccttctatggaaattaaagaggtggcctccattatactgcacaaggattttaagagagccaatatggacaatgacattgcgcttctgcttctcgccagccccattaagctcgatgacctgaaagtgccaatctgcctgccgacccagcccggacccgctacctggagggaatgctgggtcgccggatggggtcaaaccaacgccgctgataaaaactccgtaaaaaccgacctgatgaaggcacccatggtcattatggactgggaagagtgttctaagatgtttcccaaacttacaaagaacatgctgtgtgcgggatacaaaaacgagagttatgacgcctgcaaaggggactctggaggtccactggtgtgcactccagagcccggagagaagtggtaccaggtaggcatcatatcttggggaaaaagttgtggagagaagaacacacctgggatttacacgtccctcgtcaactacaacctgtggatcgagaaggtcacacaattggaaggtagaccgttcaatgcggagaaaaggcggacgtcggtcaaacaaaagccaatggggtccccggtctcgggagttccagaaccagggtctccacggtcgtggctgctgctctgccctctgagccatgtcttgtttagagctatcctatattag

SEQ ID NO: 259991 - protein, 1582 aa, Artificial Sequence
  derived and/or modified sequence
MAGPGGWRDREVTDLGHLPDPTGIFSLDKTIGLGTYGRIYLGLHEKTGAFTAVKVMNARKTPLPEIGRRVRVNKYQKSVGWRYSDEEEDLRTELNLLRKYSFHKNIVSFYGAFFKLSPPGQRHQLWMVMELCAAGSVTDVVRMTSNQSLKEDWIAYICREILQGLAHLHAHRVIHRDIKGQNVLLTHNAEVKLVDFGVSAQVSRTNGRRNSFIGTPYWMAPEVIDCDEDPRRSYDYRSDVWSVGITAIEMAEGAPPLCNLQPLEALFVILRESAPTVKSSGWSRKFHNFMEKCTIKNFLFRPTSANMLQHPFVRDIKNERHVVESLTRHLTGIIKKRQKKGIPLIFEREEAIKEQYTVRRFRGPSCTHELLRLPTSSRCRPLRVLHGEPSQPRWLPDREEPQVQALQQLQGAARVFMPLQALDSAPKPLKGQAQAPQRLQGAARVFMPLQAQVKAKASKPLQMQIKAPPRLRRAARVLMPLQAQVRAPRLLQVQSQVSKKQQAQTQTSEPQDLDQVPEEFQGQDQVPEQQRQGQAPEQQQRHNQVPEQELEQNQAPEQPEVQEQAAEPAQAETEAEEPESLRVNAQVFLPLLSQDHHVLLPLHLDTQVLIPVEGQTEGSPQAQAWTLEPPQAIGSVQALIEGLSRDLLRAPNSNNSKPLGPLQTLMENLSSNRFYSQPEQAREKKSKVSTLRQALAKRLSPKRFRAKSSWRPEKLELSDLEARRQRRQRRWEDIFNQHEEELRQVDKDKEDESSDNDEVFHSIQAEVQIEPLKPYISNPKKIEVQERSPSVPNNQDHAHHVKFSSSVPQRSLLEQAQKPIDIRQRSSQNRQNWLAASESSSEEESPVTGRRSQSSPPYSTIDQKLLVDIHVPDGFKVGKISPPVYLTNEWVGYNALSEIFRNDWLTPAPVIQPPEEDGDYVELYDASADTDGDDDDESNDTFEDTYDHANGNDDLDNQVDQANDVCKDHDDDNNKFVDDVNNNYYEAPSCPRASYGRDGSCKQDGYDGSRGKEEAYRGYGSHTANRSHGGSAASEDNAAIGDQEEHAANIGSERRGSEGDGGKGVVRTSEESGALGLNGEENCSETDGPGLKRPASQDFEYLQEEPGGGNEASNAIDSGAAPSAPDHESDNKDISESSTQSDFSANHSSPSKGSGMSADANFASAILYAGFVEVPEESPKQPSEVNVNPLYVSPACKKPLIHMYEKEFTSEICCGSLWGVNLLLGTRSNLYLMDRSGKADITKLIRRRPFRQIQVLEPLNLLITISGHKNRLRVYHLTWLRNKILNNDPESKRRQEEMLKTEEACKAIDKLTGCEHFSVLQHEETTYIAIALKSSIHLYAWAPKSFDESTAIKVCIDQSADSEGDYMSYQAYIRILAKIQAADPVNRFKRPDELLHLLKLKVFPTLDHKPVTVDLAIGSEKRLKIFFSSADGYHLIDAESEVMSDVTLPKNPLEIIIPQNIIILPDCLGIGMMLTFNAEALSVEANEQLFKKILEMWKDIPSSIAFECTQRTTGWGQKAIEVRSLQSRVLESELKRRSIKKLRFLCTRGDKLFFTSTLRNHHSRVYFMTLGKLEELQSNYDV

SEQ ID NO: 259992 - DNA, 4749 bp, Artificial Sequence
  derived and/or modified sequence
atggccggcccagggggatggagggatcgggaggtcacagatctggggcacctacctgaccccacaggaatttttagtctcgataagactataggcctcggcacatatgggcggatttacctgggcctacatgaaaagacaggagccttcacagcggttaaagtgatgaacgcgcgcaagacacctctacctgagattgggcgcagagttcgcgtcaacaagtaccagaaaagcgtgggatggagatacagcgatgaagaggaagacttaaggaccgagctgaatctgctgcgaaagtattccttccacaaaaacatcgtctccttctatggcgcatttttcaagctctctccgcctgggcagcgacatcagctgtggatggtcatggaactgtgcgcagctggaagcgtgactgatgtggttaggatgaccagcaaccagtcactgaaggaagactggattgcctatatttgcagggaaatcctccaggggcttgctcacttgcacgctcatagggttattcatagggatattaagggccagaacgttcttctgacacataacgctgaggtcaagctggtggatttcggggtgtccgcccaagtgtcaagaaccaacgggcgacgaaatagttttatcggaaccccctattggatggcccctgaagtcatcgactgtgacgaagaccctcgtaggtcttacgactaccgttccgatgtctggtcagttggcattaccgccatcgaaatggccgagggcgccccgcctctttgtaacctgcagcccctggaggcactgtttgtgatcctccgagagagtgcccctaccgtgaagtccagcggttggtccaggaaattccacaacttcatggagaagtgcactataaagaactttctgttccgaccaacctccgcaaacatgctgcagcatccattcgtccgcgatatcaaaaatgagaggcacgtggtggagtctttaacgagacatctaaccggcatcataaagaaacgacagaagaaaggtattcccctcatctttgagagggaggaagccatcaaggagcagtatactgttagacgattcaggggcccctcctgcacacatgagctgctgagactgcccacctcctccagatgccggcctttgcgcgtgcttcatggggaaccttcacagccccggtggctccctgaccgcgaggaaccccaagttcaggctctgcagcagttgcaaggcgcagcaagagtctttatgcccctgcaggcactggattcggccccaaagcctctaaaaggacaagcgcaggccccccagagactgcagggtgccgctagggtctttatgccccttcaggcacaggtcaaggccaaggcttcgaagccgctgcagatgcaaattaaggcccctccgcgcctgaggcgggcggctcgggtcctgatgcccctgcaggctcaggttcgtgctcctagactcttgcaagtccagagccaggtgtcgaaaaagcagcaggctcaaacccagacatcggagccgcaagatttggaccaggttcccgaggagtttcaggggcaggaccaagtgcccgaacagcagagacaaggacaggctccagaacagcagcagcgccataatcaggttccggaacaggaactggaacagaaccaggccccagagcagcctgaggtgcaagagcaggctgcagagcctgcccaggcagagaccgaggcagaggagcctgaatccctcagggtgaatgcacaggtgtttttgccattgctgagccaggatcaccacgtgcttctgccacttcacttagatacccaggtgctgatccccgtcgaggggcaaactgagggtagcccacaggcacaggcctggactctcgagcctccacaggccattggatcggtccaggctctgatcgaagggctatcaagggacttactgcgtgcccccaatagtaacaattccaaacccttagggccgcttcagacactgatggagaacctgagcagtaatcgcttctactcacaaccggaacaggctagagaaaagaagtcaaaagtgtccacactccgacaggccctggcgaaacgactgagccccaaacgcttccgggccaagtcctcttggcggcctgaaaagcttgagcttagcgatcttgaggccagacgccaaagacggcaacggcgctgggaagatattttcaaccaacacgaagaggaattgcgacaggtcgataaggacaaagaagacgagagcagcgataacgacgaagtcttccactccatacaggccgaagtgcaaattgagcctttgaaaccgtatattagcaaccccaaaaagatcgaggtgcaagagaggtctccttcagtgccaaataaccaggatcacgcccatcatgtgaaattttccagcagcgtcccccagcgaagtctcttggaacaggctcaaaaacctattgacataaggcaacgatcttctcagaatcggcagaattggctcgctgcatcggagagtagctccgaagaggaaagtccggtcaccggtaggcgatctcagtctagccctccatatagtacgatcgaccagaaattattggtcgacatccacgtcccagacggttttaaagtcggtaaaattagtccacccgtgtacctgactaatgagtgggtgggatacaatgcattgtctgagatttttagaaacgactggctgacccccgcacccgttatccagccacccgaggaagatggagactacgtagagctgtatgacgcttcagccgacacggatggggatgatgacgacgagtcgaacgacacgttcgaagacacttatgatcacgccaacgggaatgacgacctcgacaatcaggtcgatcaggccaacgacgtatgcaaagatcatgatgatgataataataagtttgtagacgacgtgaataacaattattatgaggcacccagctgcccgagagctagttatgggagagatggctcctgcaagcaggatggatacgacggcagtagggggaaggaggaagcctacagggggtatggaagtcacacagccaataggagtcacggtggatctgccgcatctgaagacaacgccgccatcggcgatcaggaggaacacgccgcaaacatcggctccgaaagaagagggtctgaaggggacggcggaaaaggagtggtccgcaccagtgaagagtctggggcactcggcctcaatggggaggagaattgctctgaaacggacgggccgggcctcaaaaggcctgccagtcaggacttcgaatatctccaggaggagccaggaggcggcaatgaggcatctaacgccatcgactctggagctgccccctccgcccctgaccacgaatctgataacaaggatatatctgagtcctcaacgcagtcagatttctcagctaaccactcaagtccatccaaaggctctggcatgagcgccgatgccaactttgcttcagccattttgtatgctgggttcgtggaagtgcctgaggagtcccccaagcagccttctgaggtgaatgtgaacccactgtacgtcagcccggcctgcaagaaacccctcattcacatgtacgagaaggagtttactagcgaaatttgctgcggatccttgtggggagtgaatctgctgctcggcactcgctcgaatctttaccttatggataggagtggtaaggccgacatcactaaactcattaggaggcgaccattcaggcaaatccaggtacttgaacctctgaatctgctcatcaccatcagcggccacaaaaaccgccttcgcgtctatcatttgacctggctgcggaataaaatacttaacaacgaccccgaaagtaaaagaaggcaagaggagatgttgaagacagaagaggcctgcaaagccatcgataaacttacaggatgcgagcactttagcgtccttcaacacgaagaaacaacttatattgctatcgcgctcaagtctagtatacacctttatgcttgggccccgaagtcattcgatgaatccaccgcgattaaagtgtgcatcgaccaatcggccgatagcgagggcgactatatgagttatcaggcatacattagaatccttgcaaagatccaggctgcggatccggtcaaccgctttaagcgccctgacgaactgctgcacctcctcaagctgaaagtgttcccaacccttgaccataaacccgtcactgtcgatctggctattggctcagagaaaaggctgaagatattcttcagcagcgccgacggatatcacctgatagacgccgagagcgaagttatgagtgacgtgaccctgcccaagaaccccctcgaaatcattatcccccagaacatcataattctgcccgactgtctgggcattgggatgatgctaactttcaacgccgaggccctgagcgtagaggccaacgagcagttatttaagaagatcttggagatgtggaaggatattccttcaagtattgcattcgagtgtactcagcggacgaccggctgggggcagaaggctatcgaagtgaggtcgctgcagagtcgagtccttgaatcggagctgaaaaggagatctatcaagaagctgcgattcctgtgcacaaggggtgataagctgttttttacgagtaccctgcgaaaccaccactctcgggtgtatttcatgactcttggcaaactggaggagctgcaaagtaactacgacgtgtag

SEQ ID NO: 259993 - DNA, 4752 bp, Artificial Sequence
  derived and/or modified sequence
atggctggtcctggcgggtggcgggacagagaagttacagatctcgggcacctgcccgatcccaccggtattttctctcttgacaagacaatcggcctgggtacctacggcaggatatacctaggcctgcatgagaaaacgggagcctttacggcagttaaagtaatgaacgcacggaaaactcctctgcctgagattggcagacgggttcgtgtcaataagtatcaaaaatccgtagggtggcggtactcagacgaagaggaggatctccgtaccgagctgaatctgctgcgaaagtactctttccacaagaatatcgtgagtttttacggcgcgtttttcaagctgtctcctccgggccagcgacaccagttatggatggtcatggaattgtgcgccgcaggcagcgtcacagatgtagttaggatgacgtccaatcagtcccttaaagaagactggatagcgtatatatgccgggaaatcctccaggggttagcccaccttcacgcgcacagggtgatacatagggacattaaaggccagaatgtcctattaactcacaatgccgaagtgaagctggtggatttcggcgtgtctgcccaggtatcgagaactaatggaagaagaaatagcttcataggtactccctattggatggctccggaagtgatcgattgtgatgaggatccaagacgctcctatgactacagatcagatgtgtggagcgtgggtatcaccgccatagaaatggcggaaggggcaccaccgctctgtaatttacaacctttggaggcactcttcgtgatactcagagagagcgccccgacggtaaaatctagtggctggagccgcaagttccataatttcatggagaagtgtaccatcaaaaacttcctgtttcggccaacttcagctaatatgctccagcacccattcgtgcgagatatcaaaaatgagcggcatgtggtcgagtcccttaccaggcatttgaccgggattataaaaaaacggcagaaaaaaaaaggaatcccattaattttcgaaagggaagaagccatcaaggagcaatatacagtgagacgcttcaggggcccaagctgtactcacgagctgttgcgcttaccaacctcgagtcgatgccgtccgcttcgcgttcttcacggcgaaccatcacagcctcgatggcttccagacagagaggagccccaggtgcaagcactgcaacagctgcagggagccgctcgggtattcatgcctctgcaggccctggactccgcgccaaaacccctgaagggccaggctcaagctccacagcggttacagggcgccgccagggtgtttatgcctctgcaggcccaagtgaaggcgaaagcgtcaaaacctctccaaatgcaaataaaagcacctccccggcttagacgcgcagcccgcgtcttgatgcctctgcaagcacaagtgcgggcccctaggttgctccaagtgcagtcacaggtcagcaaaaaacaacaggcacagactcagacatcagagccccaagatctcgatcaggttcctgaggaatttcaagggcaggaccaggtgcctgagcagcagaggcaaggacaggcccccgagcagcagcagcgtcacaatcaagttcctgagcaggagctcgaacagaaccaggcacctgaacagccagaggttcaggagcaggccgccgagcctgctcaggccgagaccgaagccgaggagccagagagcctacgcgtcaacgctcaagtctttctgccgcttttatctcaggatcatcatgtgctcctaccgctccatctggacacccaggtgcttatccctgttgaggggcagactgaaggtagcccacaggcacaggcatggacactcgagccccctcaagccatcggttccgttcaggcgctgattgaggggttaagccgtgatctgcttagggctccgaattccaataattctaaacctttgggtcccctgcaaactctcatggaaaatttaagttccaaccgtttctactcacagccagaacaagcaagggagaaaaaatctaaggtctcaaccctgcgccaggctctcgctaagaggctgtctcccaagagattccgtgcgaagtcaagctggagacccgagaagctagagctttctgaccttgaagctaggcgccaacggcggcagagaagatgggaggacattttcaaccaacacgaagaagaactgcggcaagtggataaggataaagaagacgaatcctcggacaacgacgaggtgttccacagtatccaagcggaggttcaaatagagccactaaagccgtacatctccaacccaaaaaaaatcgaggtgcaggagcgttcgcctagtgtgcccaacaatcaggatcacgcccatcacgtcaagttttcatcctcagtgccgcagcgaagtctgctcgagcaggcccagaaacctattgatatccggcagagatcctctcagaacaggcagaactggctcgcagcatctgaaagtagcagtgaagaagaatcacccgtgactggacgacgatcacaaagctcaccaccctacagcaccatcgaccagaagttgctggtggacattcatgtgccggacggttttaaagtcggtaagatctctccccctgtctacctcaccaatgagtgggttgggtataatgctcttagcgaaatattccggaatgactggctcacaccagctccggttatacagcctcccgaggaagacggtgactatgtagaactgtacgacgcctcagccgacaccgatggagatgacgacgacgaaagtaatgacacatttgaagacacatacgaccacgctaatggcaacgacgatttagataatcaggtcgaccaggccaacgacgtgtgcaaagaccatgatgatgacaacaacaagttcgtcgatgatgtgaacaacaattattatgaggcaccatcatgcccaagagccagctatggccgagacggaagttgcaagcaagatggctacgatggatctagagggaaggaagaagcctaccgcggttatggcagccatacagcgaatagatctcatggaggttcggcagcatccgaggataacgccgctataggagaccaggaagagcatgctgctaatatagggagcgagcgtcgcgggtctgagggcgacggcggcaagggagtcgtgcgcacctctgaagagagcggcgccttggggctcaatggcgaagagaattgttcagaaaccgatggccctggactcaaacgacccgccagtcaagactttgagtacctacaagaagagccaggtggcggaaacgaggcttcaaatgcaatagatagtggcgcagcccccagcgctcccgaccatgagtctgataacaaggacataagcgaaagtagcactcagtcagatttttccgccaatcactctagtccctccaaaggcagtggaatgtcagccgatgctaacttcgcgagcgccatactctacgctggatttgtggaagtccccgaggagagcccaaagcaaccaagcgaggtgaatgtgaatcccctatatgtcagccccgcctgcaaaaaacctttgatccacatgtacgaaaaggagtttacctccgagatctgttgcggaagcctctggggcgtgaatctcctcctcgggaccagatccaatttgtacctcatggaccgatccggaaaggcggacattaccaagctgatcagaagaaggccgttccgccagatccaggtactagaacccctaaacctgcttatcacgattagtgggcacaagaatcggctgagggtctatcacctgacgtggctaagaaacaagatactgaacaatgaccccgagtcaaagagacgacaagaggaaatgttaaaaacggaggaagcttgcaaagccatcgataagctgacaggatgcgaacacttctcagtgttgcagcacgaggagacaacatacatcgccattgctctgaaaagcagcatccatttgtatgcgtgggcaccgaagagtttcgacgaatctacggcaataaaagtgtgtatcgatcagtctgcggactctgagggtgattatatgagctatcaggcctacattcgaatcttggccaagatacaggcagcagatcccgtgaatcggtttaagcgtcctgacgaattgctgcatctactcaagctcaaggtctttcccacattagatcacaagcctgtcacggtcgatctcgcaattggaagcgagaagaggctgaagatattcttctcctctgctgacggctatcaccttattgacgccgagtcagaggtgatgagcgatgtaacactgccaaaaaatcctctggagatcatcattcctcagaacattattattctgccagactgtctagggatcggcatgatgctgaccttcaacgcggaagccctctcggtggaggccaacgagcagctgtttaaaaagattctggaaatgtggaaagatatcccatcgagtattgctttcgagtgcacacaaaggacgacaggctggggacagaaggcaattgaggtgcggtccttacagtctcgggtgctggagtcggagctcaagcgtcgctctatcaaaaagttacggtttttatgtacacgtggagacaagttgttctttacgagtacactgcgaaatcaccatagccgggtgtattttatgacccttgggaaactagaggaattgcagagtaactacgatgtttag

SEQ ID NO: 259994 - DNA, 492 bp, Artificial Sequence
  derived and/or modified sequence
atgcaagtcccaagagaacggatcaagatcgctttccgactgtggatacccatccttgtgattcggatagtcgtcgcagggacatggcctcaggctcctggactgagcaccttaggtctgaatataatcatcctgcccgactgtctcgggatcggaatgatgctgacctttaatgccgaggcactctcagtggaggccaacgagcagctgttcaaaaagattctcgagatgtggaaagacatcccatccagcatcgcattcgagtgcacacaacgtaccacaggctggggtcagaaggcgattgaggttagatccttgcagagcagggtgctggaaagcgagttaaaacgtaggagcatcaaaaagctgcgcttcctttgtaccaggggagacaagctgttttttacaagcacgctacgaaaccatcactccagagtgtactttatgaccctgggcaaactggaggagctgcagtcaaactacgatgtatag

SEQ ID NO: 259995 - DNA, 4749 bp, Artificial Sequence
  derived and/or modified sequence
atggccggccctgggggctggagggaccgggaggtgacagacctgggccacctgcctgaccccaccggcatcttcagcctggacaagaccatcggcctgggcacctacggccgcatctacctgggcctgcacgagaagacaggagccttcaccgctgtgaaggtgatgaatgccaggaagacccccctgcctgagatcggccggcgggtgcgggtgaacaagtaccagaagtctgtgggctggagatacagtgatgaggaggaggacctgaggacagagctgaacctgctgaggaagtacagcttccacaagaacatcgtgtccttctacggggccttcttcaagctgagccccccaggccagaggcaccagctgtggatggtgatggagctgtgtgccgccggctctgtgacagatgtggtgaggatgaccagcaaccagagcctgaaggaggactggatcgcctacatctgccgggagatcctgcagggcctggcccacctgcacgcccacagggtcatccaccgggacatcaagggccagaatgtgctgctgacccacaatgctgaggtgaagctggtggactttggagtgtctgcccaggtgtccaggaccaacggcagaagaaattccttcatcggcaccccctactggatggcccctgaggtgattgactgtgatgaggaccccaggaggagctatgactacagaagtgatgtgtggagcgtgggcatcacagccatcgagatggccgagggcgccccacccctgtgcaacctgcagcccctggaggccctgtttgtgatcctgcgggagagcgcccccaccgtgaagagcagcggctggagcaggaagttccacaacttcatggagaagtgcaccatcaagaacttcctgttccggcccaccagcgccaacatgctgcagcacccctttgtgcgggacatcaagaatgaaagacatgtggtggagagcctgaccaggcacctgaccggcatcatcaagaagaggcagaagaagggcatccccctcatctttgagcgggaggaggccatcaaggagcagtacacagtgcggcgcttccggggccccagctgcacccatgagctgctgcggctgcccaccagcagccgctgccggcccctgcgggtgctgcacggggagcccagccagccccgctggctgcctgaccgggaggagccccaggtgcaggccctgcagcagctgcagggcgccgcccgggtcttcatgcccctgcaggccctggacagcgcccccaagcccctgaagggccaggcccaggccccccagaggctgcagggcgccgcccgggtcttcatgcccctgcaggcccaggtgaaggccaaggccagcaagcccctgcagatgcagatcaaggccccaccccggctgcggcgggccgcccgggtgctgatgcccctgcaggcccaggtgcgggccccccggctgctgcaggtgcagagccaggtgtccaagaagcagcaggcccagacccagaccagcgagccccaggacctggaccaggtgcctgaggagttccagggccaggaccaggtgcctgagcagcagaggcagggccaggcccctgagcagcagcagaggcacaaccaggtgcctgagcaggagctggagcagaaccaggcccctgagcagcctgaggtgcaggagcaggccgctgagcccgcccaggccgagacagaagctgaggagcctgagagcctgcgggtgaatgcccaggtgttcctgcccctgctgagccaggaccaccacgtgctgctgcccctgcacctggacacccaggtgctgatccctgtggagggccagacagagggcagcccccaggcccaggcctggaccctggagcccccccaggccatcggctctgtgcaggccctgattgagggcctgagccgggacctgctgcgggcccccaacagcaacaacagcaagcccctgggccccctgcagaccctgatggagaacctgagcagcaaccgcttctacagccagcctgagcaggcccgggagaagaagagcaaggtgtccaccctgcggcaggccctggccaagaggctgagccccaagcgcttccgggccaagagctcctggaggcctgagaagctggagctgagtgacctggaggcccggcggcagaggcggcagaggcgctgggaggacatcttcaaccagcacgaggaggagctgcggcaggtggacaaggacaaggaggatgagagcagtgacaatgatgaggtgttccacagcatccaggccgaggtgcagatcgagcccctgaagccctacatcagcaaccccaagaagattgaggtgcaggagaggagccccagcgtgcccaacaaccaggaccacgcccaccacgtgaagttcagcagctctgtgccccagaggagcctgctggagcaggcccagaagcccatcgacatccggcagaggagcagccagaaccggcagaactggctggccgccagcgagagcagcagcgaggaggagagccctgtgacaggccgccgcagccagagcagccccccctacagcaccatcgaccagaagctgctggtggacatccacgtgcctgatggcttcaaggtgggcaagatcagcccccctgtgtacctgaccaatgagtgggtgggctacaatgccctgtctgagatcttcagaaatgactggctgaccccagcccctgtgatccagcccccagaggaggatggagactatgtggagctgtatgatgccagcgctgacacagatggagatgatgatgatgagagcaatgacacctttgaggacacctatgaccacgccaatggaaatgatgacctggacaaccaggtggaccaggccaatgatgtgtgcaaggaccatgatgatgacaacaacaagtttgtggatgatgtgaacaacaactactatgaggcccccagctgcccccgggccagctatggaagagatggcagctgcaagcaggacggctatgatggcagccggggcaaggaggaggcctaccggggctacggcagccacacagccaacagaagccacggcggcagcgctgcctctgaagataatgctgccatcggggaccaggaggagcacgccgccaacatcggcagcgagcggcggggctctgaaggagatggcggcaaaggagtggtgaggaccagcgaggagagcggggccctgggcctgaatggagaggagaactgcagcgagacagatggccctggcctgaagaggcctgccagccaggactttgagtacctgcaggaggagcccggcggcggcaatgaggccagcaatgccatcgacagcggggccgcccccagcgccccagaccatgaaagtgacaacaaggacatcagcgagagcagcacccagagcgacttcagcgccaaccacagcagccccagcaagggcagcggcatgtctgcagatgccaactttgccagcgccatcctgtatgccggctttgtggaggtgcctgaggagagccccaagcagcccagcgaggtgaatgtgaaccccctgtatgtgtccccagcctgcaagaagcccctcatccacatgtatgagaaggagttcaccagcgagatctgctgcggcagcctgtggggcgtgaacctgctgctgggcaccaggagcaacctgtacctgatggacagaagtggcaaggctgacatcaccaagctgatcagaagaagacccttccggcagatccaggtgctggagcccctgaacctgctgatcaccatcagcggccacaagaaccggctgcgggtgtaccacctgacctggctgaggaacaagatcctgaacaatgaccctgagagcaagaggcggcaggaggagatgctgaagacagaggaggcctgcaaggccatcgacaagctgaccggctgtgagcacttctctgtgctgcagcacgaggagaccacctacatcgccatcgccctgaagagcagcatccacctgtatgcctgggcccccaagagctttgatgagagcacagccatcaaggtgtgcatcgaccagagcgctgacagcgagggggactacatgagctaccaggcctacatccgcatcctggccaagatccaggccgctgaccctgtgaaccgcttcaagaggccagatgagctgctgcacctgctgaagctgaaggtgttccccaccctggaccacaagcctgtgacagtggacctggccatcggcagcgagaagaggctgaagatcttcttcagcagcgcagatggctaccacctgattgatgctgagagcgaggtgatgtctgatgtgaccctgcccaagaaccccctggagatcatcatcccccagaacatcatcatcctgcctgactgcctgggcatcggcatgatgctgaccttcaatgctgaggccctgtctgtggaggccaatgagcagctgttcaagaagatcctggagatgtggaaggacatccccagcagcatcgcctttgaatgtacccagaggaccaccggctggggccagaaggccatcgaggtgcgcagcctgcagagccgggtgctggagagcgagctgaagaggaggagcatcaagaagctgcgcttcctgtgcaccaggggggacaagctgttcttcaccagcaccctgaggaaccaccacagccgggtgtacttcatgaccctgggcaagctggaggagctgcagagcaactatgatgtgtag

SEQ ID NO: 259996 - DNA, 4752 bp, Artificial Sequence
  derived and/or modified sequence
atggccggccctgggggctggagggaccgggaggtgacagacctgggccacctgcctgaccccaccggcatcttcagcctggacaagaccatcggcctgggcacctacggccgcatctacctgggcctgcacgagaagacaggagccttcaccgctgtgaaggtgatgaatgccaggaagacccccctgcctgagatcggccggcgggtgcgggtgaacaagtaccagaagtctgtgggctggagatacagtgatgaggaggaggacctgaggacagagctgaacctgctgaggaagtacagcttccacaagaacatcgtgtccttctacggggccttcttcaagctgagccccccaggccagaggcaccagctgtggatggtgatggagctgtgtgccgccggctctgtgacagatgtggtgaggatgaccagcaaccagagcctgaaggaggactggatcgcctacatctgccgggagatcctgcagggcctggcccacctgcacgcccacagggtcatccaccgggacatcaagggccagaatgtgctgctgacccacaatgctgaggtgaagctggtggactttggagtgtctgcccaggtgtccaggaccaacggcagaagaaattccttcatcggcaccccctactggatggcccctgaggtgattgactgtgatgaggaccccaggaggagctatgactacagaagtgatgtgtggagcgtgggcatcacagccatcgagatggccgagggcgccccacccctgtgcaacctgcagcccctggaggccctgtttgtgatcctgcgggagagcgcccccaccgtgaagagcagcggctggagcaggaagttccacaacttcatggagaagtgcaccatcaagaacttcctgttccggcccaccagcgccaacatgctgcagcacccctttgtgcgggacatcaagaatgaaagacatgtggtggagagcctgaccaggcacctgaccggcatcatcaagaagaggcagaagaagaagggcatccccctcatctttgagcgggaggaggccatcaaggagcagtacacagtgcggcgcttccggggccccagctgcacccatgagctgctgcggctgcccaccagcagccgctgccggcccctgcgggtgctgcatggagagcccagccagccccgctggctgcctgaccgggaggagccccaggtgcaggccctgcagcagctgcagggcgccgcccgggtcttcatgcccctgcaggccctggacagcgcccccaagcccctgaagggccaggcccaggccccccagaggctgcagggcgccgcccgggtcttcatgcccctgcaggcccaggtgaaggccaaggccagcaagcccctgcagatgcagatcaaggccccaccccggctgcggcgggccgcccgggtgctgatgcccctgcaggcccaggtgcgggccccccggctgctgcaggtgcagagccaggtgtccaagaagcagcaggcccagacccagaccagcgagccccaggacctggaccaggtgcctgaggagttccagggccaggaccaggtgcctgagcagcagaggcagggccaggcccctgagcagcagcagaggcacaaccaggtgcctgagcaggagctggagcagaaccaggcccctgagcagcctgaggtgcaggagcaggccgctgagcccgcccaggccgagacagaggccgaggagcctgagagcctgcgggtgaatgcccaggtgttcctgcccctgctgagccaggaccaccacgtgctgctgcccctgcacctggacacccaggtgctgatccctgtggagggccagacagagggcagcccccaggcccaggcctggaccctggagcccccccaggccatcggctctgtgcaggccctgattgagggcctgagccgggacctgctgcgggcccccaacagcaacaacagcaagcccctgggccccctgcagaccctgatggagaacctgagcagcaaccgcttctacagccagcctgagcaggcccgggagaagaagagcaaggtgtccaccctgcggcaggccctggccaagaggctgagccccaagcgcttccgggccaagagctcctggaggcctgagaagctggagctgagtgacctggaggcccggcggcagaggcggcagaggcgctgggaggacatcttcaaccagcacgaggaggagctgcggcaggtggacaaggacaaggaggatgagagcagtgacaatgatgaggtgttccacagcatccaggccgaggtgcagatcgagcccctgaagccctacatcagcaaccccaagaagattgaggtgcaggagaggagccccagcgtgcccaacaaccaggaccacgcccaccacgtgaagttcagcagctctgtgccccagaggagcctgctggagcaggcccagaagcccatcgacatccggcagaggagcagccagaaccggcagaactggctggccgccagcgagagcagcagcgaggaggagagccctgtgactggaagaagaagccagagcagccccccctacagcaccatcgaccagaagctgctggtggacatccacgtgcctgatggcttcaaggtgggcaagatcagcccccctgtgtacctgaccaatgagtgggtgggctacaatgccctgtctgagatcttcagaaatgactggctgaccccagcccctgtgatccagcccccagaagaagatggagactatgtggagctgtatgatgccagcgctgacacagatggagatgatgatgatgagagcaatgacacctttgaggacacctatgaccacgccaatggaaatgatgacctggacaaccaggtggaccaggccaatgatgtgtgcaaggaccatgatgatgacaacaacaagtttgtggatgatgtgaacaacaactactatgaggcccccagctgcccccgggccagctatggaagagatggcagctgcaagcaggacggctatgatggcagccggggcaaggaggaggcctaccggggctacggcagccacacagccaacagaagccatggaggcagcgctgccagcgaggacaatgctgccatcggggaccaggaggagcacgccgccaacatcggcagcgagcggcggggctctgaaggagatggcggcaagggcgtggtgaggaccagcgaggagagcggggccctgggcctgaatggagaggagaactgcagcgagacagatggccctggcctgaagaggcctgccagccaggactttgagtacctgcaggaggagcccggcggcggcaatgaggccagcaatgccattgattctggagctgcccccagcgccccagaccacgagagtgacaacaaggacatcagcgagagcagcacccagagcgacttcagcgccaaccacagcagccccagcaaaggaagtggcatgtctgcagatgccaactttgccagcgccatcctgtatgccggctttgtggaggtgcctgaggagagccccaagcagcccagcgaggtgaatgtgaaccccctgtatgtgtccccagcctgcaagaagcccctcatccacatgtatgagaaggagttcaccagcgagatctgctgcggcagcctgtggggcgtgaacctgctgctgggcaccaggagcaacctgtacctgatggacagaagtggcaaggctgacatcaccaagctgatcagaagaagacccttccggcagatccaggtgctggagcccctgaacctgctgatcaccatcagcggccacaagaaccggctgcgggtgtaccacctgacctggctgaggaacaagatcctgaacaatgaccctgagagcaagaggcggcaggaggagatgctgaagacagaggaggcctgcaaggccatcgacaagctgaccggctgtgagcacttctctgtgctgcagcacgaggagaccacctacatcgccatcgccctgaagagcagcatccacctgtatgcctgggcccccaagagctttgatgagagcacagccatcaaggtgtgcatcgaccagagcgctgacagcgagggggactacatgagctaccaggcctacatccgcatcctggccaagatccaggccgctgaccctgtgaaccgcttcaagaggccagatgagctgctgcacctgctgaagctgaaggtgttccccaccctggaccacaagcctgtgacagtggacctggccatcggcagcgagaagaggctgaagatcttcttcagcagcgcagatggctaccacctgattgatgctgagagcgaggtgatgtctgatgtgaccctgcccaagaaccccctggagatcatcatcccccagaacatcatcatcctgcctgactgcctgggcatcggcatgatgctgaccttcaatgctgaggccctgtctgtggaggccaatgagcagctgttcaagaagatcctggagatgtggaaggacatccccagcagcatcgcctttgagtgcacccagaggaccaccggctggggccagaaggccatcgaggtgcgcagcctgcagagccgggtgctggagagcgagctgaagagaagaagcatcaagaagctgcgcttcctgtgcaccaggggggacaagctgttcttcaccagcaccctgaggaaccaccacagccgggtgtacttcatgaccctgggcaagctggaggagctgcagagcaactatgatgtgtag

SEQ ID NO: 259997 - DNA, 492 bp, Artificial Sequence
  derived and/or modified sequence
atgcaggtgccccgggagcgcatcaagatcgccttccggctgtggatccccatcctggtgatcagaattgtggtggccggcacctggccccaggcccctggcctgagcaccctgggcctgaacatcatcatcctgcctgactgcctgggcatcggcatgatgctgaccttcaatgctgaggccctgtctgtggaggccaatgagcagctgttcaagaagatcctggagatgtggaaggacatccccagcagcatcgcctttgagtgcacccagaggaccaccggctggggccagaaggccatcgaggtgcgcagcctgcagagccgggtgctggagagcgagctgaagagaagaagcatcaagaagctgcgcttcctgtgcaccaggggggacaagctgttcttcaccagcaccctgaggaaccaccacagccgggtgtacttcatgaccctgggcaagctggaggagctgcagagcaactatgatgtgtag

SEQ ID NO: 259998 - DNA, 4749 bp, Artificial Sequence
  derived and/or modified sequence
atggccggccccggcggctggcgggaccgggaggtgaccgacctgggccacctgcccgaccccacaggaatattcagtttggataaaacgatcgggcttggaacatacggccgtatatatctgggcctccacgaaaagacgggggcttttaccgcggttaaggtgatgaatgcacggaagacacctcttcccgagattggcagacgcgtgagagtgaacaaataccaaaagtctgttggttggcggtactctgatgaggaggaggatctccgcaccgagctcaacctcctccggaaatacagcttccataaaaacatcgtctcattttacggggctttttttaagctgagccccccgggacagcgccaccagctctggatggtcatggagctatgtgctgcagggagtgtcacagatgtcgtccggatgaccagcaatcagtcactcaaggaggattggatcgcatacatttgccgagagatcttacagggactggctcacctgcatgctcacagggttatccacagagacataaaaggacaaaacgtgttgttaacacacaatgccgaggtaaagcttgttgactttggggtttccgctcaggtttcccgaaccaacggccggaggaatagctttatcggaacgccttactggatggctccagaagtgatcgactgtgatgaagatccacgacgctcctatgattatcgctctgatgtgtggtccgtggggatcaccgcaattgaaatggcggagggagcgcccccactgtgtaatctccagcccctcgaggccctctttgtcattctgagggagagcgcgccaacagtcaagagtagcggatggtcaagaaaattccataatttcatggagaaatgtactatcaaaaatttccttttccgccccacatccgcaaatatgctgcaacatccctttgttagggacattaaaaatgagaggcacgtcgtggagagtctgactcggcatttaaccggcattatcaaaaagcgacagaagaaaggcattcccctgatcttcgagcgggaggaggcaataaaagagcagtacaccgttcgccgcttccgaggcccttcatgcactcacgagctcctgaggcttcccaccagttcgagatgccgaccacttagggtgttgcacggtgagccaagccaaccgcgatggctccctgatagagaggagccccaagtgcaggcccttcagcaactgcaaggcgccgcacgcgtcttcatgccccttcaggctcttgattcagcaccaaaacctcttaagggccaagctcaggctccccagcggctgcagggggcagctcgggtcttcatgccacttcaagcacaggtgaaagcaaaagctagcaaacctctccagatgcagattaaggccccaccgcgtctccgccgcgcagccagggtgcttatgcccttacaggcccaagtcagagcccccaggttacttcaggtgcagtctcaagtaagcaagaaacagcaagctcagacacagactagtgagccccaggatctggatcaggtcccagaggaattccaaggacaggatcaggtccctgaacagcaaagacagggacaggcccccgagcagcagcaacgccacaatcaagtccccgagcaggaactcgagcagaatcaggcaccagagcagccagaagtgcaggagcaggcggcagaacccgctcaggccgaaaccgaggcagaagagcctgaaagcctgcgcgtgaacgctcaggtgttcctgccgttgctctcccaggatcaccatgtcctgctgccactgcacctggatacccaagtgcttatccctgtcgaggggcagacagaagggagtcctcaagcccaggcctggaccctggagcctccccaggctatcggctcagtccaggctctgatcgagggcctgtccagagacctactgagagcgcccaattctaacaattccaagcccctcggtcccctgcagacacttatggaaaatctttcatcaaaccgattctactcacagcccgaacaggcacgggagaaaaagtccaaggtgtccacactccgccaggctctggccaaacggttatcacccaagcgcttccgcgccaaatcatcatggcgacctgagaaattggaattatctgatctcgaggcaagaaggcaacgcagacagcgtaggtgggaagacattttcaaccaacatgaggaggagcttaggcaggtggataaagacaaggaagatgagtccagcgacaatgacgaagtctttcattctatacaggctgaagtgcagattgagccactgaagccgtacatctccaatcctaagaaaatcgaggtgcaggaaagatcgccgtcggtgccgaataaccaggaccacgcacaccatgttaagttctcctcatcagtacctcagagaagcctgctcgaacaggctcagaaacccattgatataaggcagagatccagtcagaacagacagaactggcttgctgcgtccgaaagttcctctgaggaagaaagtccagtgactggcagacgatcacagagctcgcctccatatagcacgatcgaccagaaactcctggtggatatccacgtacccgacggttttaaggtcggcaaaatcagccctcccgtgtatctgactaatgagtgggtcggctacaacgcactgagcgagatctttcgcaatgattggctaacccccgcccctgttatacaacctccggaggaagacggggattacgtggagctgtacgacgcaagcgccgacacagacggggatgatgacgatgagtctaatgatacatttgaagatacctacgatcatgcgaatggtaatgacgacctcgacaatcaagttgatcaagcaaacgacgtgtgcaaggaccatgacgacgacaacaacaagttcgttgatgatgttaacaataactactatgaagcaccaagctgcccgagagcatcttatgggcgtgatgggagttgcaaacaggacggatatgatggatcaaggggcaaggaagaagcataccgcggctatggcagccataccgctaatcgctcacacggtggtagtgccgcgtccgaggataatgccgctataggagatcaagaggagcacgccgccaatatcggctcggagcggagaggcagtgagggcgacggcggaaagggtgtagttcggacttccgaagaaagcggggctcttggacttaatggcgaggagaactgttcagaaactgatgggccaggactaaagcggcctgcttctcaggacttcgagtacctgcaagaggagcccggcgggggaaatgaggcttctaacgcaatcgatagtggagcagcaccatccgcccccgaccacgagagtgacaataaagatatctccgagagcagtactcagagcgatttctcagcaaaccacagcagcccttccaaaggctcgggcatgtccgctgacgcgaatttcgcctcagcaatcctttatgctggtttcgtggaagtaccagaggagtcccctaaacaaccaagcgaagtcaatgtaaaccctctgtacgtgtcacctgcttgtaaaaagcctctgattcacatgtatgagaaggaatttacatccgagatttgttgcggcagcttatggggggtcaatctgcttcttgggaccaggtctaacctgtatctgatggacaggtcaggtaaggccgatatcaccaagcttattaggcgaaggcctttccgtcaaattcaggtgctcgaaccgctgaaccttctcattaccattagcggacacaagaataggttgagagtataccatttaacgtggctgcgcaataagatcctgaataatgaccccgagagtaagcgacgacaggaggagatgcttaagacggaagaggcctgcaaagcaatagacaagctgacaggttgcgaacatttcagtgtcctgcagcacgaagagactacatatattgctattgccctgaagtctagtatccacttatatgcctgggcaccgaagagcttcgatgagtctaccgcaataaaggtatgcatcgatcagtctgcagatagcgaaggagactacatgtcttaccaggcctacattcggatccttgcaaaaattcaggccgctgaccccgttaatcggtttaaaaggccagacgaattgctccacttgctgaaactcaaggtatttccgactctcgatcataagccagtgactgtggacctggccattggctccgaaaagcggttaaaaatatttttttcttcagcggacggataccacctcatcgatgccgagtccgaggtaatgtcagatgtgaccttacccaagaatcccctagaaattattatccctcagaacatcataattctgccagattgcctcggaattggcatgatgctcacttttaatgctgaagcattgtcggttgaggcgaacgagcagcttttcaaaaaaatccttgagatgtggaaggacattcccagctccattgcgtttgagtgtacccagagaactactggctggggccagaaggccatagaggttcggtctctacagtcccgggttctggagtctgagttgaagagacgaagcatcaagaagctgcggtttctgtgcacacgcggggacaagctgttctttacatcaacacttagaaaccatcacagtagagtgtactttatgacactgggtaagctcgaggaactgcagtctaactatgatgtctag

SEQ ID NO: 259999 - DNA, 4752 bp, Artificial Sequence
  derived and/or modified sequence
atggccggccccggcggctggcgggaccgggaggtgaccgacctggggcacctgcccgacccaacggggatcttctcattggacaagacaattggcctcggaacttacggcaggatctatctgggcctgcatgagaagacaggggctttcaccgccgtgaaggtgatgaacgcgcggaagacaccactgcccgaaataggtcggcgcgtgagggtgaataagtaccagaaatctgttggctggcgctactctgacgaggaggaggacctgcggactgaactgaacctcctgaggaaatactcattccataagaacatcgtgagtttctacggcgcctttttcaagctttccccccctggccagagacaccagttgtggatggttatggagttatgcgcagcaggatcagtcacagacgtggtaagaatgacatcaaatcagagcctgaaggaggactggatcgcttatatctgtcgcgagatcctacagggcctcgcacatctgcatgcccacagggtcattcaccgcgacatcaagggccagaatgtgttgttgacccacaatgcagaagtcaagctcgttgactttggggtctccgcccaggtctcccgcacgaacgggcgacggaattctttcatcggaaccccatactggatggcccctgaagtcatcgactgcgacgaagacccccgcagatcgtacgattatcgttcggacgtgtggtccgtgggaatcaccgctattgaaatggccgaaggcgctccacccctgtgcaatctccagcctctcgaggccttattcgtcattttacgagaatcggcaccaaccgtgaaatccagtggatggtccagaaagtttcataacttcatggagaagtgtacgatcaagaattttctgttccgccccacgtccgcaaatatgcttcagcacccattcgttagggacatcaaaaacgaacggcatgtagttgaaagcctaaccaggcacctaacaggaattatcaagaagcgtcagaagaagaaaggcatccctctcatcttcgagcgggaagaggccataaaagaacagtacactgttaggaggtttaggggtcctagctgcactcacgagttactccggctaccaacctcttctcgctgccgcccactccgggtgctgcacggtgaacccagccagcccaggtggcttcccgatagagaggaaccacaggtgcaggcccttcagcaactccagggcgcggctcgcgtgtttatgcccctgcaggccctagactctgctcctaaacctcttaaaggccaggcacaagccccccagaggttgcagggtgcagccagggttttcatgcccttacaagcgcaggttaaggcgaaggcgtcaaagcctttgcaaatgcagatcaaggcgccaccacgtctccggcgggcagcccgggttctgatgcccctgcaggcacaggtcagagcccctaggcttctgcaggtgcaatcccaagtgagtaagaagcagcaagcacagacacagacctctgaaccacaggatttagaccaagtgcccgaagagtttcagggacaagatcaggtgcccgaacaacagaggcagggccaggctcctgagcaacagcaaaggcacaatcaggtcccagagcaggaactggagcagaaccaggcgccggaacagccagaggtccaggagcaggccgccgaacccgcccaggctgagaccgaggctgaagaacctgaatctttgcgcgtcaatgcccaagtctttcttccactcctaagtcaggatcatcacgtgctgttaccgctgcacctagacacccaggtcctcatcccggtggagggccagaccgaaggaagtccccaggctcaggcttggacattggaacctcctcaggcgatcggctcagtgcaggccctgatcgaaggacttagcagagacctcctgagagcgccaaattctaataatagtaaaccactagggccactgcagacgttaatggagaatctctcgtctaatcggttctactcccaaccagaacaggctagggaaaaaaagtctaaggttagtacactccgccaagcactggcaaaaagactatcccctaagaggttcagagcaaagagctcgtggagaccagaaaaactcgaactgtctgacctggaagccagaagacagagacgccagaggcgatgggaggatatctttaatcagcatgaggaagagctgcgacaagtcgataaagacaaggaggacgagagtagcgacaatgatgaggtctttcattctatccaggctgaagtgcagatcgaacccctcaagccgtatatcagcaatcccaagaagattgaggtgcaggaaaggagcccatctgtgcctaataatcaagaccacgctcatcatgtcaagtttagcagcagcgtaccgcagcgctctttactcgagcaggcacaaaaacctatcgatatacgccagcgatcttcccagaaccgacaaaattggctggcagcctcagaatccagtagtgaggaagagtctccggtcaccggcagacggtcccaatcttcgcctccatactccaccatcgatcagaagctgctggttgacattcacgtccctgatgggtttaaagtggggaagatttccccaccagtgtatctcactaacgagtgggtgggatacaacgctcttagcgaaatattccgcaatgactggctaacaccagcacctgtgatccagccccctgaagaggatggggactacgttgagctttatgacgcctctgccgacaccgacggggacgatgatgacgaatctaacgacacattcgaagacacttatgatcatgccaacgggaatgacgatcttgataatcaggtggatcaggctaacgacgtgtgcaaggaccacgatgacgacaataataagttcgtggatgacgtcaataacaactactacgaggctccttcatgccctcgggcttcctacggtcgagacggctcctgcaagcaggatggctatgacggctcgagaggcaaggaagaggcgtaccgcggttatggctcccatactgctaacagatcccatggggggtccgccgccagcgaggacaacgccgccatcggggaccaagaggagcatgcggccaatatcgggagcgaacgtagaggatctgaaggagatggcgggaagggcgttgtccggaccagtgaggagagcggggcattaggcttgaacggcgaagaaaattgctcagaaaccgacggaccagggcttaaacgtccagcctcacaagattttgagtatttgcaagaggagcctgggggaggcaatgaggcttccaatgcaattgactctggcgccgctccctcggcacctgatcacgaatccgacaacaaggacatcagtgagtcctctactcaatccgatttttccgcaaatcatagttcaccctcaaagggaagtgggatgtctgccgacgccaattttgcctccgctattctatacgctggctttgtagaggtcccagaggaaagcccaaagcaaccgtccgaggtgaacgtgaatcccctgtatgtgtcccccgcatgtaagaagcctctaattcacatgtacgagaaggaattcactagcgagatatgttgtggttcactgtggggcgtcaacctgctattgggcacccgcagcaatctgtacctaatggaccggagcgggaaagccgatattactaagctgatcaggcggcgcccctttcgccagatccaggttctggaaccccttaatttgctgataacgataagcgggcacaagaatcgactccgagtctatcatctcacgtggttgagaaacaaaatcctgaacaacgatcctgaaagtaagaggcggcaggaggagatgctgaagacagaagaggcatgcaaggctatagataagctgacaggctgtgaacattttagcgttttgcagcatgaggaaaccacttacatcgctattgcactgaagtcttccatccatttatacgcctgggcgcccaagtcattcgatgagtcaaccgctatcaaggtgtgtattgatcagagtgctgattccgagggggactatatgtcataccaggcctacattagaatcctggccaagatccaggcggcagacccggttaatcgattcaagagaccggacgagctgctccatctacttaagctgaaagtctttcccacactggaccacaagcctgtcacagtcgatctggccatcggctcagagaagagactcaagattttcttttctagcgccgatggataccacctgatcgacgctgagagcgaagttatgtccgatgtaactctgcccaagaatccgctggagattattatcccccagaacattatcattcttcccgactgtttgggtataggcatgatgctgacgtttaatgcagaggctttatcggtggaagccaacgagcagctgttcaagaagatcctggaaatgtggaaggatattccgtcctctattgcttttgagtgtacccaaaggacgacaggctgggggcagaaggctatcgaggtacggtctctccaatcacgagtgctggaatccgagcttaaacgtaggtccatcaagaagctgcgcttcctttgtacgcggggcgacaaactgttctttacctcaaccctgaggaaccaccacagcagggtttactttatgacactgggaaaacttgaggaactgcagtctaattatgacgtctag

SEQ ID NO: 260000 - DNA, 492 bp, Artificial Sequence
  derived and/or modified sequence
atgcaggtgccccgggagcggatcaagatcgccttccggctgtggatcccgatcctggttatcagaatcgttgtggccggaacatggcctcaagcaccagggctgtccaccctcgggctaaacattatcatacttccagactgcctcggtatcggaatgatgctgacgtttaatgcagaggctctttcggtagaggccaatgagcagctcttcaaaaaaattctcgagatgtggaaagatataccctcctccatagccttcgagtgtactcaacggaccacggggtggggtcagaaagccatcgaagtgcgttctctccagagtagagttctggaatctgagctgaagcgaaggtcgataaaaaagttacggtttctgtgtactagaggtgataaattatttttcacctccactctgcgcaaccaccattcaagagtgtacttcatgacactgggcaaactagaggaactccagtctaattatgacgtgtag

SEQ ID NO: 260001 - DNA, 8062 bp, Artificial Sequence
  derived and/or modified sequence
acagcgctctcgacacggagcacccttctagcttcttcgtctccaggactgacgctcaggctcctctctcgccttagcccaacttgctttcccgcctcgcaaactccggtttccctccactcccaactcttttcactacacgtttcccctcctctatctcccacgccacgaaccccgatccccagactcctctctcccgccctcctccttcctctctcctcccttcaactcttcatccgcttccacctcagactctgcgcgcacccaattcagtcgcccgctcccgttcggctcctcgaagccatggcgggacctgggggctggagggacagggaggtcacggatctgggccacctgccggatccaactggaatattctcactagataaaaccattggccttggtacttatggcagaatctatttgggacttcatgagaagactggtgcatttacagctgttaaagtgatgaacgctcgtaagacccctttacctgaaataggaaggcgagtgagagtgaataaatatcaaaaatctgttgggtggagatacagtgatgaggaagaggatctcaggactgaactcaaccttctgaggaagtactctttccacaaaaacattgtgtccttctatggagcatttttcaagctgagtccccctggtcagcggcaccaactttggatggtgatggagttatgtgcagcaggttcggtcactgatgtagtgagaatgaccagtaatcagagtttaaaagaagattggattgcttatatctgccgagaaatccttcagggcttagctcaccttcacgcacaccgagtaattcaccgggacatcaaaggtcagaatgtgctgctgactcataatgctgaagtaaaactggttgattttggagtgagtgcccaggtgagcagaactaatggaagaaggaatagtttcattgggacaccatactggatggcacctgaggtgattgactgtgatgaggacccaagacgctcctatgattacagaagtgatgtgtggtctgtgggaattactgccattgaaatggctgaaggagcccctcctctgtgtaaccttcaacccttggaagctctcttcgttattttgcgggaatctgctcccacagtcaaatccagcggatggtcccgtaagttccacaatttcatggaaaagtgtacgataaaaaatttcctgtttcgtcctacttctgcaaacatgcttcaacacccatttgttcgggatataaaaaatgaacgacatgttgttgagtcattaacaaggcatcttactggaatcattaaaaaaagacagaaaaaaggaatacctttgatctttgaaagagaagaagctattaaggaacagtacaccgtgagaagattcagaggaccctcttgcactcacgagcttctgagattgccaaccagcagcagatgcagaccacttagagtcctgcatggggaaccctctcagccaaggtggctacctgatcgagaagagccacaggtccaggcacttcagcagctacagggagcagccagggtattcatgccactgcaggctctggacagtgcacctaagcctctaaaggggcaggctcaggcacctcaacgactacaaggggcagctcgggtgttcatgccactacaggctcaggtgaaggctaaagcctctaaacctctacaaatgcagattaaggcacctccacgactacggagggcagccagggtgctcatgccactacaggcacaggttagggcacctaggcttctgcaggtacagtcccaggtatccaaaaagcagcaggcccagacccagacatcagaaccacaagatttggaccaggtaccagaggaatttcagggtcaagatcaggtacccgaacaacaaaggcagggccaggcccctgaacaacagcagaggcacaaccaggtgcctgaacaagagctggagcagaaccaggcacctgaacagccagaggtacaggaacaggctgccgagcctgcacaggcagagactgaggcagaggaacctgagtcattacgagtaaatgcccaggtatttctgcccctgctatcacaagatcaccatgtgctgttgccactacatttggatactcaggtgctcattccagtagaggggcaaactgaaggatcacctcaggcacaggcttggacactagaacccccacaggcaattggctcagttcaagcactgatagagggactatcaagagacttgcttcgggcaccaaactcaaataactcaaagccacttggtccgttgcaaaccctgatggaaaatctgtcatcaaataggttttactcacaaccagaacaggcacgggagaaaaaatcaaaagtttctactctgaggcaagcactggcaaaaagactatcaccaaagaggttcagggcaaagtcatcatggagacctgaaaagcttgaactctcggatttagaagcccgcaggcaaaggcgccaacgcagatgggaagatatctttaatcagcatgaggaagaattgagacaagttgataaagacaaagaagatgaatcatcagacaatgatgaagtatttcattcgattcaggctgaagtccagatagagccattgaagccatacatttcaaatcctaaaaaaattgaggttcaagagagatctccttctgtgcctaacaaccaggatcatgcacatcatgtcaagttctcttcaagcgttcctcagcggtctcttttggaacaagctcagaagcccattgacatcagacaaaggagttcgcaaaatcgtcaaaattggctggcagcatcagaatcttcttctgaggaagaaagtcctgtgactggaaggaggtctcagtcatcaccaccttattctactattgatcagaagttgctggttgacatccatgttccagatggatttaaagtaggaaaaatatcaccccctgtatacttgacaaacgaatgggtaggctataatgcactctctgaaatcttccggaatgattggttaactccggcacctgtcattcagccacctgaagaggatggtgattatgttgaactctatgatgccagtgctgatactgatggtgatgatgatgatgagtctaatgatacttttgaagatacctatgatcatgccaatggcaatgatgacttggataaccaggttgatcaggctaatgatgtttgtaaagaccatgatgatgacaacaataagtttgttgatgatgtaaataataattattatgaggcgcctagttgtccaagggcaagctatggcagagatggaagctgcaagcaagatggttatgatggaagtcgtggaaaagaggaagcctacagaggctatggaagccatacagccaatagaagccatggaggaagtgcagccagtgaggacaatgcagccattggagatcaggaagaacatgcagccaatataggcagtgaaagaagaggcagtgagggtgatggaggtaagggagtcgttcgaaccagtgaagagagtggagcccttggactcaatggagaagaaaattgctcagagacagatggtccaggattgaagagacctgcgtctcaggactttgaatatctacaggaggagccaggtggtggaaatgaggcctcaaatgccattgactcaggtgctgcaccgtcagcacctgatcatgagagtgacaataaggacatatcagaatcatcaacacaatcagatttttctgccaatcactcatctccttccaaaggttctgggatgtctgctgatgctaactttgccagtgccatcttatacgctggattcgtagaagtacctgaggaatcacctaagcaaccctctgaagtcaatgttaacccactctatgtctctcctgcatgtaaaaaaccactaatccacatgtatgaaaaggagttcacttctgagatctgctgtggttctttgtggggagtcaatttgctgttgggaacccgatctaatctatatctgatggacagaagtggaaaggctgacattactaaacttataaggcgaagaccattccgccagattcaagtcttagagccactcaatttgctgattaccatctcaggtcataagaacagacttcgggtgtatcatctgacctggttgaggaacaagattttgaataatgatccagaaagtaaaagaaggcaagaagaaatgctgaagacagaggaagcctgcaaagctattgataagttaacaggctgtgaacacttcagtgtcctccaacatgaagaaacaacatatattgcaattgctttgaaatcatcaattcacctttatgcatgggcaccaaagtcctttgatgaaagcactgctattaaagtatgcattgatcaatcagcagactctgaaggagactacatgtcctatcaagcctatatacgaatactggcaaaaatacaggcagctgatccagtgaaccggtttaagagaccagatgagctccttcatttgctgaagctcaaggtatttccaacacttgatcataagccagtgacagttgacctggctattggttctgaaaaaagactaaagattttcttcagctcagcagatggatatcacctcatcgatgcagaatctgaggttatgtctgatgtgaccctgccaaagaatcccctggaaatcattataccacagaatatcatcattttacctgattgcttgggaattggcatgatgctcaccttcaatgctgaagccctctctgtggaagcaaatgaacaactcttcaagaagatccttgaaatgtggaaagacataccatcttctatagcttttgaatgtacacagcgaaccacaggatggggccaaaaggccattgaagtgcgctctttgcaatccagggttctggaaagtgagctgaagcgcaggtcaattaagaagctgagattcctgtgcacccggggtgacaagctgttctttacctctaccctgcgcaatcaccacagccgggtttacttcatgacacttggaaaacttgaagagctccaaagcaattatgatgtctaaaagtttccagtgatttattaccacattataaacatcatgtataggcagtctgcatcttcagatttcagagattaaatgagtattcagttttatttttagtaaagattaaatccaaaactttacttttaatgtagcacagaatagttttaatgagaaatgcagctttatgtataaaattaactatagcaagctctaggtactccaatggtgtacaatgtcttttgcacaaactttgtaacttttgttactgtgaattcaaacattactctttggacagtttggacagtatctgtattcagattttacaacatggagtaaagaaacctgttatgaattagattacaagcagccttcaaaagaattggcactgggataagatttttcagaaaaagaaaaacatcggcaaactgtgtgtgatttttccaaagctatataaagaaccaaaggtttagtcaagaaacaaaaatcttaaagattattataacccagactaaggttgaacaacctgcatgcccagagaaaactatggcgacaaaggggaaaaggccaccactcgttttctcactgattcatgccaattaagcctacagttaaagaccagttttgttcttttcacccatttttaagctggttttctcctgataagaagaaaggaagaaagccccagacgcttggtttttctcagaacccccaaaagatgtgcaatagctgttgttacaaaccaccaaataatacagttgtgagcctgaatacaggactgaactcctatacacgtgtactgtagaatgagtattttttaataccttaaggtaggcgtcaaattctactccccaaagcagagatagattgatttatcaaaattattatctggccaacagtgtgactatcagacagcatcaaatatttgcccaatccaagattagactacacaaaagcttccttccagtattaaacaaaaagaattaaacataactatgaaaaaactttgctaatatctgtgtttttcagatttcattttttgtaaaatcagaaattaatctaaacatattcagtgataagttcatgtgtaacgacttaatgttaaaggttaaaaaaaagatttcacaaaatatacaactttcaccatatatataagcctgcaaaattagagtagtgaaagtcatgctagtccatcacccaaatatgttatagacgccatagacaggtgatgtttggtcacctatggtaactgctacctgatgaagagcataatttctgcatatccatcctcaataccatggtaaattctggggcaatagagaagcaacagaactgccacaaagtatacctcaatataattcctctagttctgcttctaaaatctgaggacagtgctagtgggaaaataattttcaaactacctggttaaccaaaatacaaaagcagctgactatgtgtgatttcataatagcacatttcttgacacttagtgctagaaatgaagatttggattttcctaacaacttacatcaagaatgtagtgtagctcattattgagaatttaggaaagcctgaatccattaattaaggaaataaatgtgactcacatttcttttactgtgacacaataatgtgatcctaaaactggcttatccttgagtgtttacaactcaaacaactttttgaatgcagtagttttttttttttaaaaacaaacttttatgtcaaattttttttcttagaagtagtcttcattattataaatttgtacaccaaaaggccatggggaactttgtgcaagtacctcatcgctgagcaaatggagcttgctatgttttaatttcagaaaatttcctcatatacgtagtgtgtagaatcaagtcttttaataattcattttttcttcataatatttactcaaagttaagcttaaaaataagttttatcttaaaatcatatttgaagacagtaagacagtaaactattttaggaagtcaacccccattgcactctgtggcagttattctggtaaaaataggcaaaagtgacctgaatctacaatgatgtcccaaagtaaccaagtaagagagattgtaaatgataaaccgagctttaaaggataaagtgttaataaagaaaggaagctgggcacatgtcaaaaagggagatcgaaatgttaggtaatcatttagaaaggacagaaaatatttaaagtggctcataggtaatgaatatttctgacttagatgtaaatccatctggaatctttacatcctttgccagctgaaacaagaaagtgaagggacaatgatatttcatggtcagtttattttgtaagagacagaagaaattatatctatacattaccttgtagcagcagtacctggaagccccagcccgtcacagaagtgtggaggggggctcctgactagacaatttccctagcccttgtgatttgaagcatgaaagttctggcaggttatgagcagcactagggataaagtatggttttattttggtgtaatttaggtttttcaacaaagcccttgtctaaaataaaaggcattattggaaatatttgaaaactagaaaatgatggataaaagggctgataagaaaatttctgactgtcagtagaagtgagataagatcctcagaggaaacagtaagaagggataatcattaagatagtaaaacaggcaaagcagaatcacatgtgcacacacacatacacatgtaaacattggaatgcataagttttaatattttagcgctatcagtttctaaatgcattaattactaactgccctctcccaagattcatttagttcaaacagtatccgtaaactaggaataatgccacatgcattcaatgggatcttttaagtactcttcagtttgttccaagaaatgtgcctactgaaatcaaattaatttgtattcaatgtgtacttcaagactgctaattgtttcatctgaaagcctacaatgaatcattgttcaaccttgaaaaataaaattttgtaaaaca

SEQ ID NO: 260002 - DNA, 8064 bp, Artificial Sequence
  derived and/or modified sequence
acagcgctctcgacacggagcacccttctagcttcttcgtctccaggactgacgctcaggctcctctctcgccttagcccaacttgctttcccgcctcgcaaactccggtttccctccactcccaactcttttcactacacgtttcccctcctctatctcccacgccacgaaccccgatccccagactcctctctcccgccctcctccttcctctctcctcccttcaactcttcatccgcttccacctcagactctgcgcgcacccaattcagtcgcccgctcccgttcggctcctcgaagccatggcgggacctgggggctggagggacagggaggtcacggatctgggccacctgccggatccaactggaatattctcactagataaaaccattggccttggtacttatggcagaatctatttgggacttcatgagaagactggtgcatttacagctgttaaagtgatgaacgctcgtaagacccctttacctgaaataggaaggcgagtgagagtgaataaatatcaaaaatctgttgggtggagatacagtgatgaggaagaggatctcaggactgaactcaaccttctgaggaagtactctttccacaaaaacattgtgtccttctatggagcatttttcaagctgagtccccctggtcagcggcaccaactttggatggtgatggagttatgtgcagcaggttcggtcactgatgtagtgagaatgaccagtaatcagagtttaaaagaagattggattgcttatatctgccgagaaatccttcagggcttagctcaccttcacgcacaccgagtaattcaccgggacatcaaaggtcagaatgtgctgctgactcataatgctgaagtaaaactggttgattttggagtgagtgcccaggtgagcagaactaatggaagaaggaatagtttcattgggacaccatactggatggcacctgaggtgattgactgtgatgaggacccaagacgctcctatgattacagaagtgatgtgtggtctgtgggaattactgccattgaaatggctgaaggagcccctcctctgtgtaaccttcaacccttggaagctctcttcgttattttgcgggaatctgctcccacagtcaaatccagcggatggtcccgtaagttccacaatttcatggaaaagtgtacgataaaaaatttcctgtttcgtcctacttctgcaaacatgcttcaacacccatttgttcgggatataaaaaatgaacgacatgttgttgagtcattaacaaggcatcttactggaatcattaaaaaaagacagaaaaaaaaaggaatacctttgatctttgaaagagaagaagctattaaggaacagtacaccgtgagaagattcagaggaccctcttgcactcacgagcttctgagattgccaaccagcagcagatgcagaccacttagagtcctgcatggggaaccctctcagccaaggtggctacctgatcgagaagagccacaggtccaggcacttcagcagctacagggagcagccagggtattcatgccactgcaggctctggacagtgcacctaagcctctaaaggggcaggctcaggcacctcaacgactacaaggggcagctcgggtgttcatgccactacaggctcaggtgaaggctaaagcctctaaacctctacaaatgcagattaaggcacctccacgactacggagggcagccagggtgctcatgccactacaggcacaggttagggcacctaggcttctgcaggtacagtcccaggtatccaaaaagcagcaggcccagacccagacatcagaaccacaagatttggaccaggtaccagaggaatttcagggtcaagatcaggtacccgaacaacaaaggcagggccaggcccctgaacaacagcagaggcacaaccaggtgcctgaacaagagctggagcagaaccaggcacctgaacagccagaggtacaggaacaggctgccgagcctgcacaggcagagactgaggcagaggaacctgagtcattacgagtaaatgcccaggtatttctgcccctgctatcacaagatcaccatgtgctgttgccactacatttggatactcaggtgctcattccagtagaggggcaaactgaaggatcacctcaggcacaggcttggacactagaacccccacaggcaattggctcagttcaagcactgatagagggactatcaagagacttgcttcgggcaccaaactcaaataactcaaagccacttggtccgttgcaaaccctgatggaaaatctgtcatcaaataggttttactcacaaccagaacaggcacgggagaaaaaatcaaaagtttctactctgaggcaagcactggcaaaaagactatcaccaaagaggttcagggcaaagtcatcatggagacctgaaaagcttgaactctcggatttagaagcccgcaggcaaaggcgccaacgcagatgggaagatatctttaatcagcatgaggaagaattgagacaagttgataaagacaaagaagatgaatcatcagacaatgatgaagtatttcattcgattcaggctgaagtccagatagagccattgaagccatacatttcaaatcctaaaaaaattgaggttcaagagagatctccttctgtgcctaacaaccaggatcatgcacatcatgtcaagttctcttcaagcgttcctcagcggtctcttttggaacaagctcagaagcccattgacatcagacaaaggagttcgcaaaatcgtcaaaattggctggcagcatcagaatcttcttctgaggaagaaagtcctgtgactggaaggaggtctcagtcatcaccaccttattctactattgatcagaagttgctggttgacatccatgttccagatggatttaaagtaggaaaaatatcaccccctgtatacttgacaaacgaatgggtaggctataatgcactctctgaaatcttccggaatgattggttaactccggcacctgtcattcagccacctgaagaggatggtgattatgttgaactctatgatgccagtgctgatactgatggtgatgatgatgatgagtctaatgatacttttgaagatacctatgatcatgccaatggcaatgatgacttggataaccaggttgatcaggctaatgatgtttgtaaagaccatgatgatgacaacaataagtttgttgatgatgtaaataataattattatgaggcgcctagttgtccaagggcaagctatggcagagatggaagctgcaagcaagatggttatgatggaagtcgtggaaaagaggaagcctacagaggctatggaagccatacagccaatagaagccatggaggaagtgcagccagtgaggacaatgcagccattggagatcaggaagaacatgcagccaatataggcagtgaaagaagaggcagtgagggtgatggaggtaagggagtcgttcgaaccagtgaagagagtggagcccttggactcaatggagaagaaaattgctcagagacagatggtccaggattgaagagacctgcgtctcaggactttgaatatctacaggaggagccaggtggtggaaatgaggcctcaaatgccattgactcaggtgctgcaccgtcagcacctgatcatgagagtgacaataaggacatatcagaatcatcaacacaatcagatttttctgccaatcactcatctccttccaaaggttctgggatgtctgctgatgctaactttgccagtgccatcttatacgctggattcgtagaagtacctgaggaatcacctaagcaaccctctgaagtcaatgttaacccactctatgtctctcctgcatgtaaaaaaccactaatccacatgtatgaaaaggagttcacttctgagatctgctgtggttctttgtggggagtcaatttgctgttgggaacccgatctaatctatatctgatggacagaagtggaaaggctgacattactaaacttataaggcgaagaccattccgccagattcaagtcttagagccactcaatttgctgattaccatctcaggtcataagaacagacttcgggtgtatcatctgacctggttgaggaacaagattttgaataatgatccagaaagtaaaagaaggcaagaagaaatgctgaagacagaggaagcctgcaaagctattgataagttaacaggctgtgaacacttcagtgtcctccaacatgaagaaacaacatatattgcaattgctttgaaatcatcaattcacctttatgcatgggcaccaaagtcctttgatgaaagcactgctattaaagtatgcattgatcaatcagcagactctgaaggagactacatgtcctatcaagcctatatacgaatactggcaaaaatacaggcagctgatccagtgaaccggtttaagagaccagatgagctccttcatttgctgaagctcaaggtatttccaacacttgatcataagccagtgacagttgacctggctattggttctgaaaaaagactaaagattttcttcagctcagcagatggatatcacctcatcgatgcagaatctgaggttatgtctgatgtgaccctgccaaagaatcccctggaaatcattataccacagaatatcatcattttacctgattgcttgggaattggcatgatgctcaccttcaatgctgaagccctctctgtggaagcaaatgaacaactcttcaagaagatccttgaaatgtggaaagacataccatcttctatagcttttgaatgtacacagcgaaccacaggatggggccaaaaggccattgaagtgcgctctttgcaatccagggttctggaaagtgagctgaagcgcaggtcaattaagaagctgagattcctgtgcacccggggtgacaagctgttctttacctctaccctgcgcaatcaccacagccgggtttacttcatgacacttggaaaacttgaagagctccaaagcaattatgatgtctaaaagtttccagtgatttattaccacattataaacatcatgtataggcagtctgcatcttcagatttcagagattaaatgagtattcagttttatttttagtaaagattaaatccaaaactttacttttaatgtagcacagaatagttttaatgagaaatgcagctttatgtataaaattaactatagcaagctctaggtactccaatggtgtacaatgtcttttgcacaaactttgtaacttttgttactgtgaattcaaacattactctttggacagtttggacagtatctgtattcagattttacaacatggagtaaagaaacctgttatgaattagattacaagcagccttcaaaagaattggcactgggataagatttttcagaaaaagaaaaacatcggcaaactgtgtgtgatttttccaaagctatataaagaaccaaaggtttagtcaagaaacaaaaatcttaaagattattataacccagactaaggttgaacaacctgcatgcccagagaaaactatggcgacaaaggggaaaaggccaccactcgttttctcactgattcatgccaattaagcctacagttaaagaccagttttgttcttttcacccatttttaagctggttttctcctgataagaagaaaggaagaaagccccagacgcttggtttttctcagaacccccaaaagatgtgcaatagctgttgttacaaaccaccaaataatacagttgtgagcctgaatacaggactgaactcctatacacgtgtactgtagaatgagtattttttaataccttaaggtaggcgtcaaattctactccccaaagcagagatagattgatttatcaaaattattatctggccaacagtgtgactatcagacagcatcaaatatttgcccaatccaagattagactacacaaaagcttccttccagtattaaacaaaaagaattaaacataactatgaaaaaactttgctaatatctgtgtttttcagatttcattttttgtaaaatcagaaattaatctaaacatattcagtgataagttcatgtgtaacgacttaatgttaaaggttaaaaaaaagatttcacaaaatatacaactttcaccatatatataagcctgcaaaattagagtagtgaaagtcatgctagtccatcacccaaatatgttatagacgccatagacaggtgatgtttggtcacctatggtaactgctacctgatgaagagcataatttctgcatatccatcctcaataccatggtaaattctggggcaatagagaagcaacagaactgccacaaagtatacctcaatataattcctctagttctgcttctaaaatctgaggacagtgctagtgggaaaataattttcaaactacctggttaaccaaaatacaaaagcagctgactatgtgtgatttcataatagcacatttcttgacacttagtgctagaaatgaagatttggattttcctaacaacttacatcaagaatgtagtgtagctcattattgagaatttaggaaagcctgaatccattaattaaggaaataaatgtgactcacatttcttttactgtgacacaataatgtgatcctaaaactggcttatccttgagtgtttacaactcaaacaactttttgaatgcagtagttttttttttttaaaaacaaacttttatgtcaaattttttttcttagaagtagtcttcattattataaatttgtacaccaaaaggccatggggaactttgtgcaagtacctcatcgctgagcaaatggagcttgctatgttttaatttcagaaaatttcctcatatacgtagtgtgtagaatcaagtcttttaataattcattttttcttcataatatttactcaaagttaagcttaaaaataagttttatcttaaaatcatatttgaagacagtaagacagtaaactattttaggaagtcaacccccattgcactctgtggcagttattctggtaaaaataggcaaaagtgacctgaatctacaatgatgtcccaaagtaaccaagtaagagagattgtaaatgataaaccgagctttaaaggataaagtgttaataaagaaaggaagctgggcacatgtcaaaaagggagatcgaaatgttaggtaatcatttagaaaggacagaaaatatttaaagtggctcataggtaatgaatatttctgacttagatgtaaatccatctggaatctttacatcctttgccagctgaaacaagaaagtgaagggacaatgatatttcatggtcagtttattttgtaagagacagaagaaattatatctatacattaccttgtagcagcagtacctggaagccccagcccgtcacagaagtgtggaggggggctcctgactagacaatttccctagcccttgtgatttgaagcatgaaagttctggcaggttatgagcagcactagggataaagtatggttttattttggtgtaatttaggtttttcaacaaagcccttgtctaaaataaaaggcattattggaaatatttgaaaactagaaaatgatggataaaagggctgataagaaaatttctgactgtcagtagaagtgagataagatcctcagaggaaacagtaagaagggataatcattaagatagtaaaacaggcaaagcagaatcacatgtgcacacacacatacacatgtaaacattggaatgcataagttttaatattttagcgctatcagtttctaaatgcattaattactaactgccctctcccaagattcatttagttcaaacagtatccgtaaactaggaataatgccacatgcattcaatgggatcttttaagtactcttcagtttgttccaagaaatgtgcctactgaaatcaaattaatttgtattcaatgtgtacttcaagactgctaattgtttcatctgaaagcctacaatgaatcattgttcaaccttgaaaaataaaattttgtaaaac

SEQ ID NO: 260003 - DNA, 4749 bp, Artificial Sequence
  derived and/or modified sequence
atggctggcccaggaggctggagagatcgcgaggtaacagacttaggccacctccctgacccaacagggatctttagcctggacaagacgattggcctgggaacttacggcagaatttacctgggattgcacgagaagactggcgcttttacggccgttaaagtcatgaacgccagaaagactcctctgcccgagatcggaagaagggtccgggtcaataaataccagaaaagcgtgggttggagatacagcgacgaagaggaagatctgcgcacagagcttaacctgctccgtaagtattctttccacaaaaacattgttagcttttacggcgcattttttaagctctctcccccaggccagaggcatcagttgtggatggtcatggagctgtgcgccgctggttcggtgacggacgttgtcagaatgacaagcaaccaatccctcaaggaagattggatcgcttatatttgtcgggagatattgcaaggacttgcgcacctgcacgctcacagagtgatccatcgcgacatcaaggggcagaatgttctgctcactcataacgccgaagtcaagttggttgacttcggtgtcagtgcccaggtgtctaggacgaatggacgtaggaactcgtttattggtacgccctattggatggccccagaggtaattgactgtgatgaagacccccgtcggtcgtatgattaccgcagcgacgtgtggtctgttgggatcacggcaatcgaaatggctgaaggcgctccacctctatgtaatctccagcctctggaagcactgttcgtaattttgcgcgagtcagcccctacagtcaagagcagcgggtggtcacgcaaattccataacttcatggaaaagtgtaccataaagaacttcctgttcagacctaccagtgccaatatgttacagcatccatttgtgcgtgacatcaaaaatgaacgccatgtagtggagtctttgactcggcatctaactggcatcattaagaaacggcaaaagaaaggcattccactgatattcgaacgtgaggaagccatcaaagaacagtatactgtacgcagattccgaggtccttcatgtacccacgagctgctgaggttacctacgagctcccggtgtcggccacttcgggtactgcatggcgagcctagccagccgagatggcttccagacagggaagagccacaggtgcaggctttacagcagcttcagggggcagcccgagtcttcatgccacttcaagcgctagattcggcgccaaaacccctgaagggacaggcccaggcccctcagcgtcttcagggagcagccagggtcttcatgcctcttcaggctcaggtaaaggccaaggcctccaagcctctccagatgcagattaaggccccacctcgcctaagacgggctgctagggttctcatgcctctgcaagcccaggtgcgggcacccagacttctccaggttcagagccaggtctccaagaaacagcaggcccaaacgcagacctcggagcctcaagacctcgaccaggtgccagaggagtttcagggtcaggatcaagtacccgaacagcagcggcaggggcaggcccctgagcagcagcagagacacaaccaggtgccagagcaagagcttgagcagaatcaggcacccgagcagccagaggtccaggagcaggccgctgaacctgcgcaagccgagaccgaggccgaggaacctgaaagtttgcgggtcaatgctcaggtcttcctgccactgctgtcacaggaccatcatgtactgttacctctgcatctggatacccaagttctgatccccgtggaaggacagacagagggctccccccaagctcaggcctggaccctggagccacctcaggcaatcgggtcggtgcaggccctaatcgaggggctttctcgcgaccttcttagagccccaaactctaataatagcaaaccactcgggcctctccagactttaatggagaatctgagctctaacagattctatagccagcctgagcaggccagggaaaaaaagtccaaagtgagcacactccgtcaagcgttagccaaaaggttgtctcctaaacggtttcgggctaaaagttcctggcggcctgagaaactcgagctttctgaccttgaagcgagacgtcagcgacgacagcgcaggtgggaggatatctttaaccaacacgaagaagagctcagacaggttgacaaggataaagaagacgagtcctcagacaatgatgaagtattccactccattcaagccgaggtccagattgagccactcaagccttacatttctaaccctaagaagatcgaagtgcaggagcggtcaccctctgtacccaacaaccaagaccacgcacaccacgttaagttttcaagcagcgtcccacagcgttccctgctcgaacaggcccagaagcccattgatattaggcaacggtctagccagaaccgccagaactggttggcagcttccgaatcctcaagcgaggaagagagtccagtcaccggccgtcggagtcaatcttccccaccctattctaccatcgaccagaagttgctagttgatattcacgtccctgacgggttcaaagtgggcaaaataagcccaccagtctatttgaccaacgagtgggtagggtacaatgctttaagcgagatcttccggaacgattggttgacaccagcccctgtgattcagcctcctgaggaggacggagattacgtggagttatacgatgcttctgcagacactgacggggacgatgacgatgagagcaatgacaccttcgaggacacgtatgatcacgctaatggcaatgacgatctggataatcaggttgaccaggctaacgatgtgtgtaaggaccacgacgacgacaataataagttcgtggatgacgtcaacaataactactacgaggctccaagttgtcccagagcttcgtatgggagagatgggtcatgtaaacaggatggatacgatgggtcccgcggtaaggaggaggcctatagaggctatggaagccacacagcaaatcgttcccatgggggttccgctgccagtgaggataatgctgctattggagatcaggaagaacacgcagctaatatcggatcagagagaagaggatctgagggcgacggaggaaagggtgtggttaggacaagcgaagaatcaggtgccctgggccttaacggcgaagaaaattgtagcgagaccgacggtcctggattgaagcgacctgcctctcaagatttcgagtatttacaggaggagcccggtggaggaaacgaggccagtaacgcgattgatagtggagccgctccatccgcacctgatcacgaatccgacaacaaggatatcagcgagagcagcacacagagcgacttttcagctaaccactctagcccctcaaaagggtcgggtatgtccgccgacgcgaacttcgctagtgcaatactgtatgcgggtttcgtggaggtgccagaagaatccccaaagcagccatcagaagttaacgtgaaccccttgtacgtctcccccgcttgcaagaagcccttgatacatatgtatgagaaagagttcactagtgaaatctgctgtgggagcctctggggagttaatttattgcttggtaccagatctaacctctacctgatggacagatctggcaaggctgatataaccaagttgatcaggagacgtccatttcgccagatacaggtgctcgagccattaaacttgctgattactatctctggccacaagaacagattaagggtctatcatctcacatggctaagaaacaaaatccttaacaacgaccccgagtcaaaaagaaggcaggaggaaatgctgaaaactgaagaagcgtgtaaagccatcgataagctgacaggatgcgaacacttttccgtccttcagcacgaagagaccacgtatatagcgattgcattgaagtcctccatacacctgtatgcctgggctcccaaatctttcgatgaatccactgctattaaagtgtgcatcgaccagtccgctgattccgagggcgactacatgtcataccaagcgtacatcaggatattggccaagatccaggccgcagatcccgtaaacaggtttaaacgccctgacgaattgctgcacctgctgaagcttaaagtgtttcccacacttgatcataagccagtgaccgttgacctcgcaattggctctgagaagcggctcaaaattttcttcagcagcgcggatggctatcatttgatcgatgccgagtcagaggtgatgtcagacgtaaccctgccgaaaaatccactagaaattattataccccagaacatcattattctgccagattgcctgggaatcggtatgatgttgacgttcaatgccgaagctcttagtgtagaagccaacgaacagctattcaaaaaaattctagagatgtggaaggatataccatctagcatcgcattcgagtgtacacaacggaccacagggtgggggcagaaggctattgaggttcggtccctgcagagtcgagtcctggagtcggagctaaagaggagatctatcaagaagctgcgcttcctctgcacacgaggggataagctattttttacctccaccttacgaaatcaccacagtagagtgtatttcatgacattgggtaagctcgaggagctgcagtctaattacgatgtctat

SEQ ID NO: 260004 - DNA, 4751 bp, Artificial Sequence
  derived and/or modified sequence
atggcaggtcctggaggatggcgcgatagagaggtgacagacctggggcacctccccgatccaactggcatttttagtcttgacaaaactatcggattgggcacctatggtcgaatctacctcgggctgcatgagaaaacgggagcgtttaccgcggtgaaggtcatgaacgccagaaagacaccactcccggagatcggcagacgcgtccgcgtcaataagtatcagaaaagcgttggatggagatacagcgacgaggaggaagatctacgcaccgagctgaacctcctaagaaagtacagctttcacaagaacattgtaagtttctatggagctttcttcaagctgagccccccaggccagagacatcagctgtggatggtcatggagctgtgtgctgccggtagtgtcacagacgtggtgaggatgacatctaaccaaagcctcaaagaagactggattgcctatatttgtcgcgaaatactacaggggctagcccatttacacgctcatcgcgtaatccacagggatattaaaggccagaacgttcttcttacacacaatgcagaggtaaagcttgtggacttcggggtgtcagcccaagtaagtcgaaccaacgggcgtcgtaattccttcattggaacaccctactggatggccccagaggttattgactgcgacgaggatccacggagatcttatgactaccggagtgacgtctggagtgtggggatcacggccattgagatggctgagggagccccacctctctgcaatctacagccactggaggcactcttcgtcatccttagagagagtgccccaactgtgaaaagctctggatggtctcgaaaatttcacaattttatggagaaatgcacaatcaaaaacttcctatttaggcctacctctgctaatatgttacaacaccctttcgtccgcgacatcaagaacgagaggcacgtagttgagtctctaaccaggcatttgacggggattattaaaaagcgccagaagaagaaggggatcccccttattttcgaaagggaagaagccattaaagaacagtataccgttaggcggttcagggggccttcatgcacacatgaactgctcaggctgccgacatctagtcgctgccgcccactacgcgtgctccatggcgagccctctcagcctaggtggctgcctgacagggaggagccccaagtgcaggcccttcagcaactgcagggagccgcacgggtttttatgccactccaggccctggacagcgccccaaagccacttaaaggccaggcacaggcccctcagcgcctccagggtgcagcccgtgtgttcatgccactgcaagcgcaggtgaaggcaaaagcttcaaaacccctgcaaatgcagatcaaggcaccacctaggcttagacgcgctgctcgcgttttgatgccactgcaagctcaggtgagagctccccgactcctgcaggtgcaatctcaagtttctaagaaacagcaggctcagactcagacctctgagccccaagacctcgatcaggtccctgaagaatttcaaggtcaggaccaggttccggaacaacaacgtcaagggcaagccccagaacagcagcagcgacacaatcaggtgccagaacaggagctggagcagaaccaggcgcctgaacagccagaggtgcaggagcaggctgctgagcctgctcaggcggagaccgaagcggaggagccggagtccttacgagtgaacgcccaggtcttcctgccactgctgtcccaggatcatcacgttctgctgcctctccatcttgacacacaggtgctcattccagttgagggccagacagagggtagtccccaggcccaagcgtggactttggagcctccgcaagctatcgggagcgtgcaggctctcatcgagggcctttctcgggatctcctgcgagctccgaatagcaacaactccaagcccctcggtcctctgcagacattgatggagaacttgtcttcaaacaggttttacagccaacccgaacaggcacgggagaaaaagagcaaggtttcaactttaagacaggccctagcaaagcggttatccccaaagcgctttcgggcaaagagttcctggagaccagaaaaactggaactgtcagacctggaggcacgccgtcaaaggcgtcagcggaggtgggaggatattttcaaccagcacgaggaagaactcaggcaagttgacaaagataaggaggacgaatcttcagacaacgacgaggtgttccactcgattcaagcggaagtacagattgagcctctgaagccttacatttcaaaccccaagaagatagaggtccaagaacggagcccttctgtgccaaacaaccaggaccatgcccatcacgtgaaattttccagctctgttccccagcgcagcttgttggagcaggcacagaaaccaatagacatcaggcagcgcagcagtcagaatagacagaactggctggccgcatcggaatcctccagtgaggaggaatcaccagtgactggtagaaggtcccagtcaagccctccttattccacaattgaccagaagctccttgtcgatatccacgtccccgacgggttcaaggtgggaaaaatcagccctccggtgtatctcaccaacgagtgggtcggctacaacgccttatcagaaatttttagaaacgactggctgacacccgcacccgttattcagcccccagaagaagacggggactatgttgagttgtatgatgcctccgctgacactgacggggatgatgacgacgaatcgaacgacacttttgaggacacatatgatcacgcgaacgggaatgatgacctggacaatcaggtagaccaggcaaacgacgtatgcaaagaccacgacgacgacaacaacaaattcgtcgacgacgttaacaataattattatgaagctcccagttgccctagagcctcttacggtagggatgggtcttgtaagcaggacggatacgacgggtcccgcggtaaggaggaggcctatagggggtacgggtctcacaccgcgaaccgttcccacgggggaagtgccgcatctgaagataacgccgctataggcgaccaagaagagcacgccgcaaatattggatcagagcgccgagggagcgagggggatggcggaaaaggcgtggtgcgaacgagcgaagaatctggcgctctcggccttaacggtgaagaaaactgctctgagacagacggacccggtttaaaacgtcccgctagccaggattttgaatatctccaggaggagcccggagggggaaatgaggcttcaaacgcgatcgacagtggagcagctccctccgcacccgatcacgaatctgataataaggacataagcgaaagttcaactcagtcggatttctcagccaatcactccagtccaagtaagggaagcggcatgagcgccgacgctaatttcgcctctgctatcttgtatgcgggattcgtggaagttccagaggagtccccgaagcaaccttccgaagtcaatgtcaaccccctgtacgtaagtcccgcttgcaagaagcccttaatccacatgtatgaaaaggagttcacctctgagatttgttgtggaagtttgtggggcgttaatctgcttttaggaacacgatccaacctgtacctcatggaccggtcaggaaaagctgatatcaccaagctgattcgaaggagacccttcaggcagatacaagtgctagagccactgaaccttctcattaccatttcagggcacaagaatcgccttagagtgtaccatctgacttggctacgaaataaaatattaaataatgacccagaaagcaagaggcgccaggaagagatgctgaagaccgaggaggcatgcaaggccatagataagctaaccgggtgcgaacattttagcgtgctacagcacgaggaaacgacctatatcgctatcgccctgaaatcttctattcacctgtacgcatgggcacccaaatctttcgacgaatccacagctatcaaagtgtgtatcgaccagagtgctgactccgagggcgactatatgtcctaccaggcttatattcgtatattagccaagattcaagctgcggatcctgtaaacaggttcaaacggccagatgaactcttacatctcttgaagttgaaagtgttccccaccctggaccacaagcctgtcacggtcgatttggctatcggcagcgagaaaagactgaaaatattcttctcctctgccgatggctatcatctcatcgacgccgaatcggaggtgatgagtgacgtgacgctcccaaaaaacccgctggaaatcatcatcccccagaacattattattctcccagactgtctaggaattggaatgatgcttacttttaacgcggaagcattatcagtggaggccaatgagcaactcttcaaaaagatactggagatgtggaaggacatcccttcaagtattgccttcgagtgcacacagaggaccactggttggggacagaaggctatcgaggtgagaagtctgcagtctcgcgtattagagtcagaactcaagcggcgttctatcaagaagctccgtttcctctgcacccgaggcgataagctcttttttacatccacgctccgcaaccaccactcccgagtatacttcatgacgcttgggaagctagaggagcttcagagtaactacgacgtgta

SEQ ID NO: 260005 - DNA, 492 bp, Artificial Sequence
  derived and/or modified sequence
atgcaggtacctcgcgagcggataaaaattgccttccgcctgtggatccctatactcgtgattcggatagtcgtggccggaacatggccccaagccccaggactttcaaccttgggcctgaacattataattttgcctgactgcctcgggatcggaatgatgctgaccttcaacgccgaagctctctccgtggaagccaatgaacagttgttcaaaaagatccttgagatgtggaaagacatcccctcaagtatcgcctttgagtgcacccaacggacaacaggttggggtcagaaagccatcgaggtgcgaagccttcaatctcgcgtcctggagtctgaattaaaacggagatctattaaaaaactccgcttcctgtgtacccggggagacaaactgttcttcacaagtacgctccggaatcaccattctcgagtttatttcatgaccctggggaaactggaggagctccagtcaaattatgatgtgtag

SEQ ID NO: 260006 - DNA, 4749 bp, Artificial Sequence
  derived and/or modified sequence
atggccggccccggcggctggagagacagagaggtgaccgacctgggccacctgcccgaccccaccggcatcttcagcctggacaagaccatcggcctgggcacctacggcagaatctacctgggcctgcacgagaagaccggcgccttcaccgccgtgaaggtgatgaacgccagaaagacccccctgcccgagatcggcagaagagtgagagtgaacaagtaccagaagagcgtgggctggagatacagcgacgaggaggaggacctgagaaccgagctgaacctgctgagaaagtacagcttccacaagaacatcgtgagcttctacggcgccttcttcaagctgagcccccccggccagagacaccagctgtggatggtgatggagctgtgcgccgccggcagcgtgaccgacgtggtgagaatgaccagcaaccagagcctgaaggaggactggatcgcctacatctgcagagagatcctgcagggcctggcccacctgcacgcccacagagtgatccacagagacatcaagggccagaacgtgctgctgacccacaacgccgaggtgaagctggtggacttcggcgtgagcgcccaggtgagcagaaccaacggcagaagaaacagcttcatcggcaccccctactggatggcccccgaggtgatcgactgcgacgaggaccccagaagaagctacgactacagaagcgacgtgtggagcgtgggcatcaccgccatcgagatggccgagggcgccccccccctgtgcaacctgcagcccctggaggccctgttcgtgatcctgagagagagcgcccccaccgtgaagagcagcggctggagcagaaagttccacaacttcatggagaagtgcaccatcaagaacttcctgttcagacccaccagcgccaacatgctgcagcaccccttcgtgagagacatcaagaacgagagacacgtggtggagagcctgaccagacacctgaccggcatcatcaagaagagacagaagaagggcatccccctgatcttcgagagagaggaggccatcaaggagcagtacaccgtgagaagattcagaggccccagctgcacccacgagctgctgagactgcccaccagcagcagatgcagacccctgagagtgctgcacggcgagcccagccagcccagatggctgcccgacagagaggagccccaggtgcaggccctgcagcagctgcagggcgccgccagagtgttcatgcccctgcaggccctggacagcgcccccaagcccctgaagggccaggcccaggccccccagagactgcagggcgccgccagagtgttcatgcccctgcaggcccaggtgaaggccaaggccagcaagcccctgcagatgcagatcaaggccccccccagactgagaagagccgccagagtgctgatgcccctgcaggcccaggtgagagcccccagactgctgcaggtgcagagccaggtgagcaagaagcagcaggcccagacccagaccagcgagccccaggacctggaccaggtgcccgaggagttccagggccaggaccaggtgcccgagcagcagagacagggccaggcccccgagcagcagcagagacacaaccaggtgcccgagcaggagctggagcagaaccaggcccccgagcagcccgaggtgcaggagcaggccgccgagcccgcccaggccgagaccgaggccgaggagcccgagagcctgagagtgaacgcccaggtgttcctgcccctgctgagccaggaccaccacgtgctgctgcccctgcacctggacacccaggtgctgatccccgtggagggccagaccgagggcagcccccaggcccaggcctggaccctggagcccccccaggccatcggcagcgtgcaggccctgatcgagggcctgagcagagacctgctgagagcccccaacagcaacaacagcaagcccctgggccccctgcagaccctgatggagaacctgagcagcaacagattctacagccagcccgagcaggccagagagaagaagagcaaggtgagcaccctgagacaggccctggccaagagactgagccccaagagattcagagccaagagcagctggagacccgagaagctggagctgagcgacctggaggccagaagacagagaagacagagaagatgggaggacatcttcaaccagcacgaggaggagctgagacaggtggacaaggacaaggaggacgagagcagcgacaacgacgaggtgttccacagcatccaggccgaggtgcagatcgagcccctgaagccctacatcagcaaccccaagaagatcgaggtgcaggagagaagccccagcgtgcccaacaaccaggaccacgcccaccacgtgaagttcagcagcagcgtgccccagagaagcctgctggagcaggcccagaagcccatcgacatcagacagagaagcagccagaacagacagaactggctggccgccagcgagagcagcagcgaggaggagagccccgtgaccggcagaagaagccagagcagccccccctacagcaccatcgaccagaagctgctggtggacatccacgtgcccgacggcttcaaggtgggcaagatcagcccccccgtgtacctgaccaacgagtgggtgggctacaacgccctgagcgagatcttcagaaacgactggctgacccccgcccccgtgatccagccccccgaggaggacggcgactacgtggagctgtacgacgccagcgccgacaccgacggcgacgacgacgacgagagcaacgacaccttcgaggacacctacgaccacgccaacggcaacgacgacctggacaaccaggtggaccaggccaacgacgtgtgcaaggaccacgacgacgacaacaacaagttcgtggacgacgtgaacaacaactactacgaggcccccagctgccccagagccagctacggcagagacggcagctgcaagcaggacggctacgacggcagcagaggcaaggaggaggcctacagaggctacggcagccacaccgccaacagaagccacggcggcagcgccgccagcgaggacaacgccgccatcggcgaccaggaggagcacgccgccaacatcggcagcgagagaagaggcagcgagggcgacggcggcaagggcgtggtgagaaccagcgaggagagcggcgccctgggcctgaacggcgaggagaactgcagcgagaccgacggccccggcctgaagagacccgccagccaggacttcgagtacctgcaggaggagcccggcggcggcaacgaggccagcaacgccatcgacagcggcgccgcccccagcgcccccgaccacgagagcgacaacaaggacatcagcgagagcagcacccagagcgacttcagcgccaaccacagcagccccagcaagggcagcggcatgagcgccgacgccaacttcgccagcgccatcctgtacgccggcttcgtggaggtgcccgaggagagccccaagcagcccagcgaggtgaacgtgaaccccctgtacgtgagccccgcctgcaagaagcccctgatccacatgtacgagaaggagttcaccagcgagatctgctgcggcagcctgtggggcgtgaacctgctgctgggcaccagaagcaacctgtacctgatggacagaagcggcaaggccgacatcaccaagctgatcagaagaagacccttcagacagatccaggtgctggagcccctgaacctgctgatcaccatcagcggccacaagaacagactgagagtgtaccacctgacctggctgagaaacaagatcctgaacaacgaccccgagagcaagagaagacaggaggagatgctgaagaccgaggaggcctgcaaggccatcgacaagctgaccggctgcgagcacttcagcgtgctgcagcacgaggagaccacctacatcgccatcgccctgaagagcagcatccacctgtacgcctgggcccccaagagcttcgacgagagcaccgccatcaaggtgtgcatcgaccagagcgccgacagcgagggcgactacatgagctaccaggcctacatcagaatcctggccaagatccaggccgccgaccccgtgaacagattcaagagacccgacgagctgctgcacctgctgaagctgaaggtgttccccaccctggaccacaagcccgtgaccgtggacctggccatcggcagcgagaagagactgaagatcttcttcagcagcgccgacggctaccacctgatcgacgccgagagcgaggtgatgagcgacgtgaccctgcccaagaaccccctggagatcatcatcccccagaacatcatcatcctgcccgactgcctgggcatcggcatgatgctgaccttcaacgccgaggccctgagcgtggaggccaacgagcagctgttcaagaagatcctggagatgtggaaggacatccccagcagcatcgccttcgagtgcacccagagaaccaccggctggggccagaaggccatcgaggtgagaagcctgcagagcagagtgctggagagcgagctgaagagaagaagcatcaagaagctgagattcctgtgcaccagaggcgacaagctgttcttcaccagcaccctgagaaaccaccacagcagagtgtacttcatgaccctgggcaagctggaggagctgcagagcaactacgacgtgtag

SEQ ID NO: 260007 - DNA, 4752 bp, Artificial Sequence
  derived and/or modified sequence
atggccggccccggcggctggagagacagagaggtgaccgacctgggccacctgcccgaccccaccggcatcttcagcctggacaagaccatcggcctgggcacctacggcagaatctacctgggcctgcacgagaagaccggcgccttcaccgccgtgaaggtgatgaacgccagaaagacccccctgcccgagatcggcagaagagtgagagtgaacaagtaccagaagagcgtgggctggagatacagcgacgaggaggaggacctgagaaccgagctgaacctgctgagaaagtacagcttccacaagaacatcgtgagcttctacggcgccttcttcaagctgagcccccccggccagagacaccagctgtggatggtgatggagctgtgcgccgccggcagcgtgaccgacgtggtgagaatgaccagcaaccagagcctgaaggaggactggatcgcctacatctgcagagagatcctgcagggcctggcccacctgcacgcccacagagtgatccacagagacatcaagggccagaacgtgctgctgacccacaacgccgaggtgaagctggtggacttcggcgtgagcgcccaggtgagcagaaccaacggcagaagaaacagcttcatcggcaccccctactggatggcccccgaggtgatcgactgcgacgaggaccccagaagaagctacgactacagaagcgacgtgtggagcgtgggcatcaccgccatcgagatggccgagggcgccccccccctgtgcaacctgcagcccctggaggccctgttcgtgatcctgagagagagcgcccccaccgtgaagagcagcggctggagcagaaagttccacaacttcatggagaagtgcaccatcaagaacttcctgttcagacccaccagcgccaacatgctgcagcaccccttcgtgagagacatcaagaacgagagacacgtggtggagagcctgaccagacacctgaccggcatcatcaagaagagacagaagaagaagggcatccccctgatcttcgagagagaggaggccatcaaggagcagtacaccgtgagaagattcagaggccccagctgcacccacgagctgctgagactgcccaccagcagcagatgcagacccctgagagtgctgcacggcgagcccagccagcccagatggctgcccgacagagaggagccccaggtgcaggccctgcagcagctgcagggcgccgccagagtgttcatgcccctgcaggccctggacagcgcccccaagcccctgaagggccaggcccaggccccccagagactgcagggcgccgccagagtgttcatgcccctgcaggcccaggtgaaggccaaggccagcaagcccctgcagatgcagatcaaggccccccccagactgagaagagccgccagagtgctgatgcccctgcaggcccaggtgagagcccccagactgctgcaggtgcagagccaggtgagcaagaagcagcaggcccagacccagaccagcgagccccaggacctggaccaggtgcccgaggagttccagggccaggaccaggtgcccgagcagcagagacagggccaggcccccgagcagcagcagagacacaaccaggtgcccgagcaggagctggagcagaaccaggcccccgagcagcccgaggtgcaggagcaggccgccgagcccgcccaggccgagaccgaggccgaggagcccgagagcctgagagtgaacgcccaggtgttcctgcccctgctgagccaggaccaccacgtgctgctgcccctgcacctggacacccaggtgctgatccccgtggagggccagaccgagggcagcccccaggcccaggcctggaccctggagcccccccaggccatcggcagcgtgcaggccctgatcgagggcctgagcagagacctgctgagagcccccaacagcaacaacagcaagcccctgggccccctgcagaccctgatggagaacctgagcagcaacagattctacagccagcccgagcaggccagagagaagaagagcaaggtgagcaccctgagacaggccctggccaagagactgagccccaagagattcagagccaagagcagctggagacccgagaagctggagctgagcgacctggaggccagaagacagagaagacagagaagatgggaggacatcttcaaccagcacgaggaggagctgagacaggtggacaaggacaaggaggacgagagcagcgacaacgacgaggtgttccacagcatccaggccgaggtgcagatcgagcccctgaagccctacatcagcaaccccaagaagatcgaggtgcaggagagaagccccagcgtgcccaacaaccaggaccacgcccaccacgtgaagttcagcagcagcgtgccccagagaagcctgctggagcaggcccagaagcccatcgacatcagacagagaagcagccagaacagacagaactggctggccgccagcgagagcagcagcgaggaggagagccccgtgaccggcagaagaagccagagcagccccccctacagcaccatcgaccagaagctgctggtggacatccacgtgcccgacggcttcaaggtgggcaagatcagcccccccgtgtacctgaccaacgagtgggtgggctacaacgccctgagcgagatcttcagaaacgactggctgacccccgcccccgtgatccagccccccgaggaggacggcgactacgtggagctgtacgacgccagcgccgacaccgacggcgacgacgacgacgagagcaacgacaccttcgaggacacctacgaccacgccaacggcaacgacgacctggacaaccaggtggaccaggccaacgacgtgtgcaaggaccacgacgacgacaacaacaagttcgtggacgacgtgaacaacaactactacgaggcccccagctgccccagagccagctacggcagagacggcagctgcaagcaggacggctacgacggcagcagaggcaaggaggaggcctacagaggctacggcagccacaccgccaacagaagccacggcggcagcgccgccagcgaggacaacgccgccatcggcgaccaggaggagcacgccgccaacatcggcagcgagagaagaggcagcgagggcgacggcggcaagggcgtggtgagaaccagcgaggagagcggcgccctgggcctgaacggcgaggagaactgcagcgagaccgacggccccggcctgaagagacccgccagccaggacttcgagtacctgcaggaggagcccggcggcggcaacgaggccagcaacgccatcgacagcggcgccgcccccagcgcccccgaccacgagagcgacaacaaggacatcagcgagagcagcacccagagcgacttcagcgccaaccacagcagccccagcaagggcagcggcatgagcgccgacgccaacttcgccagcgccatcctgtacgccggcttcgtggaggtgcccgaggagagccccaagcagcccagcgaggtgaacgtgaaccccctgtacgtgagccccgcctgcaagaagcccctgatccacatgtacgagaaggagttcaccagcgagatctgctgcggcagcctgtggggcgtgaacctgctgctgggcaccagaagcaacctgtacctgatggacagaagcggcaaggccgacatcaccaagctgatcagaagaagacccttcagacagatccaggtgctggagcccctgaacctgctgatcaccatcagcggccacaagaacagactgagagtgtaccacctgacctggctgagaaacaagatcctgaacaacgaccccgagagcaagagaagacaggaggagatgctgaagaccgaggaggcctgcaaggccatcgacaagctgaccggctgcgagcacttcagcgtgctgcagcacgaggagaccacctacatcgccatcgccctgaagagcagcatccacctgtacgcctgggcccccaagagcttcgacgagagcaccgccatcaaggtgtgcatcgaccagagcgccgacagcgagggcgactacatgagctaccaggcctacatcagaatcctggccaagatccaggccgccgaccccgtgaacagattcaagagacccgacgagctgctgcacctgctgaagctgaaggtgttccccaccctggaccacaagcccgtgaccgtggacctggccatcggcagcgagaagagactgaagatcttcttcagcagcgccgacggctaccacctgatcgacgccgagagcgaggtgatgagcgacgtgaccctgcccaagaaccccctggagatcatcatcccccagaacatcatcatcctgcccgactgcctgggcatcggcatgatgctgaccttcaacgccgaggccctgagcgtggaggccaacgagcagctgttcaagaagatcctggagatgtggaaggacatccccagcagcatcgccttcgagtgcacccagagaaccaccggctggggccagaaggccatcgaggtgagaagcctgcagagcagagtgctggagagcgagctgaagagaagaagcatcaagaagctgagattcctgtgcaccagaggcgacaagctgttcttcaccagcaccctgagaaaccaccacagcagagtgtacttcatgaccctgggcaagctggaggagctgcagagcaactacgacgtgtag

SEQ ID NO: 260008 - DNA, 492 bp, Artificial Sequence
  derived and/or modified sequence
atgcaggtgcccagagagagaatcaagatcgccttcagactgtggatccccatcctggtgatcagaatcgtggtggccggcacctggccccaggcccccggcctgagcaccctgggcctgaacatcatcatcctgcccgactgcctgggcatcggcatgatgctgaccttcaacgccgaggccctgagcgtggaggccaacgagcagctgttcaagaagatcctggagatgtggaaggacatccccagcagcatcgccttcgagtgcacccagagaaccaccggctggggccagaaggccatcgaggtgagaagcctgcagagcagagtgctggagagcgagctgaagagaagaagcatcaagaagctgagattcctgtgcaccagaggcgacaagctgttcttcaccagcaccctgagaaaccaccacagcagagtgtacttcatgaccctgggcaagctggaggagctgcagagcaactacgacgtgtag

SEQ ID NO: 260009 - protein, 1243 aa, Artificial Sequence
  derived and/or modified sequence
MENCSAASTFLTDSLELELGTEWCKPPYFSCAVDNRGGGKHFSGESYLCSGALKRLILNLDPLPTNFEEDTLEIFGIQWVTETALVNSSRELFHLFRQQLYNLETLLQSSCDFGKVSTLHCKADNIRQQCVLFLHYVKVFIFRYLKVQNAESHVPVHPYEALEAQLPSVLIDELHGLLLYIGHLSELPSVNIGAFVNQNQIKLFPPSWHLLHLHLDIHWLVLEILYMLGEKLKQVVYGHQFMNLASDNLTNISLFEEHCETLLCDLISLSLNRYDKVRSSESLMSDQCPCLCIKELWVLLIHLLDHRSKWFVSESFWNWLNKLLKTLLEKSSDRRRSSMPVIQSRDPLGFSWWIITHVASFYKFDRHGVPDEMRKVESNWNFVEELLKKSISVQGVILEEQLRMYLHCCLTLCDFWEPNIAIVTILWEYYSKNLNSSFSISWLPFKGLANTMKSPLSMLEMVKTCCCDKQDQELYKSSSSYTIFLCILAKVVKKAMKSNGPHPWKQVKGRIYSKFHQKRMEELTEVGLQNFFSLFLLLAAVAEVEDVASHVLDLLNFLKPAFVTSQRALIWKGHMAFLLMYAQKNLDIGVLAEKFSCAFREKAKEFLVSKNEEMVQRQTIWTLLSIYIDGVQEVFETSYCLYPSHEKLLNDGFSMLLRACRESELRTVLSFLQAVLARIRSMHQQLCQELQRDNVDLFVQSSLSAKERHLAAVASALWRHFFSFLKSQRMSQVVPFSQLADAAADFTLLAMDMPSTAPSDFQPQPVISIIQLFGWDDIICPQVVARYLSHVLQNSTLCEALSHSGYVSFQALTVRSWIRCVLQMYIKNLSGPDDLLIDKNLEEAVEKEYMKQLVKLTRLLFNLSEVKSIFSKAQVEYLSISEDPKKALVRFFEAVGVTYGNVQTLSDKSAMVTKSLEYLGEVLKYIKPYLGKKVFSAGLQLTYGMMGILVKSWAQIFATSKAQKLLFRIIDCLLLPHAVLQQEKELPAPMLSAIQKSLPLYLQGMCIVCCQSQNPNAYLNQLLGNVIEQYIGRFLPASPYVSDLGQHPVLLALRNTATIPPISSLKKCIVQVIRKSYLEYKGSSPPPRLASILAFILQLFKETNTDIYEVELLLPGILKCLVLVSEPQVKRLATENLQYMVKACQVGSEEEPSSQLTSVFRQFIQDYGMRYYYQVYSILETVATLDQQVVIHLISTLTQSLKDSEQKWGLGRNIAQREAYSKLLSHLGQMGQDEMQRLENDNT

SEQ ID NO: 260010 - DNA, 3732 bp, Artificial Sequence
  derived and/or modified sequence
atggagaactgcagcgccgctagcacttttctgacggactccttggagctagaattgggcactgagtggtgtaaacctccgtattttagttgcgcggtggataatcggggaggaggcaagcatttctccggagagtcctacttgtgctctggcgccttgaagcgccttatcctaaacctggatccattgccaaccaattttgaagaggatacactggagatattcggcatacaatgggtgactgaaactgctttagtgaattctagcagggagctgttccacctgtttcgtcaacaattgtacaacctggaaacgctactgcaaagcagttgcgatttcggcaaggtaagtacactgcactgtaaagccgacaacattagacaacagtgtgtgctgtttttgcactacgtgaaggtgttcatctttcgatacctgaaggtgcagaacgccgagagtcacgtcccagtgcacccatacgaagccttggaggctcaactcccaagcgtgctaattgatgaacttcacgggctgctgttgtacattggtcatctgtccgagctgccctctgtaaatattggggccttcgtgaatcagaatcagattaaactcttccccccgtcatggcaccttctgcatttacacctggatattcactggcttgtgcttgagatcctatacatgctgggagagaagctgaagcaagtggtctacggccatcagtttatgaacctggcctcagataatctaactaatatcagcttgtttgaggagcattgtgagaccctgctatgtgacctgatttcccttagcctcaatagatacgacaaggtgcggtctagtgagagcctgatgagtgaccaatgtccttgcctctgtattaaggaactgtgggtactcctgattcacttgctcgaccataggagcaagtggtttgtctccgaatcattttggaactggttgaacaaattgttgaaaacgctcctcgagaagtcctctgaccggaggcgctcaagcatgcccgtgattcagtctagggaccccctcggcttcagttggtggatcataacccacgtcgcatcattctataagtttgaccgccatggcgtgcccgacgaaatgaggaaagttgaatcaaactggaactttgttgaagaactcctgaagaaaagcatatcagtgcaaggggtgattcttgaagagcagctgagaatgtatttgcactgctgcctcactctctgtgacttttgggaacctaatatcgccattgtgactatcctgtgggaatactactctaagaacttgaattcgtccttctctatttcatggctgccatttaaaggattggcaaacaccatgaaatcccccctgtccatgcttgagatggttaagacatgttgttgtgacaaacaggaccaggaactctacaagtcctcaagcagctatactatcttcctttgcatactggcgaaagtagtgaaaaaggccatgaagagtaacgggcctcatccttggaagcaggtcaaagggagaatttactccaaatttcatcagaaacgtatggaagaactgacagaggtgggcctgcagaactttttctcattatttctgcttttggccgccgttgccgaggtcgaagatgtcgcaagccacgtgttggatctgcttaactttctgaagccagcctttgtgacatcgcagcgcgctctaatctggaaaggccatatggcgttccttcttatgtacgcccagaagaatctggatatcggggttttggccgaaaagttttcttgtgcgttccgagagaaggccaaagagtttctagtgtccaaaaatgaagaaatggttcagcgtcagactatttggacattactgagcatctacattgacggcgtccaggaggtcttcgaaacctcctattgtctctacccctcccatgagaaactgcttaatgacggattttcaatgctgctccgcgcttgcagggaatctgaacttcgaaccgtcctgagctttttgcaggctgtgctggcgagaataaggtcaatgcaccagcaactgtgtcaagagctgcagagagacaatgtcgacttatttgtgcagtcatctctgagtgccaaggaacgtcatttggcggccgtggcatctgccctctggcggcatttcttcagctttctaaaatcacagaggatgtcgcaagtggtgcctttttctcagttggccgatgcggctgccgatttcactttactggccatggacatgccctccactgcgccctccgacttccagcctcagcccgtgatttcaatcattcagctgttcggttgggacgacattatatgtcctcaggtggtggccagatacctgagccatgtgctgcaaaacagtactctatgcgaggccctctctcattccggctatgttagcttccaagccctgaccgtacgaagctggatacgctgtgtgctgcaaatgtatattaaaaatttgtccggtcccgacgatctgctgattgacaagaacttagaggaagccgtcgagaaagagtacatgaagcagttggtgaagttgacccggctcctttttaatctgtccgaagtcaagagcattttcagcaaggcacaggtcgagtacctgtccatatccgaagaccccaaaaaggctctggtcagattttttgaagcagtcggggtgacatacggtaatgtgcagacactctcagataagtcagcaatggtcacaaagtccctcgagtatctgggagaggttctgaagtatatcaaaccctatttgggaaagaaagtctttagcgcaggactccagctcacatacgggatgatgggcattttggtgaagagctgggcccagatcttcgcgacttccaaggcccagaaactcctctttcggatcattgattgcctgctgctaccgcacgcagtactgcagcaagagaaggagttgcccgcacccatgctgagtgcgatccagaagtctctgccgctgtatcttcaagggatgtgtatagtgtgctgtcaatctcaaaatcccaacgcctatctcaaccaactgttggggaatgtcatcgaacagtatatcggtcgattccttcccgcctcgccgtacgtttccgacctcggacagcatcctgtgctacttgcccttagaaataccgcgactattcctcctatatcgagcctaaagaagtgcattgttcaggtcataaggaagagttacctcgaatacaaagggtccagccccccaccacgactcgcttcgatcttggcattcatcctacagctcttcaaagaaaccaacactgacatctatgaggtggagctacttttgccagggatactcaagtgccttgtgctggtctccgagcctcaggtgaaacgtctagccacggagaacctgcagtatatggtcaaggcctgccaggtgggttctgaggaggaaccatcttcccaacttaccagtgtgttcaggcagtttatccaggattatggcatgcgttactactaccaagtgtactccattcttgagacagtggctactctggatcagcaggtcgtgattcatctcatcagtacactaacacaatctctgaaggatagtgagcagaaatggggacttggacggaacattgcccagcgtgaagcctacagcaagctgcttagtcacctgggacagatggggcaggatgagatgcagagactggagaacgacaatacgtag

SEQ ID NO: 260011 - DNA, 8643 bp, Artificial Sequence
  derived and/or modified sequence
gtttgcggtttagaccccaaagattcctgttggtggtctgggtcacaggaggcaggtttcgggagctggaaatgtgagcgggtacgacaggcaccgcgggtaaccgacgccccgggtccttgctgcagccgggtacgcgggataccggcaccccgccttctccgcccgagtgctgccaggcgtgggcctggaatctcttcacaccttctctttggagcccttaatgatacgacgaaccccaagtgtttcagaacatgaagtaaacaatggagaactgttctgctgcatcgacgttcctgactgacagcttagagctggagctggggacggaatggtgcaaacctccttacttttcttgtgctgttgacaacagaggaggaggaaaacatttttctggagaatcctacctctgcagcggagcccttaagcgattgattttgaatcttgaccctttaccaactaattttgaagaagataccttggaaatatttggcattcagtgggttactgaaacagcattagtgaattcatctagagaactctttcatttattcaggcaacaactgtacaacttggaaaccttgttacagtccagttgtgattttgggaaggtatcaactctacactgcaaagcagacaatattaggcagcagtgtgtactatttctccattatgttaaagttttcatcttcaggtatctgaaagtacagaatgctgagagtcatgttcctgtccatccttatgaggctttggaggctcagcttccctcagtgttgattgatgagcttcatggattactcttgtatattggacacctatctgaacttcccagtgttaatataggagcatttgtaaatcaaaaccagattaagctttttccaccgtcatggcatttattacatctccacttggatatacattggctggtgctagaaattctttacatgctgggtgaaaaattgaaacaagttgtatatggtcatcagtttatgaatctggcaagtgacaatttaaccaacatcagcctatttgaagaacattgtgaaactctcctttgtgatttaataagcctgtcactcaacaggtacgacaaggttaggtcttctgaatcattaatgagtgaccagtgtccatgtttatgcattaaagaattatgggttctacttattcatcttctagaccacagaagtaaatggtttgtctcggaatcattttggaactggttgaataaactacttaaaacactgcttgaaaaatcaagtgaccgaagaagatcctctatgcctgtaatccagtccagggatccattaggttttagttggtggattattactcatgtagcatcattttacaagtttgatcgccatggagtaccagatgaaatgagaaaagtggaatcaaattggaactttgtagaagaactgctgaaaaagtccatcagtgttcagggtgtcattctagaagaacaattacgaatgtatcttcactgttgtttgacactttgtgatttctgggagccaaacattgcaattgttaccattttatgggaatattatagtaagaacctgaatagttccttcagtatttcttggcttccttttaaaggccttgctaataccatgaagtcacccttgtctatgcttgaaatggtgaagacttgctgttgcgataaacaagatcaggaactatataaatccagcagtagttatactatttttctttgtattctggcaaaagttgttaaaaaagcaatgaagagcaatggccctcatccttggaaacaagtcaaaggaagaatatattcaaaattccatcaaaaaagaatggaagaactaactgaagttggtctacagaacttttttagcctttttctactgttagcagctgttgcagaggtagaagatgttgcaagtcatgttttagacctcctgaatttcctcaagcctgcttttgtaacgtctcagagagccctcatttggaagggtcacatggccttcctcttgatgtatgcccagaaaaatctggacattggtgttttggctgagaaattttcatgtgctttccgggagaaagcaaaggaattcttggtgtctaagaatgaggaaatggtacagagacagactatctggacccttctttccatatacattgatggtgttcaagaagtgtttgagaccagctattgcttgtatccttcccatgaaaaactgcttaatgatggatttagtatgcttctgcgagcatgtcgagaatctgaacttaggacagtattgagcttcctacaagctgttctggccagaatcaggagtatgcatcaacaattgtgtcaggaacttcaaagggacaatgtggacctatttgtacagtcttcattatcggctaaagagcgccaccttgctgcagttgccagtgcactgtggagacatttcttttcatttttgaagagtcagagaatgtcacaggtagtgcctttctcacaacttgcggatgcagctgcagactttactttgctagcaatggacatgccaagcacagctccatcagattttcagcctcagccagttatatcaattattcaactttttggttgggatgatatcatctgccctcaagttgtagcaagatatttaagtcatgtcctacaaaatagcacattatgtgaagcactttctcattcaggctatgtatcttttcaagccttaaccgtaagatcatggattcgttgtgttttgcaaatgtatattaaaaacctctctgggcctgatgatttgctcatagataaaaatctggaagaggcagttgaaaaagagtacatgaaacagttggtcaaactgacaagattactatttaatctctcagaagtaaagagtattttctcaaaggcccaagttgaatatttatccatctcagaagaccctaaaaaagcacttgttcgattctttgaggctgttggtgtaacttacgggaacgtccagacactttctgataaatctgccatggtcacaaagtccttggaataccttggtgaagtattaaaatatattaagccttatttgggaaaaaaagttttcagtgcagggctgcagctgacttatggaatgatgggaattcttgtgaaatcatgggcacaaatctttgccacttctaaagcccaaaaattactattccggatcatagattgtttactgctgccacatgcagtattacagcaagagaaggaactgcctgcacctatgttgtcagcaattcagaaaagtcttcctttgtatctccagggcatgtgtatcgtgtgttgtcaatctcaaaatccgaatgcctatttgaatcaattgctagggaatgttattgagcagtatattgggcgatttcttccagcttcaccatatgtttcagatcttggacaacatcctgttttgctggcattgagaaacacagccactattccaccaatatcatctctaaagaaatgcattgtgcaagtcataaggaaatcctaccttgagtataaggggtcctcacctcctcctcgcttagcatccattctggccttcatcctccaactcttcaaggaaactaacacagacatttatgaagttgaactactcctccctggcattttaaaatgcttggtgttagtcagtgaaccacaagttaaaaggctggccacagagaacctgcaatacatggtaaaagcctgccaagtggggtcagaagaagaaccttcctcccagctgacttctgtgtttaggcagtttatccaggattatggtatgaggtactattaccaggtttacagcattttagaaacagtagcaacattggaccagcaggttgtcatccacttgatttctacccttactcagtctctgaaggattcagagcagaaatggggccttggcaggaatatagcacaaagggaagcctatagcaaacttttgtctcaccttggacagatgggacaagatgagatgcagagactggaaaatgataatacttaatatattttgtgattcatcctgtctattaattatcagtatctaaagccacattgttccactctaattcctacttttaattaattgtataatgttctgtttaaaataatttctaggattttttttccttttatatctgtaagtaaaaaatgtataaataaggaactgaaggttaattagcaactgtgtaataggatccttggaactttttacaaaactgcattctaccttgatgaaattttagttaaactaaattaaagaaacattttctgagagtgttttctgtgtgtgagtattaagcagatacttcatccatagactttttgttgtagtatgacttcctgcctccctgccttgtgactgatttgtcatgtttattttttatttttacaataatagttatgttttaaaatgatactttttcaaagtacctggctaccctatactgtgtttttggtgggggaaaggtgttgggaaatgtgactgtgtatttgtttttcttttttatatgtgtgaggcaagttaacaaagaaaacccttacaaagcacacttaactgtgttaggaatgagactgaatctggctaaaggattatacagctgatatccaaaaagaagtgtaaacatgccaacagggtttatatttaggttccaagagttgccaaattttttttttattcatcctttcttttggagttgtcattaaaaaaaaaatcatatcaggaggaggaaataaaggagactttaagaggagagtaaataaaaatattctagaaaagtaacaatagtagtggtctgagaagtcagctgatccatcttcttgctctttagccagagcttcttataacttagcattttatccaagaaacctgtttagtttcctttaacaacattgtttctcaacttttgaactcttaactcatccagattgttttaccagttggagcttgtccttgactccttttcctattgagcattatttggttgaaagagctccagtcctagttttgggaacccacctgggtctcaaactcagctttgctttatgatcttgagctagttacgtaacctttctcagtctagtttcttcatggagaagaaaagaagaatccctttactatttgacagtgttgttgtgagaatcaatgggataatgtacgtgaaaatatttggtggcccaaattctgttgggaaatgtacagacacgattagtttattactcgtgcacaattaaggcaaagaacacctctcaattttatctttctctaatgatatgtcccagatgaatgatcccactttccaatgttttcttacatcatgttttctaactttgaagtactttgtttccttcttgggattatagtctttatcatggttctactcttccttcaagaaaacatttcaacccttctctggctcaaggagtatctttaaaaatgaaatactttgcaatcagtattctgtagttaatagcgttctcttaattataatctgtgaaatccaaaggagtgtctgttattttcataacatataaatggtccttctctcaaatcagcttcatcaaagggaataaatgaaagcttaaggctgtttaatagacttcataacactgaatttcttttcatcatgatagtgacttactaaacaaataatgtatggcttggaaagttccagcagtcactaaggagttttatctatttaaggtgatgcctttaaagaggttatttatgtgtatatgtgtttttgtgtgtgtgtgtgtgtgtgtgtgtgtgtgtgtgtgtgtgtgggttttttttttccaaaggagattgataaagatacctttgagaatcttgctccttagagtatgaaaacgtttaaaggataggaaaagctgctactgaatcatgctttaggacatatatctatagatactaagaataactaaaatttgtacttaagaatggtaacaacaaagtgtgtaacaatatgtgtgtgtattatatgttttgtatttatgtataagtaactttttttaaagcttttttttaaattgaaaaaagaagaaaatttatggctcagttccttttttttaaaatcttcactgatccttcacttattactacaatcttgccctctttcattcccagacttggagtcccttatacctgcttctttaatagccactttccctaaataccctgtaatttctgaggctgctgcttctaccagtgtaatacaagccattgtcttttggtcaaatctgagtttgttctcctttctcatgttctttgtcctctctgtgacaattgtattttcttttatcttcccatcatttccacaatggtactgctccttcctacatatacagttgacccttgagcaacacaagtttgaactgtgcaggtccacttatatgtggatctaaaatacagtatttgtgggatgcaaaatctgagtatatggaggaccaactttttgtagaggcaggttcctcagggttaactgcaggacttgagtaagtgcagattatggtatgcacaggggatcctggaaccagtccccagaccaaaaatgaccactgtatcttgagagcaccttcatggtcttctttcctgtccccagtcgtaagatacgacccttcatctgctttgtctcaacattctgttagtggtgaactgataactccagcttttctctctctttttttttttttttttttttttgttgttgttgttgttgttgttttgaggcagagtcttgctctgtcgcccaggctggagtgcagtggcacgatctcggctcactgcaagctctgcctcccgggttcacgccattctcctgcctcagcctcccaagtagctgggactacaggtgcccgccaccacgcccggctaattttttttgtatttttagtagagacggggtttcaccatgttgggctcgatctcctgacctcatgatccgcccgcctcggcctcccaaagtgctgggattacaggcgtgatgagccacctagtgctaattcatctctaaacctctgtagttggagtctcctgaaatctcagactacctcctgctttcattttctacccagggaatacactattgtcctaagttatttagccttgaaatgtcagaggcattttaggttcttcatgtttctcccactttcagttgattaccattacaggatcttaggcttctttttatctttttgcagtgccttgcatccactggttgtttgttttttctgttgggcactacttatttccttacctctggtttcttctcctacagcttatgttctgaaatgtgtattcctaaaatactgttttcctcttgttacttttctgctcgaggacttccagtaacttaccattgtttataaggtgatgttcaaacccttcagtctggagactttctgccacctatctgactgtacctttatcttcaagcttatctctttccaaacaagaggctcatttagcagctttctctgattgccatgttcatcctacactcagcctcattcagtttacagcatggaaactgtataggacctctttcctatagaaattgaagacacttaaataggaagaaaattaaaatatacatttggatacatgagtattccagtcaaataatatctataaaataccagatagagtataaaagacaactgaaggacaacagagtgatgaaaggactttattaggcatttggatttggttatgatttaaatttcaatttaattagaacgtttccatggcaaggaaggaagcatggaggactgtggaaaagtcattcagtattgagttcatttgcattagaggaatttcatagtttaaaacttgtatatctttacctatccttcgtatgttttcttcttaagcatatttgactttttctacctcagcatctgtataagaaaatatttgtgagtcagatgtttgtgggttttccttacctattattattttcttccatgctttacaacacattttttaaactaccttgttcttaaataattacacggacctgcttctgtgtactttcacagaatctttgacagttaaaaattgtatgttatataaaaatttgacaagcttctacagttaggaaaagcctttagaaatctgccttccccaaaccgtatgttatcatagcactcatgtctccccatgtctaaaaggtaaatagatacagaaacctcaccaaaagttgaatcatctgtactaaaccactgcttttttatccagactttttatataaatcttttattttccaaaaaactgatcttttacctacccctcttagagttaaaaatattgcctgtcaggcaagagtatagtatgccaatataaataatatgctttatttggttagaaacagttggtttgggaagctagcaacatagcatattctttacaaatttaataaggtgtattttgatactgtgataacctgcattgtaaattaccaaatggttggaattgaccagtttatacttattaaaatttttgatgtgccaatggctatccaattcattgcatttgtgaattgtgcttttagaaaaattgtggacattttagttttatatacatatttatgagttatttgtgcatatgataaaattatatataataataaaagtatatatgtaactta

SEQ ID NO: 260012 - DNA, 3732 bp, Artificial Sequence
  derived and/or modified sequence
atggagaactgcagcgctgccagcaccttcctgacagacagcctggagctggagctgggcacagagtggtgcaagccaccctacttcagctgtgctgtggacaacagaggaggcggcaagcacttctctggagagagctacctgtgcagcggggccctgaagaggctcatcctgaacctggaccccctgcccaccaactttgaggaggacaccctggagatcttcggcatccagtgggtgacagaaacagccctggtgaacagcagccgggagctgttccacctgttccggcagcagctgtacaacctggagaccctgctgcagagcagctgtgactttgggaaggtgtccaccctgcactgcaaggctgacaacatccggcagcagtgtgtgctcttcctgcactacgtgaaggtgttcatcttccgctacctgaaggtgcagaatgctgagagccacgtgcctgtgcacccctatgaggccctggaggcccagctgcccagcgtgctgattgatgagctgcacggcctgctgctgtacatcggccacctgtctgagctgcccagcgtgaacatcggggcctttgtgaaccagaaccagatcaagctgtttcctccttcctggcacctgctgcacctgcacctggacatccactggctggtgctggagatcctgtacatgctgggggagaagctgaagcaggtggtgtatggccaccagttcatgaacctggccagtgacaacctgaccaacatcagcctgtttgaggagcactgtgagaccctgctgtgtgacctgatcagcctgagcctgaacagatatgacaaggtgcgcagcagcgagagcctgatgtctgaccagtgcccctgcctgtgcatcaaggagctgtgggtgctgctgatccacctgctggaccacaggagcaagtggtttgtgtctgagagcttctggaactggctgaacaagctgctgaagaccctgctggagaagagcagtgacagaagaagaagctccatgcctgtgatccagagccgggaccccctgggcttctcctggtggatcatcacccacgtggccagcttctacaagtttgacagacatggagtgcctgatgagatgaggaaggtggagagcaactggaactttgtggaggagctgctgaagaagagcatctctgtgcagggcgtcatcctggaggagcagctgaggatgtacctgcactgctgcctgaccctgtgtgacttctgggagcccaacatcgccatcgtgaccatcctgtgggagtactacagcaagaacctgaacagcagcttcagcatctcctggctgcccttcaagggcctggccaacaccatgaagagccccctgtccatgctggagatggtgaagacctgctgctgtgacaagcaggaccaggagctgtacaagagcagcagcagctacaccatcttcctgtgcatcctggccaaggtggtgaagaaggccatgaagagcaatggcccccacccctggaagcaggtgaagggccgcatctacagcaagttccaccagaagaggatggaggagctgacagaggtgggcctgcagaacttcttcagcctcttcctgctgctggccgctgtggccgaggtggaggatgtggccagccacgtgctggacctgctgaacttcctgaagccagcctttgtgaccagccagagggccctgatctggaagggccacatggccttcctgctgatgtatgcccagaagaacctggacatcggcgtgctggccgagaagttcagctgtgccttccgggagaaggccaaggagttcctggtgtccaagaatgaggagatggtgcagaggcagaccatctggaccctgctgagcatctacattgatggagtgcaggaggtgtttgagaccagctactgcctgtaccccagccatgagaagctgctgaatgatggcttctccatgctgctgcgggcctgccgggagagcgagctgaggacagtgctgtccttcctgcaggccgtgctggcccgcatccgctccatgcaccagcagctgtgccaggagctgcagagggacaacgtggacctgtttgtgcagagcagcctgagcgccaaggagcggcacctggccgctgtggccagcgccctgtggaggcacttcttctccttcctgaagagccagaggatgagccaggtggtgcccttcagccagctggctgatgctgctgctgacttcaccctgctggccatggacatgcccagcacagcccccagcgacttccagccccagcctgtgatcagcatcatccagctgtttggctgggatgacatcatctgcccccaggtggtggcccgctacctgagccacgtgctgcagaacagcaccctgtgtgaggccctgagccacagcggctacgtgtccttccaggccctgactgtgcgctcctggatccgctgtgtgctgcagatgtacatcaagaacctgagcggcccagatgacctgctgattgacaagaacctggaggaggccgtggagaaggagtacatgaagcagctggtgaagctgacccggctgctcttcaacctgtctgaggtgaagagcatcttcagcaaggcccaggtggagtacctgagcatcagcgaggaccccaagaaggccctggtgcgcttctttgaggccgtgggcgtgacctatggaaatgtgcagaccctgagtgacaagagcgccatggtgaccaagagcctggagtacctgggggaggtgctgaagtacatcaagccctacctgggcaagaaggtgttttctgctggcctgcagctgacctacggcatgatgggcatcctggtgaagtcctgggcccagatctttgccaccagcaaggcccagaagctgctcttccgcatcatcgactgcctgctgctgccccatgctgtgctgcagcaggagaaggagctgcctgcccccatgctgagcgccatccagaagagcctgcccctgtacctgcagggcatgtgcatcgtgtgctgccagagccagaaccccaatgcctacctgaaccagctgctgggcaatgtgattgagcagtacatcggccgcttcctgcctgccagcccctacgtgtctgacctgggccagcaccctgtgctgctggccctgaggaacacagccaccatcccccccatcagcagcctgaagaagtgcatcgtgcaggtgatcaggaagagctacctggagtacaagggcagcagccccccaccccggctggccagcatcctggccttcatcctgcagctgttcaaggagaccaacacagacatctatgaggtggagctgctgctgcccggcatcctgaagtgcctggtgctggtgtctgagccccaggtgaagaggctggccacagagaacctgcagtacatggtgaaggcctgccaggtgggcagcgaggaggagcccagcagccagctgaccagcgtcttccggcagttcatccaggactatggcatgagatactactaccaggtgtacagcatcctggagaccgtggccaccctggaccagcaggtggtgatccacctgatcagcaccctgacccagagcctgaaggacagcgagcagaagtggggcctgggcaggaacatcgcccagcgggaggcctacagcaagctgctgagccacctgggccagatgggccaggatgagatgcagaggctggagaatgacaacacctag

SEQ ID NO: 260013 - DNA, 3732 bp, Artificial Sequence
  derived and/or modified sequence
atggagaactgcagcgccgccagcaccttcctgaccgacagcctggaactggaactggggaccgagtggtgtaagcctccctatttcagctgcgccgtggataaccggggcggagggaagcatttctctggcgagtcctacctgtgctctggtgctctgaagagacttatcctgaatttggacccgctgcccaccaacttcgaagaagacaccctggagatttttgggattcagtgggtcaccgaaactgcacttgttaattcctcccgtgagctatttcatctgttcagacaacagttatacaacctggagacattgctacagagctcatgtgattttggaaaggtgagcacgcttcattgcaaggcagataatattcggcaacagtgcgtcctctttctgcactatgtcaaggtttttatttttcggtatctgaaagtgcagaacgcagaatcccatgtgccggtgcacccgtacgaggccctggaggcccagctaccatctgttctgatcgatgagctccacggtttgctgctttatatcggccacctgtcggagctcccctcagtgaacattggagccttcgtaaaccagaaccagataaaactgttcccccccagctggcacctgttgcatctgcacctagatattcattggctggtactagaaatcctctatatgctcggagagaaacttaagcaggttgtctatgggcaccaatttatgaacttggccagtgataacctgaccaacattagtttgttcgaagagcattgtgagactctcctgtgcgaccttatctccctgtccctgaatcgatacgataaggtgcgctcctctgagagtctgatgtctgaccagtgtccttgtctatgcataaaggagctgtgggtcttgctgatccacctgctggatcaccggagcaagtggtttgttagcgagtccttttggaactggctcaacaagttgttgaaaactctgctggagaaatcatccgataggcgccgttcatctatgcctgtgattcagagcagagaccccctggggttctcttggtggatcattactcatgtggcttcattttacaaatttgaccgccacggtgtgcctgacgagatgcgtaaggtggagtctaactggaactttgtcgaggaacttctcaagaaaagcatctccgtccaaggagttattctggaggagcaacttcggatgtacctgcactgttgccttacgttatgcgatttctgggagcccaacatcgccattgtgacaattctctgggagtactattccaagaatttgaacagctctttcagcatctcctggctcccgttcaaagggttggctaataccatgaagtcgcctttgtccatgctggaaatggtcaaaacttgctgttgtgataaacaagatcaggaactgtacaaatctagcagttcctacacaattttcctgtgcattctagccaaagtggttaagaaagcgatgaagtccaacgggccacatccctggaaacaggtgaaaggtaggatttacagtaaattccaccaaaagagaatggaggagctgacagaagtgggcctccagaattttttctcactgtttctgctattggccgcggtagcagaggttgaggatgtcgcctcacacgtgctcgacctcttgaactttctgaagcccgcattcgtcacatcacagcgggcccttatttggaaggggcatatggcattcctgctgatgtacgcacagaaaaacttggatataggagtcctcgccgaaaagtttagctgcgcctttagggagaaagccaaagagttcttggtgtcaaagaatgaggagatggtgcaaagacaaaccatatggacattgctatcaatctacatcgacggagtgcaagaagtgtttgagacgtcctactgtctctacccatctcacgaaaagcttctcaatgatggattttcaatgctacttagagcctgcagagaaagcgagctgaggaccgtgctgagtttccttcaggccgtcctcgctcgcattcgatcgatgcatcagcaactgtgtcaggaactccagcgagacaacgtcgatctgttcgtgcagtcctcactatccgcaaaagagaggcacctggcggcggtggcatcagccttatggcgacacttctttagcttcctcaagagccaacgcatgtctcaggttgtcccttttagccagctcgcagatgctgccgccgactttacactgctggctatggacatgccatctacagcacctagcgactttcagccacagcctgttatcagcattatacagctgttcggctgggacgacataatctgtccgcaggtcgttgcccgctatctgtcacacgtattgcagaattccaccctctgtgaagccctgtcccatagcggttacgtgagtttccaggcactcacggtgaggtcgtggataaggtgtgtcctacagatgtatatcaagaatttgtccggccccgacgatctcctgatagacaaaaatctcgaagaggccgtcgagaaggagtacatgaaacagcttgtgaagttgactcgcctgttgtttaacctcagtgaggtgaaatcgatcttctccaaggcgcaggtagagtatctttcaatttccgaggatcccaagaaagctttagtgagattctttgaggcagtgggcgtcacatacggtaacgtgcaaacactgagcgataaatctgccatggttaccaaatcgctggagtacctcggggaggtgttaaagtatattaaaccatacctgggcaaaaaggtcttctcagctggcctgcagctgacttacgggatgatggggatcttagttaagagctgggcccagatctttgctacctcaaaagcccagaaactgctttttcgcataatcgactgtctgctgctaccgcacgccgtgctccagcaggaaaaggaactgcctgcgcccatgctctctgcaatccagaaatcattacctctgtatttgcagggaatgtgtatcgtttgctgtcaaagtcagaacccaaacgcctacctgaaccagttattgggaaacgttattgaacaatacataggtcgtttcctgcctgcttccccctatgtgtctgatctgggccagcaccctgtcctcttagccttgagaaatactgccactatcccgcccatatcaagtctaaagaaatgcatagtgcaggtgatcaggaaaagttacctggagtacaaaggctcgagcccccctcctcgactggcatctatcttggcttttattttacaactattcaaagagactaacaccgacatctatgaagttgaactcctcctgccaggtatattaaagtgcctggtcctggtaagcgagccccaagtgaagcgattagcaactgagaacctccagtatatggtaaaagcatgccaggtcggctcagaggaagagcccagttctcagctgaccagcgtctttcgccaatttatacaggattatggcatgaggtactattatcaggtgtactcaatccttgaaacggttgctactctggaccagcaagtcgtaatccatctgattagcactttaactcagtctcttaaggatagcgagcagaagtggggcttgggtcggaatatcgctcagcgcgaggcttattccaaattgctttctcaccttggtcagatggggcaggacgagatgcaaagactagaaaatgacaacacttag

SEQ ID NO: 260014 - DNA, 3732 bp, Artificial Sequence
  derived and/or modified sequence
atggaaaattgttctgcagcgtctaccttcctgacagactctttggagctcgagctggggactgaatggtgtaagcctccgtacttcagttgcgcagtggataacaggggcggaggaaaacacttttccggtgaaagctatctgtgctctggggctctgaagagactcattctgaacttagatccattacccactaacttcgaggaagacaccttggaaatcttcgggattcagtgggttaccgaaaccgcgctggtgaattctagccgggagctgtttcacttgttccgacagcagctgtacaatctggaaactttgctgcagtcctcctgcgacttcggtaaggtcagcacactgcactgtaaggcggataatatccgacaacaatgcgtcttatttttacactatgtgaaggttttcattttccgatacttaaaggtgcagaacgcagaaagtcatgtacccgtgcatccgtatgaggccctagaagcccagctacctagtgtactgatcgatgaactgcatggacttttattatatatcgggcatctctccgagctcccaagtgtgaatatcggtgcattcgtgaaccagaatcaaatcaagctttttccaccttcctggcatctgctccatctgcatctcgacattcactggcttgttttagaaatcctgtacatgctgggggaaaaactgaagcaggtggtgtatggacaccaattcatgaatttggccagtgacaacctcaccaatatttcccttttcgaggagcactgcgaaactctactttgtgatcttatatccttgagcttgaacaggtacgacaaagtccggagcagtgagagtctgatgagtgaccagtgcccatgcctgtgcataaaggagttgtgggtgcttctgattcatctattggatcaccgttctaaatggttcgtcagcgagtctttttggaactggctgaataagcttcttaagacactgctggaaaagagctccgacaggaggcggtccagcatgccggtcatccagtcccgggatcctttaggttttagctggtggatcattacccacgtggctagtttctacaaatttgatcgtcatggtgtgccggatgagatgagaaaggtggagagcaactggaattttgtagaggaattgctgaaaaagtcaatcagcgtccagggagtgattctggaagaacaactgcgcatgtacctgcattgttgcctcacgctctgtgacttttgggagccaaacatcgccatcgttaccatactttgggaatactacagcaagaatctcaacagttctttctctataagctggctgcctttcaaaggattggcgaacaccatgaagtcccctctgtccatgcttgaaatggtaaaaacctgttgttgtgataaacaggatcaagagctgtataagtcctcttcttcctacacaatcttcctctgcattctcgccaaggtggtgaaaaaggccatgaagagcaatggtccacatccctggaagcaagtgaaaggacgcatttactctaaatttcatcaaaagcggatggaagagctgacggaagtgggcctgcagaatttttttagtctctttctgttgctcgctgccgtcgctgaggtcgaggacgtggcatcccatgttctggatctgctgaattttcttaaaccagcctttgtaacatcgcagagggctctgatttggaagggtcacatggcattcttgttgatgtacgcccagaagaacctcgatatcggagtcctggccgaaaaattcagctgcgccttccgggagaaagctaaagaattcctggtgtctaagaatgaggaaatggttcagcggcaaaccatttggaccttgctgtctatctatatcgacggagtgcaggaagtgttcgagacatcttactgtctgtaccctagccatgagaaactgcttaatgacgggttcagtatgctgcttcgggcatgcagagagtctgaactacggactgtactgtcattcctgcaggccgtcctcgccagaatccgtagtatgcaccagcaactgtgtcaggagctgcagcgggataacgtagatctgttcgttcaatcgtccctttcagccaaggagcgccatttggctgccgtggcatctgccctgtggcggcactttttcagttttctgaagagtcaaagaatgtcacaagtcgttcctttcagtcagctcgcagacgctgcagccgactttacattacttgctatggatatgcccagtactgctcccagcgacttccagccacagccagtcataagcatcatccagctttttggctgggatgatatcatatgccctcaggtggtcgctcgctacttgagtcatgtgctgcagaactctactctgtgtgaagccctctcccattcaggctacgtgtcctttcaggcattaacagttcggagttggatccggtgtgtgctgcagatgtatatcaagaacctgtcagggcctgacgacctcttgattgacaagaacctggaagaggcagttgaaaaagagtatatgaagcagctcgtgaagctgacgcggttgctgttcaacttgagtgaggtgaaatctatatttagtaaggcacaagtggaatatctttccatcagtgaggatccgaagaaggccctggtccgattcttcgaagccgtgggggtcacgtatggaaatgtacaaacgctatcggacaagtcagccatggtaaccaaatcattagagtacctgggtgaagtgctcaagtatattaagccataccttggtaagaaggtgttttccgccggacttcagttgacatacggaatgatgggtatcctcgtgaaatcatgggcccagatttttgccacctcaaaagcacagaagctgctctttagaatcatagactgcttgcttcttccacatgctgtgctccaacaggaaaaggagctccccgctcctatgctgtccgctattcaaaagtccctgccgctctatctgcaggggatgtgcatagtctgttgtcaatctcagaatcccaacgcatatttgaaccaactcttaggaaacgtgatcgaacagtatattggtaggtttctccctgcttccccgtacgtgagcgatctggggcagcacccagtgcttctcgccctcagaaatactgctacaatacccccaatctcgtcgctcaaaaaatgcatcgtgcaggtgattcgcaaatcttacttagagtataaagggtcaagccctcctcccagacttgccagcattctggcctttattctgcaactattcaaggagactaacactgatatttatgaggtagagctcctgttgcccggaattttgaagtgtttggtcctagtgagtgagcctcaagtaaaacgtctcgccactgaaaatctgcagtacatggttaaggcttgccaagtgggcagcgaagaggaaccgtcctcacagctgacgtccgtgttccggcagttcatccaggattacgggatgcgctattactaccaggtgtattctatactcgaaacagtagcgaccctcgaccagcaggtagtcattcaccttatttctacattaactcaatcactcaaggacagtgaacagaaatggggcttaggcagaaatattgcacagagggaagcctacagcaaactattgtcacacctaggacagatggggcaagacgagatgcagcgtctggaaaacgataatacttag

SEQ ID NO: 260015 - DNA, 3732 bp, Artificial Sequence
  derived and/or modified sequence
atggagaactgcagcgccgccagcaccttcctgaccgacagcctggagctggagctgggcaccgagtggtgcaagcccccctacttcagctgcgccgtggacaacagaggcggcggcaagcacttcagcggcgagagctacctgtgcagcggcgccctgaagagactgatcctgaacctggaccccctgcccaccaacttcgaggaggacaccctggagatcttcggcatccagtgggtgaccgagaccgccctggtgaacagcagcagagagctgttccacctgttcagacagcagctgtacaacctggagaccctgctgcagagcagctgcgacttcggcaaggtgagcaccctgcactgcaaggccgacaacatcagacagcagtgcgtgctgttcctgcactacgtgaaggtgttcatcttcagatacctgaaggtgcagaacgccgagagccacgtgcccgtgcacccctacgaggccctggaggcccagctgcccagcgtgctgatcgacgagctgcacggcctgctgctgtacatcggccacctgagcgagctgcccagcgtgaacatcggcgccttcgtgaaccagaaccagatcaagctgttcccccccagctggcacctgctgcacctgcacctggacatccactggctggtgctggagatcctgtacatgctgggcgagaagctgaagcaggtggtgtacggccaccagttcatgaacctggccagcgacaacctgaccaacatcagcctgttcgaggagcactgcgagaccctgctgtgcgacctgatcagcctgagcctgaacagatacgacaaggtgagaagcagcgagagcctgatgagcgaccagtgcccctgcctgtgcatcaaggagctgtgggtgctgctgatccacctgctggaccacagaagcaagtggttcgtgagcgagagcttctggaactggctgaacaagctgctgaagaccctgctggagaagagcagcgacagaagaagaagcagcatgcccgtgatccagagcagagaccccctgggcttcagctggtggatcatcacccacgtggccagcttctacaagttcgacagacacggcgtgcccgacgagatgagaaaggtggagagcaactggaacttcgtggaggagctgctgaagaagagcatcagcgtgcagggcgtgatcctggaggagcagctgagaatgtacctgcactgctgcctgaccctgtgcgacttctgggagcccaacatcgccatcgtgaccatcctgtgggagtactacagcaagaacctgaacagcagcttcagcatcagctggctgcccttcaagggcctggccaacaccatgaagagccccctgagcatgctggagatggtgaagacctgctgctgcgacaagcaggaccaggagctgtacaagagcagcagcagctacaccatcttcctgtgcatcctggccaaggtggtgaagaaggccatgaagagcaacggcccccacccctggaagcaggtgaagggcagaatctacagcaagttccaccagaagagaatggaggagctgaccgaggtgggcctgcagaacttcttcagcctgttcctgctgctggccgccgtggccgaggtggaggacgtggccagccacgtgctggacctgctgaacttcctgaagcccgccttcgtgaccagccagagagccctgatctggaagggccacatggccttcctgctgatgtacgcccagaagaacctggacatcggcgtgctggccgagaagttcagctgcgccttcagagagaaggccaaggagttcctggtgagcaagaacgaggagatggtgcagagacagaccatctggaccctgctgagcatctacatcgacggcgtgcaggaggtgttcgagaccagctactgcctgtaccccagccacgagaagctgctgaacgacggcttcagcatgctgctgagagcctgcagagagagcgagctgagaaccgtgctgagcttcctgcaggccgtgctggccagaatcagaagcatgcaccagcagctgtgccaggagctgcagagagacaacgtggacctgttcgtgcagagcagcctgagcgccaaggagagacacctggccgccgtggccagcgccctgtggagacacttcttcagcttcctgaagagccagagaatgagccaggtggtgcccttcagccagctggccgacgccgccgccgacttcaccctgctggccatggacatgcccagcaccgcccccagcgacttccagccccagcccgtgatcagcatcatccagctgttcggctgggacgacatcatctgcccccaggtggtggccagatacctgagccacgtgctgcagaacagcaccctgtgcgaggccctgagccacagcggctacgtgagcttccaggccctgaccgtgagaagctggatcagatgcgtgctgcagatgtacatcaagaacctgagcggccccgacgacctgctgatcgacaagaacctggaggaggccgtggagaaggagtacatgaagcagctggtgaagctgaccagactgctgttcaacctgagcgaggtgaagagcatcttcagcaaggcccaggtggagtacctgagcatcagcgaggaccccaagaaggccctggtgagattcttcgaggccgtgggcgtgacctacggcaacgtgcagaccctgagcgacaagagcgccatggtgaccaagagcctggagtacctgggcgaggtgctgaagtacatcaagccctacctgggcaagaaggtgttcagcgccggcctgcagctgacctacggcatgatgggcatcctggtgaagagctgggcccagatcttcgccaccagcaaggcccagaagctgctgttcagaatcatcgactgcctgctgctgccccacgccgtgctgcagcaggagaaggagctgcccgcccccatgctgagcgccatccagaagagcctgcccctgtacctgcagggcatgtgcatcgtgtgctgccagagccagaaccccaacgcctacctgaaccagctgctgggcaacgtgatcgagcagtacatcggcagattcctgcccgccagcccctacgtgagcgacctgggccagcaccccgtgctgctggccctgagaaacaccgccaccatcccccccatcagcagcctgaagaagtgcatcgtgcaggtgatcagaaagagctacctggagtacaagggcagcagccccccccccagactggccagcatcctggccttcatcctgcagctgttcaaggagaccaacaccgacatctacgaggtggagctgctgctgcccggcatcctgaagtgcctggtgctggtgagcgagccccaggtgaagagactggccaccgagaacctgcagtacatggtgaaggcctgccaggtgggcagcgaggaggagcccagcagccagctgaccagcgtgttcagacagttcatccaggactacggcatgagatactactaccaggtgtacagcatcctggagaccgtggccaccctggaccagcaggtggtgatccacctgatcagcaccctgacccagagcctgaaggacagcgagcagaagtggggcctgggcagaaacatcgcccagagagaggcctacagcaagctgctgagccacctgggccagatgggccaggacgagatgcagagactggagaacgacaacacctag

SEQ ID NO: 260016 - protein, 161 aa, Artificial Sequence
  derived and/or modified sequence
MEYTGSKYIGEYVDGRMEGKAKYILPTETIYVGEMKDGMFHGEGTLYFPSGSQYDAIWENGLAIKGTYTFSDGLHYDEKNWHYCDGYDRRFYTEILNGLKPAGMAQLTNMDPPRKIPKGYYDCGDGFYNPVTRVVKDYRNRFLRNADDDEHEWITRTCRKG

SEQ ID NO: 260017 - DNA, 486 bp, Artificial Sequence
  derived and/or modified sequence
atggagtacaccggcagcaagtacatcggcgagtacgtggacggcagaatggagggcaaggccaagtacatcctgcccaccgagaccatctacgtgggcgagatgaaggacggcatgttccacggcgagggcaccctgtacttccccagcggcagccagtacgacgccatctgggagaacggcctggccatcaagggcacctacaccttcagcgacggcctgcactacgacgagaagaactggcactactgcgacggctacgacagaagattctacaccgagatcctgaacggcctgaagcccgccggcatggcccagctgaccaacatggacccccccagaaagatccccaagggctactacgactgcggcgacggcttctacaaccccgtgaccagagtggtgaaggactacagaaacagattcctgagaaacgccgacgacgacgagcacgagtggatcaccagaacctgcagaaagggctag

SEQ ID NO: 260018 - DNA, 486 bp, Artificial Sequence
  derived and/or modified sequence
atggagtatactggcagcaagtacatcggagagtacgtggatggacggatggaaggaaaggccaagtacatcctcccgactgagaccatttatgtgggggagatgaaggatggaatgttccacggggaaggcactctctatttcccatccgggtctcaatacgacgccatttgggaaaacggattggctatcaaggggacatatacattttccgatggcctccactatgacgagaaaaattggcattattgcgatggctatgataggcggttctatacagaaatcttgaatggcctgaaaccagctggcatggcccagttgacaaacatggaccctcctagaaagattccaaagggctactatgattgcggagatggcttttataaccctgtcacaagggtggtaaaggattatcggaataggttcttgcgaaacgctgatgatgacgagcatgagtggatcacgcgcacttgtagaaagggttag

SEQ ID NO: 260019 - DNA, 486 bp, Artificial Sequence
  derived and/or modified sequence
atggagtacacaggcagcaagtacatcggggagtatgtggatggccgcatggagggcaaggccaagtacatcctgcccacagagaccatctacgtgggggagatgaaggatggcatgtttcatggagagggcaccctgtacttccccagcggcagccagtatgatgccatctgggagaatggcctggccatcaagggcacctacaccttcagtgatggcctgcactatgatgagaagaactggcactactgtgatggctatgaccggcgcttctacacagagatcctgaatggcctgaagccagctggcatggcccagctgaccaacatggacccccccaggaagatccccaagggctactatgactgtggagatggcttctacaaccctgtgaccagggtggtgaaggactacagaaaccgcttcctgagaaatgctgatgatgatgaacatgagtggatcaccaggacctgcaggaagggctag

SEQ ID NO: 260020 - DNA, 486 bp, Artificial Sequence
  derived and/or modified sequence
atggagtacaccggcagcaagtacatcggcgagtacgtggacggccgtatggagggcaaagctaagtacattctacccaccgaaactatttatgttggagagatgaaggacggcatgttccacggagaaggaaccctgtacttcccttctggctctcaatatgacgctatctgggagaatggcctggcaataaagggcacttacacctttagtgacggcttgcattacgacgaaaaaaattggcactactgtgacggatacgatcggcgtttttatacggaaatcttgaacgggttaaaacctgccggtatggcacagcttacaaatatggatcctcccaggaagatccctaaaggctactacgattgcggagatgggttttacaatccagtgacccgcgtggtgaaggattaccgaaatagattcctacgtaatgctgacgacgacgagcacgagtggataacccgcacatgccgcaagggctag

SEQ ID NO: 260021 - DNA, 705 bp, Artificial Sequence
  derived and/or modified sequence
atagtgatgccgtatccactgagactccggatcctaacagctggaagctaaaaacaggcgccatggagtacacagggagcaaatatatcggggaatatgtagatgggaggatggagggcaaagccaagtacatcctccctaccgaaacaatatatgttggggaaatgaaggatggcatgtttcacggcgagggaaccctgtacttccccagcggaagccaatacgacgccatttgggaaaacggattggccataaagggcacatatacgttctcagatgggctgcactatgatgagaaaaactggcattactgcgacggctatgatcggaggttttacacagagatcctcaatggcttgaagcctgcaggtatggctcaactcaccaatatggacccacctagaaaaatccccaagggctattacgattgtggagacggcttctataacccagtcacgagggtagtcaaggactataggaaccgctttctaagaaacgcagatgatgacgagcatgagtggatcacccgtacctgtcgaaagggctaggatgagatcgtgggtcacaggcccgagccgtgaactctgtggctgcctccaccagaggtttccatctgccctactagcattggctgccctgggggacgggctgtagttctagaacctgattttaactcaggaataaagactttctgcggtcagtggc

SEQ ID NO: 260022 - DNA, 486 bp, Artificial Sequence
  derived and/or modified sequence
atggagtatacgggaagtaagtatatcggggagtacgtcgatggacggatggaagggaaagcaaaatatattctcccaacggaaaccatttacgtgggagaaatgaaggacggcatgttccatggagagggcaccctgtactttcccagcgggtcacagtacgatgccatatgggagaacgggctcgccataaagggtacatacacgttctctgacggcctacactacgatgagaagaattggcactattgtgacgggtacgaccgtagattctataccgaaatcctgaatggcttaaagcctgccggaatggctcagcttaccaacatggatccgccaaggaagatccccaaggggtattatgactgcggggatggattctataatcctgttactcgcgtggttaaagactatcgtaatcggttcctgaggaatgctgacgatgatgagcacgagtggattacacgcacctgtcgcaagggctag

SEQ ID NO: 260023 - protein, 119 aa, Artificial Sequence
  derived and/or modified sequence
MKVLISSLLLLLPLMLMSMVSSSLNPGVARGHRDRGQASRRWLQEGGQECECKDWFLRAPRRKFMTVSGLPKKQCPCDHFKGNVKKTRHQRHHRKPNKHSRACQQFLKQCQLRSFALPL

SEQ ID NO: 260024 - DNA, 360 bp, Artificial Sequence
  derived and/or modified sequence
atgaaagtactgatctcctctctccttctgcttctgcccctcatgctgatgagcatggtctcaagctctctgaacccgggggtggccagaggccatcgcgatcgggggcaagcgtctcgccgctggcttcaggagggtggccaggagtgtgaatgtaaggattggtttctgcgcgcaccacggcgcaagtttatgaccgtctccggcctgcctaaaaaacaatgcccctgtgatcatttcaagggtaacgttaaaaagacaaggcatcagaggcaccaccgcaaacccaataagcatagtcgcgcttgccaacagtttctcaaacaatgccaactgaggtcttttgcactgcccctgtag

SEQ ID NO: 260025 - DNA, 360 bp, Artificial Sequence
  derived and/or modified sequence
atgaaggtactgatttccagcctgcttctgcttctacctctgatgttgatgagtatggtatcgagtagcctcaacccgggggtagcacgaggtcacagagatcgaggacaggcctccaggcggtggctgcaggaagggggtcaggaatgcgagtgtaaagactggttcctgagagccccacggcggaaattcatgaccgttagtgggctgcccaagaaacagtgcccatgtgaccatttcaagggaaacgtcaaaaagactcgtcaccaaaggcatcataggaaacctaataaacactcaagagcttgtcagcagtttctaaagcagtgtcagctacgatctttcgcactacctctttag

SEQ ID NO: 260026 - DNA, 360 bp, Artificial Sequence
  derived and/or modified sequence
atgaaggtgctgatcagcagcctgctgctgctgctgcccctgatgctgatgtccatggtgagcagcagcctgaaccctggggtggcccggggccaccgggaccggggccaggccagccgccgctggctgcaggagggcggccaggagtgtgagtgcaaggactggttcctgcgggcccccaggaggaagttcatgacagtgtctggcctgcccaagaagcagtgcccctgtgaccacttcaagggaaatgtgaagaagaccaggcaccagaggcaccacaggaagcccaacaagcacagccgggcctgccagcagttcctgaagcagtgccagctgcggagctttgccctgcccctgtag

SEQ ID NO: 260027 - DNA, 360 bp, Artificial Sequence
  derived and/or modified sequence
atgaaggtgctgatcagcagcctgctgctgctgctgcccctgatgctgatgagcatggtgtctagcagcctgaaccctggcgtagccagaggtcaccgagaccgaggccaggcgtcaagacgctggctccaggaaggcggtcaagagtgtgaatgcaaggattggttcctgcgcgcacctagaagaaagtttatgacagtctccggcctgccaaaaaaacaatgtccctgcgatcatttcaagggtaacgtgaagaagacccggcatcaacggcaccataggaaacccaacaaacatagcagggcctgtcagcagtttcttaagcagtgtcagttgcggtcgtttgccctccctctatag

SEQ ID NO: 260028 - DNA, 360 bp, Artificial Sequence
  derived and/or modified sequence
atgaaggtgctgatcagcagcctgctgctgctgctgcccctgatgctgatgagcatggtatcgagtagccttaaccccggcgttgctcgcggccaccgcgaccgcggccaggcctcccgtaggtggcttcaggaggggggtcaggagtgcgagtgtaaagactggtttctcagagccccccgacggaagttcatgacagtatcaggactgccaaagaagcagtgcccctgcgatcactttaaaggcaacgtgaaaaagacacgtcatcaacgccaccaccggaaacctaacaaacatagcagagcttgccagcagtttttaaagcagtgtcagctcagatcttttgcccttccactgtag

SEQ ID NO: 260029 - DNA, 360 bp, Artificial Sequence
  derived and/or modified sequence
atgaaggttcttatttcatctcttctgctattgctccccctcatgctgatgtccatggtgagctcaagcttgaaccctggagtggccaggggccaccgcgaccgcggacaggcttcccgcagatggctacaggagggcggacaggaatgcgagtgtaaggattggttcctcagggcaccacgcaggaagttcatgacagtgtccggtttgcctaaaaaacagtgcccctgcgatcattttaaaggtaacgtgaagaaaacccggcatcagcggcaccaccggaagccaaataaacactctcgggcttgccagcagtttctgaaacagtgccaactcaggtctttcgctctgcccctatag

SEQ ID NO: 260030 - DNA, 360 bp, Artificial Sequence
  derived and/or modified sequence
atgaaggttctgatcagctctcttctcctcctactgccgctgatgctcatgtcgatggtgtcctcttccctcaaccccggtgtagctcgaggacacagagatcgcggtcaggcctcacgtaggtggttgcaggaaggtggccaagagtgcgaatgcaaggattggtttttgcgcgcaccccgtagaaagtttatgacagtaagcggactccctaaaaaacagtgcccatgcgaccattttaaggggaatgtcaagaaaacccgccatcaaagacaccaccggaaacccaacaaacattcgcgggcttgtcagcagttcttgaagcagtgccaactgcgctcatttgcactgccactttag

SEQ ID NO: 260031 - DNA, 852 bp, Artificial Sequence
  derived and/or modified sequence
ctcgccctcaaatgggaacgctggcctgggactaaagcatagaccaccaggctgagtatcctgacctgagtcatccccagggatcaggagcctccagcagggaaccttccattatattcttcaagcaacttacagctgcaccgacagttgcgatgaaagttctaatctcttccctcctcctgttgctgccactaatgctgatgtccatggtctctagcagcctgaatccaggggtcgccagaggccacagggaccgaggccaggcttctaggagatggctccaggaaggcggccaagaatgtgagtgcaaagattggttcctgagagccccgagaagaaaattcatgacagtgtctgggctgccaaagaagcagtgcccctgtgatcatttcaagggcaatgtgaagaaaacaagacaccaaaggcaccacagaaagccaaacaagcattccagagcctgccagcaatttctcaaacaatgtcagctaagaagctttgctctgcctttgtaggagctctgagcgcccactcttccaattaaacattctcagccaagaagacagtgagcacacctaccagacactcttcttctcccacctcactctcccactgtacccacccctaaatcattccagtgctctcaaaaagcatgtttttcaagatcattttgtttgttgctctctctagtgtcttcttctctcgtcagtcttagcctgtgccctccccttacccaggcttaggcttaattacctgaaagattccaggaaactgtagcttcctagctagtgtcatttaaccttaaatgcaatcaggaaagtagcaaacagaagtcaataaatatttttaaatgtc

SEQ ID NO: 260032 - DNA, 1172 bp, Artificial Sequence
  derived and/or modified sequence
gattcccataaagcacatggtctaatctgttacgtaacagcaagacagcgtcacctcacctgttctcgccctcaaatgggaacgctggcctgggactaaagcatagaccaccaggctgagtatcctgacctgagtcatccccagggatcaggagcctccagcagggaaccttccattatattcttcaagcaacttacagctgcaccgacagttgcgatgaaagttctaatctcttccctcctcctgttgctgccactaatgctgatgtccatggtctctagcagcctgaatccaggggtcgccagaggccacagggaccgaggccaggcttctaggagatggctccaggaaggcggccaagaatgtgagtgcaaagattggttcctgagagccccgagaagaaaattcatgacagtgtctgggctgccaaagaagcagtgcccctgtgatcatttcaagggcaatgtgaagaaaacaagacaccaaaggcaccacagaaagccaaacaagcattccagagcctgccagcaatttctcaaacaatgtcagctaagaagctttgctctgcctttgtaggagctctgagcgcccactcttccaattaaacattctcagccaagaagacagtgagcacacctaccagacactcttcttctcccacctcactctcccactgtacccacccctaaatcattccagtgctctcaaaaagcatgtttttcaagatcattttgtttgttgctctctctagtgtcttcttctctcgtcagtcttagcctgtgccctccccttacccaggcttaggcttaattacctgaaagattccaggaaactgtagcttcctagctagtgtcatttaaccttaaatgcaatcaggaaagtagcaaacagaagtcaataaatatttttaaatgtcacagatcaaaattgtttccttcaaatggggtctgccaattcacaaccagatgacccattttaccctattcactgcagactgaatccagattctacacatacttatccccaccaagaccctcactctgtctccattggcctacttgttcatctttcactcattcgacaaatctttctgaggtaagagcgaggtgggacaaaaaaaaaaaagcataccaatgaaccagacacggtcttattaaagataatataggttt

SEQ ID NO: 260033 - DNA, 360 bp, Artificial Sequence
  derived and/or modified sequence
atgaaggtgctgatcagcagcctgctgctgctgctgcccctgatgctgatgagcatggtgagcagcagcctgaaccccggcgtggccagaggccacagagacagaggccaggccagcagaagatggctgcaggagggcggccaggagtgcgagtgcaaggactggttcctgagagcccccagaagaaagttcatgaccgtgagcggcctgcccaagaagcagtgcccctgcgaccacttcaagggcaacgtgaagaagaccagacaccagagacaccacagaaagcccaacaagcacagcagagcctgccagcagttcctgaagcagtgccagctgagaagcttcgccctgcccctgtag

SEQ ID NO: 260034 - protein, 236 aa, Artificial Sequence
  derived and/or modified sequence
MTAEFLSLLCLGLCLGYEDEKKNEKPPKPSLHAWPSSVVEAESNVTLKCQAHSQNVTFVLRKVNDSGYKQEQSSAENEAEFPFTDLKPKDAGRYFCAYKTTASHEWSESSEHLQLVVTDKHDELEAPSMKTDTRTIFVAIFSCISILLLFLSVFIIYRCSQHSSSSEESTKRTSHSKLPEQEAAEADLSNMERVSLSTADPQGVTYAELSTSALSEAASDTTQEPPGSHEYAALKV

SEQ ID NO: 260035 - DNA, 711 bp, Artificial Sequence
  derived and/or modified sequence
atgaccgccgagttcctgagcctgctgtgcctgggcctgtgcctgggctacgaggacgagaagaagaacgagaagccccccaagcccagcctgcacgcctggcccagcagcgtggtggaggccgagagcaacgtgaccctgaagtgccaggcccacagccagaacgtgaccttcgtgctgagaaaggtgaacgacagcggctacaagcaggagcagagcagcgccgagaacgaggccgagttccccttcaccgacctgaagcccaaggacgccggcagatacttctgcgcctacaagaccaccgccagccacgagtggagcgagagcagcgagcacctgcagctggtggtgaccgacaagcacgacgagctggaggcccccagcatgaagaccgacaccagaaccatcttcgtggccatcttcagctgcatcagcatcctgctgctgttcctgagcgtgttcatcatctacagatgcagccagcacagcagcagcagcgaggagagcaccaagagaaccagccacagcaagctgcccgagcaggaggccgccgaggccgacctgagcaacatggagagagtgagcctgagcaccgccgacccccagggcgtgacctacgccgagctgagcaccagcgccctgagcgaggccgccagcgacaccacccaggagccccccggcagccacgagtacgccgccctgaaggtgtag

SEQ ID NO: 260036 - DNA, 711 bp, Artificial Sequence
  derived and/or modified sequence
atgacagcagagttcctgagcttgctgtgtctggggctgtgtctcggatacgaggatgagaaaaaaaatgaaaagcctcccaaaccttcactgcatgcatggccctctagcgtcgtggaggccgagtccaacgtgaccctcaagtgtcaggctcactctcagaacgttacatttgtgctccggaaggtgaacgactctggctacaagcaggagcagtcctccgccgagaacgaggcagagtttcctttcacagatctgaaacccaaagacgcaggacggtacttctgcgcatataagaccacagcctcacacgaatggtccgagtctagcgagcacctccagttggtggtcaccgacaaacacgatgagttggaggcaccgagcatgaagactgatacacggacgatattcgttgctatcttttcttgcatttccatccttctgctgttcctgagtgtgttcattatctatcgctgtagtcagcacagctcgtcctccgaagagagcacaaaaaggacctcccatagcaaattgcccgaacaagaggctgcagaagcggatctgagcaatatggaacgcgtgtcacttagcacggccgacccccagggcgtaacctatgccgaactgagtacttccgccctgtcagaagccgcctccgacacaacacaagagcccccagggagccacgaatacgcagcacttaaggtatag

SEQ ID NO: 260037 - DNA, 711 bp, Artificial Sequence
  derived and/or modified sequence
atgacagctgagttcctgagcctgctgtgcctgggcctgtgcctgggctatgaagatgagaagaagaatgagaagccacccaagcccagcctgcacgcctggcccagctctgtggtggaggccgagagcaatgtgaccctgaagtgccaggcccacagccagaatgtgacctttgtgctgaggaaggtgaatgacagcggctacaagcaggagcagagcagcgcagaaaatgaagctgagttccccttcacagacctgaagcccaaggatgctggccgctacttctgtgcctacaagaccacagccagccatgagtggagcgagagcagcgagcacctgcagctggtggtgacagacaagcatgatgagctggaggcccccagcatgaagacagacaccaggaccatctttgtggccatcttcagctgcatcagcatcctgctgctcttcctgagcgtcttcatcatctaccgctgcagccagcacagcagcagcagcgaggagagcaccaagaggaccagccacagcaagctgcctgagcaggaggccgctgaggccgacctgagcaacatggagcgggtgtccctgagcacagctgacccccagggcgtgacctatgcagagctgagcaccagcgccctgtctgaggccgccagtgacaccacccaggagcccccaggcagccatgaatatgctgccctgaaggtgtag

SEQ ID NO: 260038 - DNA, 711 bp, Artificial Sequence
  derived and/or modified sequence
atgaccgccgagttcctgagcctgctgtgcctgggcctgtgcctgggatacgaagatgagaaaaaaaacgagaagccccccaagccttcattacacgcatggccttccagcgtggtggaggccgagtcaaacgtcactctgaagtgtcaggcacacagtcagaacgtcacgtttgttctgcggaaggtgaacgactctggatacaaacaagagcagagcagcgccgagaacgaggctgagtttcctttcacagatctcaagccaaaagatgctgggcggtacttctgcgcatacaaaacaaccgcatcacatgaatggtctgagtctagtgaacatctgcagcttgtggttacagataagcatgacgaacttgaggccccttctatgaaaacggacacaagaaccatctttgtggccatcttctcctgtattagtattctgctgctgtttttgagcgtcttcattatctatagatgcagtcagcactcttcttcctccgaagaaagtaccaagaggacatcccactcaaaactcccggaacaggaagccgctgaagcggacctgtccaacatggaaagagtcagcctgtctactgccgatccacagggcgttacatatgcagaactctccacatctgccctgagcgaggccgcttccgatacgacacaggagccacccggtagtcatgagtatgccgctctgaaggtgtag

SEQ ID NO: 260039 - DNA, 711 bp, Artificial Sequence
  derived and/or modified sequence
atgaccgctgaatttctgagtttattatgtttggggctttgcctgggttatgaagatgagaagaaaaacgagaagcccccaaaaccaagcttacacgcctggcctagcagcgtggtcgaagctgagtcgaacgtcaccctgaagtgccaggcccacagtcaaaatgtgacattcgtcctcagaaaagttaatgactccggatataagcaggaacagtcatctgctgagaatgaagcagaatttccattcaccgatctgaagcctaaggatgcaggtcgctacttctgcgcatataaaaccacggcatcccatgagtggagcgagtcaagtgaacatttgcaactggttgttaccgacaagcacgatgagctcgaggccccatcaatgaagacagacactaggaccattttcgttgcaatttttagttgcatcagtatcctactgctcttcctgtccgttttcattatctacagatgcagtcagcattcatctagtagcgaggaatcaaccaaaagaacctcccactctaaactgccagaacaggaagcggctgaagccgatctatcaaacatggagagagtgagtctctctacagcggatccgcagggcgtgacctacgccgaactgtccacgtcggccctgagcgaagcggcttccgacactacccaagagcccccaggaagtcacgagtacgcggcacttaaggtgtag

SEQ ID NO: 260040 - DNA, 1023 bp, Artificial Sequence
  derived and/or modified sequence
gtgagaaggaaactgcaagagtggggcagagaaccagagtgtcagagcaaaacctcctctatctgcacatcctggggacgaaccgggcagccggagagctgcggccggcccagtcccgctccgcctttgaagggtaaaacccaaggcggggccttggttctggcagaagggacgctatgaccgcagaattcctctccctgctttgcctcgggctgtgtctgggctacgaagatgagaaaaagaatgagaaaccgcccaagccctccctccacgcctggcccagctcggtggttgaagccgagagcaatgtgaccctgaagtgtcaggctcattcccagaatgtgacatttgtgctgcgcaaggtgaacgactctgggtacaagcaggaacagagctcggcagaaaacgaagctgaattccccttcacggacctgaagcctaaggatgctgggaggtacttttgtgcctacaagacaacagcctcccatgagtggtcagaaagcagtgaacacttgcagctggtggtcacagataaacacgatgaacttgaagctccctcaatgaaaacagacaccagaaccatctttgtcgccatcttcagctgcatctccatccttctcctcttcctctcagtcttcatcatctacagatgcagccagcacagttcatcatctgaggaatccaccaagagaaccagccattccaaacttccggagcaggaggctgccgaggcagatttatccaatatggaaagggtatctctctcgacggcagacccccaaggagtgacctatgctgagctaagcaccagcgccctgtctgaggcagcttcagacaccacccaggagcccccaggatctcatgaatatgcggcactgaaagtgtagcaagaagacagccctggccactaaaggaggggggatcgtgctggccaaggttatcggaaatctggagatgcagatactgtgtttccttgctcttcgtccatatcaataaaattaagtttctcgtcttaaaaagaaa

SEQ ID NO: 260041 - DNA, 828 bp, Artificial Sequence
  derived and/or modified sequence
atgagcaccatcggcagcttcgagggcttccaggccgtgagcctgaagcaggagggcgacgaccagcccagcgagaccgaccacctgagcatggaggaggaggaccccatgcccagacagatcagcagacagagcagcgtgaccgagagcaccctgtaccccaacccctaccaccagccctacatcagcagaaagtacttcgccaccagacccggcgccatcgagaccgccatggaggacctgaagggccacgtggccgagaccagcggcgagaccatccagggcttctggctgctgaccaagatcgaccactggaacaacgagaaggagagaatcctgctggtgaccgacaagaccctgctgatctgcaagtacgacttcatcatgctgagctgcgtgcagctgcagagaatccccctgagcgccgtgtacagaatctgcctgggcaagttcaccttccccggcatgagcctggacaagagacagggcgagggcctgagaatctactggggcagccccgaggagcagagcctgctgagcagatggaacccctggagcaccgaggtgccctacgccaccttcaccgagcaccccatgaagtacaccagcgagaagttcctggagatctgcaagctgagcggcttcatgagcaagctggtgcccgccatccagaacgcccacaagaacagcaccggcagcggcagaggcaagaagctgatggtgctgaccgagcccatcctgatcgagacctacaccggcctgatgagcttcatcggcaacagaaacaagctgggctacagcctggccagaggcagcatcggcttctag

SEQ ID NO: 260042 - DNA, 828 bp, Artificial Sequence
  derived and/or modified sequence
atgtcaactatcggctccttcgagggcttccaggcggtgtcattaaagcaggagggggacgaccagccctctgagaccgaccacctcagcatggaggaggaagaccctatgccgcgtcagatttcccgacagtcgtctgtaactgagtctactttataccctaatccttaccatcagccatatatatcccgcaaatattttgcaacccgtcctggcgccatagaaactgccatggaagacctgaagggccacgttgccgagacttccggagaaaccattcagggattttggcttctgactaagatcgatcactggaacaatgagaaagagcgtatcctgctggtgaccgacaagaccctactgatctgtaagtacgattttatcatgctttcctgcgtacaactgcagagaatccccctttcggccgtgtatagaatctgcttgggaaagttcaccttcccgggcatgagcttggacaaacgtcaaggtgaaggccttcggatatattgggggtcgccagaggagcagagtctgttgtcccggtggaacccatggtctactgaggtcccttacgctaccttcacagaacaccctatgaagtatacatcagagaaatttctcgaaatttgtaaactttctggcttcatgtccaagctcgtgccagcgattcagaacgcccacaagaattccaccggcagtggaagaggaaaaaagctcatggtgctgacagagccgatattgattgaaacatacaccggcttgatgtcctttattggaaatcgcaataaattgggctattctctggcccgggggtcgattgggttttag

SEQ ID NO: 260043 - DNA, 828 bp, Artificial Sequence
  derived and/or modified sequence
atgagcacaattgggtcattcgaggggttccaggcggtgtctcttaaacaggaaggggacgaccagccaagtgagactgatcacctcagcatggaagaggaggatccaatgccccgccaaatctcacggcagtcctcagtcactgagtctactctgtatcccaacccgtaccatcagccttatataagccgtaagtattttgccacacgacccggcgcgattgagactgctatggaggatctgaagggccatgtcgcagaaactagcggagagacgatccagggcttctggttgctgaccaagatcgaccactggaataacgaaaaagaacggatcttgctggtgacggataagacgttgcttatctgtaagtatgatttcataatgctgtcttgcgtgcagctgcaaagaatccctctttcagccgtttaccgaatctgcttgggtaaatttactttccctggcatgagcctggacaaaaggcagggtgagggtttgaggatttactggggaagcccggaagaacaaagtctgctgtcacgctggaatccctggagcacagaggttccttacgccacttttacagaacaccccatgaagtacacctctgagaagttcctggagatctgtaagcttagcggcttcatgagtaaactggtaccagccattcaaaacgcccataaaaactcaacgggaagcggaagaggcaagaaactgatggtgctgactgagcctatcctgattgaaacctacactggactaatgtctttcatcggcaacagaaacaaactcggctattcactcgccagggggtcgataggcttttag

SEQ ID NO: 260044 - DNA, 828 bp, Artificial Sequence
  derived and/or modified sequence
atgagcaccatcggcagctttgagggcttccaggccgtgtccctgaagcaggagggagatgaccagcccagcgagacagaccacctgtccatggaggaggaggaccccatgccccggcagatcagccggcagagctctgtgacagagagcaccctgtaccccaacccctaccaccagccctacatcagcaggaagtactttgccaccaggcctggggccatcgagacagccatggaggacctgaagggccacgtggccgagaccagcggggagaccatccagggcttctggctgctgaccaagattgaccactggaacaatgagaaggagcgcatcctgctggtgacagacaagaccctgctgatctgcaagtatgacttcatcatgctgagctgtgtgcagctgcagaggatccccctgtctgctgtgtaccgcatctgcctgggcaagttcaccttccctggcatgagcctggacaagaggcagggcgagggcctgcgcatctactggggcagccctgaggagcagagcctgctgagccgctggaacccctggagcacagaggtgccctatgccaccttcacagagcaccccatgaagtacaccagcgagaagttcctggagatctgcaagctgagcggcttcatgagcaagctggtgcctgccatccagaatgcccacaagaacagcactggaagtggccggggcaagaagctgatggtgctgacagagcccatcctgattgagacctacacaggcctgatgtccttcatcggcaacagaaacaagctgggctacagcctggcccggggcagcatcggcttctag

SEQ ID NO: 260045 - DNA, 828 bp, Artificial Sequence
  derived and/or modified sequence
atgagcaccatcggcagcttcgagggcttccaggccgtgagcctgaaacaggagggtgacgaccagccttcagagacagaccatttgtcgatggaggaggaagacccaatgcctcgccagatttccagacagtcctctgttactgagtccacactttacccaaacccctaccatcagccctacatcagcaggaagtattttgccacaaggccaggagccattgagaccgccatggaagatcttaagggtcacgtggcagagacctccggggaaaccattcagggcttttggctgctcaccaagattgaccattggaacaacgaaaaggagcggattctacttgtgactgacaagactctactaatttgcaagtatgatttcattatgctctcatgcgttcaactgcagcggatccctctctccgcagtgtatcgtatctgtcttgggaagtttacgtttcccgggatgtccctcgacaaaaggcagggcgagggtctgagaatctattggggttctccagaagaacagtcgctgctgtccagatggaatccgtggtccacagaagtgccctatgcaacgtttacggagcaccctatgaaatataccagcgagaaatttctggaaatatgcaaacttagcggatttatgtccaagctcgtgcctgctatacagaacgcccataagaattctacgggctcagggaggggcaagaaacttatggtgttaaccgagccaatcttgatagagacatatactggcctgatgtcctttatcggcaacaggaacaaattgggatatagccttgccaggggcagcatcgggttttag

SEQ ID NO: 260046 - DNA, 828 bp, Artificial Sequence
  derived and/or modified sequence
atgagcaccatcggcagcttcgagggcttccaggccgtgagcctgaagcaggaaggtgatgatcagccctcagaaaccgatcaccttagcatggaagaggaagacccaatgcctcgtcagatatctcggcagtcctccgtgaccgagtctactctgtaccccaatccctatcaccagccttatatttctagaaagtactttgctaccaggccaggtgccattgaaaccgcaatggaggacctgaaagggcacgttgctgaaaccagtggcgagaccatacaaggattttggctcctgactaagattgatcactggaataacgagaaagagcggatcctgctcgtaaccgataaaacactgctgatctgtaaatatgacttcatcatgctgtcctgtgtccaacttcagcgcatccccctcagcgccgtctataggatctgcctcggtaagtttacatttccaggaatgtccttggataaaaggcagggcgagggcctgcgcatctactggggctcacccgaggagcagagcctcttaagccgatggaacccttggtccactgaggtcccctatgctacttttactgaacatcctatgaaatatacctcagaaaagtttctcgagatctgtaagctgagcggcttcatgtcaaagctggttcccgctattcagaatgcccacaaaaacagtactggctcaggacggggcaagaaactcatggtgctgaccgaacctatcctcattgaaacgtacacaggcctcatgagtttcattggaaacaggaataagttgggctactcccttgcccgcggttctataggattctag

SEQ ID NO: 260047 - DNA, 828 bp, Artificial Sequence
  derived and/or modified sequence
atgtccacaatcggttcttttgagggattccaggctgtgtctcttaagcaagagggggacgatcagcccagcgagacagatcatctgagtatggaagaagaagatcctatgcccaggcagattagcaggcagtctagcgtgaccgagagcacgctgtacccaaatccatatcatcagccatacataagccgtaaatatttcgccacacggcctggtgcaattgaaactgctatggaagacctcaagggtcatgtagcagaaactagcggcgaaacaattcagggcttctggctgttaacaaagatcgaccactggaataacgaaaaggagagaattctgctagtgactgacaagactctgcttatctgtaagtatgatttcatcatgttatcatgtgtgcagctgcagcggatacccctatcagctgtctacagaatctgcctcgggaagttcaccttccctggaatgtccctggacaagagacagggcgagggactgaggatttattggggttctcccgaagagcagtctctgcttagcagatggaatccgtggtctacggaggtgccatatgctacatttacagagcacccgatgaagtataccagtgaaaagtttttagaaatctgcaagttgtctggtttcatgtccaaactggttcccgcaatccaaaacgcacataagaactctactggctccgggagggggaagaagttaatggtgttgaccgagcccatcctaatcgagacctacaccggcctcatgtctttcattggcaaccggaataaactcggatacagcttggcaaggggatccatcgggttttag

SEQ ID NO: 260048 - DNA, 828 bp, Artificial Sequence
  derived and/or modified sequence
atgagtaccataggcagctttgaagggttccaggcagtgagtcttaaacaagagggagacgaccagccttcagagacagaccatctcagcatggaagaagaggacccaatgccgaggcagatctccaggcaaagctcagtcaccgaatccacattatacccaaacccttatcaccaaccctatataagtaggaagtatttcgccacccggccaggagcaattgaaactgcaatggaggatctgaaaggacacgttgcagagaccagtggcgagaccatccaaggattttggctcctgaccaaaatcgatcattggaacaacgagaaggaaaggatcttactggtgaccgacaaaacactgttaatttgcaagtatgattttatcatgttgagctgcgtgcagctgcagaggatccctctgagcgcggtgtaccggatctgcctgggaaagtttacgttccccggaatgtctctggacaaaaggcaaggggaggggcttcgcatttattgggggtccccagaagaacagtccttgctgagcaggtggaatccatggtcaaccgaagtgccctacgcaacctttacagaacaccctatgaagtacacaagcgaaaagttcctcgaaatctgtaagctgtccggttttatgtctaaattagtgcccgcaatccagaatgcccataaaaacagcactggttccggaaggggcaagaagctgatggtcctgaccgagccgatactaatagaaacctacaccgggttaatgtcattcatcggtaatagaaacaagcttggatatagcctagctcggggatctattggcttctag

SEQ ID NO: 260049 - protein, 304 aa, Artificial Sequence
  derived and/or modified sequence
MNIVFSRDSQVRVMENTVANTEKYFGQFCSLLAAYTRKTARLRDKADQLVKQLIDFANSENPELRATMRGFAEDLAKVQDYRQAQVERLETKVVNPLKLYGAQIKQTRAEIKKFKHVQNHEIKQLEKLEKLRQKSPSDQQMIGQAETRVQRAAVDSSRTTLQLEETVDGFQRQKLKDLQKFFCDFVTIEMVFHAKAVEVYSSAFQTLEKYDLERDLLDFRAKMQGVYGHYDTRLLANTSPPPSVLQSLASQGTLQVQLSRANEDPEHPHANHGRFSLCEWVVKGQPAHCVCGQGGHLMLPGHSL

SEQ ID NO: 260050 - protein, 304 aa, Artificial Sequence
  derived and/or modified sequence
MNIVFSRDSQVRVMENTVANTEKYFGQFCSLLAAYTRKTARLRDKADQLVKQLIDFANSENPELRATMRGFAEDLAKVQDYRQAQVERLETKVVNPLKLYGAQIKQTRAEIKKFKHVQNHEIKQLEKLEKLRQKSPSDQQMISQAETRVQRAAVDSSRTTLQLEETVDGFQRQKLKDLQKFFCDFVTIEMVFHAKAVEVYSSAFQTLEKYDLERDLLDFRAKMQGVYGHYDTRLLANTSPPPSVLQSLASQGTLQVQLSRANEDPEHPHANHGRFSLCEWVVKGQPAHCVCGQGGHLMLPGHSL

SEQ ID NO: 260051 - DNA, 915 bp, Artificial Sequence
  derived and/or modified sequence
atgaacatcgtgttcagcagagacagccaggtgagagtgatggagaacaccgtggccaacaccgagaagtacttcggccagttctgcagcctgctggccgcctacaccagaaagaccgccagactgagagacaaggccgaccagctggtgaagcagctgatcgacttcgccaacagcgagaaccccgagctgagagccaccatgagaggcttcgccgaggacctggccaaggtgcaggactacagacaggcccaggtggagagactggagaccaaggtggtgaaccccctgaagctgtacggcgcccagatcaagcagaccagagccgagatcaagaagttcaagcacgtgcagaaccacgagatcaagcagctggagaagctggagaagctgagacagaagagccccagcgaccagcagatgatcggccaggccgagaccagagtgcagagagccgccgtggacagcagcagaaccaccctgcagctggaggagaccgtggacggcttccagagacagaagctgaaggacctgcagaagttcttctgcgacttcgtgaccatcgagatggtgttccacgccaaggccgtggaggtgtacagcagcgccttccagaccctggagaagtacgacctggagagagacctgctggacttcagagccaagatgcagggcgtgtacggccactacgacaccagactgctggccaacaccagccccccccccagcgtgctgcagagcctggccagccagggcaccctgcaggtgcagctgagcagagccaacgaggaccccgagcacccccacgccaaccacggcagattcagcctgtgcgagtgggtggtgaagggccagcccgcccactgcgtgtgcggccagggcggccacctgatgctgcccggccacagcctgtag

SEQ ID NO: 260052 - DNA, 915 bp, Artificial Sequence
  derived and/or modified sequence
atgaacatcgtgttcagcagagacagccaggtgagagtgatggagaacaccgtggccaacaccgagaagtacttcggccagttctgcagcctgctggccgcctacaccagaaagaccgccagactgagagacaaggccgaccagctggtgaagcagctgatcgacttcgccaacagcgagaaccccgagctgagagccaccatgagaggcttcgccgaggacctggccaaggtgcaggactacagacaggcccaggtggagagactggagaccaaggtggtgaaccccctgaagctgtacggcgcccagatcaagcagaccagagccgagatcaagaagttcaagcacgtgcagaaccacgagatcaagcagctggagaagctggagaagctgagacagaagagccccagcgaccagcagatgatcagccaggccgagaccagagtgcagagagccgccgtggacagcagcagaaccaccctgcagctggaggagaccgtggacggcttccagagacagaagctgaaggacctgcagaagttcttctgcgacttcgtgaccatcgagatggtgttccacgccaaggccgtggaggtgtacagcagcgccttccagaccctggagaagtacgacctggagagagacctgctggacttcagagccaagatgcagggcgtgtacggccactacgacaccagactgctggccaacaccagccccccccccagcgtgctgcagagcctggccagccagggcaccctgcaggtgcagctgagcagagccaacgaggaccccgagcacccccacgccaaccacggcagattcagcctgtgcgagtgggtggtgaagggccagcccgcccactgcgtgtgcggccagggcggccacctgatgctgcccggccacagcctgtag

SEQ ID NO: 260053 - DNA, 1897 bp, Artificial Sequence
  derived and/or modified sequence
gtgggcggccccatcgcctagcaaccgggtggcagcgtcccttgagcccaggccacacagctgcacccagccctgcccggctcctcccaggcctgcaggacccctggggccctgtccttattccccagcaccgggacagccaaagctctggtcacaatgaacatcgtcttctccagggacagccaggtgagggtgatggagaataccgtggccaacaccgagaagtactttgggcagttctgctcgctgctggccgcctacacgcgcaagacggcccggctgcgggacaaggcggaccagctggtcaagcagctcatcgactttgccaactccgagaaccccgagctgcgggccaccatgaggggcttcgctgaggacctggccaaagtgcaggattaccggcaggcccaggtcgagaggctggagaccaaggtggtcaaccccctgaagctctacggggcacagatcaagcagacacgggctgagatcaagaaattcaaacatgtccaaaatcatgagatcaaacaactggaaaaactggagaaactgaggcagaagtcaccctcggatcagcaaatgatcggccaggcagagaccagagtgcagagggccgctgtggactccagccgcaccaccctccagctggaggagactgtggatggcttccagaggcagaagctcaaggacctgcagaaatttttttgtgactttgtaactattgagatggttttccatgccaaagcggtggaggtgtattctagcgccttccagaccctggagaagtatgacctggagagggatctactggattttagagccaagatgcaaggagtttatgggcattatgacactcggctgcttgccaacaccagcccccctccatctgttcttcagtctctcgccagccagggaactctgcaggtccagctgagtagggcaaatgaagaccctgaacatcctcatgccaatcatggcaggtttagtctctgtgagtgggtggttaaggggcagccagcccactgtgtgtgtgggcagggtgggcatctcatgcttccaggacattctctctaacgacgtagggtaagtgcaatcccaagccgtttaaaataatcccagactgcctggaggctttgttcttattttctgattcttttttctttgtctttgttggattgtgttaattcaaagaccttgtcttcaagctctgaatttccttcttctacttgttcaattctgttgctgagactttccagagcattttgcatttctgtgagtgtatccaatgtttcctgaagttttgattgtttttctttatgctatctatttcttggtccgagcccactgctcccggcggtgtgaccttgggaaagtctcctagcctctctgtgccttagagtcctcgcctgcagagtggcttagaacagtaacctccgtgtagggctgtgctgagtatcagatgaacagatctatacgaagcacagaaaacccggcctgttgcgcaacaaacacttgagacttgttgctgccattatcattactgatgttgctgtcgttttattattattattatttagagtgctcagagcaccatatggagcccaggaaaagaaggggaggagagtgaggacaactccatggaggaggcccccgtggaggacctcagggcactggggcagggaccccataagagagaactgcccacaacagtcagaagaacttagctggccttggatcctcaggtgggctctgctgtgtgccctcaggcaagccacgtgtcctctgagcctcagtttcctcatctgtacaacagggccaatatcactcacttcacaggttgctctgggggatcgctgtgcctggcatatagtaggtgttcaataaatgccctgtgactctc

SEQ ID NO: 260054 - DNA, 1897 bp, Artificial Sequence
  derived and/or modified sequence
gtgggcggccccatcgcctagcaaccgggtggcagcgtcccttgagcccaggccacacagctgcacccagccctgcccggctcctcccaggcctgcaggacccctggggccctgtccttattccccagcaccgggacagccaaagctctggtcacaatgaacatcgtcttctccagggacagccaggtgagggtgatggagaataccgtggccaacaccgagaagtactttgggcagttctgctcgctgctggccgcctacacgcgcaagacggcccggctgcgggacaaggcggaccagctggtcaagcagctcatcgactttgccaactccgagaaccccgagctgcgggccaccatgaggggcttcgctgaggacctggccaaagtgcaggattaccggcaggcccaggtcgagaggctggagaccaaggtggtcaaccccctgaagctctacggggcacagatcaagcagacacgggctgagatcaagaaattcaaacatgtccaaaatcatgagatcaaacaactggaaaaactggagaaactgaggcagaagtcaccctcggatcagcaaatgatctcccaggcagagaccagagtgcagagggccgctgtggactccagccgcaccaccctccagctggaggagactgtggatggcttccagaggcagaagctcaaggacctgcagaaatttttttgtgactttgtaactattgagatggttttccatgccaaagcggtggaggtgtattctagcgccttccagaccctggagaagtatgacctggagagggatctactggattttagagccaagatgcaaggagtttatgggcattatgacactcggctgcttgccaacaccagcccccctccatctgttcttcagtctctcgccagccagggaactctgcaggtccagctgagtagggcaaatgaagaccctgaacatcctcatgccaatcatggcaggtttagtctctgtgagtgggtggttaaggggcagccagcccactgtgtgtgtgggcagggtgggcatctcatgcttccaggacattctctctaacgacgtagggtaagtgcaatcccaagccgtttaaaataatcccagactgcctggaggctttgttcttattttctgattcttttttctttgtctttgttggattgtgttaattcaaagaccttgtcttcaagctctgaatttccttcttctacttgttcaattctgttgctgagactttccagagcattttgcatttctgtgagtgtatccaatgtttcctgaagttttgattgtttttctttatgctatctatttcttggtccgagcccactgctcccggcggtgtgaccttgggaaagtctcctagcctctctgtgccttagagtcctcgcctgcagagtggcttagaacagtaacctccgtgtagggctgtgctgagtatcagatgaacagatctatacgaagcacagaaaacccggcctgttgcgcaacaaacacttgagacttgttgctgccattatcattactgatgttgctgtcgttttattattattattatttagagtgctcagagcaccatatggagcccaggaaaagaaggggaggagagtgaggacaactccatggaggaggcccccgtggaggacctcagggcactggggcagggaccccataagagagaactgcccacaacagtcagaagaacttagctggccttggatcctcaggtgggctctgctgtgtgccctcaggcaagccacgtgtcctctgagcctcagtttcctcatctgtacaacagggccaatatcactcacttcacaggttgctctgggggatcgctgtgcctggcatatagtaggtgttcaataaatgccctgtgactctc

SEQ ID NO: 260055 - DNA, 915 bp, Artificial Sequence
  derived and/or modified sequence
atgaacattgtctttagtcgagattcgcaggttagggtgatggaaaatacagtcgccaacactgagaaatacttcggacaattctgctcactgctggccgcctacacgagaaaaaccgcacggctccgcgataaggccgaccagttggtaaaacagctcatcgactttgcgaattcagaaaatccagagttgcgcgctaccatgaggggtttcgccgaagatctggcgaaagtccaggactacagacaagcccaggtggaaaggttggagactaaggttgtcaacccactaaagctatacggagcacagattaaacagacccgggccgagataaaaaagttcaaacacgtgcagaaccatgaaatcaaacagcttgagaagctcgaaaagcttcgccagaaaagtccaagcgaccagcagatgattggccaagccgaaacccgcgtccagagagccgctgtcgactctagtcgaaccactttacagctggaggaaactgtcgacggattccagcgtcaaaaactcaaggacctgcaaaagttcttctgtgactttgtaactatagagatggtatttcatgcgaaggccgtcgaagtctatagttccgcatttcagaccctcgagaaatacgacctggaacgagatctgttggattttagggctaagatgcagggagtgtatgggcattacgatacgagattgttggctaacaccagccctcctccctctgtattacagtccctggcctcccagggcaccttgcaggtccagctcagtcgggctaatgaagatcctgagcaccctcacgcgaaccatggccgcttcagtctatgcgaatgggtggtgaaggggcaaccggcacactgcgtatgtgggcaaggcggccatctgatgcttccaggccacagcctgtag

SEQ ID NO: 260056 - DNA, 915 bp, Artificial Sequence
  derived and/or modified sequence
atgaatattgttttctctcgggactctcaagtgcgcgtcatggaaaacactgtggccaacactgagaaatattttggacagttctgtagcttgctagcggcgtacacccggaagacagctcgccttcgagacaaggctgaccagttggtgaagcagttgatagactttgccaactccgaaaacccagagctgcgcgccactatgcgtggcttcgcagaagacctagccaaggtccaggattatagacaagcacaggtcgaacgtctggagacaaaggtggtgaatccacttaagctgtacggcgcccagatcaaacaaacacgggccgagatcaagaaattcaagcacgtgcagaaccatgaaatcaaacagcttgagaaactggaaaagctgcgccaaaaatcccccagcgatcagcagatgatttcacaggctgagacacgcgtgcagcgagccgctgtagactccagccgcacaacacttcagcttgaggagacggtcgatggtttccagcgccaaaagctgaaggatctacagaaattcttctgtgactttgtgacaatcgagatggtcttccacgccaaggccgtggaggtgtactcttcagcatttcagaccctggaaaagtacgatctcgagcgcgatctgctggacttcagggctaaaatgcagggtgtgtacggccactatgatacccggctattagcgaacacctcacccccccccagcgtgttacagtctctggcctcacagggcacactccaggttcaattgtccagagccaacgaagatcctgaacacccacacgctaatcatgggaggttcagtctctgtgagtgggttgtcaagggccagccagctcattgtgtttgcggacagggcggtcacttgatgttgcccggacacagtctctag

SEQ ID NO: 260057 - DNA, 915 bp, Artificial Sequence
  derived and/or modified sequence
atgaacatcgtgttcagccgggacagccaggtgcgggtgatggagaacacagtggccaacacagagaagtacttcggccagttctgcagcctgctggccgcctacaccaggaagacagcccggctgcgggacaaggctgaccagctggtgaagcagctgattgactttgccaacagcgagaaccctgagctgcgggccaccatgaggggctttgctgaggacctggccaaggtgcaggactaccggcaggcccaggtggagcggctggagaccaaggtggtgaaccccctgaagctgtatggagcccagatcaagcagaccagggctgagatcaagaagttcaagcacgtgcagaaccacgagatcaagcagctggagaagctggagaagctgcggcagaagagccccagcgaccagcagatgattggccaggccgagaccagggtgcagagagctgctgtggacagcagcaggaccaccctgcagctggaggagaccgtggatggcttccagaggcagaagctgaaggacctgcagaagttcttctgtgactttgtgaccatcgagatggtgttccacgccaaggctgtggaggtgtacagcagcgccttccagaccctggagaagtatgacctggagcgggacctgctggacttccgggccaagatgcagggcgtgtatggccactatgacacccggctgctggccaacaccagccccccaccttctgtgctgcagagcctggccagccagggcaccctgcaggtgcagctgagccgggccaatgaagatcctgagcacccccacgccaaccacggccgcttcagcctgtgtgagtgggtggtgaagggccagcctgcccactgtgtgtgtggccagggcggccacctgatgctgcccggccacagcctgtag

SEQ ID NO: 260058 - DNA, 915 bp, Artificial Sequence
  derived and/or modified sequence
atgaacatcgtgttcagccgggacagccaggtgcgggtgatggagaacacagtggccaacacagagaagtacttcggccagttctgcagcctgctggccgcctacaccaggaagacagcccggctgcgggacaaggctgaccagctggtgaagcagctgattgactttgccaacagcgagaaccctgagctgcgggccaccatgaggggctttgctgaggacctggccaaggtgcaggactaccggcaggcccaggtggagcggctggagaccaaggtggtgaaccccctgaagctgtatggagcccagatcaagcagaccagggctgagatcaagaagttcaagcacgtgcagaaccacgagatcaagcagctggagaagctggagaagctgcggcagaagagccccagcgaccagcagatgatcagccaggccgagaccagggtgcagagagctgctgtggacagcagcaggaccaccctgcagctggaggagaccgtggatggcttccagaggcagaagctgaaggacctgcagaagttcttctgtgactttgtgaccatcgagatggtgttccacgccaaggctgtggaggtgtacagcagcgccttccagaccctggagaagtatgacctggagcgggacctgctggacttccgggccaagatgcagggcgtgtatggccactatgacacccggctgctggccaacaccagccccccaccttctgtgctgcagagcctggccagccagggcaccctgcaggtgcagctgagccgggccaatgaagatcctgagcacccccacgccaaccacggccgcttcagcctgtgtgagtgggtggtgaagggccagcctgcccactgtgtgtgtggccagggcggccacctgatgctgcccggccacagcctgtag

SEQ ID NO: 260059 - DNA, 915 bp, Artificial Sequence
  derived and/or modified sequence
atgaacatcgtgttcagccgggacagccaggtgcgggtgatggagaatacggtggccaacactgaaaagtactttgggcaattctgttccttgctcgccgcttacacgcgaaagactgcgcgtctgagagacaaagcagaccaactcgtaaaacagcttatcgacttcgcaaattcggagaacccagaacttagggcgaccatgcgcgggttcgccgaggatctggcaaaagtgcaggattaccggcaggcccaggtggagaggctggagaccaaagtcgtcaatcctcttaagctgtacggcgcccaaatcaagcagactcgggcagaaatcaagaagtttaagcacgttcaaaatcacgagatcaagcagctggaaaagcttgagaaattgcggcagaagagtccatctgatcaacaaatgattggccaagccgaaacacgtgtacaacgcgcagccgtggactcaagccggacaacactgcagctggaggagaccgtagacggatttcaacgtcagaaactcaaggacctacaaaaattcttttgcgatttcgtgaccattgagatggtcttccatgccaaggcggtggaggtctattccagcgccttccagacacttgagaaatatgatcttgagcgagatctgctggatttccgcgccaagatgcaaggtgtatacggccactatgatacccgcctgcttgcgaatacctcaccccctccttctgtccttcagtctcttgcctctcagggcactctgcaggttcagctcagtcgagcaaacgaagatcccgaacaccctcatgcaaaccacggcagattctccctctgtgaatgggttgttaagggtcagccagcccactgcgtatgtggtcagggaggtcatctgatgttgccaggtcactctctgtag

SEQ ID NO: 260060 - DNA, 915 bp, Artificial Sequence
  derived and/or modified sequence
atgaacatcgtgttcagccgggacagccaggtgcgggtgatggagaataccgttgctaatactgagaagtatttcggacagttctgttcactcctcgcagcttataccagaaaaaccgctcgtcttagggataaagccgaccaacttgtcaaacagctcatcgactttgcgaatagcgaaaaccccgaactgcgtgccaccatgcgtggtttcgctgaggacctcgcgaaggtgcaagattaccgccaggcccaggtcgagcggctcgaaaccaaggtggtgaatccattgaagctctacggcgctcagatcaagcagactagagcagaaatcaagaagttcaagcatgtgcagaatcacgaaattaagcagcttgagaagttagagaaacttagacaaaagagtccatctgatcagcagatgatttcccaggccgaaactcgggtgcagcgtgccgctgtagacagctcaaggaccactttgcagcttgaagagacggttgacggcttccagcgtcagaaactgaaagatctccagaagttcttttgcgactttgtgaccatcgaaatggtgttccatgccaaggccgtggaggtatattcctcagcattccagaccttagagaagtacgatctcgaaagagacctcctcgacttccgtgctaagatgcagggagtgtatggtcactacgacacccggctgttggccaatacctctccaccaccatcagttctgcagtccctggcatcacaagggacactgcaggtgcagctgagcagggccaatgaggatccagaacaccctcatgccaaccatggtagattctcactttgtgagtgggtagtaaagggacaacctgcccattgcgtatgtggacagggagggcatctcatgttaccaggccattccctgtag

SEQ ID NO: 260061 - DNA, 915 bp, Artificial Sequence
  derived and/or modified sequence
atgaacattgtgttcagtagggattcacaggtgcgcgtgatggaaaataccgttgctaacacagagaagtatttcgggcagttctgtagcttgctggctgcctatacacggaaaactgcaagactacgcgacaaggccgatcagctggtcaagcaactgatcgatttcgcaaattcagagaatccggagttgcgtgcgaccatgcggggtttcgccgaggatctggccaaagtgcaagattaccggcaagcccaagtggagcgcttggaaactaaagtggtcaacccccttaagctgtacggcgctcagatcaaacagaccagagctgagatcaaaaagtttaaacacgtccagaatcatgagattaaacagttggagaagctagaaaaattgaggcagaagtctccatctgaccagcagatgattgggcaggcagagacacgggtgcagagagcagcggtggattcatcacgtacaaccttgcaactggaggaaaccgtggatggtttccagcggcagaagttaaaggatctgcaaaagttcttctgcgatttcgtgaccatcgagatggtgttccacgcaaaagctgtggaggtctacagcagtgcattccagacgctggaaaagtacgaccttgaacgagacctccttgattttcgcgcaaaaatgcaaggcgtgtatggccattatgataccagactgcttgccaacacaagccctcctccaagtgtgctgcagtcactggcctcacagggcaccttacaggtccagctgtccagggccaacgaggaccccgagcatccccacgcgaatcacggacggttttccctttgtgaatgggttgtgaagggccagccagctcactgcgtctgcggacagggcggtcacctgatgttgcccggtcatagcctgtag

SEQ ID NO: 260062 - DNA, 915 bp, Artificial Sequence
  derived and/or modified sequence
atgaacatagtattctcacgcgattcacaagtgcgagtcatggagaacacagtggccaataccgagaaatacttcgggcaattttgctctctattggccgcatacacccgaaaaaccgctaggctcagagataaggccgaccagctggtaaagcagctgatcgatttcgctaactctgaaaatccggagctgcgcgcaacgatgcgaggcttcgccgaagatcttgccaaagtgcaggactatcgacaggcgcaagtggagcgcctggaaaccaaggtcgtaaatccgctaaaactgtatggcgctcaaataaagcagacgcgagccgaaatcaagaagtttaagcatgtgcagaaccacgaaatcaagcagttggagaagctcgaaaaactgaggcagaaatccccctctgatcagcagatgattagtcaggctgaaacccgagtccagcgtgcagccgtggacagcagcagaaccactctacaacttgaagagaccgttgacggctttcagcggcaaaaattgaaagaccttcagaaatttttctgcgatttcgttacaattgaaatggtattccacgccaaggcggtggaggtgtacagtagcgctttccagacccttgaaaagtacgacctcgaacgggatctcctggactttagggcaaaaatgcaaggagtctatggccattatgacactagactactggccaacacctctcccccaccctccgtcctgcagtctttagcttcgcagggaactctgcaggtccagttgagtcgcgcaaatgaagatcctgagcacccccatgccaaccacggtcggtttagcctttgcgagtgggttgtgaagggccagcccgcacactgcgtttgcggccaggggggacatttaatgctccctggacacagcctttag

SEQ ID NO: 260063 - protein, 293 aa, Artificial Sequence
  derived and/or modified sequence
MDTTRYSKWGGSSEEVPGGPWGRWVHWSRRPLFLALAVLVTTVLWAVILSILLSKASTERAALLDGHDLLRTNASKQTAALGALKEEVGDCHSCCSGTQAQLQTTRAELGEAQAKLMEQESALRELRERVTQGLAEAGRGREDVRTELFRALEAVRLQNNSCEPCPTSWLSFEGSCYFFSVPKTTWAAAQDHCADASAHLVIVGGLDEQGFLTRNTRGRGYWLGLRAVRHLGKVQGYQWVDGVSLSFSHWNQGEPNDAWGRENCVMMLHTGLWNDAPCDSEKDGWICEKRHNC

SEQ ID NO: 260064 - DNA, 1359 bp, Artificial Sequence
  derived and/or modified sequence
agtgcgtaggtccagtgagaacaggcgtgaaatttatatctctgcccaggactgggtgcctgcatcgccatggacaccaccaggtacagcaagtggggcggcagctccgaggaggtccccggagggccctggggacgctgggtgcactggagcaggagacccctcttcttggccctggctgtcctggtcaccacagtcctttgggctgtgattctgagtatcctattgtccaaggcctccacggagcgcgcggcgctgcttgacggccacgacctgctgaggacaaacgcctcgaagcagacggcggcgctgggtgccctgaaggaggaggtcggagactgccacagctgctgctcggggacgcaggcgcagctgcagaccacgcgcgcggagcttggggaggcgcaggcgaagctgatggagcaggagagcgccctgcgggaactgcgtgagcgcgtgacccagggcttggctgaagccggcaggggccgtgaggacgtccgcactgagctgttccgggcgctggaggccgtgaggctccagaacaactcctgcgagccgtgccccacgtcgtggctgtccttcgagggctcctgctactttttctctgtgccaaagacgacgtgggcggcggcgcaggatcactgcgcagatgccagcgcgcacctggtgatcgttgggggcctggatgagcagggcttcctcactcggaacacgcgtggccgtggttactggctgggcctgagggctgtgcgccatctgggcaaggttcagggctaccagtgggtggacggagtctctctcagcttcagccactggaaccagggagagcccaatgacgcttgggggcgcgagaactgtgtcatgatgctgcacacggggctgtggaacgacgcaccgtgtgacagcgagaaggacggctggatctgtgagaaaaggcacaactgctgaccccgcccagtgccctggagccgcgcccattgcagcatgtcgtatcctgggggctgctcacctccctggctcctggagctgattgccaaagagttttttcttcctcatccaccgctgctgagtctcagaaacacttggcccaacatagccctgtccagcccagtgcctgggctctgggacctccatgccgacctcatcctaactccactcacgcagacccaacctaacctccactagctccaaaatccctgctcctgcgtccccgtgatatgcctccacttctctccctaaccaaggttaggtgactgaggactggagctgtttggttttctcgcattttccaccaaactggaagctgtttttgcagcctgaggaagcatcaataaatatttgagaaatgaatccagg

SEQ ID NO: 260065 - DNA, 1176 bp, Artificial Sequence
  derived and/or modified sequence
agtgcgtaggtccagtgagaacaggcgtgaaatttatatctctgcccaggactgggtgcctgcatcgccatggacaccaccaggtacagcaagtggggcggcagctccgaggaggtccccggagggccctggggacgctgggtgcactggagcaggagacccctcttcttggccctggctgtcctggtcaccacagtcctttgggctgtgattctgagtatcctattgtccaaggcctccacggagcgcgcggcgctgcttgacggccacgacctgctgaggacaaacgcctcgaagcagacggcggcgctgggtgccctgaaggaggaggtcggagactgccacagctgctgctcggggacgcaggcgcagctgcagaccacgcgcgcggagcttggggaggcgcaggcgaagctgatggagcaggagagcgccctgcgggaactgcgtgagcgcgtgacccagggcttggctgaagccggcaggggccgtgaggacgtccgcactgagctgttccgggcgctggaggccgtgaggctccagaacaactcctgcgagccgtgccccacgtcgtggctgtccttcgagggctcctgctactttttctctgtgccaaagacgacgtgggcggcggcgcaggatcactgcgcagatgccagcgcgcacctggtgatcgttgggggcctggatgagcagggcttcctcactcggaacacgcgtggccgtggttactggctgggcctgagggctgtgcgccatctgggcaaggttcagggctaccagtgggtggacggagtctctctcagcttcagccactggaaccagggagagcccaatgacgcttgggggcgcgagaactgtgtcatgatgctgcacacggggctgtggaacgacgcaccgtgtgacagcgagaaggacggctggatctgtgagaaagcacaactgctgaccccgcccagtgccctggagccgcgcccattgcagcatgtcgtatcctgggggctgctcacctccctggctcctggagctgattgccaaagagttttttcttcctcatccaccgctgctgagtctcagaaacacttggcccaacatagccctgtccagcccagtgcctgggctctgggacctccatgccgacctcatcctaactccactcacgcagacccaacctaa

SEQ ID NO: 260066 - DNA, 882 bp, Artificial Sequence
  derived and/or modified sequence
atggacaccaccagatacagcaagtggggcggcagcagcgaggaggtgcccggcggcccctggggcagatgggtgcactggagcagaagacccctgttcctggccctggccgtgctggtgaccaccgtgctgtgggccgtgatcctgagcatcctgctgagcaaggccagcaccgagagagccgccctgctggacggccacgacctgctgagaaccaacgccagcaagcagaccgccgccctgggcgccctgaaggaggaggtgggcgactgccacagctgctgcagcggcacccaggcccagctgcagaccaccagagccgagctgggcgaggcccaggccaagctgatggagcaggagagcgccctgagagagctgagagagagagtgacccagggcctggccgaggccggcagaggcagagaggacgtgagaaccgagctgttcagagccctggaggccgtgagactgcagaacaacagctgcgagccctgccccaccagctggctgagcttcgagggcagctgctacttcttcagcgtgcccaagaccacctgggccgccgcccaggaccactgcgccgacgccagcgcccacctggtgatcgtgggcggcctggacgagcagggcttcctgaccagaaacaccagaggcagaggctactggctgggcctgagagccgtgagacacctgggcaaggtgcagggctaccagtgggtggacggcgtgagcctgagcttcagccactggaaccagggcgagcccaacgacgcctggggcagagagaactgcgtgatgatgctgcacaccggcctgtggaacgacgccccctgcgacagcgagaaggacggctggatctgcgagaagagacacaactgctag

SEQ ID NO: 260067 - DNA, 882 bp, Artificial Sequence
  derived and/or modified sequence
atggatactacacggtactctaagtggggtggttcaagtgaggaggttccgggcggtccttggggacgttgggtacactggagtcgccgccccctttttctggccttggcagtcttagtgaccacagtgctttgggctgtcatcttgtcgatccttttatcaaaagctagcactgagcgagccgcgttactggatggtcatgacttactccgaaccaacgccagtaagcagactgccgcccttggcgccctgaaggaggaggtaggtgactgccattcttgctgctcaggaacacaggcacaattgcagacaacccgcgctgaactgggggaggcacaagccaagcttatggagcaggagagcgctctgagggagctgcgggaaagggtgactcaagggctcgccgaggccggcagaggtagggaggacgtcagaactgaactcttccgcgcacttgaggcagtgagattgcagaacaactcgtgtgagccttgtccaacttcctggctgtccttcgaagggagctgttatttctttagtgttccaaaaaccacatgggccgccgcacaggaccattgtgccgacgctagcgcccatttggtgattgttggaggactagatgagcagggatttctgaccagaaataccagaggtagaggatattggctggggctccgagccgtccggcacctgggaaaggtgcaaggatatcagtgggttgacggcgttagtcttagcttctctcattggaatcagggcgagccaaatgacgcctggggcagggagaactgtgtgatgatgttgcacactggactttggaacgatgcgccctgtgacagtgaaaaggacgggtggatttgcgagaagcgacacaactgctag

SEQ ID NO: 260068 - DNA, 882 bp, Artificial Sequence
  derived and/or modified sequence
atggacaccacccgctacagcaagtggggcggcagcagcgaggaggtgcctgggggcccctggggccgctgggtgcactggagcagaagacccctcttcctggccctggccgtgctggtgaccaccgtgctgtgggccgtcatcctgagcatcctgctgagcaaggccagcacagaaagagctgccctgctggatggccatgacctgctgcggaccaatgccagcaagcagacagctgccctgggcgccctgaaggaggaggtgggggactgccacagctgctgcagcggcacccaggcccagctgcagaccaccagggctgagctgggggaggcccaggccaagctgatggagcaggagagcgccctgcgggagctgcgggagcgggtgacccagggcctggccgaggccggccggggccgggaggatgtgaggacagagctgttccgggccctggaggccgtgcggctgcagaacaacagctgtgagccctgccccacctcctggctgagctttgagggcagctgctacttcttctctgtgcccaagaccacctgggccgccgcccaggaccactgtgctgatgccagcgcccacctggtgattgtgggcggcctggatgagcagggcttcctgaccaggaacacccggggccggggctactggctgggcctgcgggctgtgcgccacctgggcaaggtgcagggctaccagtgggtggatggagtgtccctgtccttcagccactggaaccagggcgagcccaatgatgcctggggccgggagaactgtgtgatgatgctgcacacaggcctgtggaatgatgccccctgtgacagcgagaaggatggctggatctgtgagaagaggcacaactgctag

SEQ ID NO: 260069 - DNA, 882 bp, Artificial Sequence
  derived and/or modified sequence
atggacaccacccggtacagcaagtggggcggcagcagcgaggaggtgcccggtggcccttggggcagatgggtgcactggagccgaaggcccctctttctggcattggcagttctagtgacaactgtgttgtgggccgtgatcctttctatactgctgtccaaagcctcaaccgagagagccgcccttctggacggccatgacctgctgagaacaaacgcttcaaaacaaactgcggccttaggagccttaaaagaggaggtgggggattgccatagctgctgcagcggtacccaggcccagctgcagacgaccagagccgaacttggggaggcacaggctaagcttatggaacaggagtcagccttaagagaactgagggagcgggtgactcaaggcctggctgaggctggaaggggccgagaggatgtgcggacagaactgttccgggcactcgaagccgtcagactccagaacaattcttgcgagccttgtcctacctcttggctcagctttgaaggcagctgctatttcttctctgtgcccaagaccacatgggcggcggcccaggaccactgcgctgacgcctccgcacacctggtcatcgtgggcggcctggacgagcagggtttcctgacccgaaatacccgcgggagggggtactggcttggcttgagggccgttcgccatttgggcaaggtccaaggttatcaatgggtggatggtgtcagtctcagcttttcacattggaatcagggtgagccaaacgatgcgtggggcagagagaactgcgtgatgatgctccacacgggtttgtggaacgatgccccttgtgactctgagaaggacggctggatttgtgagaagcgccacaactgttag

SEQ ID NO: 260070 - DNA, 882 bp, Artificial Sequence
  derived and/or modified sequence
atggacactacccgttattcaaaatgggggggatcatcagaggaggtccctggtgggccttggggccgttgggtccattggtcacgtaggcctttatttttggccttagctgtactagtaaccactgtattatgggccgtcatcctcagcatcctgctatccaaagcgagtacggaacgagctgccctgctggacggacacgacttgttgagaaccaacgcctcaaaacagacagcggctctgggggcacttaaagaagaggtgggcgattgtcattcatgctgctcgggcacacaggcacagttgcagaccactcgggctgaattgggtgaggcacaggcaaaactcatggaacaggaaagcgccttgagagagcttagagagcgggtcactcaggggttggccgaagccggacgcggaagagaggatgttcggacagagctgttcagagcattagaagctgttcgattgcagaacaactcctgcgagccctgccctacatcctggcttagtttcgaaggaagctgctatttctttagcgttcctaaaaccacttgggctgcagcccaagaccactgcgctgacgcgtcggcacatctcgtgattgttggaggtctggatgaacagggctttctaaccagaaacactcggggaagaggttactggctgggtcttcgcgcagtccgccacctgggtaaggtgcagggttaccagtgggtggatggcgtgagtttgagcttcagtcactggaatcaaggcgagccaaatgacgcttggggaagggagaattgtgttatgatgctgcacacgggtctgtggaatgatgcaccgtgtgatagcgaaaaagatggctggatctgcgagaagcgccacaattgctag

SEQ ID NO: 260071 - DNA, 711 bp, Artificial Sequence
  derived and/or modified sequence
atgcccggcagccccgtgaccagcggctactacggcgtgagaagaagcttcctgagcgacagcgacttccacaacagcaagcagttcagcaacgacgtgtacaccagcagcgtgggcaagcccttcccctgcgagagcagcgccggccagagccacgccgccctgctggagccctacttcccccaggagccctacggcgactacagaccccccgccctgacccccaacgccggcagcctgttcagcgccagccccctgccccccctgctgcccccccccttccccggcgaccccgcccacttcctgttcagagacagctgggagcagaccctgcccgacggcctgagccagcccgaccccgtgagcgccgacgccctgctgaccctgccccccagcaccagctgcctgagccagctggagagcggcagcatcgcccagcacagaggcagcagctggggcagcagcctggccggcgcccagagctacagcctgcacgccctggaggacctgcaccacacccccggctaccccaccccccccccctaccccttcacccccttcatgaccgtgagcaacgacctgccccccaaggtgggccccctgagccccgacgaggaggccgacaccggcagcctgcacgaccccagcccctgggtgaaggaggacggcagcatcgcctggggcagctacgagtgcagaagagcctactag

SEQ ID NO: 260072 - DNA, 711 bp, Artificial Sequence
  derived and/or modified sequence
atgcccggtagccctgtgactagcggctattacggggttcgacgctcattcttgtctgattcggacttccataactccaaacagttttcaaatgacgtgtatactagcagtgtggggaaaccatttccatgtgagagctccgcgggccaaagtcacgctgccctgttggagccatatttccctcaggagccatatggggactaccggcccccggccctgaccccaaacgccggatcactcttctccgcctcaccacttcctcctcttctgccccctccattccccggcgaccctgcacattttctgtttcgtgattcctgggagcaaacccttccagacgggctgtcacagccggaccccgtgagtgccgatgcgctgttaactctgcctcctagtacttcctgcctgtcacagctcgaatccggcagcatcgctcagcacagggggagcagctggggtagctcactggccggtgcacaatcctatagcctccacgctttggaagacctgcatcacactcccggctaccccacacctccgccttacccttttacgccttttatgacggttagcaatgatctcccccccaaggttggtcccttgtcccctgacgaggaagctgacactggatcattgcatgatcctagcccctgggtaaaggaggatgggagcattgcttggggttcttacgaatgtaggagagcgtactag

SEQ ID NO: 260073 - DNA, 711 bp, Artificial Sequence
  derived and/or modified sequence
atgcctggcagccctgtgaccagcggctactatggagtgcggcgctccttcctgagtgacagcgacttccacaacagcaagcagttcagcaatgatgtgtacaccagctctgtgggcaagcccttcccctgtgagagcagcgctggccagagccatgctgccctgctggagccctacttcccccaggagccctatggagactaccggcccccagccctgaccccaaatgccggcagcctcttcagcgccagccccctgccccccctgctgcccccacccttccctggggaccctgcccacttcctgttccgggacagctgggagcagaccctgcctgatggcctgagccagcctgaccctgtgtctgcagatgccctgctgaccctgccccccagcaccagctgcctgagccagctggagagcggcagcatcgcccagcaccggggcagctcctggggcagcagcctggccggggcccagagctacagcctgcacgccctggaggacctgcaccacaccccaggctaccccaccccaccaccctaccccttcacccccttcatgacagtgtccaatgacctgccccccaaggtgggccccctgagcccagatgaggaggccgacaccggcagcctgcatgaccccagcccctgggtgaaggaggatggcagcatcgcctggggcagctatgaatgtagaagagcctactag

SEQ ID NO: 260074 - DNA, 711 bp, Artificial Sequence
  derived and/or modified sequence
atgcccggcagccccgtgaccagcggctactacggcgtgcggcggagcttcttgagcgactccgacttccacaactcaaaacagttctccaacgacgtttataccagctctgtgggtaagccgtttccttgtgagagttcagctggccagtctcacgccgccttgctagagccttatttcccacaggagccgtacggggattataggcctcctgccttgacacccaacgcaggcagtcttttctcagcctcccctctgcctcctcttctaccccccccttttccaggcgatcccgctcatttcttatttcgcgatagttgggagcagactctgcccgacggcctgagtcaacccgaccctgtatccgcagacgccctgttaaccctcccgcctagcacttcttgcctaagtcagctcgagtccggctctatcgcccagcatcggggctcgtcttgggggtcttccttagcaggggcacagtcctactcattacacgctcttgaagacctccatcacaccccaggctacccgacccctccaccctatcctttcacaccgtttatgacagtgtccaatgatctgcctccgaaagtcggcccccttagtccggacgaggaggccgacacaggctcactgcacgatcccagcccctgggtcaaggaagatggcagcattgcctggggaagttacgagtgccgaagggcctactag

SEQ ID NO: 260075 - DNA, 711 bp, Artificial Sequence
  derived and/or modified sequence
atgcctgggagccctgtgactagtgggtattacggcgttaggcgtagcttcctgagtgactcagactttcacaacagtaagcagttcagtaatgatgtgtatacaagctctgtaggcaagccttttccctgcgagagttccgccggacagagtcacgctgccctgctggagccctattttccacaagagccctatggggactacagacctccagcattgactccgaatgccggatcactgttctccgcttcccctctcccccctttactccctccaccctttccaggagatcccgcacacttccttttcagagacagctgggaacaaacactgccagacgggctgtctcagccggaccctgtctccgcggacgcacttctaactctgccaccaagcaccagttgtctctctcagttggagtccgggagcatcgcccaacaccggggttcctcttgggggagctctctggccggtgcccagagctattcactgcacgcgttagaggacctgcatcacacccccggataccctacaccgcctccatacccttttactccatttatgaccgtgagtaatgacctgccgcctaaagtggggcctctctcccctgacgaagaggcagataccggaagcctccatgacccctccccatgggtaaaagaggatggcagcatcgcatgggggtcttacgagtgtcgccgagcatactag

SEQ ID NO: 260076 - protein, 1135 aa, Artificial Sequence
  derived and/or modified sequence
MVDLESEVPPLPPRYRFRDLLLGDQGWQNDDRVQVEFYMNENTFKERLKLFFIKNQRSSLRIRLFNFSLKLLSCLLYIIRVLLENPSQGNEWSHIFWVNRSLPLWGLQVSVALISLFETILLGYLSYKGNIWEQILRIPFILEIINAVPFIISIFWPSLRNLFVPVFLNCWLAKHALENMINDLHRAIQRTQSAMFNQVLILISTLLCLIFTCICGIQHLERIGKKLNLFDSLYFCIVTFSTVGFGDVTPETWSSKLFVVAMICVALVVLPIQFEQLAYLWMERQKSGGNYSRHRAQTEKHVVLCVSSLKIDLLMDFLNEFYAHPRLQDYYVVILCPTEMDVQVRRVLQIPMWSQRVIYLQGSALKDQDLLRAKMDDAEACFILSSRCEVDRTSSDHQTILRAWAVKDFAPNCPLYVQILKPENKFHIKFADHVVCEEEFKYAMLALNCICPATSTLITLLVHTSRGQEGQQSPEQWQKMYGRCSGNEVYHIVLEESTFFAEYEGKSFTYASFHAHKKFGVCLIGVRREDNKNILLNPGPRYIMNSTDICFYINITKEENSAFKNQDQQRKSNVSRSFYHGPSRLPVHSIIASMGTVAIDLQDTSCRSASGPTLSLPTEGSKEIRRPSIAPVLEVADTSSIQTCDLLSDQSEDETTPDEEMSSNLEYAKGYPPYSPYIGSSPTFCHLLHEKVPFCCLRLDKSCQHNYYEDAKAYGFKNKLIIVAAETAGNGLYNFIVPLRAYYRPKKELNPIVLLLDNPPDMHFLDAICWFPMVYYMVGSIDNLDDLLRCGVTFAANMVVVDKESTMSAEEDYMADAKTIVNVQTLFRLFSSLSIITELTHPANMRFMQFRAKDCYSLALSKLEKKERERGSNLAFMFRLPFAAGRVFSISMLDTLLYQSFVKDYMISITRLLLGLDTTPGSGFLCSMKITADDLWIRTYARLYQKLCSSTGDVPIGIYRTESQKLTTSESQISISVEEWEDTKDSKEQGHHRSNHRNSTSSDQSDHPLLRRKSMQWARRLSRKGPKHSGKTAEKITQQRLNLYRRSERQELAELVKNRMKHLGLSTVGYDEMNDHQSTLSYILINPSPDTRIELNDVVYLIRPDPLAYLPNSEPSRRNSICNVTGQDSREETQL

SEQ ID NO: 260077 - DNA, 3408 bp, Artificial Sequence
  derived and/or modified sequence
atggtggacctggaaagcgaggttccccctctgccacctaggtaccggtttcgagacctccttttgggggaccagggatggcagaacgacgaccgcgttcaggtggagttctacatgaacgaaaatacttttaaagagcggctgaaattgttcttcatcaagaaccaacgcagtagcctccggatcaggctattcaacttcagtctaaaactcctcagctgtctgctctacataatcagggttctgctggagaatccctcccagggcaacgagtggtcccatattttttgggttaaccgctctctacctctgtggggtcttcaggtcagtgtggcgctgatatctctattcgagacgatactcctcggatatctctcatacaaggggaacatctgggaacagattctgcggatcccattcatcctggaaattatcaatgccgtgcctttcattataagtattttttggcccagtctccggaatctcttcgtgccagtgttcctcaactgttggctggcaaagcatgctttagagaatatgatcaatgatctgcatcgggccatccagcgaacgcagtctgctatgtttaaccaggtgctaatactgatctcaaccctgctgtgcctgattttcacctgtatatgtgggatccagcacctggaaagaattggcaagaagctgaatctttttgactctctctatttttgcattgtgaccttctctactgtgggcttcggtgatgtgacccctgaaacctggtcgtcaaaattattcgttgtggccatgatctgcgtagctttggtagtgttgcctattcaattcgagcagctggcctatctgtggatggagagacaaaagtccggaggtaactattctagacacagggcgcagaccgagaaacacgtcgtactgtgtgtatccagcttaaagatagacctactcatggactttctgaatgaattctacgcacaccctaggctccaggactactacgtcgtaatcctgtgtcctacggaaatggacgttcaggtacggagagtcctgcagattccaatgtggtctcagagagtgatatatctccagggatccgcactgaaggaccaagatctgctgcgagcgaaaatggatgatgccgaggcttgttttatcttaagttccagatgcgaagtagatagaactagcagcgaccaccagacgattttaagggcctgggccgtgaaggattttgccccaaactgcccgctgtatgttcagatcctgaaaccagagaacaagttccacataaagttcgctgaccacgttgtgtgcgaagaggagttcaagtacgccatgctcgctctgaattgtatctgtccggccacctccactctgatcacacttctggtccatacatcccgcggccaggaggggcagcagtcccccgagcagtggcagaaaatgtatggcaggtgttctggaaatgaggtttatcacatcgtcttggaggagagtaccttcttcgctgaatatgagggcaaatcattcacttatgcgtcttttcatgcccataagaaatttggcgtttgtctgatcggagtccggcgggaggataacaagaacatcctcttgaacccgggccccagatatatcatgaactccaccgacatatgtttttacatcaacatcacaaaagaagaaaacagcgcttttaagaatcaggaccagcagcgaaagtccaatgttagcagatcgttctaccacgggccatctcggcttcctgttcattcaatcatcgcctccatgggtacagttgcgatcgatctccaggacacatcttgtagaagcgcaagtggccctacactcagccttcctaccgaaggatcaaaagagatcagaagaccctccatcgcgccagttcttgaggtcgctgatacttcaagcatccagacatgcgaccttctctcggatcagagcgaagacgaaacaacacccgacgaggagatgagctctaacctagaatacgcaaaggggtaccccccgtattctccgtatataggtagcagccctactttctgccacctgcttcacgagaaggttcctttttgttgcctccgtctggacaaaagctgtcagcacaattactacgaagatgcaaaagcctatggcttcaaaaacaaacttattatcgttgccgctgaaaccgcaggtaatggtctttacaattttatcgtgcctcttagggcctactaccggccaaaaaaagagcttaatccaatagtgctcctattggataaccccccagatatgcacttcctcgatgccatatgttggttcccgatggtgtactatatggtcggtagtattgacaacctagatgacttattacgatgtggcgtgaccttcgcagcgaacatggttgtggtcgataaagaatcaacaatgtccgcggaggaggactatatggccgacgccaagaccattgtgaacgtccagactctgtttcgcctcttttcatcactgtccatcataaccgaactgactcaccctgccaacatgaggttcatgcagttcagggcgaaggactgctattcccttgcactgtccaagctggagaagaaggaacgggagaggggtagcaatctggcatttatgtttagactcccattcgcagctggaagggtgttttccattagtatgctcgatactttgctgtaccagtctttcgtgaaagattatatgatatcaattaccagacttctactagggttggacacgactccagggtccggcttcttgtgctccatgaaaatcaccgccgacgacctgtggatcagaacctatgccagactttatcaaaagctatgctcttccactggagatgtccctatcggcatatacagaactgaaagtcagaagctgactacctccgagtcgcaaatcagtatcagcgtggaagagtgggaggacaccaaagatagcaaagagcagggtcatcataggtccaaccatcgtaatagtacatcgtccgaccaaagcgaccacccacttctgcgcaggaaaagcatgcagtgggctagacgtttgagtcggaagggacccaagcactctggcaagacagcagagaagataacccagcagcggctgaatctgtataggcggtccgaaagacaggaactggcggagctggtgaagaaccgcatgaaacacctggggctgtccacagtggggtatgacgaaatgaacgatcatcaatccacactctcttatattcttatcaatccctcccctgatacccggatagaactgaatgatgtggtgtatctcattagacccgaccccctcgcgtatctccctaattccgaaccatcccggcgcaattcaatttgtaatgtcactggccaggattcccgagaggagacacaactttag

SEQ ID NO: 260078 - DNA, 1572 bp, Artificial Sequence
  derived and/or modified sequence
attattaatgacctccaccgggcaatccagcggacacagagtgctatgtttaaccaagtgctgattcttatctctacgcttttgtgtctcattttcacctgtatctgcggtattcagcatttggagcgaatcggcaagaagctcaacctgttcgactccctctacttttgtattgtgaccttttccacagttggtttcggggacgtgactccggagacctggagttctaaactcttcgtggtagctatgatttgcgtagccctcgttgtccttccgattcagttcgaacagctggcatacctgtggatggagaggcagaaaagtggggggaactattcgcgacaccgggcacagactgagaagcatgtcgtcctgtgtgttagttctttaaaaatcgaccttctcatggattttctcaacgaattttacgcacacccacggctgcaagactattacgtggtgattctgtgccccaccgaaatggatgtgcaggtgcggcgtgtactacagatcccaatgtggagccagagggtgatctatctgcagggatctgccctgaaggatcaagacctcctcagggctaagatggatgatgccgaagcgtgctttatactcagctcaaggtgcgaagtggatcggacctccagcgaccatcagacgattctacgagcttgggcagtaaaagacttcgcacctaactgccccttatacgtccagatcctaaaaccagaaaataaattccacatcaaatttgcggaccacgtggtctgtgaggaggaattcaagtatgctatgctcgccctgaattgcatctgccccgctacgtctactctgatcacactgctggtgcatacttctagaggccaggaagggcaacagtcccctgaacaatggcagaaaatgtatggaagatgtagcggcaatgaggtatatcatattgttctggaggagtcaaccttcttcgctgagtatgagggcaaatccttcacctatgcctcttttcacgcacataaaaaatttggggtgtgtctcatcggagtacgtcgcgaggataataagaacatattgcttaacccggggccacgatatataatgaatagtactgacatttgtttctatattaacattacaaaagaggaaaatagtgcttttaagaaccaagaccagcagaggaagtcaaatgtctcccggagcttttatcatggtccatctaggctgccagtgcacagcattatcgctagtatgggaacggtagcaatcgatctccaggacacgtcctgccgctcggcttctggtcccaccctaagtctgccaaccgaaggcagtaaggaaatccgtagacctagtatagctcctgtgctcgaggtcgccgatacttcttcaatccagacctgcgacctgctttctgaccagtcggaggacgagaccacaccagacgaagaaatgagctccaatcttgaatatgcgaaagggtacccgccatacagcccctatatcggatccagccctaccttttgtcacctgctgcacgaaaaagtgccattctgctgtctgcgcctggacaaattttag

SEQ ID NO: 260079 - DNA, 3408 bp, Artificial Sequence
  derived and/or modified sequence
atggtggacctggagagcgaggtgccccccctgcccccacgctaccgcttccgggacctgctgctgggggaccagggctggcagaatgatgacagagtgcaggtggagttctacatgaatgaaaacaccttcaaggagcggctgaagctgttcttcatcaagaaccagaggagcagcctgcgcatccgcctcttcaacttcagcctgaagctgctgagctgcctgctgtacatcatccgggtgctgctggagaaccccagccagggcaatgagtggagccacatcttctgggtgaacagaagcctgcccctgtggggcctgcaggtgtctgtggccctgatcagcctgtttgagaccatcctgctgggctacctgagctacaagggcaacatctgggagcagatcctgcgcatccccttcatcctggagatcatcaatgctgtgcccttcatcatcagcatcttctggcccagcctgaggaacctgtttgtgcctgtgttcctgaactgctggctggccaagcacgccctggagaacatgatcaatgacctgcaccgggccatccagaggacccagagcgccatgttcaaccaggtgctgatcctgatcagcaccctgctgtgcctgatcttcacctgcatctgtggcatccagcacctggagagaattggcaagaagctgaacctgtttgacagcctgtacttctgcatcgtgaccttcagcacagtgggctttggagatgtgaccccagagacctggagcagcaagctgtttgtggtggccatgatctgtgtggccctggtggtgctgcccatccagtttgagcagctggcctacctgtggatggagcggcagaagagcggcggcaactacagccgccaccgggcccagacagagaagcacgtggtgctgtgtgtgagcagcctgaagattgacctgctgatggacttcctgaatgagttctacgcccacccccggctgcaggactactacgtggtgatcctgtgccccacagagatggatgtgcaggtgagaagagtgctgcagatccccatgtggagccagagggtcatctacctgcagggcagcgccctgaaggaccaggacctgctgcgggccaagatggatgatgctgaggcctgcttcatcctgagcagccgctgtgaggtggacaggaccagcagtgaccaccagaccatcctgcgggcctgggccgtgaaggactttgcccccaactgccccctgtatgtgcagatcctgaagccagagaacaagttccacatcaagtttgctgaccacgtggtgtgtgaggaggagttcaagtatgccatgctggccctgaactgcatctgcccagccaccagcaccctcatcaccctgctggtgcacaccagccggggccaggagggccagcagagccctgagcagtggcagaagatgtatggccgctgcagcggaaatgaggtgtaccacatcgtgctggaggagagcaccttctttgctgaatatgagggcaagagcttcacctacgccagcttccacgcccacaagaagtttggagtgtgcctgattggagtgagaagagaggacaacaagaacatcctgctgaaccctggcccccgctacatcatgaacagcacagacatctgcttctacatcaacatcaccaaggaggagaacagcgccttcaagaaccaggaccagcagaggaagagcaatgtgagccgctccttctaccacggccccagccggctgcctgtgcacagcatcatcgcctccatgggcaccgtggccatcgacctgcaggacaccagctgccgcagcgccagcggccccaccctgagcctgcccacagagggcagcaaggagatcagaagacccagcatcgcccctgtgctggaggtggccgacaccagcagcatccagacctgtgacctgctgagtgaccagagtgaagatgagaccaccccagatgaggagatgagcagcaacctggagtatgccaagggctacccaccctacagcccctacatcggcagcagccccaccttctgccacctgctgcacgagaaggtgcccttctgctgcctgcggctggacaagagctgccagcacaactactatgaagatgccaaggcctacggcttcaagaacaagctgatcatcgtggccgctgagacagctggaaatggcctgtacaacttcatcgtgcccctgcgggcctactaccggcccaagaaggagctgaaccccatcgtgctgctgctggacaaccccccagacatgcacttcctggatgccatctgctggttccccatggtgtactacatggtgggcagcattgacaacctggatgacctgctgcgctgtggggtgacctttgctgccaacatggtggtggtggacaaggagagcaccatgtctgctgaggaggactacatggctgatgccaagaccatcgtgaatgtgcagaccctcttccgcctcttcagcagcctgagcatcatcacagagctgacccacccagccaacatgaggttcatgcagttccgggccaaggactgctacagcctggccctgagcaagctggagaagaaggagcgggagcggggcagcaacctggccttcatgttccggctgccctttgctgctggccgggtcttcagcatctccatgctggacaccctgctgtaccagagctttgtgaaggactacatgatcagcatcacccggctgctgctgggcctggacaccaccccaggcagcggcttcctgtgcagcatgaagatcacagcagatgacctgtggatccgcacctacgcccggctgtaccagaagctgtgcagcagcactggagatgtgcccatcggcatctacagaacagagagccagaagctgaccaccagcgagagccagatcagcatctctgtggaggagtgggaggacaccaaggacagcaaggagcagggccaccacaggagcaaccacaggaacagcaccagcagtgaccagagcgaccaccccctgctgcggaggaagtccatgcagtgggcccggcggctgagcaggaagggccccaagcacagcggcaagacagctgagaagatcacccagcagaggctgaacctgtacagaagaagtgagcggcaggagctggccgagctggtgaagaacaggatgaagcacctgggcctgagcacagtgggctatgatgagatgaatgaccaccagagcaccctgagctacatcctgatcaaccccagcccagacaccagaattgagctgaatgatgtggtgtacctgatccggccagaccccctggcctacctgcccaacagcgagcccagcagaagaaacagcatctgcaatgtgacaggccaggacagccgggaggagacccagctgtag

SEQ ID NO: 260080 - DNA, 1572 bp, Artificial Sequence
  derived and/or modified sequence
atcatcaatgacctgcaccgggccatccagaggacccagagcgccatgttcaaccaggtgctgatcctgatcagcaccctgctgtgcctgatcttcacctgcatctgtggcatccagcacctggagcgcatcggcaagaagctgaacctgtttgacagcctgtacttctgcatcgtgaccttcagcacagtgggctttggagatgtgaccccagagacctggagcagcaagctgtttgtggtggccatgatctgtgtggccctggtggtgctgcccatccagtttgagcagctggcctacctgtggatggagcggcagaagagcggcggcaactacagccgccaccgggcccagacagagaagcacgtggtgctgtgtgtgagcagcctgaagattgacctgctgatggacttcctgaatgagttctacgcccacccccggctgcaggactactacgtggtgatcctgtgccccacagagatggatgtgcaggtgcggcgggtgctgcagatccccatgtggagccagagggtcatctacctgcagggcagcgccctgaaggaccaggacctgctgcgggccaagatggatgatgctgaggcctgcttcatcctgagcagccgctgtgaggtggacaggaccagcagtgaccaccagaccatcctgcgggcctgggccgtgaaggactttgcccccaactgccccctgtatgtgcagatcctgaagccagagaacaagttccacatcaagtttgctgaccacgtggtgtgtgaggaggagttcaagtatgccatgctggccctgaactgcatctgcccagccaccagcaccctcatcaccctgctggtgcacaccagccggggccaggagggccagcagagccctgagcagtggcagaagatgtatggccgctgcagcggaaatgaggtgtaccacatcgtgctggaggagagcaccttctttgctgaatatgagggcaagagcttcacctacgccagcttccacgcccacaagaagtttggagtgtgcctgattggagtgcggcgggaggacaacaagaacatcctgctgaaccctggcccccgctacatcatgaacagcacagacatctgcttctacatcaacatcaccaaggaggagaacagcgccttcaagaaccaggaccagcagaggaagagcaatgtgagccgctccttctaccacggccccagccggctgcctgtgcacagcatcatcgcctccatgggcaccgtggccatcgacctgcaggacaccagctgccgcagcgccagcggccccaccctgagcctgcccacagagggcagcaaggagatccggcggcccagcatcgcccctgtgctggaggtggccgacaccagcagcatccagacctgtgacctgctgagtgaccagagtgaagatgagaccaccccagatgaggagatgagcagcaacctggagtatgccaagggctacccaccctacagcccctacatcggcagcagccccaccttctgccacctgctgcacgagaaggtgcccttctgctgcctgcggctggacaagttctag

SEQ ID NO: 260081 - DNA, 3408 bp, Artificial Sequence
  derived and/or modified sequence
atggtggacctggagagcgaggtgccccccctgcccccccggtaccgcttccgggatctcttgctgggggatcagggttggcagaacgacgatcgggtgcaggtggaattttacatgaacgagaataccttcaaagagcggctcaagctgttctttattaagaaccagcgttcctccctgcgcattaggctatttaacttctcccttaagctgctttcatgccttttatacataatcagggtcctcttagaaaatcctagccaaggtaacgagtggtctcacatcttttgggttaaccgcagcctgcccttgtggggcctacaggtgagtgttgcgctgattagcctgttcgagaccattctcctggggtaccttagctacaaaggaaatatctgggaacagattctccgcatcccattcattctggagataatcaatgccgtccccttcatcataagtattttttggccctctctgagaaatctattcgtcccagtattcttgaactgttggctcgctaagcatgcactggagaacatgattaacgatcttcatcgcgccattcagcgaactcagagtgcgatgtttaaccaggttctcatcctaattagtactttgttgtgcctgatcttcacatgcatctgtggcatccaacacctggagcgcatcggaaagaaactcaacctctttgacagcctgtacttttgcatcgtgactttctctacagtcggttttggcgacgtcactcccgagacctggtctagcaagttgttcgtcgtcgctatgatctgcgtcgccctggtcgtgctgccaatacaatttgaacagttggcctacctctggatggagcgccagaagtctggtggaaattatagccgccaccgggcccagacagagaaacatgtggtactatgcgtaagctctcttaaaatagacctactgatggactttcttaacgaattttatgcgcacccacgcctccaggattactacgtggtgatactgtgcccgaccgagatggatgttcaggtgcgtcgagtgctccagataccgatgtggagtcagagggtgatctatttacagggttccgcattgaaagaccaggatcttctgcgcgccaaaatggacgatgcagaagcctgcttcatactgagttctcgctgtgaagtggacaggacctcttccgaccaccaaaccattctgagggcttgggcggtgaaggacttcgctcctaactgccctctgtacgtacagatcctaaagcccgagaataaattccacatcaaattcgcagatcacgtcgtgtgtgaggaggagtttaagtatgctatgctagcactcaattgcatctgccccgcaacctcgaccctaatcacactcttggtccatacaagtcgggggcaggaaggtcagcagagtcccgagcagtggcagaaaatgtacgggagatgcagcggaaacgaagtttatcatatcgtcctggaagagagtaccttcttcgctgaatacgaaggaaagagcttcacatacgcctcctttcacgcccacaagaagtttggagtctgcctgatcggcgtaaggcgggaagataataaaaacatcctcttgaatcccggaccccggtatataatgaactccacagacatatgtttttacatcaacatcacgaaagaagaaaattcagccttcaagaatcaggaccagcagcgaaagagcaacgtttctagatccttttatcatgggcccagtagactccctgtgcatagcatcattgcaagtatgggaacagtcgcaattgacctgcaggatacatcctgtaggtctgcctccggccccacactgtccctccccaccgaaggatctaaggaaatccgccgcccctcaatcgcacctgtgcttgaagttgccgataccagctctatccagacttgcgacctgttgagtgaccaatccgaagacgagactacacccgacgaagagatgagctctaatctcgagtatgccaagggctaccccccttatagcccatacattgggtcatccccaactttctgccatttacttcatgaaaaggtgccattctgttgcttgcggttagacaagtcttgccagcataactattacgaagatgccaaggcatatgggttcaaaaataagttaatcattgtggccgccgagaccgctggcaatggcctgtacaactttatcgtacccctgagagcttactatcgacctaagaaggaactgaacccaatagtgctgttattagataaccctccagatatgcatttcctggacgctatttgttggttcccaatggtatattatatggttggctcaatcgacaatctggatgacctcctccgatgtggtgttacctttgctgcaaatatggtggtcgtagataaggaatcgactatgagcgcggaagaggattatatggccgacgccaagacaatcgttaatgtacagaccttatttcggttgtttagtagtctcagtatcatcaccgagctgacgcatcccgccaatatgagattcatgcagtttagagctaaagattgctacagtttggccctgagtaaactggagaagaaggaacgagagcgcggtagtaaccttgcttttatgttcagacttccattcgccgccgggcgagtgtttagtatatctatgctggacacattgttgtaccaaagctttgtgaaggattacatgatttctattacacgactgctgcttggcctggacacaaccccgggttctggcttcctttgcagtatgaaaatcaccgcagatgacctgtggattagaacttacgctagactgtatcagaaactgtgttcaagcacaggtgacgtccctatcggcatctaccgtactgagtcacaaaaacttacaacctctgaaagtcagattagtatctctgtcgaagagtgggaggatactaaagattcaaaggagcaaggccatcaccgatctaaccaccggaactcaacttcctctgaccagtccgaccatcctctgctgcgacgcaaatctatgcagtgggctaggcgcctgtctcggaagggtccaaaacatagcggcaaaaccgcagaaaaaatcactcaacagagactaaatctttatagaagatctgagcggcaagaactggcagagctggttaaaaaccgcatgaaacatcttgggctgtcaacggttgggtacgatgaaatgaacgaccaccagagcactctgagctacatcctgattaaccccagtcccgatactaggattgaactcaatgatgtcgtctacctgatacgtcctgaccctctggcatacctgcccaatagcgagcctagcaggcgtaattcaatctgcaatgtcaccgggcaggactctagagaggagacccaactgtag

SEQ ID NO: 260082 - DNA, 1572 bp, Artificial Sequence
  derived and/or modified sequence
atcatcaacgacctgcaccgggccatccagcggacccagagcgccatgttcaaccaggttctgatactcatctccacgctactgtgcctcatcttcacatgtatttgtgggattcagcatttggagagaatcggtaagaagctgaacttatttgattctttatacttttgtatcgtgacattctctaccgtgggattcggagatgtgacgcccgaaacctggagttcgaaactgttcgtcgttgccatgatatgcgtggctctggtcgttctgcccattcagttcgagcagcttgcttacctttggatggagcgacagaagagcgggggaaattactcccgccaccgggcccagactgagaagcacgtggttctgtgtgtctcctcattgaagatagacctgctaatggatttcttgaacgagttttacgcccacccaagacttcaggactattatgtcgtgattctgtgtccgacagagatggacgtccaggtcaggcgagtattgcagattcctatgtggagccagagagtaatatacttacagggcagtgccctgaaggatcaggatctcctgcgtgccaagatggacgatgcagaggcctgcttcattctcagcagccgttgtgaggtggaccgtacgtcaagcgaccaccagactattcttcgcgcgtgggctgtcaaggattttgctccaaactgcccactctacgttcagattctgaagccggaaaacaaatttcatatcaaatttgctgatcacgttgtttgcgaagaggagttcaagtatgccatgctggcgctaaattgcatttgcccagcaacgtccaccctgattacccttctggtccacacttcaaggggccaggaaggccagcagtcccctgagcagtggcaaaagatgtacgggcgatgtagtgggaatgaagtgtaccacattgtcctggaggaaagcacattttttgccgaatacgaaggcaagtccttcacatatgcgtctttccatgcacacaaaaaattcggtgtatgtctcatcggtgtccgcagggaggataacaaaaatatcttactcaaccccggacctcgatacatcatgaacagcacagacatctgcttctatattaacattactaaagaagaaaactccgccttcaaaaatcaggatcagcaaaggaagagcaatgtttctcgatcattttaccacggaccctctaggctgcctgttcattccatcattgcctcgatggggaccgtcgcaattgatttacaggataccagttgtagaagcgcatctggcccaaccctgtccctcccgaccgagggcagtaaggaaattaggcggccatcgatcgcccccgtcctagaggttgcagacaccagcagcattcaaacctgcgacctgctttccgaccaaagcgaggacgagaccactccggacgaggaaatgagctccaacctcgaatacgcgaaaggataccctccctactccccatacataggatcgtctcctaccttctgccatctgttacatgaaaaggtgcctttctgctgcctgcgattagataagttttag

SEQ ID NO: 260083 - DNA, 3553 bp, Artificial Sequence
  derived and/or modified sequence
ctttctttctccctcctctcctccatttgttgtttgatgtttcccactctttgaggaaggatggttgatttggagagcgaagtgccccctctgcctcccaggtacaggtttcgagatttgctgctaggggaccaaggatggcaaaacgacgacagggtacaagttgaattctatatgaatgaaaatacatttaaagaaagactaaaattatttttcataaaaaaccagagatcaagtctaaggatacgcctgttcaatttttctctcaaattactaagctgcttattatacataatccgagtactactagaaaacccttcacaaggaaatgaatggtctcatatcttttgggtgaacagaagtctacctttgtggggcttacaggtttcagtggcattgataagtctgtttgaaacaatattacttggttatcttagttataagggaaacatctgggaacagattttacgaatacccttcatcttggaaataattaatgcagttcccttcattatctcaatattctggccttccttaaggaatctatttgtcccagtctttctgaactgttggcttgccaaacatgccttggaaaatatgattaatgatctacacagagccattcagcgtacacagtctgcaatgtttaatcaagttttgattttaatatctacattactatgccttatcttcacctgcatttgtgggatccaacatctggaacgaataggaaagaagctgaatctctttgactccctttatttctgcattgtgacgttttctactgtgggcttcggggatgtcactcctgaaacatggtcctccaagctttttgtagttgctatgatttgtgttgctcttgtggttctacccatacagtttgaacagctggcttatttgtggatggagagacaaaagtcaggaggaaactatagtcgacatagagctcaaactgaaaagcatgtcgtcctgtgtgtcagctcactgaagattgatttacttatggattttttaaatgaattctatgctcatcctaggctccaggattattatgtggtgattttgtgtcctactgaaatggatgtacaggttcgaagggtactgcagattccaatgtggtcccaacgagttatctaccttcaaggttcagcccttaaagatcaagacctattgagagcaaagatggatgacgctgaggcctgttttattctcagtagccgttgtgaagtggataggacatcatctgatcaccaaacaattttgagagcatgggctgtgaaagattttgctccaaattgtcctttgtatgtccagatattaaagcctgaaaataaatttcacatcaaatttgctgatcatgttgtttgtgaagaagagtttaaatacgccatgttagctttaaactgtatatgcccagcaacatctacacttattacactactggttcatacctctagagggcaagaaggccagcaatcgccagaacaatggcagaagatgtacggtagatgctccgggaatgaagtctaccacattgttttggaagaaagtacattttttgctgaatatgaaggaaagagttttacatatgcctctttccatgcacacaaaaagtttggcgtctgcttgattggtgttaggagggaggataataaaaacattttgctgaatccaggtcctcgatacattatgaattctacagacatatgcttttatattaatattaccaaagaagagaattcagcatttaaaaaccaagaccagcagagaaaaagcaatgtgtccaggtcgttttatcatggaccttccagattacctgtacatagcataattgccagcatgggtactgtggctatagacttgcaagatacaagctgtagatcagcaagtggccctaccctgtctcttcctacagagggaagcaaagaaataagaagacctagcattgctcctgttttagaggttgcagatacatcatcgattcaaacatgtgatcttctaagtgaccaatcagaagatgaaactacaccagatgaagaaatgtcttcaaacttagagtatgctaaaggttacccaccttattctccatatataggaagttcacccactttttgtcatctccttcatgaaaaagtaccattttgctgcttaagattagacaagagttgccaacataactactatgaggatgcaaaagcctatggattcaaaaataaactaattatagttgcagctgaaacagctggaaatggattatataactttattgttcctctcagggcatattatagaccaaagaaagaacttaatcccatagtactgctattggataacccgccagatatgcattttctggatgcaatctgttggtttccaatggtttactacatggtgggctctattgacaacctagatgacttactcaggtgtggagtgacttttgctgctaatatggtggttgtggataaagagagcaccatgagtgccgaggaagactacatggcagatgccaaaaccattgtgaacgtgcagacactcttcaggttgttttccagtctcagtattatcacagagctaactcaccccgccaacatgagattcatgcaattcagagccaaagactgttactctcttgctctttcaaaactggaaaagaaagaacgggagagaggctctaacttggcctttatgtttcgactgccttttgctgctgggagggtgtttagcatcagtatgttggacactctgctgtatcagtcatttgtgaaggattatatgatttctatcacgagacttctgttgggactggacactacaccaggatctgggtttctttgttctatgaaaatcactgcagatgacttatggatcagaacttatgccagactttatcagaagttgtgttcttctactggagatgttcccattggaatctacaggactgagtctcagaaacttactacatctgagtctcaaatatctatcagtgtagaagagtgggaagacaccaaagactccaaagaacaagggcaccaccgcagcaaccaccgcaactcaacatccagtgatcagtcggaccatcccttgctgcggagaaaaagcatgcagtgggcccgaagactgagcagaaaaggcccaaaacactctggtaaaacagctgaaaaaataacccagcagcgactgaacctctacaggaggtcagaaagacaagagcttgctgaacttgtgaaaaatagaatgaaacacttgggtctttctacagtgggatatgatgaaatgaatgatcatcaaagtaccctctcctacatcctgattaacccatctccagataccagaatagagctgaatgatgttgtatacttaattcgaccagatccactggcctaccttccaaacagtgagcccagtcgaagaaacagcatctgcaatgtcactggtcaagattctcgggaggaaactcaactttgataaaaataaaatgagaaacttttttcctacaaagaccttgcttgaaaccacaaaagttttgctggcacgaaagaaactagatgga

SEQ ID NO: 260084 - DNA, 3146 bp, Artificial Sequence
  derived and/or modified sequence
ccctcctctcctccatttgttgtttgatgtttcccactctttgaggaaggatggttgatttggagagcgaagtgccccctctgcctcccaggtacaggtttcgagatttgctgctaggggaccaaggatggcaaaacgacgacagggtacaagttgaattctatatgaatgaaaatacatttaaagaaagactaaaattatttttcataaaaaaccagagatcaagtctaaggatacgcctgttcaatttttctctcaaattactaagctgcttattatacataatccgagtactactagaaaacccttcacaaggaaatgaatggtctcatatcttttgggtgaacagaagtctacctttgtggggcttacaggtttcagtggcattgataagtctgtttgaaacaatattacttggttatcttagttataagggaaacatctgggaacagattttacgaatacccttcatcttggaaataattaatgcagttcccttcattatctcaatattctggccttccttaaggaatctatttgtcccagtctttctgaactgttggcttgccaaacatgccttggaaaatatgattaatgatctacacagagccattcagcgtacacagtctgcaatgtttaatcaagttttgattttaatatctacattactatgccttatcttcacctggatcaccaaacaattttgagagcatgggctgtgaaagattttgctccaaattgtcctttgtatgtccagatattaaagcctgaaaataaatttcacatcaaatttgctgatcatgttgtttgtgaagaagagtttaaatacgccatgttagctttaaactgtatatgcccagcaacatctacacttattacactactggttcatacctctagagggcaagaaggccagcaatcgccagaacaatggcagaagatgtacggtagatgctccgggaatgaagtctaccacattgttttggaagaaagtacattttttgctgaatatgaaggaaagagttttacatatgcctctttccatgcacacaaaaagtttggcgtctgcttgattggtgttaggagggaggataataaaaacattttgctgaatccaggtcctcgatacattatgaattctacagacatatgcttttatattaatattaccaaagaagagaattcagcatttaaaaaccaagaccagcagagaaaaagcaatgtgtccaggtcgttttatcatggaccttccagattacctgtacatagcataattgccagcatgggtactgtggctatagacttgcaagatacaagctgtagatcagcaagtggccctaccctgtctcttcctacagagggaagcaaagaaataagaagacctagcattgctcctgttttagaggttgcagatacatcatcgattcaaacatgtgatcttctaagtgaccaatcagaagatgaaactacaccagatgaagaaatgtcttcaaacttagagtatgctaaaggttacccaccttattctccatatataggaagttcacccactttttgtcatctccttcatgaaaaagtaccattttgctgcttaagattagacaagagttgccaacataactactatgaggatgcaaaagcctatggattcaaaaataaactaattatagttgcagctgaaacagctggaaatggattatataactttattgttcctctcagggcatattatagaccaaagaaagaacttaatcccatagtactgctattggataacccatgacttactcaggtgtggagtgacttttgctgctaatatggtggttgtggataaagagagcaccatgagtgccgaggaagactacatggcagatgccaaaaccattgtgaacgtgcagacactcttcagaaagaacgggagagaggctctaacttggcctttatgtttcgactgccttttgctgctgggagggtgtttagcatcagtatgttggacactctgctgtatcagtcatttgtgaaggattatatgatttctatcacgagacttctgttgggactggacactacaccaggatctgggtttctttgttctatgaaaatcactgcagatgacttatggatcagaacttatgccagactttatcagaagttgtgttcttctactggagatgttcccattggaatctacaggactgagtctcagaaacttactacatctgagtctcgaaaaatagcatcacaagattttattggatctacttcctgacgttacttaaattgtctcaaatatctatcagtgtagaagagtgggaagacaccaaagactccaaagaacaagggcaccaccgcagcaaccaccgcaactcaacatccagtgatcagtcggaccatcccttgctgcggagaaaaagcatgcagtgggcccgaagactgagcagaaaaggcccaaaacactctggtaaaacagctgaaaaaataacccagcagcgactgaacctctacaggaggtcagaaagacaagagcttgctgaacttgtgaaaaatagaatgaaacacttgggtctttctacagtgggatatgatgaaatgaatgatcatcaaagtaccctctcctacatcctgattaacccatctccagataccagaatagagctgaatgatgttgtatacttaattcgaccagatccactggcctaccttccaaacagtgagcccagtcgaagaaacagcatctgcaatgtcactggtcaagattctcgggaggaaactcaactttgataaaaataaaatgagaaacttttttcctacaaagaccttgcttgaaaccacaaaagttttgctggcacgaaagaaactagatggaaatatatgtaattctctcatatttaaaaacgtaatctcttctcttagaagtatagatcattttgaaacttaatgtactacttactggtactctccctattaatatttgaaggacctcaatggaataaatttgaaaagctaaattaaaatacaaaaatttaaatctgacatttaattgttttataataatccaaactctatgaaagcaattttaaaaattattaaggttttatgaagttgacaaaatctaactatatttggtgcatcacaatggacacaga

SEQ ID NO: 260085 - DNA, 5164 bp, Artificial Sequence
  derived and/or modified sequence
tattattaatgatctacacagagccattcagcgtacacagtctgcaatgtttaatcaagttttgattttaatatctacattactatgccttatcttcacctgcatttgtgggatccaacatctggaacgaataggaaagaagctgaatctctttgactccctttatttctgcattgtgacgttttctactgtgggcttcggggatgtcactcctgaaacatggtcctccaagctttttgtagttgctatgatttgtgttgctcttgtggttctacccatacagtttgaacagctggcttatttgtggatggagagacaaaagtcaggaggaaactatagtcgacatagagctcaaactgaaaagcatgtcgtcctgtgtgtcagctcactgaagattgatttacttatggattttttaaatgaattctatgctcatcctaggctccaggattattatgtggtgattttgtgtcctactgaaatggatgtacaggttcgaagggtactgcagattccaatgtggtcccaacgagttatctaccttcaaggttcagcccttaaagatcaagacctattgagagcaaagatggatgacgctgaggcctgttttattctcagtagccgttgtgaagtggataggacatcatctgatcaccaaacaattttgagagcatgggctgtgaaagattttgctccaaattgtcctttgtatgtccagatattaaagcctgaaaataaatttcacatcaaatttgctgatcatgttgtttgtgaagaagagtttaaatacgccatgttagctttaaactgtatatgcccagcaacatctacacttattacactactggttcatacctctagagggcaagaaggccagcaatcgccagaacaatggcagaagatgtacggtagatgctccgggaatgaagtctaccacattgttttggaagaaagtacattttttgctgaatatgaaggaaagagttttacatatgcctctttccatgcacacaaaaagtttggcgtctgcttgattggtgttaggagggaggataataaaaacattttgctgaatccaggtcctcgatacattatgaattctacagacatatgcttttatattaatattaccaaagaagagaattcagcatttaaaaaccaagaccagcagagaaaaagcaatgtgtccaggtcgttttatcatggaccttccagattacctgtacatagcataattgccagcatgggtactgtggctatagacttgcaagatacaagctgtagatcagcaagtggccctaccctgtctcttcctacagagggaagcaaagaaataagaagacctagcattgctcctgttttagaggttgcagatacatcatcgattcaaacatgtgatcttctaagtgaccaatcagaagatgaaactacaccagatgaagaaatgtcttcaaacttagagtatgctaaaggttacccaccttattctccatatataggaagttcacccactttttgtcatctccttcatgaaaaagtaccattttgctgcttaagattagacaagttttagccataaaatctctgccacagaccattgttcctgattcaagcgaaatattttttctggactactcctggggatcttggactcaaggctttgcctagatgacttactcaggtgtggagtgacttttgctgctaatatggtggttgtggataaagagagcaccatgagtgccgaggaagactacatggcagatgccaaaaccattgtgaacgtgcagacactcttcaggttgttttccagtctcagtattatcacagagctaactcaccccgccaacatgagattcatgcaattcagagccaaagactgttactctcttgctctttcaaaactggaaaagaaagaacgggagagaggctctaacttggcctttatgtttcgactgccttttgctgctgggagggtgtttagcatcagtatgttggacactctgctgtatcagtcatttgtgaaggattatatgatttctatcacgagacttctgttgggactggacactacaccaggatctgggtttctttgttctatgaaaatcactgcagatgacttatggatcagaacttatgccagactttatcagaagttgtgttcttctactggagatgttcccattggaatctacaggactgagtctcagaaacttactacatctgagtctcaaatatctatcagtgtagaagagtgggaagacaccaaagactccaaagaacaagggcaccaccgcagcaaccaccgcaactcaacatccagtgatcagtcggaccatcccttgctgcggagaaaaagcatgcagtgggcccgaagactgagcagaaaaggcccaaaacactctggtaaaacagctgaaaaaataacccagcagcgactgaacctctacaggaggtcagaaagacaagagcttgctgaacttgtgaaaaatagaatgaaacacttgggtctttctacagtgggatatgatgaaatgaatgatcatcaaagtaccctctcctacatcctgattaacccatctccagataccagaatagagctgaatgatgttgtatacttaattcgaccagatccactggcctaccttccaaacagtgagcccagtcgaagaaacagcatctgcaatgtcactggtcaagattctcgggaggaaactcaactttgataaaaataaaatgagaaacttttttcctacaaagaccttgcttgaaaccacaaaagttttgctggcacgaaagaaactagatggaaatatatgtaattctctcatatttaaaaacgtaatctcttctcttagaagtatagatcattttgaaacttaatgtactacttactggtactctccctattaatatttgaaggacctcaatggaataaatttgaaaagctaaattaaaatacaaaaatttaaatctgacatttaattgttttataataatccaaactctatgaaagcaattttaaaaattattaaggttttatgaagttgacaaaatctaactatatttggtgcatcacaatggacacagaatgctgctgctcctcttaaaaattaaatgtgtcatattatattctttaaacttactgttttacaaaattgagctcatcgtaaatgtctagtcttctcacatagagattaaccaacaaacttgtgtggctgacttttgtgtaagaatcatagtttgctttagaatacaaatctttaagtcattttaacttttttttctgccttacgatataaaaatatttatcttagaatttgagatgttcatagcatgttttattacattgaagaaactaaaacataaatgaaaagaaacactaggttcctgcactttttggtaactttatgtctagcaaatattttatgccaagaaaagcatactataaagcaaatatctattattctcctaaacgaatgcctagcatagagaaaatacttaatacacatttgttgacttaaatttaattcaaggattgaaaaattaactggatatcttgaaatatacagtaatgattgtccttagactcttgaactttaccatctttcctattcatatatctatatagtaaatttcactagaaaaattcttttaaaattgacagaagataatttataccttttatggactctgaagacacttcaaaacattaaaagtccttatgtctttggtaatgaaacaataacactcaatgaaggatgtattaaaatttttgacttaattttgaaatcgtatatatgagctatactttaacattatgagagaaaagcataaaacaaaaataggtagttcttggcttttaacattaatgcaaatcatgcagaatttgagttataaatttaaatataaattgaccattgatgatatccagtttttcattttttacctgtattgcattttccccctagagaaatagatcaaaagagcacaagagtatgcgtacatagtttaccaggtagtagaagtgtgttaaaatgttcctgtaaaagaaacattggtaaatttaaatacatactgttctaattttgtattttttaatttttgaatttgacattgagtttaattcagcaacaacaaaaaatacatataaaactagaaagggactttttttcctttcttttcataatgaagcagatcaacttaaaggataataaaatttttaaagaaaagatattctaatgtactctcaataattctacagaaataaaactgtaaagtgcaatgtgaaatcaaagattatagtcattgtataatttggcttggaggctatgaaatgtctttttttctttttggtattttacattattcacattttagaataacaagaacaccaagaattacccctaaaacagagaccctgtatttaatctactttgatcagagaagtagaatttataacaggttagctaaaattgggagcatgccttaaaacttaaagattgtatgcatatatgtgtatatgttataaacgtgaaatatatttgacacacacattcacatataaattgttaaaaactgaaggcagaatggaactaatatatgtaacagagaaaaacaataaattttatgaacttgttttatatttgcatatcaagagtcaagtatgatgtttctttaagttgactttttttacttcattatttttaggaataaatgtaagattttacaaatcttttatttccccacaagatctgaagtttggtatttttgcattatgacagttgttgagactaggattttaagctaggatatgattatatttcctatataactaaaaattttgtttcataaattttaaaataattatttttgactatgaacattagtccaaatttaatatttgacacagttcataccagcttgctacaataatgataatttattagtctttctgttatttaaagaataaaaacatgcttataaaagacttttaatgaaatgttgcctttttaaaataattatacttgcacatgaaaataaaatataaagtcaataatagtccttgtagcccaatgggaattgattctgtttattgtctgtaccattttgctaccagttacattgaactgctttaaaataaataataaaattatttctaatgatg

SEQ ID NO: 260086 - DNA, 3408 bp, Artificial Sequence
  derived and/or modified sequence
atggttgacttggagtccgaggtgccgcctttacctccaaggtacagattccgagatctcctccttggcgatcaggggtggcagaacgatgatagggtccaggtcgagttctatatgaatgagaatacctttaaggagaggctcaagcttttttttataaagaatcagcgttcttccttgcgcattagactcttcaatttcagtctgaaactgctgagttgcctcctgtatattatccgagttcttctcgaaaacccatctcagggaaatgaatggtcccacatcttttgggtgaaccgcagtctacctctgtggggactgcaggtgagcgtggccctgatctctctcttcgaaaccattttactgggttatctttcgtataaaggcaacatctgggagcagatattacgcataccattcattttggagatcatcaatgccgtacctttcattatttctattttctggcctagtctcagaaacctgtttgtgcccgtcttcctgaattgctggctggcgaagcacgcgctggaaaatatgattaacgacttgcatcgtgcaatccaacggacccagtctgctatgttcaaccaggtgctgatacttatcagcacccttttatgcctcattttcacctgcatctgcggaatacagcacctggaaaggatcggcaagaagctgaacctgtttgatagcctttacttttgtatcgtgacattcagcacagtcgggttcggggatgtgactcctgaaacttggtccagtaagctcttcgtggtagcgatgatttgtgtagccttagtggtgttaccaatccaattcgaacagctggcatacctgtggatggagcggcagaagtccgggggaaattactccaggcacagggctcaaaccgagaaacacgtggttctatgtgtgtcatccttgaagatcgacctgctgatggatttcctgaacgagttctatgctcaccctcggctgcaggattactacgtcgtgatcctgtgcccaacagaaatggatgtccaggtacggagagttctccagatcccaatgtggtcccaaagagtgatttatctgcaagggtctgcactgaaggatcaggatttgctaagggctaagatggacgacgcagaggcgtgtttcatcctgtcttctcggtgtgaggtggatcgcacttcgagcgaccatcaaaccatattgcgtgcctgggccgtgaaagattttgcccctaattgccctttgtacgtccagatcctgaagccagagaataagttccatattaagtttgccgaccatgtggtatgtgaggaggaattcaagtacgctatgctggctttgaattgcatttgccccgcaacctctactttgataaccctcttggtgcacacctctagaggacaagagggccagcaatcccctgagcagtggcagaagatgtatgggcgatgtagtggcaacgaggtgtaccacatcgtgctagaggagtctactttcttcgccgaatacgaaggaaagtcatttacatacgcctcttttcacgcccacaaaaaatttggcgtgtgtctcatcggggtgagaagggaagacaataaaaacatcttgttaaatccgggaccgcgatatattatgaacagcaccgatatttgtttctacattaacattacaaaggaggagaactcagccttcaaaaatcaagaccagcagagaaagagcaatgtgtcgcggtccttctaccacggcccttcccgcctgccagttcactccataatagcctctatgggcacagtggcaattgacctccaggacacctcttgtcgttccgctagcggcccaacactgtcacttccgacggagggttctaaggaaatacgaagaccaagcatagcaccagtgcttgaagtggcagacacctcaagcatccagacctgcgatcttctgtctgatcagtccgaggatgaaacgactcccgatgaagaaatgtcatcgaatctggagtacgccaaaggttaccctccctacagcccctacattggtagcagtccaacattctgccatctgctccacgaaaaggtgccattttgttgcctgcggctggacaaatcctgccagcacaactattacgaggatgccaaggcatatggattcaagaacaaattgatcatcgtggctgccgagactgcgggtaacggattatacaacttcatcgttccgttgcgcgcatattatcggccaaagaaagaactgaaccccatcgtcttgctgttagacaacccccctgatatgcatttcctggacgccatatgttggtttcctatggtctattacatggtcgggagcatcgacaacctggatgatctcttacgctgcggagtgaccttcgcagcgaacatggtggttgtagataaggagtccactatgtcagcagaagaagactatatggccgacgcaaagacaattgtgaacgtccaaacactgtttcgtttattttccagtttaagcatcataactgagcttacgcaccccgcaaatatgaggttcatgcagttccgagccaaagactgttattcactggccctctcaaaactggaaaaaaaggagagagagcgcggtagcaacctggcctttatgtttagacttccgttcgctgctggacgggtctttagcatatcaatgctggacacactcctgtaccagtcctttgtcaaggattacatgatttccattactaggctcttgcttggtttggacaccactccaggcagcggatttctctgctctatgaaaattacagcggacgatctgtggatccgtacctacgctagattgtaccagaaactttgtagctccaccggagatgtcccaataggaatctataggactgagagccagaagctgaccacttcggaatctcagatctctattagtgtcgaggagtgggaggacactaaggactccaaagaacagggtcatcaccggagcaatcatcggaactcgacatcatctgaccagtctgaccaccctctgctccgaaggaagagcatgcagtgggcgagacgtctgtcccgcaagggacccaagcattccggtaaaaccgctgaaaagattactcaacagcgtctcaatctttaccggcgtagcgagagacaagaactggcagagctagtcaagaatcgcatgaaacatctggggctgtctacagtgggctacgacgaaatgaacgatcaccagtccaccctttcctacattctgatcaatcccagtcctgatacacgtatcgagcttaatgatgtggtctatctgataagaccagatcccctcgcatacttacctaactctgagccttctaggcggaacagtatttgtaatgtgacggggcaggattcccgcgaggaaactcagctctag

SEQ ID NO: 260087 - DNA, 1572 bp, Artificial Sequence
  derived and/or modified sequence
attataaatgacctccaccgagcaatccaacggactcagagcgctatgttcaatcaggttctgatattgatttcgaccttactttgcctgatatttacgtgcatctgcggcatccagcaccttgagcggataggaaagaaactgaacctcttcgactccctatatttttgcatcgtgacattcagcaccgtgggattcggcgatgttacccccgagacatggagctcaaagctctttgtggtggcaatgatatgtgtggcactggtcgtgcttccaatccagtttgaacagctcgcatacctgtggatggagcgccagaaaagtgggggaaactacagtagacatagggcccaaacagagaaacacgtcgtgctgtgtgtgtcttctttgaagattgatctgctcatggatttcttgaatgaattttacgcccatcctcggttgcaggactattacgtggtgattctgtgtccaacagaaatggatgtccaggttaggcgcgtgcttcagatccctatgtggtcccagagggttatctacctgcaaggctccgccctcaaggaccaggatctactgcgcgctaaaatggacgacgccgaggcctgttttatcttgtcgtcaagatgtgaggtagacaggacaagctccgaccaccagaccattctcagggcctgggcagtgaaggatttcgccccaaactgccccctatatgttcagatcctcaaacccgaaaataagtttcacatcaaatttgcagatcacgtggtgtgcgaagaagaattcaagtatgccatgctggcactgaactgtatatgccctgccacttcgaccctaattaccctgctggtccacacctcacgaggccaggaaggccaacagtcgcctgagcagtggcagaaaatgtatggaaggtgttccggaaatgaggtgtaccacatcgtgctcgaagagagtacattcttcgcagagtacgagggcaagagtttcacatacgctagtttccatgcacataaaaaattcggagtgtgcctcattggggtcagacgggaagataataagaacatattactgaaccccggaccccgatacataatgaactctaccgatatctgcttttacatcaacattacaaaagaggaaaactctgccttcaaaaaccaagaccagcagagaaagtccaatgtgtccaggtctttttaccatggcccaagcaggttgccagtgcactccatcattgctagtatgggcactgtcgcaatcgacttgcaagacaccagttgtagatcagccagcggccctaccctgtccctcccgacagagggctccaaagaaatcaggagacctagcatcgctcccgttctcgaagtcgccgacacgtcatccatccagacctgtgatctgctctccgatcagagtgaggatgaaactactcccgacgaagaaatgtcgagtaatttggagtacgcaaagggctaccccccatactctccgtatatcgggtcgtcgccaaccttctgtcacctgcttcacgagaaggtgcccttttgttgcctgcgtctggacaagttttag

SEQ ID NO: 260088 - DNA, 3408 bp, Artificial Sequence
  derived and/or modified sequence
atggtggacctggagagcgaggtgccccccctgccccccagatacagattcagagacctgctgctgggcgaccagggctggcagaacgacgacagagtgcaggtggagttctacatgaacgagaacaccttcaaggagagactgaagctgttcttcatcaagaaccagagaagcagcctgagaatcagactgttcaacttcagcctgaagctgctgagctgcctgctgtacatcatcagagtgctgctggagaaccccagccagggcaacgagtggagccacatcttctgggtgaacagaagcctgcccctgtggggcctgcaggtgagcgtggccctgatcagcctgttcgagaccatcctgctgggctacctgagctacaagggcaacatctgggagcagatcctgagaatccccttcatcctggagatcatcaacgccgtgcccttcatcatcagcatcttctggcccagcctgagaaacctgttcgtgcccgtgttcctgaactgctggctggccaagcacgccctggagaacatgatcaacgacctgcacagagccatccagagaacccagagcgccatgttcaaccaggtgctgatcctgatcagcaccctgctgtgcctgatcttcacctgcatctgcggcatccagcacctggagagaatcggcaagaagctgaacctgttcgacagcctgtacttctgcatcgtgaccttcagcaccgtgggcttcggcgacgtgacccccgagacctggagcagcaagctgttcgtggtggccatgatctgcgtggccctggtggtgctgcccatccagttcgagcagctggcctacctgtggatggagagacagaagagcggcggcaactacagcagacacagagcccagaccgagaagcacgtggtgctgtgcgtgagcagcctgaagatcgacctgctgatggacttcctgaacgagttctacgcccaccccagactgcaggactactacgtggtgatcctgtgccccaccgagatggacgtgcaggtgagaagagtgctgcagatccccatgtggagccagagagtgatctacctgcagggcagcgccctgaaggaccaggacctgctgagagccaagatggacgacgccgaggcctgcttcatcctgagcagcagatgcgaggtggacagaaccagcagcgaccaccagaccatcctgagagcctgggccgtgaaggacttcgcccccaactgccccctgtacgtgcagatcctgaagcccgagaacaagttccacatcaagttcgccgaccacgtggtgtgcgaggaggagttcaagtacgccatgctggccctgaactgcatctgccccgccaccagcaccctgatcaccctgctggtgcacaccagcagaggccaggagggccagcagagccccgagcagtggcagaagatgtacggcagatgcagcggcaacgaggtgtaccacatcgtgctggaggagagcaccttcttcgccgagtacgagggcaagagcttcacctacgccagcttccacgcccacaagaagttcggcgtgtgcctgatcggcgtgagaagagaggacaacaagaacatcctgctgaaccccggccccagatacatcatgaacagcaccgacatctgcttctacatcaacatcaccaaggaggagaacagcgccttcaagaaccaggaccagcagagaaagagcaacgtgagcagaagcttctaccacggccccagcagactgcccgtgcacagcatcatcgccagcatgggcaccgtggccatcgacctgcaggacaccagctgcagaagcgccagcggccccaccctgagcctgcccaccgagggcagcaaggagatcagaagacccagcatcgcccccgtgctggaggtggccgacaccagcagcatccagacctgcgacctgctgagcgaccagagcgaggacgagaccacccccgacgaggagatgagcagcaacctggagtacgccaagggctaccccccctacagcccctacatcggcagcagccccaccttctgccacctgctgcacgagaaggtgcccttctgctgcctgagactggacaagagctgccagcacaactactacgaggacgccaaggcctacggcttcaagaacaagctgatcatcgtggccgccgagaccgccggcaacggcctgtacaacttcatcgtgcccctgagagcctactacagacccaagaaggagctgaaccccatcgtgctgctgctggacaacccccccgacatgcacttcctggacgccatctgctggttccccatggtgtactacatggtgggcagcatcgacaacctggacgacctgctgagatgcggcgtgaccttcgccgccaacatggtggtggtggacaaggagagcaccatgagcgccgaggaggactacatggccgacgccaagaccatcgtgaacgtgcagaccctgttcagactgttcagcagcctgagcatcatcaccgagctgacccaccccgccaacatgagattcatgcagttcagagccaaggactgctacagcctggccctgagcaagctggagaagaaggagagagagagaggcagcaacctggccttcatgttcagactgcccttcgccgccggcagagtgttcagcatcagcatgctggacaccctgctgtaccagagcttcgtgaaggactacatgatcagcatcaccagactgctgctgggcctggacaccacccccggcagcggcttcctgtgcagcatgaagatcaccgccgacgacctgtggatcagaacctacgccagactgtaccagaagctgtgcagcagcaccggcgacgtgcccatcggcatctacagaaccgagagccagaagctgaccaccagcgagagccagatcagcatcagcgtggaggagtgggaggacaccaaggacagcaaggagcagggccaccacagaagcaaccacagaaacagcaccagcagcgaccagagcgaccaccccctgctgagaagaaagagcatgcagtgggccagaagactgagcagaaagggccccaagcacagcggcaagaccgccgagaagatcacccagcagagactgaacctgtacagaagaagcgagagacaggagctggccgagctggtgaagaacagaatgaagcacctgggcctgagcaccgtgggctacgacgagatgaacgaccaccagagcaccctgagctacatcctgatcaaccccagccccgacaccagaatcgagctgaacgacgtggtgtacctgatcagacccgaccccctggcctacctgcccaacagcgagcccagcagaagaaacagcatctgcaacgtgaccggccaggacagcagagaggagacccagctgtag

SEQ ID NO: 260089 - DNA, 1572 bp, Artificial Sequence
  derived and/or modified sequence
atcatcaacgacctgcacagagccatccagagaacccagagcgccatgttcaaccaggtgctgatcctgatcagcaccctgctgtgcctgatcttcacctgcatctgcggcatccagcacctggagagaatcggcaagaagctgaacctgttcgacagcctgtacttctgcatcgtgaccttcagcaccgtgggcttcggcgacgtgacccccgagacctggagcagcaagctgttcgtggtggccatgatctgcgtggccctggtggtgctgcccatccagttcgagcagctggcctacctgtggatggagagacagaagagcggcggcaactacagcagacacagagcccagaccgagaagcacgtggtgctgtgcgtgagcagcctgaagatcgacctgctgatggacttcctgaacgagttctacgcccaccccagactgcaggactactacgtggtgatcctgtgccccaccgagatggacgtgcaggtgagaagagtgctgcagatccccatgtggagccagagagtgatctacctgcagggcagcgccctgaaggaccaggacctgctgagagccaagatggacgacgccgaggcctgcttcatcctgagcagcagatgcgaggtggacagaaccagcagcgaccaccagaccatcctgagagcctgggccgtgaaggacttcgcccccaactgccccctgtacgtgcagatcctgaagcccgagaacaagttccacatcaagttcgccgaccacgtggtgtgcgaggaggagttcaagtacgccatgctggccctgaactgcatctgccccgccaccagcaccctgatcaccctgctggtgcacaccagcagaggccaggagggccagcagagccccgagcagtggcagaagatgtacggcagatgcagcggcaacgaggtgtaccacatcgtgctggaggagagcaccttcttcgccgagtacgagggcaagagcttcacctacgccagcttccacgcccacaagaagttcggcgtgtgcctgatcggcgtgagaagagaggacaacaagaacatcctgctgaaccccggccccagatacatcatgaacagcaccgacatctgcttctacatcaacatcaccaaggaggagaacagcgccttcaagaaccaggaccagcagagaaagagcaacgtgagcagaagcttctaccacggccccagcagactgcccgtgcacagcatcatcgccagcatgggcaccgtggccatcgacctgcaggacaccagctgcagaagcgccagcggccccaccctgagcctgcccaccgagggcagcaaggagatcagaagacccagcatcgcccccgtgctggaggtggccgacaccagcagcatccagacctgcgacctgctgagcgaccagagcgaggacgagaccacccccgacgaggagatgagcagcaacctggagtacgccaagggctaccccccctacagcccctacatcggcagcagccccaccttctgccacctgctgcacgagaaggtgcccttctgctgcctgagactggacaagttctag

SEQ ID NO: 260090 - protein, 634 aa, Artificial Sequence
  derived and/or modified sequence
MDMNELPTNLPVDTVKLRIEKTVIRRISAEAFYYLVELQYLWVTYNSVASIDPSSFYNLKQLHELRLDGNSLAAFPWASLLDMPLLRTLDLHNNKITSVPNEALRYLKNLAYLDLSSNRLTTLPPDFLESWTHLVSTPSGVLDLSPSRIILGLQDNPWFCDCHISKMIELSKVVDPAIVLLDPLMTCSEPERLTGILFQRAELEHCLKPSVMTSATKIMSALGSNVLLRCDATGFPTPQITWTRSDSSPVNYTVIQESPEEGVRWSIMSLTGISSKDAGDYKCKAKNLAGMSEAVVTVTVLGITTTPIPPDTSERTGDHPEWDVQPGSGRSTSVSSASSYLWSSSFSPTSSFSASTLSPPSTASFSLSPFSSSTVSSTTTLSTSISASTTMANKRSFQLHQGGKRNLKVAKNGSKLPPASTSKKEELALLDQTMLTETNAAIENLRVVSETKESVTLTWNMINTTHNSAVTVLYSKYGGKDLLLLNADSSKNQVTIDGLEPGGQYMACVCPKGVPPQKDQCITFSTERVEGDDSQWSLLLVVTSTACVVILPLICFLLYKVCKLQCKSEPFWEDDLAKETYIQFETLFPRSQSVGELWTRSHRDDSEKLLLCSRSSVESQVTFKSEGSRPEYYC

SEQ ID NO: 260091 - DNA, 1905 bp, Artificial Sequence
  derived and/or modified sequence
atggacatgaacgagctgcccaccaacctgcccgtggacaccgtgaagctgagaatcgagaagaccgtgatcagaagaatcagcgccgaggccttctactacctggtggagctgcagtacctgtgggtgacctacaacagcgtggccagcatcgaccccagcagcttctacaacctgaagcagctgcacgagctgagactggacggcaacagcctggccgccttcccctgggccagcctgctggacatgcccctgctgagaaccctggacctgcacaacaacaagatcaccagcgtgcccaacgaggccctgagatacctgaagaacctggcctacctggacctgagcagcaacagactgaccaccctgccccccgacttcctggagagctggacccacctggtgagcacccccagcggcgtgctggacctgagccccagcagaatcatcctgggcctgcaggacaacccctggttctgcgactgccacatcagcaagatgatcgagctgagcaaggtggtggaccccgccatcgtgctgctggaccccctgatgacctgcagcgagcccgagagactgaccggcatcctgttccagagagccgagctggagcactgcctgaagcccagcgtgatgaccagcgccaccaagatcatgagcgccctgggcagcaacgtgctgctgagatgcgacgccaccggcttccccaccccccagatcacctggaccagaagcgacagcagccccgtgaactacaccgtgatccaggagagccccgaggagggcgtgagatggagcatcatgagcctgaccggcatcagcagcaaggacgccggcgactacaagtgcaaggccaagaacctggccggcatgagcgaggccgtggtgaccgtgaccgtgctgggcatcaccaccacccccatcccccccgacaccagcgagagaaccggcgaccaccccgagtgggacgtgcagcccggcagcggcagaagcaccagcgtgagcagcgccagcagctacctgtggagcagcagcttcagccccaccagcagcttcagcgccagcaccctgagcccccccagcaccgccagcttcagcctgagccccttcagcagcagcaccgtgagcagcaccaccaccctgagcaccagcatcagcgccagcaccaccatggccaacaagagaagcttccagctgcaccagggcggcaagagaaacctgaaggtggccaagaacggcagcaagctgccccccgccagcaccagcaagaaggaggagctggccctgctggaccagaccatgctgaccgagaccaacgccgccatcgagaacctgagagtggtgagcgagaccaaggagagcgtgaccctgacctggaacatgatcaacaccacccacaacagcgccgtgaccgtgctgtacagcaagtacggcggcaaggacctgctgctgctgaacgccgacagcagcaagaaccaggtgaccatcgacggcctggagcccggcggccagtacatggcctgcgtgtgccccaagggcgtgcccccccagaaggaccagtgcatcaccttcagcaccgagagagtggagggcgacgacagccagtggagcctgctgctggtggtgaccagcaccgcctgcgtggtgatcctgcccctgatctgcttcctgctgtacaaggtgtgcaagctgcagtgcaagagcgagcccttctgggaggacgacctggccaaggagacctacatccagttcgagaccctgttccccagaagccagagcgtgggcgagctgtggaccagaagccacagagacgacagcgagaagctgctgctgtgcagcagaagcagcgtggagagccaggtgaccttcaagagcgagggcagcagacccgagtactactgctag

SEQ ID NO: 260092 - DNA, 1905 bp, Artificial Sequence
  derived and/or modified sequence
atggacatgaatgaactcccaaccaatctcccggttgataccgttaagcttcgcatagagaagacagtcattagaaggatttccgctgaggctttttattatctggtggaattacagtacctatgggtcacatataatagcgtggcatccattgaccctagtagcttttacaatcttaaacagttgcatgagctgcgactggacggcaactctctggccgctttcccttgggcaagtctgcttgatatgcccctgttacgcacacttgacctccacaacaacaagatcacctccgtgcctaatgaggccctgagatatctaaagaaccttgcctacctagatctgtcgtcaaatcgcctcacaacactgccccctgactttctagaatcctggacccacctcgtctccacacccagcggtgtgctggatttatccccatctcgcatcatcttgggactccaggacaatccttggttttgtgattgtcacatatccaagatgatcgaattatcaaaggtggtggatcccgctattgtgctactggacccgttaatgacttgtagtgaaccggaacgcttgacgggaatcttattccagagggcagagttagaacattgtctgaagcctagcgtgatgacttcagccacaaagatcatgtctgctcttggaagtaacgttcttctgaggtgtgacgccaccggctttcccactccccagatcacatggactcgatccgacagctcccctgttaattacacagtcatccaagagagtcccgaggaaggagtgagatggtctataatgtccttaaccggtatttcgagtaaggacgccggagattataagtgtaaagcgaagaatctggctggtatgtctgaggcggttgtaacagtaacagtcctgggcatcaccacaacacccatcccccctgatacaagcgaacgtaccggggatcacccagagtgggacgttcagcccggctcaggccgctccacttcagtgtcctctgcatcaagctacctttggtcctcgtctttttcgcccacgagcagcttctccgccagcacactttcccctccctccacagctagcttctctttgtcaccattcagtagtagcaccgtctcaagtactactacactctccacgtctatcagcgcctccactacgatggcgaataagaggagctttcagttacatcaggggggcaagcgcaacttaaaggtggcaaagaacggtagtaagttgccacccgcgagtacctccaagaaggaggagcttgcgctgctcgaccagaccatgctcacagagaccaacgctgccatcgagaatctgcgcgtggtttcagaaactaaagagtccgtgaccctcacttggaacatgatcaatacaacgcataattctgctgtgaccgtcctgtactctaaatacggggggaaggaccttctgcttttaaatgccgattcatctaagaaccaggtcactatcgacggactcgagccaggggggcagtatatggcatgcgtgtgccccaagggggttcctccccaaaaggaccagtgtatcactttctcaacagaaagagtggagggagatgactcacagtggagtttactgctcgtggtcacctctacagcctgtgtagttatccttcctctgatctgctttctcctttataaagtctgtaagttgcagtgtaagagtgagccgttttgggaagatgacctggcgaaggagacttatatccaattcgaaacattattcccaagaagccagtctgtgggagaactatggacaagaagccaccgggacgactctgaaaagttacttctatgctccagatcttccgtggagtcccaagtaacgttcaagagtgaggggtcgagacctgagtactactgttag

SEQ ID NO: 260093 - DNA, 3624 bp, Artificial Sequence
  derived and/or modified sequence
cttagaccttggttagatttgaaccaaggccctcctcggcctcccaaagtgctgggattacaggcgtgagccactgcccagctgaaaattgatacatttttcaaatgagaagtatttttttcaaatgggtgttggaaagtgagtttcctcacattgttcatgttgtgacactaggttggtgctatgtaatgacatggatatgaacgagctgcctacgaacctccccgtggacactgtgaagcttcgcatagagaagactgtcatccgcagaatctctgcggaggccttctattacctggtggagctccagtatctctgggtgacttacaattccgtggccagcattgaccccagcagcttttacaacctgaagcaactgcatgagttgcgcttggatgggaattctctggctgctttcccttgggcatctctgctggacatgccccttctgaggaccctggacttgcacaataacaaaataaccagtgtgccaaatgaggcgctcaggtatctgaagaaccttgcctacttggatttatcaagcaacagactcaccacattgccaccagatttcctggagagctggactcatttagtttcaacaccttctggagtcctggacctttccccaagcaggattattcttggtctacaggacaatccttggttctgtgactgtcatatttccaaaatgattgagttgtcaaaggtcgttgaccctgctatagtgcttctggatccactgatgacttgcagtgaacctgagcgcctcacaggaattttgtttcagcgggctgaattggagcattgtctgaaaccatcagtgatgacctcagccaccaaaatcatgtctgctctgggcagtaatgttctactgcggtgtgatgccactggcttccccaccccacagatcacatggaccagatctgacagctcgccagttaattatacagtaatacaagaatctccagaggaaggagtcagatggtccataatgagcttgacaggcatttcttccaaagacgctggggattacaaatgtaaggccaaaaatctggctgggatgtcagaagctgtggttactgtgacagtgcttggcattaccacaactccaataccaccagacacttctgaaagaactggagatcatcctgagtgggatgtccagccgggatctggaagatctacatctgtatctagcgcatcatcatatctttggtcctcttccttctcccccacatcttctttttctgcttctactttgtctcctccctctactgcttccttctctttatctcctttctcctcctccactgtttcttcaaccacaactctgagcacaagcatctcagcaagtaccaccatggccaacaagcgatcattccagctccaccaaggtgggaaaagaaatttaaaggtggcaaagaatggaagtaagcttcctccagccagcacaagtaagaaagaagagctggcattgttggatcaaacaatgcttacggagacaaatgccgcaatagaaaacctcagggtggtcagtgagactaaagagagtgtgacattgacgtggaatatgatcaacaccacacataactctgcagtgactgtgttgtattccaagtatggtgggaaggacctgctgctgttgaatgcagactccagcaagaaccaagtaaccatagatggcttggaacccggtgggcaatacatggcctgtgtctgtccaaaaggagtgcctccccagaaagaccaatgcatcaccttttctactgaaagagttgaaggagatgattctcaatggtctctccttctcgtggtgaccagtactgcctgtgttgttatcttaccattgatttgtttcttgttgtacaaagtttgcaaactgcaatgtaaatcagaacctttttgggaagatgatttggcaaaggagacttatatccaatttgagaccctgtttcccaggtctcaaagtgtaggtgagctctggacacgaagccacagggatgactcagagaaattgctgctttgttctaggtcaagtgtggaatctcaggtgacttttaaaagtgaaggttccagaccagagtattattgctaaggttctgcagctcaggtgcatgtgagctacaaaactagcatctaagggtataattgaccctaggtttggatgacttttggacagactttcacattgtacatgaaaatcacaaatggaatgcttttaagtatgtttaaaaaataccatgagacctctgaactgaaaagacaaataatgttgattttttttcttgtgtggaaaaggtctacagaaataatttttagagtggtgcttaataaattattaatactttttagggtaatgttttagttcttaaaaataagttcatgtgaaagtagcaagtgaactctgtatttaaaaatatagttttttgagtcatgaggaaacattagcaaaaccagctaagccttgatgtttattcatgttcgaagtgcattatagcatttgctgtggatgttttctgacattgcctaatggagagcgtgggatcataaaggattttgtgttcactaaggttaaatctaactcacgggagagagagggctctgtctcttggtaccattatgcattgtgatactatagagttgtgttcatatttcttgtaagaaaaatttttgcttttctttagaaatataggtattagcaaaagtaagtatacaaagaggattatgacaaatagaccatttctttaaaaatggtaactgttgcatttaaacacatcgactgacagattatatggatatttaaaaataactttaaatcaatcttttaatattttgctgtttgctcttatgttctcccttctttcttccttccttgtcttccctccctttccttccttcattctttctttcttctgctctgtcagaagatatacaagtagccaaagcatcacgagccaagctgtttgtcttttgccatattgtcttttgattctcttgataaagagaaagcttttgaaattacttactgccctttgaaagtctgttttacaaccccaaaggatattttaggactttaaaagggaagcttcagtggattcatttggttagattcttttcctaggttaaaaacatcggggaacttaaatacataggaaaggagttcacaaataaaatttagtttttttagaaagagaatattttaataactgtagtatactacaagaaacatctcatggctttaagattaacgatagcgataaggcccactcaagcatctcacagtggtgatattacatgtcacttagcaggatgcaacctggcctagggatttccagaagacaaggccacctcagcacagatgcaactttcataaattttagaacaaagcctaaccttactagattaaacttgctctatgaaagaaacacttggtaattgacccagactgaatacatgtataagaaatgggaaagatctcccaaactctgagaacggtcctcaaatagaagctctcctagtcagttggtcatctgacctctgactatatccggcctatgacaccagccagctcctgctttctgtcttgtaagagcactgctggaataaactacttgagcatta

SEQ ID NO: 260094 - DNA, 1905 bp, Artificial Sequence
  derived and/or modified sequence
atggacatgaatgagctgcccaccaacctgcctgtggacacagtgaagctgagaattgagaagacagtcatccgccgcatctctgctgaggccttctactacctggtggagctgcagtacctgtgggtgacctacaacagcgtggccagcattgaccccagcagcttctacaacctgaagcagctgcacgagctgcggctggatggcaacagcctggccgccttcccctgggccagcctgctggacatgcccctgctgcggaccctggacctgcacaacaacaagatcacctctgtgcccaatgaggccctgcgctacctgaagaacctggcctacctggacctgagcagcaaccggctgaccaccctgcccccagacttcctggagagctggacccacctggtgtccaccccatctggagtgctggacctgagccccagccgcatcatcctgggcctgcaggacaacccctggttctgtgactgccacatcagcaagatgattgagctgagcaaggtggtggaccctgccatcgtgctgctggaccccctgatgacctgcagcgagcctgagcggctgaccggcatcctcttccagagagctgagctggagcactgcctgaagcccagcgtgatgaccagcgccaccaagatcatgtctgccctgggcagcaatgtgctgctgcgctgtgatgccaccggcttccccaccccccagatcacctggaccaggagtgacagcagccctgtgaactacaccgtcatccaggagagccctgaggagggcgtgcgctggagcatcatgagcctgaccggcatcagcagcaaggatgctggggactacaagtgcaaggccaagaacctggccggcatgtctgaggccgtggtgacagtgacagtgctgggcatcaccaccacccccatccccccagacaccagcgagaggactggagaccaccctgagtgggatgtgcagcccggcagcggccgcagcacctctgtgagcagcgccagcagctacctgtggagcagcagcttcagccccaccagcagcttcagcgccagcaccctgagcccccccagcacagccagcttcagcctgagccccttcagcagcagcacagtgagcagcaccaccaccctgagcaccagcatcagcgccagcaccaccatggccaacaagaggagcttccagctgcaccagggcggcaagaggaacctgaaggtggccaagaatggcagcaagctgcccccagccagcaccagcaagaaggaggagctggccctgctggaccagaccatgctgacagagaccaatgctgccatcgagaacctgcgggtggtgtctgagaccaaggagagcgtgaccctgacctggaacatgatcaacaccacccacaacagcgctgtgacagtgctgtacagcaaatatggaggcaaggacctgctgctgctgaatgctgacagcagcaagaaccaggtgaccattgatggcctggagcccggcggccagtacatggcctgtgtgtgccccaagggcgtgcccccccagaaggaccagtgcatcaccttcagcacagagcgggtggagggagatgacagccagtggagcctgctgctggtggtgaccagcacagcctgtgtggtgatcctgcccctcatctgcttcctgctgtacaaggtgtgcaagctgcagtgcaagtctgagcccttctgggaggatgacctggccaaggagacctacatccagtttgagaccctcttccccaggagccagagcgtgggggagctgtggaccaggagccacagagatgacagcgagaagctgctgctgtgcagccgcagctctgtggagagccaggtgaccttcaagtctgagggcagcaggcctgagtactactgctag

SEQ ID NO: 260095 - DNA, 1905 bp, Artificial Sequence
  derived and/or modified sequence
atggacatgaacgagctgcccaccaacctgcccgtggacaccgtgaaactgcgaattgagaagaccgtaatccgtaggattagcgccgaagccttttactacctggtcgaactccaatatctctgggtgacatataatagcgtcgcctccatcgaccccagctctttctataatctgaaacagctccatgagctgaggttggatggtaatagcctggctgccttcccgtgggcctcacttctggacatgcccttgctgagaacactggacctgcataacaacaaaataacatccgttccgaacgaggccctaaggtacttgaagaatttggcttacctcgacttgtcatctaataggctgactacactgcctccggattttctggagagctggactcatctggtatccactccatctggcgtactggacctttccccgtcccgaattattttggggctgcaggacaacccttggttttgcgactgtcacatctccaaaatgattgagctgtccaaggttgtagatcctgccatcgtgttactagacccactgatgacatgctccgaacccgagcggttgactggcattctgttccaacgcgcagaactagaacactgtcttaaacccagcgtgatgacaagcgcgactaaaattatgagtgctctgggctctaatgttctgctaagatgcgatgctaccgggtttcccacacctcagattacgtggacacgttctgattcctccccagtgaactacacagttatccaggaaagtcccgaagaaggcgtgaggtggagcataatgagcttgacgggaatctcctccaaggacgccggcgattacaagtgcaaggcaaagaatttggcgggaatgtctgaagccgttgtcacggttacagttctggggatcaccactacgccgataccacccgacacatctgagagaactggggaccacccggagtgggacgtgcagcctgggagcgggcgcagcacgtcagtttcatccgcctcctcatacctatggagctctagcttttcaccaacctcctctttttcagcctctacactgtctcctccaagtacagccagtttttcactgtcaccattcagcagcagcaccgtctcgtccacaaccacactgagcactagcatatcagcatcaaccactatggctaataaacggtcattccaactgcaccaaggagggaagagaaacctgaaggtcgccaaaaatggatctaaactgcctccagcctctacctccaagaaagaggagcttgctctgcttgaccagaccatgctgactgagactaatgccgccatagaaaatctgcgcgtcgtcagcgaaacaaaggagagcgtgaccctcacctggaacatgatcaacactactcacaattcagctgtcaccgtcctatactcaaagtacggcggcaaagatcttctcctgctgaatgccgacagctcaaaaaaccaggtgaccatcgatggcctagagccaggcggacaatatatggcttgcgtctgccccaagggtgtgccaccacagaaggaccagtgcattacctttagtacagagcgtgtggagggcgatgatagccagtggagtctgctgctagtcgttacatccaccgcctgcgtggttattctaccgctaatctgctttctgctgtacaaagtgtgcaagttgcagtgtaagagcgaacctttttgggaagatgaccttgctaaagagacttacatccaattcgagactctgtttccacgcagccagtccgttggggagctgtggacccggtcacatcgcgatgactctgagaaattgttgttgtgtagccgtagctccgttgagagtcaggtgacctttaagagcgaggggtctaggcccgagtattattgttag

SEQ ID NO: 260096 - DNA, 1905 bp, Artificial Sequence
  derived and/or modified sequence
atggacatgaacgaactgcctacaaatctacctgtggatacagtgaagctacggattgagaagaccgtcattcggaggatctccgccgaggcattttactatttagttgagctccagtatttgtgggtcacttataatagtgttgcaagcatcgatccctcaagtttctacaacctgaaacagttgcacgagttgcgacttgacgggaacagtctagctgcctttccatgggcaagtcttctagatatgccgctattgaggacgctggacctgcacaataacaagataacatctgtgccaaacgaagctttaagatatttgaaaaatctggcgtaccttgacttatccagcaaccggctaacaactttgccccctgatttcttggagtcttggacccacctagtctccactccttccggggtgttggatttgtcaccaagtagaataattctgggcctccaggacaatccatggttttgtgattgtcacatttccaagatgatcgagctctcaaaggtcgtggatcccgcaatcgtgctgctggacccgctgatgacctgctctgaaccagaaaggctaaccggaattttgttccagagggccgaactcgaacactgcctgaagccatccgtcatgacctcagccaccaagatcatgtcggcactcgggagcaatgtacttctaagatgtgatgccacaggatttcctacgccgcagattacttggactcggtccgattctagcccagtcaattacacagtcatacaggaatcaccggaggaaggagtccgctggagtataatgtcactgacgggcataagctctaaggacgctggcgactacaagtgcaaagccaaaaacctggccggaatgagtgaagcggtggtgacggttactgtcctagggatcacaacaacacccattccacccgacacttctgagagaacaggggaccacccagagtgggatgtgcagccaggttctgggcgatctacaagcgtctcctcagcttcatcctatctgtggtcgtcctccttcagccccacctcaagtttcagcgcctcaacactgagccccccttctaccgcctctttttccctttccccttttagcagcagcactgtgagttctacaactaccctttccacttcaatatcggcgtccaccacaatggctaataagaggtcttttcagctgcaccaagggggaaagcgcaaccttaaggttgctaagaacggtagcaaattgccacctgcctcaaccagtaaaaaggaggaattggccctgcttgaccagaccatgctaacggaaacaaatgccgctattgagaatttgcgcgtggttagtgaaactaaggagagcgtcactttgacgtggaatatgatcaataccactcataacagcgctgtgactgttctgtattcaaagtacggcggaaaagacttgctgctgctcaatgctgacagctcgaaaaatcaagtgactattgacggtttagaacctggtggacaatatatggcatgtgtgtgccctaagggggtgcctccccagaaggaccagtgtatcacatttagtacagagagagtagagggcgatgactctcagtggagcttgctccttgtggtgacttccacagcttgtgtcgtgattctacctctgatttgctttctcttatacaaagtctgcaaactgcagtgcaaatccgaacccttctgggaggacgacctcgctaaagaaacctacattcagtttgaaaccctttttcccagatcgcagagtgtgggagaactatggacacgaagccatagggacgactccgagaaactactcctgtgttcgcgctctagcgttgagtctcaggttacatttaaatccgagggatcaaggccggagtattactgttag

SEQ ID NO: 260097 - DNA, 573 bp, Artificial Sequence
  derived and/or modified sequence
atgaaggccagccagtgctgctgctgcctgagccacctgctggccagcgtgctgctgctgctgctgctgcccgagctgagcggccccctggccgtgctgctgcaggccgccgaggccgcccccggcctgggcccccccgaccccagacccagaaccctgccccccctgccccccggccccacccccgcccagcagcccggcagaggcctggccgaggccgccggccccagaggcagcgagggcggcaacggcagcaaccccgtggccggcctggagaccgacgaccacggcggcaaggccggcgagggcagcgtgggcggcggcctggccgtgagccccaaccccggcgacaagcccatgacccagagagccctgaccgtgctgatggtggtgagcggcgccgtgctggtgtacttcgtggtgagaaccgtgagaatgagaagaagaaacagaaagaccagaagatacggcgtgctggacaccaacatcgagaacatggagctgacccccctggagcaggacgacgaggacgacgacaacaccctgttcgacgccaaccaccccagaagatag

SEQ ID NO: 260098 - DNA, 1356 bp, Artificial Sequence
  derived and/or modified sequence
aagttagcaaccgaaggcgtccttagcagcagtggccgctgagatgtacgaacttccggttctccgggcagctgccactgctgtagcttctgccacctgccacgaccgggcctctccctggcgtttggtcacctctgcttcattctccaccgcgcctatggtccctcttggagccagcgtggcgggcctggcggctcccgggtggtgagagagcggtccgggaacgatgaaggcctcgcagtgctgctgctgtctcagccacctcttggcttccgtcctcctcctgctgttgctgcctgaactaagcgggcccctggcagtcctgctgcaggcagccgaggccgcgccaggtcttgggcctcctgaccctagaccacggacattaccgccgctgccaccgggccctacccctgcccagcagccgggccgtggtctggctgaagctgcggggccgcggggctccgagggaggcaatggcagcaaccctgtggccgggcttgagacggacgatcacggagggaaggccggggaaggctcggtgggtggcggccttgctgtgagccccaaccctggcgacaagcccatgacccagcgggccctgaccgtgttgatggtggtgagcggcgcggtgctggtgtacttcgtggtcaggacggtcaggatgagaagaagaaaccgaaagactaggagatatggagttttggacactaacatagaaaatatggaattgacacctttagaacaggatgatgaggatgatgacaacacgttgtttgatgccaatcatcctcgaagataagaatgtgccttttgatgaaagaactttatctttctacaatgaagagtggaatttctatgtttaaggaataagaagccactatatcaatgttgggggggtatttaagttacatatattttaacaacctttaatttgctgttgcaataaataccgtatccttttattatatctttatatgtatagaagtactctgttaatgggctcagagatgttggggataaagtatactgtaataatttatctgtttgaaaattactataaaacggtgttttctgatcggtttttgtttcctgcttaccatatgattgtaaattgttttatgtattaatcagttaatgctaattatttttgctgatgtcatatgttaaagagctataaattccaacaaccaactggtgtgtaaaaataatttaaaatttcctttactgaaaggtatttcccatttttgtggggaaaagaagccaaatttattactttgtgttggggtttttaaaatattaagaaatgtctaagttattgtttgcaaaacaataaatatgattttaaattctcttaaa

SEQ ID NO: 260099 - DNA, 573 bp, Artificial Sequence
  derived and/or modified sequence
atgaaggcctcccagtgctgctgctgtttaagccatttgctcgcttctgtgctgctgcttctcttgctccccgagttaagtgggcctttagcggttttgcttcaggctgccgaggcagcaccagggttaggcccacctgacccaaggcctagaaccctgcccccccttcctccaggacccactccagctcagcagcccggtcgggggctggcagaagcagccggccctcgcgggtctgaggggggtaatggttctaaccccgtggccggcttagagaccgacgatcatggaggtaaagccggggaaggctcggttggcggggggttagctgtttctccaaaccctggagataaaccaatgacacaacgcgccttgactgttctgatggtagtgtcgggagccgttctggtatacttcgtggtgcgcaccgtgaggatgcgcagaagaaaccgaaagacccgccggtacggggtgctcgatactaatattgagaatatggaacttaccccactcgagcaggacgacgaagacgacgacaatacccttttcgacgctaatcaccccagacgttag

SEQ ID NO: 260100 - DNA, 573 bp, Artificial Sequence
  derived and/or modified sequence
atgaaggccagccagtgctgctgctgcctgagccacctgctggcctctgtgctgctgctgctgctgctgcctgagctgagcggccccctggccgtgctgctgcaggccgctgaggccgcccctggcctgggccccccagacccccggcccaggaccctgccccccctgcccccaggccccaccccagcccagcagcccggccggggcctggccgaggccgccggcccccggggcagcgagggcggcaatggcagcaaccctgtggccggcctggagacagatgaccacggcggcaaggccggggagggctctgtgggcggcggcctggccgtgagccccaaccctggggacaagcccatgacccagagggccctgactgtgctgatggtggtgtctggagctgtgctggtgtactttgtggtgaggacagtgaggatgagaagaagaaacaggaagacccggcgctatggagtgctggacaccaacatcgagaacatggagctgacccccctggagcaggatgatgaagatgatgacaacaccctgtttgatgccaaccaccccaggaggtag

SEQ ID NO: 260101 - DNA, 573 bp, Artificial Sequence
  derived and/or modified sequence
atgaaggccagccagtgctgctgctgcctgagccacctgctggcctctgtcctcctcctgctgctgctgcctgagcttagcggtcccctagctgtgctgctgcaagccgctgaggccgctcccggcttgggccctcctgacccccgtcctcgcaccctgccccctctgccaccaggcccaacaccagcgcagcagccaggacgcggattagccgaggccgccggaccacgcggaagcgaggggggtaacggaagcaaccctgtggcaggcctcgaaaccgacgatcacggaggaaaagccggggaggggtctgtcgggggaggactggctgtgtcacccaatcctggggacaagcccatgacacagcgcgcgttaacggtgctaatggtagtgtccggggctgtgctggtttatttcgttgtgagaaccgtgcggatgagaagacggaaccgcaaaactcgtaggtatggtgttctggataccaacatcgagaacatggagctcacacctttggagcaggatgatgaggatgatgacaatacactgtttgacgcaaatcatccccgcaggtag

SEQ ID NO: 260102 - DNA, 573 bp, Artificial Sequence
  derived and/or modified sequence
atgaaagcatctcagtgttgttgctgccttagccatcttcttgccagcgttctcctgctactgcttttacctgagctcagcggcccactggctgtgctcctgcaagctgcagaggcagcgcctggtctggggcctcccgaccctcggcctcgaacgctaccgcctcttccaccaggcccaacccccgcacagcaacccggacgcggactggcagaggccgctggccctcgcggaagcgaaggcggaaatggatcaaatccagtggcaggactcgagaccgatgaccacggcggaaaggccggagaagggtcagtcgggggaggcctcgcagtatctccgaatcctggcgacaagcctatgacccagagagctcttacagtcctgatggttgttagtggggctgtcctggtgtactttgtggtgcgcacagtccggatgagacggcgaaatcggaaaacccggcgttatggagtgttggatactaatatagaaaatatggagcttacgccgttggagcaggacgacgaagatgatgacaacaccttgtttgacgccaatcaccctaggcgctag

SEQ ID NO: 260103 - protein, 409 aa, Artificial Sequence
  derived and/or modified sequence
MEESWEAAPGGQAGAELPMEPVGSLVPTLEQPQVPAKVRQPEGPESSPSPAGAVEKAAGAGLEPSSKKKPPSPRPGSPRVPPLSLGYGVCPEPPSPGPALVKLPRNGEAPGAEPAPSAWAPMELQVDVRVKPVGAAGGSSTPSPRPSTRFLKVPVPESPAFSRHADPAHQLLLRAPSQGGTWGRRSPLAAARTESGCDAEGRASPAEGSAGSPGSPTCCRCKELGLEKEDAALLPRAGLDGDEKLPRAVTLTGLPMYVKSLYWALAFMAVLLAVSGVVIVVLASRAGARCQQCPPGWVLSEEHCYYFSAEAQAWEASQAFCSAYHATLPLLSHTQDFLGRYPVSRHSWVGAWRGPQGWHWIDEAPLPPQLLPEDGEDNLDINCGALEEGTLVAANCSTPRPWVCAKGTQ

SEQ ID NO: 260104 - DNA, 1230 bp, Artificial Sequence
  derived and/or modified sequence
atggaggagagctgggaggccgcccccggcggccaggccggcgccgagctgcccatggagcccgtgggcagcctggtgcccaccctggagcagccccaggtgcccgccaaggtgagacagcccgagggccccgagagcagccccagccccgccggcgccgtggagaaggccgccggcgccggcctggagcccagcagcaagaagaagccccccagccccagacccggcagccccagagtgccccccctgagcctgggctacggcgtgtgccccgagccccccagccccggccccgccctggtgaagctgcccagaaacggcgaggcccccggcgccgagcccgcccccagcgcctgggcccccatggagctgcaggtggacgtgagagtgaagcccgtgggcgccgccggcggcagcagcacccccagccccagacccagcaccagattcctgaaggtgcccgtgcccgagagccccgccttcagcagacacgccgaccccgcccaccagctgctgctgagagcccccagccagggcggcacctggggcagaagaagccccctggccgccgccagaaccgagagcggctgcgacgccgagggcagagccagccccgccgagggcagcgccggcagccccggcagccccacctgctgcagatgcaaggagctgggcctggagaaggaggacgccgccctgctgcccagagccggcctggacggcgacgagaagctgcccagagccgtgaccctgaccggcctgcccatgtacgtgaagagcctgtactgggccctggccttcatggccgtgctgctggccgtgagcggcgtggtgatcgtggtgctggccagcagagccggcgccagatgccagcagtgcccccccggctgggtgctgagcgaggagcactgctactacttcagcgccgaggcccaggcctgggaggccagccaggccttctgcagcgcctaccacgccaccctgcccctgctgagccacacccaggacttcctgggcagataccccgtgagcagacacagctgggtgggcgcctggagaggcccccagggctggcactggatcgacgaggcccccctgcccccccagctgctgcccgaggacggcgaggacaacctggacatcaactgcggcgccctggaggagggcaccctggtggccgccaactgcagcacccccagaccctgggtgtgcgccaagggcacccagtag

SEQ ID NO: 260105 - DNA, 1230 bp, Artificial Sequence
  derived and/or modified sequence
atggaggagtcttgggaggccgcgcccggaggtcaggctggcgccgagctgcctatggagccagttggtagccttgtccccaccctggagcaacctcaagtgcccgccaaagtgagacaacccgagggccctgaatcctctcctagccctgctggcgcagttgaaaaagccgccggagcaggactcgagccctcctccaaaaagaagccccctagtccgaggcccgggtcacctcgggttcctcctcttagcttggggtatggagtgtgtccggagccacccagtcctgggcctgcactggtgaagttgccacgcaatggcgaggcaccaggggctgaaccagctcctagcgcatgggcccccatggagcttcaggtggacgtccgggtcaagcctgtcggggctgcggggggttcttcgaccccttcaccacggccatctacgagatttctgaaggtgccagtgcccgaatctcccgccttttcacgacacgccgaccccgcacaccagttgctgcttcgagctcctagccagggggggacctggggcaggaggagtccgctggcagccgcaaggacggagagcgggtgtgatgccgagggaagagcatcaccagcggaaggttccgcaggcagccccggctctccaacatgctgccgctgcaaagaactgggtctggaaaaggaggacgccgctctgttgcccagggctgggctggatggcgatgaaaagctaccccgggctgtgaccttgaccggcctgcccatgtacgtgaagtctttatattgggcactggccttcatggccgtgcttcttgcagtatccggggtagtgatagtggtcttagcttccagggccggcgcccgctgtcagcagtgtcctcccggatgggtgttgtccgaagagcactgctactacttttccgccgaggctcaggcgtgggaagcttcacaggctttctgctccgcctatcatgctaccctgccccttctgtcgcacactcaggatttcttgggcagatatccggtcagccgccactcctgggtcggagcttggcgcggcccacagggctggcactggatcgatgaagcaccccttcctccccaactcctccccgaagacggggaagacaacctggacatcaactgtggagctttggaagagggcaccctggtagcagccaattgcagcactcctagaccctgggtgtgtgctaaaggcacacagtag

SEQ ID NO: 260106 - DNA, 2197 bp, Artificial Sequence
  derived and/or modified sequence
ggagagcgaagctcctctgcactgggcccaggtgcgctcctcagcgtctccgggtggcggggcgcgcgggatggaggagtcttgggaggctgcgcccggaggccaagccggggcagagctcccaatggagcccgtgggaagcctggtccccacgctggagcagccgcaggtgcccgcgaaggtgcgacaacctgaaggtcccgaaagcagcccaagtccggccggggccgtggagaaggcggcgggcgcaggcctggagccctcgagcaagaaaaagccgccttcgcctcgccccgggtccccgcgcgtgccgccgctcagcctgggctacggggtctgccccgagccgccgtcaccgggccctgccttggtcaagctgccccggaatggcgaggcgcccggggctgagcctgcgcccagcgcctgggcgcccatggagctgcaggtagatgtgcgcgtgaagcccgtgggcgcggccggtggcagcagcacgccatcgcccaggccctccacgcgcttcctcaaggtgccggtgcccgagtcccctgccttctcccgccacgcggacccggcgcaccagctcctgctgcgcgcaccatcccagggcggcacgtggggccgccgctcgccgctggctgcagcccggacggagagcggctgcgacgcagagggccgggccagccccgcggaaggaagcgccggctccccgggctcccccacgtgctgccgctgcaaggagctggggctggagaaggaggatgcggcgctgttgccccgcgcggggttggacggcgacgagaagctgccccgggccgtaacgcttacggggctacccatgtacgtgaagtccctgtactgggccctggcgttcatggctgtgctcctggcagtctctggggttgtcattgtggtcctggcctcaagagcaggagccagatgccagcagtgccccccaggctgggtgttgtccgaggagcactgttactacttctctgcagaagcgcaggcctgggaagccagccaggctttctgctcagcctaccacgctaccctccccctgctaagccacacccaggacttcctgggcagatacccagtctccaggcactcctgggtgggggcctggcgaggcccccagggctggcactggatcgacgaggccccactcccgccccagctactccctgaggacggcgaggacaatctggatatcaactgtggggccctggaggaaggcacgctggtggctgcaaactgcagcactccaagaccctgggtctgtgccaaggggacccagtgatctgggctctgcctggtcctcagcctgccaggcagatgcagcaccccctacaggggaggccagttgagagcttgggcagcctcttcctggacccagttatccaggtcttcatgctctgctcaagggggccacatgagcgagcctaggagctggacttcaacccaggaagatgcatccgagggaaaggagattttctatggcctcaggcctgagtgccaatattagtctccagcttctgtggatgatcggtttgatgacattgggatggttgtttagcatttctgtgccttggtttcattaaaatgacaatttccccctagaggaaaaagacagggttaacaaccacagcggattccaatctgggttctcattccggctcatggaaatgagtctgccgttgttcagtggcagtgggacttggcagggataacgtcattgctgtgaattctacttcaggcagctgggtgtacatcggacacagcctaccggcagcctctggaaaattaaccaaggaaaaggagcggtcagccctggaaagaggggagagcaaggttttccttccccaccctgagagttggcaaagggttggcagacaggaaggttctgggtggagatcccgcatgtgggctggccagcccctggcacgctgatgcccaagggtgagacaaggcagagaggacagggccacctggcaggagaagccaggagagcaccccagcttggtaggtggaagctgaggagtctgagtgaaaaaggaaatcagagaaatgcaggcacgttccaggcagctcttctacccacagctgcagagacgaccaacctgaagatgtctccatgctggggtgcagtgaagaccttcaggctggaggatgtggctgacagagttgtgtagttcct

SEQ ID NO: 260107 - DNA, 1230 bp, Artificial Sequence
  derived and/or modified sequence
atggaggagagctgggaggccgcccctgggggccaggccggggctgagctgcccatggagcctgtgggcagcctggtgcccaccctggagcagccccaggtgcctgccaaggtgcggcagcctgagggccctgagagcagccccagccctgctggagctgtggagaaggccgccggggccggcctggagcccagcagcaagaagaagccacccagccccaggcctggcagcccccgggtgccccccctgagcctgggctatggagtgtgcccagagccccccagccctggccctgccctggtgaagctgcccagaaatggagaggcccctggagctgagcccgcccccagcgcctgggcccccatggagctgcaggtggatgtgcgggtgaagcctgtgggcgccgccggcggcagcagcacccccagcccccggcccagcacccgcttcctgaaggtgcctgtgcctgagagccctgccttcagcagacatgctgaccctgcccaccagctgctgctgcgggcccccagccagggcggcacctggggccgccgcagccccctggccgccgccaggacagaaagtggctgtgatgctgagggccgggccagccctgctgagggcagcgctggcagccctggcagccccacctgctgccgctgcaaggagctgggcctggagaaggaggatgctgccctgctgcccagggctggcctggatggagatgagaagctgcccagggctgtgaccctgaccggcctgcccatgtatgtgaagagcctgtactgggccctggccttcatggctgtgctgctggccgtgtctggagtggtgattgtggtgctggccagccgggccggggcccgctgccagcagtgccccccaggctgggtgctgtctgaggagcactgctactacttctctgctgaggcccaggcctgggaggccagccaggccttctgcagcgcctaccacgccaccctgcccctgctgagccacacccaggacttcctgggccgctaccctgtgagccgccacagctgggtgggcgcctggaggggcccccagggctggcactggattgatgaggcccccctgcccccccagctgctgcctgaagatggagaggacaacctggacatcaactgtggggccctggaggagggcaccctggtggccgccaactgcagcaccccccggccctgggtgtgtgccaagggcacccagtag

SEQ ID NO: 260108 - DNA, 1230 bp, Artificial Sequence
  derived and/or modified sequence
atggaggagagctgggaggccgcccccggcggccaggccggcgccgaactgccaatggagccagtcgggtctctcgtccctacactggagcagccccaagtacctgctaaggtccggcaacccgaggggcctgaatccagccctagccccgcaggggctgtagaaaaagccgccggcgccggactagaaccatcctccaaaaagaagcctcctagtccaaggccaggctcccctcgagtgcccccgctttccctgggatacggagtgtgtcccgagcccccatctccaggtcccgctctagtcaagttgccccggaacggcgaggctcctggagcagagcccgccccatccgcttgggcaccgatggagctgcaggtcgacgtgagggttaaacccgtgggcgcagccggtggcagctccacaccatcgccaagaccctctacccgattcttgaaggtgcctgtcccggaaagccccgccttctctagacacgccgaccctgcccaccagttgcttttacgcgctccctcacagggcggcacctgggggagaagatccccactggcagcagctcggacggagagtggttgcgacgctgagggaagggcaagccccgccgagggatctgcaggatcgccagggtcccctacatgttgtcgatgcaaagaactggggcttgagaaggaagacgctgctctgctgcccagggcgggcctcgatggagacgaaaaattacctcgggcagtcaccctgacaggacttcccatgtacgtcaaatccctctactgggcccttgcttttatggctgtgctgctggccgtcagtggcgtggtcatcgtagtgcttgctagtagagccggggcaaggtgtcagcagtgtccaccggggtgggtgctctcggaggaacattgctactacttctccgccgaggcacaggcctgggaggcctctcaggctttttgtagcgcctaccacgccacactgcctctgctctcccatacgcaggattttcttggccggtatccagtttctaggcactcctgggtgggagcttggcggggccctcagggctggcattggattgatgaagccccacttccccctcaactgctgccagaagatggcgaggacaacttggacattaattgcggagccctcgaagagggtacactggtggctgcgaattgcagtacgcctaggccatgggtgtgtgcaaaaggcacacagtag

SEQ ID NO: 260109 - DNA, 1230 bp, Artificial Sequence
  derived and/or modified sequence
atggaggaaagctgggaggcagcgccaggaggccaggctggagctgagctcccaatggagcccgtggggtccttagtcccaacactggagcagccacaggttccagcaaaagtacgccaaccagagggtcctgaatccagcccctcacccgctggtgccgttgagaaagctgctggcgctggcctggagccaagttctaaaaagaaaccacccagtcccagacccggtagccccagagtgccccctctgagtctggggtatggtgtgtgtccagaaccaccttctccaggcccagccttggttaagctgccacggaatggggaggcacctggtgcagagcccgcaccctcagcatgggcacccatggagttgcaggtggacgtgagagtcaagcccgttggggctgctggcggtagctccacacctagtcccagacctagcacccgattcctgaaggtgcctgttcccgagtccccggctttctcccgtcacgcagatcctgctcatcagctgctgttgcgagcccctagccaaggtggcacttggggacgtcgctccccgcttgctgcagccagaacagaaagcggttgcgacgccgagggtagagccagccccgctgaaggttcggcgggtagccccggatcacctacctgttgtcgctgcaaggaactgggtctggagaaggaagacgcagctctgttgcctagagcagggctggacggtgatgaaaagctgcctcgcgcagtgactctcaccggcctgccaatgtatgtcaagagtttgtactgggcgctggccttcatggcagtcttactcgctgtttccggcgttgtgatagtcgtgcttgccagccgcgcaggcgctcgctgccagcagtgtcctcccggatgggtactgtcggaagaacactgctactactttagcgccgaagcgcaggcctgggaagccagccaagcgttctgctccgcctaccatgccacattgccgttgcttagccacacgcaagatttcctcggacggtaccccgtgtcacgtcatagttgggtgggcgcatggcgaggacctcaaggatggcattggatcgacgaagcccctttgcctccacagctgctccccgaagacggggaggacaatcttgatattaactgtggggcactggaagaggggaccttggtcgcggcaaactgtagcacaccaagaccatgggtctgtgccaaaggcacacagtag

SEQ ID NO: 260110 - protein, 607 aa, Artificial Sequence
  derived and/or modified sequence
MVCTRKTKTLVSTCVILSGMTNIICLLYVGWVTNYIASVYVRGQEPAPDKKLEEDKGDTLKIIERLDHLENVIKQHIQEAPAKPEEAEAEPFTDSSLFAHWGQELSPEGRRVALKQFQYYGYNAYLSDRLPLDRPLPDLRPSGCRNLSFPDSLPEVSIVFIFVNEALSVLLRSIHSAMERTPPHLLKEIILVDDNSSNEELKEKLTEYVDKVNSQKPGFIKVVRHSKQEGLIRSRVSGWRAATAPVVALFDAHVEFNVGWAEPVLTRIKENRKRIISPSFDNIKYDNFEIEEYPLAAQGFDWELWCRYLNPPKAWWKLENSTAPIRSPALIGCFIVDRQYFQEIGLLDEGMEVYGGENVELGIRVWQCGGSVEVLPCSRIAHIERAHKPYTEDLTAHVRRNALRVAEVWMDEFKSHVYMAWNIPQEDSGIDIGDITARKALRKQLQCKTFRWYLVSVYPEMRMYSDIIAYGVLQNSLKTDLCLDQGPDTENVPIMYICHGMTPQNVYYTSSQQIHVGILSPTVDDDDNRCLVDVNSRPRLIECSYAKAKRMKLHWQFSQGGPIQNRKSKRCLELQENSDLEFGFQLVLQKCSGQHWSITNVLRSLAS

SEQ ID NO: 260111 - DNA, 2504 bp, Artificial Sequence
  derived and/or modified sequence
gctgttctcctagcagcgcgggccggtcggaccgccaaggcagccggcgctggcgatgggaagcggcgtggccgccgacacaggcagtggcaaagtttcccagacgtacacatctggacgcgcggctgccggctacccgtgacccctctaggaagggttcagggatttttaatttggaaaaaaatccacctggtttcctttgtcaaggtctctccgggtggccagcggcaggagctgcaaacttgggcacggcggctacaccggcagcggaccgggctttggagaacctcgggactcaggtgctgaggtgcccagcggctccggacgtgctacggggtgcgagcgcgggggagttcggggcgcacgacaaggaagggcccccgggagctctatatggaggaaggagcccagaatggtgtgcaccaggaagaccaaaactttggtgtccacttgcgtgatcctgagcggcatgactaacatcatctgcctgctctacgtgggctgggtcaccaactacatcgccagcgtgtatgtgcgggggcaggagccggcgcccgacaagaagctggaggaagacaaaggggacactctgaagattattgagcggctggaccacctggagaatgtcatcaagcagcacattcaagaggctcctgccaagcctgaggaggcagaggccgagcccttcacagactcctctctgtttgcacactggggccaggagctcagccccgaaggccggcgcgtggccctgaagcaattccagtactacggctacaacgcctacctcagcgaccgcctgcccctggaccggcccctgcctgacctcagacccagtgggtgccgtaacctctcatttcctgacagcctgccagaggtgagcatcgtgttcatcttcgtcaatgaagcgctttcagtgctgctgcgctccatccactcggccatggaacgcacgcccccacatctgctcaaggagatcattctggtggatgacaacagcagtaacgaggaactgaaggagaagctgaccgaatatgtggacaaggtgaacagccagaagccaggcttcatcaaagtcgtgcgtcacagcaagcaggaaggcctcatccgctccagggtcagtggctggagggcggccactgcccctgtggtggcactctttgatgcccacgtggagttcaatgtgggctgggctgaacctgtactcacccgcatcaaggagaaccggaagcggatcatctcgccatcctttgataacatcaaatatgacaactttgagatagaagagtacccgctggctgcccagggctttgactgggagctgtggtgccgctacctaaatccccccaaggcctggtggaagctggagaactccacagcgccaatcaggagccctgccctcattggctgcttcattgtggaccggcagtacttccaggagatcggcctgctggacgaaggcatggaagtctacgggggcgagaatgtggagcttgggatcagggtgtggcagtgtggcgggagtgtggaggtcctgccctgctcacggattgcccacattgagcgagcccacaagccctacacagaggacctcaccgcccatgtccgcaggaacgctctcagggtggctgaagtctggatggatgaatttaaaagccacgtctacatggcatggaacataccgcaggaggactcaggaattgacattggggacatcactgcaaggaaggctctcaggaaacagctgcagtgcaagaccttccggtggtacctggtcagcgtgtacccagagatgaggatgtactccgacatcattgcctatggagtgctgcagaattctctgaagactgatttgtgtcttgaccaggggccagatacagagaatgtccccatcatgtacatctgccatgggatgacgcctcagaacgtgtactacacgagcagtcagcagatccatgtgggcattctgagccccaccgtggatgatgatgacaaccgatgcctggtggacgtcaacagccggccccggctcatcgaatgcagctacgccaaagccaagaggatgaagcttcactggcagttctctcagggaggacccatccagaaccgcaagtctaagcgctgtctggagctgcaggagaatagcgacctggagttcggcttccagctggtgttgcagaagtgctcgggccagcactggagcatcaccaacgtcctgaggagcctcgcgtcctgacccaccggggccacttccggctgcctctttgctactgtgtagcacctgctgcaacgttgcctgctgtccacgtggggttgtttggagtctggggaaccaggttagtgggcccccaagaagagctttttatttcctattcaattttcatggagtttatagaaagatgctgattggtaggtgatggtatgatatcaaactattttgcagttgtaaataggggacagatggaaaatatttataactgacaataaaatattattaagaaaag

SEQ ID NO: 260112 - DNA, 1824 bp, Artificial Sequence
  derived and/or modified sequence
atggtatgcacgcgcaagaccaagactctcgtgagtacctgtgtaatactgtctgggatgactaatattatttgtctgttatacgtcgggtgggttaccaattacatcgctagcgtctatgtgcgtggccaggaacctgccccggacaaaaaactggaggaggacaagggcgacactttaaagattatcgagcgcctcgatcacctagagaatgtcatcaaacaacacatacaagaggcgccagcaaaacccgaggaagcagaggcagagcccttcacagactccagtttgtttgcccattggggtcaagaactctcccctgaaggtaggcgggttgcgctcaaacagttccagtactacggctacaacgcttacttatccgatcggcttcccctagacagaccactgccagacctgcggcccagcgggtgtaggaacctctcattcccagactcacttcctgaggtgtctatcgtgtttatctttgttaacgaggctctcagtgtattgctgcgatcaatccattccgctatggagaggacacctccacatttactgaaagagattattttggtggacgataactcaagcaatgaagaactgaaagaaaaactgacggagtacgtggataaagtgaactctcagaaaccagggttcataaaggtagtccgacatagcaagcaggagggacttattagatcgcgggtatctgggtggagggccgctaccgcccctgtcgttgccttgttcgacgcccacgtggaattcaacgtggggtgggccgaacctgttctcactaggataaaggaaaaccgaaaaaggatcatcagcccgtcttttgacaatattaaatacgataacttcgaaatcgaagagtacccactggctgcacaaggctttgactgggagttgtggtgcaggtacttaaacccccccaaggcatggtggaaactggagaattccacagcgccgattcggagtccagccttgatcgggtgtttcatagtggatagacagtatttccaggagataggcctgctcgacgagggcatggaggtatatgggggcgagaacgtggaactggggatccgggtgtggcaatgcggcggctcagtggaagtgctgccatgcagcaggatcgcgcatattgagagggctcataagccctacactgaagacctgacggctcacgtgcgaagaaacgcactgcgcgtggctgaggtttggatggatgaatttaagtcacatgtgtatatggcgtggaatataccacaggaggactcaggtatagacatcggggatatcaccgctcggaaagccttgaggaaacaactccaatgcaagactttcagatggtacctggttagtgtttaccccgaaatgagaatgtacagcgacataattgcctacggcgtgctgcaaaatagtcttaaaaccgacctttgtctagaccaaggcccagacacggagaatgtgcctattatgtatatttgtcatgggatgacaccccagaatgtgtactacacatcctcccagcagattcacgtagggatcttgagtcctactgtcgatgacgacgacaaccgctgcttggtcgatgtcaacagccgccccagactcatcgagtgctcgtacgcaaaggctaagcggatgaaactccactggcagtttagccagggcggccccatccagaataggaaatccaaaagatgcttagagttgcaggaaaactctgatttggagtttgggtttcagttagtgctacagaaatgcagcggacagcattggtccattactaatgtactcagaagtctcgccagctag

SEQ ID NO: 260113 - DNA, 1824 bp, Artificial Sequence
  derived and/or modified sequence
atggtgtgcaccaggaagaccaagaccctggtgtccacctgtgtgatcctgagcggcatgaccaacatcatctgcctgctgtatgtgggctgggtgaccaactacatcgcctctgtgtatgtgcggggccaggagcccgccccagacaagaagctggaggaggacaagggggacaccctgaagatcatcgagcggctggaccacctggagaatgtcatcaagcagcacatccaggaggccccagccaagccagaggaggccgaggccgagcccttcacagacagcagcctgtttgcccactggggccaggagctgagccctgagggccggcgggtggccctgaagcagttccagtactacggctacaatgcctacctgagtgaccggctgcccctggaccggcccctgcctgacctgcggcccagcggctgcaggaacctgtccttcccagacagcctgcctgaggtgtccatcgtgttcatctttgtgaatgaggccctgtctgtgctgctgcggagcatccacagcgccatggagaggaccccaccccacctgctgaaggagatcatcctggtggatgacaacagcagcaatgaggagctgaaggagaagctgacagaatatgtggacaaggtgaacagccagaagccaggcttcatcaaggtggtgcgccacagcaagcaggagggcctcatccgcagccgggtgtctggctggagggctgccacagcccctgtggtggccctgtttgatgcccacgtggagttcaacgtgggctgggccgagcctgtgctgacccgcatcaaggagaacaggaagaggatcatcagccccagctttgacaacatcaagtatgacaactttgaaattgaggagtaccccctggccgcccagggctttgactgggagctgtggtgccgctacctgaacccccccaaggcctggtggaagctggagaacagcacagcccccatccgcagccctgccctgattggctgcttcatcgtggaccggcagtacttccaggagatcggcctgctggatgagggcatggaggtgtatggaggagaaaatgtggagctgggcatccgggtgtggcagtgtggcggctctgtggaggtgctgccctgcagccgcatcgcccacatcgagcgggcccacaagccctacacagaggacctgacagcccacgtgagaagaaatgccctgcgggtggccgaggtgtggatggatgagttcaagagccacgtgtacatggcctggaacatcccccaggaggacagcggcatcgacatcggggacatcacagccaggaaggccctgaggaagcagctgcagtgcaagaccttccgctggtacctggtgtctgtgtacccagagatgaggatgtacagcgacatcatcgcctacggcgtgctgcagaacagcctgaagacagacctgtgcctggaccagggccctgacacagaaaatgtgcccatcatgtacatctgccacggcatgaccccccagaatgtgtactacaccagcagccagcagatccacgtgggcatcctgagccccaccgtggatgatgatgacaaccgctgcctggtggatgtgaacagccggccccggctgattgagtgcagctatgccaaggccaagaggatgaagctgcactggcagttcagccagggcggccccatccagaacaggaagagcaagcgctgcctggagctgcaggagaacagcgacctggagtttggcttccagctggtgctgcagaagtgcagcggccagcactggagcatcaccaacgtgctgcggagcctggccagctag

SEQ ID NO: 260114 - DNA, 1824 bp, Artificial Sequence
  derived and/or modified sequence
atggtgtgcacccggaagaccaagaccctggtgagcacctgcgtgatcctttcgggaatgacgaatatcatttgccttctgtatgttgggtgggtcaccaactatattgcatccgtttatgtgcgcggccaggaaccagctccagataaaaagctcgaggaagacaagggtgacacgctgaaaattattgagcggctggaccatctggagaatgtaatcaagcagcatatccaggaggctccagcaaagccagaagaagccgaagcggagcctttcaccgactcttctctattcgcccattggggacaggaactgtctcccgaaggaaggagagttgccctaaaacagtttcaatattatggttataatgcttacttgtctgacaggcttccattggatcggcctttgcctgacctgcggccatcaggctgcagaaatctgtcttttccagacagtctccctgaagtgtccatcgtgtttatctttgtcaacgaggctcttagcgttctgctgcgtagcatccactccgctatggagcggacccccccacaccttctcaaggaaatcattttggtcgatgacaattccagcaatgaggaactcaaagaaaagctcactgaatacgtagacaaggtcaacagccaaaagcccggattcataaaggtcgtccgtcatagtaagcaggagggtctcataaggagtcgggtgagtggctggcgggcggctactgcacccgtggtggccctcttcgacgcccatgtggaattcaatgttggatgggcagagccagtactgacacgaataaaagagaataggaaaagaattatctctccatctttcgacaacatcaagtacgataactttgaaatcgaggagtatccactcgcagcccagggtttcgactgggagttatggtgcaggtacctgaatccgccaaaagcctggtggaaacttgagaattctactgcgcccatcaggtcgcccgcactgatcggttgttttattgtcgacaggcaatacttccaggagatcggactgttggacgaggggatggaggtctatggaggtgagaatgtggaactcggaatacgtgtctggcagtgcggcgggagtgtggaggtgctcccttgttcacggatagctcacatagagcgcgctcacaaaccttacactgaagatctcaccgctcatgttcgccgcaatgcgctccgggtggcagaggtgtggatggatgagttcaaaagtcacgtttacatggcctggaacatcccgcaggaggactcaggcattgacatcggtgatatcaccgcgcgcaaggcactcaggaaacagcttcagtgtaagacgttccgatggtacctagtgtcagtatatcctgagatgcggatgtatagcgatattatcgcttatggagtcctgcaaaactccttgaagaccgatctgtgcctcgaccaaggtccagataccgaaaacgtgcccataatgtacatttgtcatggcatgaccccacagaatgtgtactatacttcttcccagcagatccatgttggaattctttcacccactgtcgacgacgacgataataggtgtctcgtggacgtgaattcccgcccacgtttgatcgaatgttcatatgcgaaagccaaacgcatgaaacttcactggcagtttagtcaaggggggcccatccaaaaccgaaaatctaaaaggtgtctagaactgcaggagaattctgacctcgagtttggctttcagttggtgctccagaagtgcagtgggcagcactggagcatcaccaacgttctcagatccctagcgtcatag

SEQ ID NO: 260115 - DNA, 1824 bp, Artificial Sequence
  derived and/or modified sequence
atggtgtgcacccgcaaaactaaaacactcgtgagcacttgtgtcatcttgagcggtatgacaaacattatttgtctcctgtatgtcggatgggttaccaactatattgcatccgtctatgttcggggacaagaaccagcgcctgataagaagctcgaagaagataagggagacactctgaagataattgagaggctcgatcatctcgagaatgttatcaaacaacatatacaagaagcaccggctaagcccgaggaggccgaagctgagcccttcactgacagctccctgttcgctcactggggccaggaactcagcccagaggggagacgggtggccctcaaacagtttcagtactatggttacaatgcatatttgagtgacagacttcccctggacagacccctgccagatctacgacccagtggctgtcggaaccttagtttccctgatagcctgcccgaagtgtctatagtttttatattcgtgaacgaagccctttcagtgctcctcaggagcattcattcagcaatggagcgtaccccccctcacctgttaaaggagatcatactggtggacgacaacagctcaaatgaggagctgaaggagaagctcactgagtacgtcgataaagtaaattcccagaagccaggatttattaaggtggtccggcactcaaagcaggaaggattgataagaagtagagtaagcggatggcgggctgccaccgcaccagtagtcgccctctttgatgcccacgtcgagttcaacgtcgggtgggccgagcctgttctgacccgaatcaaggaaaaccgtaagcgcataatctcaccaagctttgacaacataaaatacgacaatttcgagattgaggagtacccgctggccgctcaaggttttgactgggagctgtggtgccggtacctcaacccaccaaaggcatggtggaagcttgaaaattccacagcccctattagaagccccgcactgataggatgttttatcgtcgaccggcagtattttcaggagatcggtctcctggatgagggaatggaagtgtatggcggtgagaatgtggagctgggcatacgggtgtggcaatgtggtggatcggtggaggtgctgccctgctccaggatcgctcacattgaaagagcgcacaagccatacaccgaggatctgaccgcacacgtaaggagaaacgctctgagggtggccgaggtctggatggacgaatttaaatcccacgtgtacatggcgtggaatatacctcaagaggatagcggtattgatattggggacattactgctcgtaaggctctccggaagcagctccagtgcaaaacattcaggtggtatcttgtgtctgtctaccccgagatgcgtatgtattccgatataatcgcctatggcgtgctccagaacagcttgaaaacagatttgtgcctagatcagggaccagacacagagaacgtgcctattatgtatatctgtcacggtatgactccccagaacgtatattacacgtctagccagcaaatccatgtcggaattctgagtcctaccgtggatgatgacgataaccggtgcttggtggacgtcaactcacgccctcggttaattgagtgcagctatgcaaaagcaaagcgcatgaaactccactggcaattctcccaggggggacccatacagaacaggaagtccaaacgttgtctagagctgcaagaaaattcagaccttgaattcggattccagctggtgttacagaagtgcagcggacagcattggtctatcactaacgtgttgcgctctctggctagttag

SEQ ID NO: 260116 - DNA, 1824 bp, Artificial Sequence
  derived and/or modified sequence
atggtgtgcaccagaaagaccaagaccctggtgagcacctgcgtgatcctgagcggcatgaccaacatcatctgcctgctgtacgtgggctgggtgaccaactacatcgccagcgtgtacgtgagaggccaggagcccgcccccgacaagaagctggaggaggacaagggcgacaccctgaagatcatcgagagactggaccacctggagaacgtgatcaagcagcacatccaggaggcccccgccaagcccgaggaggccgaggccgagcccttcaccgacagcagcctgttcgcccactggggccaggagctgagccccgagggcagaagagtggccctgaagcagttccagtactacggctacaacgcctacctgagcgacagactgcccctggacagacccctgcccgacctgagacccagcggctgcagaaacctgagcttccccgacagcctgcccgaggtgagcatcgtgttcatcttcgtgaacgaggccctgagcgtgctgctgagaagcatccacagcgccatggagagaacccccccccacctgctgaaggagatcatcctggtggacgacaacagcagcaacgaggagctgaaggagaagctgaccgagtacgtggacaaggtgaacagccagaagcccggcttcatcaaggtggtgagacacagcaagcaggagggcctgatcagaagcagagtgagcggctggagagccgccaccgcccccgtggtggccctgttcgacgcccacgtggagttcaacgtgggctgggccgagcccgtgctgaccagaatcaaggagaacagaaagagaatcatcagccccagcttcgacaacatcaagtacgacaacttcgagatcgaggagtaccccctggccgcccagggcttcgactgggagctgtggtgcagatacctgaacccccccaaggcctggtggaagctggagaacagcaccgcccccatcagaagccccgccctgatcggctgcttcatcgtggacagacagtacttccaggagatcggcctgctggacgagggcatggaggtgtacggcggcgagaacgtggagctgggcatcagagtgtggcagtgcggcggcagcgtggaggtgctgccctgcagcagaatcgcccacatcgagagagcccacaagccctacaccgaggacctgaccgcccacgtgagaagaaacgccctgagagtggccgaggtgtggatggacgagttcaagagccacgtgtacatggcctggaacatcccccaggaggacagcggcatcgacatcggcgacatcaccgccagaaaggccctgagaaagcagctgcagtgcaagaccttcagatggtacctggtgagcgtgtaccccgagatgagaatgtacagcgacatcatcgcctacggcgtgctgcagaacagcctgaagaccgacctgtgcctggaccagggccccgacaccgagaacgtgcccatcatgtacatctgccacggcatgaccccccagaacgtgtactacaccagcagccagcagatccacgtgggcatcctgagccccaccgtggacgacgacgacaacagatgcctggtggacgtgaacagcagacccagactgatcgagtgcagctacgccaaggccaagagaatgaagctgcactggcagttcagccagggcggccccatccagaacagaaagagcaagagatgcctggagctgcaggagaacagcgacctggagttcggcttccagctggtgctgcagaagtgcagcggccagcactggagcatcaccaacgtgctgagaagcctggccagctag

SEQ ID NO: 260117 - DNA, 1083 bp, Artificial Sequence
  derived and/or modified sequence
atgagcaccgtgatctgcatgaagcagagagaggaggagttcctgctgaccatcagacccttcgccaacagaatgcagaagagcccctgctacatccccatcgtgagcagcgccaccctgtgggacagaagcacccccagcgccaagcacatcccctgctacgagagaaccagcgtgccctgcagcagattcatcaaccacatgaagaacttcagcgagagccccaagttcagaagcctgcacttcctgaacttccccgtgttccccgagagaacccagaacagcatggcctgcaagagactgctgcacacctgccagtacatcgtgcccagatgcagcgtgagcaccgtgagcttcgacgaggagagctacgaggagttcagaagcagccccgcccccagcagcgagaccgacgaggcccccctgatcttcaccgccagaggcgagaccgaggagagagccagaggcgcccccaagcaggcctggaacagcagcttcctggagcagctggtgaagaagcccaactgggcccacagcgtgaaccccgtgcacctggaggcccagggcatccacatcagcagacacaccagacccaagggccagcccctgagcagccccaagaagaacagcggcagcgccgccagacccagcaccgccatcggcctgtgcagaagaagccagacccccggcgccctgcagagcaccggccccagcaacaccgagctggagcccgaggagagaatggccgtgcccgccggcgcccaggcccaccccgacgacatccagagcagactgctgggcgccagcggcaaccccgtgggcaagggcgccgtggccatggcccccgagatgctgcccaagcacccccacacccccagagacagaagaccccaggccgacaccagcctgcacggcaacctggccggcgcccccctgcccctgctggccggcgccagcacccacttccccagcaagagactgatcaaggtgtgcagcagcgccccccccagacccaccagaagattccacaccgtgtgcagccaggccctgagcagacccgtggtgaacgcccacctgcactag

SEQ ID NO: 260118 - DNA, 624 bp, Artificial Sequence
  derived and/or modified sequence
atgagcaccgtgatctgcatgaagcagagagaggaggagttcctgctgaccatcagacccttcgccaacagaatgcagaagagcccctgctacatccccatcgtgagcagcgccaccctgtgggacagaagcacccccagcgccaagcacatcccctgctacgagagaaccagcgtgccctgcagcagattcatcaaccacatgaagaacttcagcgagagccccaagttcagaagcctgcacttcctgaacttccccgtgttccccgagagaacccagaacagcatggcctgcaagagactgctgcacacctgccagtacatcgtgcccagatgcagcgtgagcaccgtgagcttcgacgaggagagctacgaggagttcagaagcagccccgcccccagcagcgagaccgacgaggcccccctgatcttcaccgccagaggcgagaccgaggagagagccagaggcgcccccaagcaggcctggaacagcagcttcctggagcagctggtgaagaagcccaactgggcccacagcgtgaaccccgtgcacctggaggcccagggcatccacatcagcagacacaccagacccaagggccagcccctgagcagccccaagtag

SEQ ID NO: 260119 - DNA, 1083 bp, Artificial Sequence
  derived and/or modified sequence
atgagtacagttatctgcatgaagcagcgggaagaagagtttttgctgacaattagaccctttgctaatagaatgcagaagagtccctgttatattcccattgtctcaagtgccactttgtgggataggagtacaccttctgctaagcacattccatgttatgagagaacgagtgtcccctgtagtcgcttcatcaatcacatgaaaaacttctccgagagtcctaaattccgttcgctccatttcctaaactttccagtgtttcccgagagaacgcagaacagcatggcgtgtaagcgcctgctgcatacatgccagtatattgtcccaaggtgctctgtgtcgaccgtgtcattcgacgaagaatcctacgaggagttcagaagctctcccgcaccaagttctgagacagacgaagccccacttatatttactgcgcggggtgaaacagaagaacgagcgaggggggctcctaagcaggcctggaatagcagctttctcgaacagctggtgaaaaagccgaactgggcccactcggtgaaccctgtacacttggaggcccaggggatccatatctcacggcacactcgcccgaaaggccagcctctgagtagccccaagaagaactcagggagcgcagccagacccagcacagctatcgggctgtgccgtcgctcacagacaccaggtgcgctgcagtctacagggccaagcaatacggagctggagcccgaagaacgtatggccgtgcccgctggcgcccaggcccatccggatgacatccagtcccggctactgggtgcatcagggaatccggtgggtaaaggtgccgttgccatggccccagagatgcttcctaagcacccccacactccaagggacaggcgcccacaggccgacacgtccctccacggaaacctggcaggcgccccactaccactactcgccggagccagtacccactttccctccaaaagattgatcaaggtatgtagtagcgcccctcccaggccaacgcgcaggtttcataccgtttgttcccaggccctgtcccgccctgtcgttaacgctcatcttcactag

SEQ ID NO: 260120 - DNA, 1083 bp, Artificial Sequence
  derived and/or modified sequence
atgagtaccgtgatttgcatgaagcagagggaagaggagtttctgcttaccattaggcctttcgcaaatcgtatgcagaagtcaccatgctacatccctatcgtgtcatccgccacactgtgggacagatcaaccccctctgccaagcatatcccttgttatgaaaggaccagcgtcccttgctcccgttttattaatcatatgaagaatttctctgaatcccccaagttcaggtcgctgcactttctcaacttcccagtgttcccagaacggactcagaatagtatggcctgcaaaagattgctacacacttgccaatatatcgtccccaggtgctcagttagtaccgtgtcttttgatgaagagtcctacgaagagtttaggagctccccagccccatctagcgaaacagacgaggccccgctgatctttaccgccaggggagagacagaggaacgcgcccggggtgcgccaaaacaggcctggaactctagtttcctagaacagctcgtgaagaagcccaattgggctcactctgtcaatcccgtgcatttagaagctcaggggatccacatttcccgacacacaaggccaaaaggccaacccctatcaagcccgaagaagaactccggcagcgcagctcggccttccacagctattggcctgtgcaggagatcccaaactcctggagccttgcaatcaacgggaccttcaaacacggaattagagcccgaggagcgcatggctgtccccgccggcgcccaggcacaccccgacgacatacagagccggttactgggagcttctggaaatcccgtcggaaaaggggccgtagctatggcccctgagatgctgccaaagcatccacacacgcccagagaccgaaggccacaagcagatacttctttgcatgggaacctggcaggagcccctctgccactgttagcaggcgcgtcaacacactttccgtccaagaggctgataaaggtgtgctctagtgctccccccagacccactaggaggttccataccgtctgctcccaggctctctcgcgtccggttgttaatgcacatcttcactag

SEQ ID NO: 260121 - DNA, 624 bp, Artificial Sequence
  derived and/or modified sequence
atgtccaccgttatttgtatgaagcagagggaagaggagttcctgctcaccatacggccattcgcaaaccgaatgcagaagtcaccgtgctacattcctatagtctcctccgccactctctgggatcgctccactccaagcgctaaacacattccttgttatgagaggacttccgtcccttgttctcggttcattaatcacatgaagaatttcagcgaaagccccaaatttaggtcactgcacttcctcaatttcccagtgttcccagagcgcactcagaatagcatggcatgcaagcggctcctgcacacatgtcagtatattgtacctcgatgtagcgtatccaccgtatctttcgatgaggaatcttacgaggagttcagaagctctccggcccctagttccgagactgacgaagccccactcatcttcactgctagaggggaaaccgaagagcgcgcaaggggtgctccaaagcaggcctggaatagtagtttccttgagcagttggtcaagaagcccaattgggcccacagcgtaaatccagtccacctggaggcacagggtattcatatttctcggcatacacggcctaagggccagcccctgagctccccgaaatag

SEQ ID NO: 260122 - DNA, 1083 bp, Artificial Sequence
  derived and/or modified sequence
atgagcaccgtcatctgcatgaagcagcgggaggaggagttcctgctgaccatccggccctttgccaacaggatgcagaagagcccctgctacatccccatcgtgtcctctgccaccctgtgggacaggagcaccccatctgccaagcacatcccctgctatgaaagaacatctgtgccctgcagccgcttcatcaaccacatgaagaacttcagcgagagccccaagttccgcagcctgcacttcctgaacttccctgtgtttcctgagaggacccagaacagcatggcctgcaagaggctgctgcacacctgccagtacatcgtgccccgctgcagcgtgtccacagtgtcctttgatgaggagagctatgaggagttccgcagcagccctgcccccagcagcgagacagatgaggcccccctcatcttcaccgcccggggggagacagaggagcgggcccggggggcccccaagcaggcctggaacagcagcttcctggagcagctggtgaagaagcccaactgggcccacagcgtgaaccctgtgcacctggaggcccagggcatccacatcagccgccacacccggcccaagggccagcccctgagcagccccaagaagaacagcggcagcgctgcccggcccagcacagccatcggcctgtgccgccgcagccagacccctggggccctgcagagcacaggccccagcaacacagagctggagcctgaggagaggatggctgtgcctgctggggcccaggcccacccagatgacatccagagccggctgctgggcgccagcggcaaccctgtgggcaaaggagctgtggccatggcccctgagatgctgcccaagcacccccacaccccccgggacagaagaccccaggccgacaccagcctgcacggcaacctggccggggcccccctgcccctgctggccggggccagcacccacttccccagcaagaggctcatcaaggtgtgcagcagcgccccaccccggcccacccggcgcttccacacagtgtgcagccaggccctgagcaggcctgtggtgaatgcccacctgcactag

SEQ ID NO: 260123 - DNA, 624 bp, Artificial Sequence
  derived and/or modified sequence
atgagcaccgtcatctgcatgaagcagcgggaggaggagttcctgctgaccatccggccctttgccaacaggatgcagaagagcccctgctacatccccatcgtgtcctctgccaccctgtgggacaggagcaccccatctgccaagcacatcccctgctatgaaagaacatctgtgccctgcagccgcttcatcaaccacatgaagaacttcagcgagagccccaagttccgcagcctgcacttcctgaacttccctgtgtttcctgagaggacccagaacagcatggcctgcaagaggctgctgcacacctgccagtacatcgtgccccgctgcagcgtgtccacagtgtcctttgatgaggagagctatgaggagttccgcagcagccctgcccccagcagcgagacagatgaggcccccctcatcttcaccgcccggggggagacagaggagcgggcccggggggcccccaagcaggcctggaacagcagcttcctggagcagctggtgaagaagcccaactgggcccacagcgtgaaccctgtgcacctggaggcccagggcatccacatcagccgccacacccggcccaagggccagcccctgagcagccccaagtag

SEQ ID NO: 260124 - DNA, 1083 bp, Artificial Sequence
  derived and/or modified sequence
atgagcaccgtgatctgcatgaagcagcgggaggaggagttcctgcttacaattagaccattcgctaaccgcatgcagaaaagcccctgctacatacctatcgtcagcagcgccaccctctgggaccggtctacgccctcagcaaaacacatcccttgctacgaaagaacctcagtgccatgttcacggtttatcaaccatatgaaaaattttagtgagagtcccaaattccgcagccttcacttcctgaatttccccgttttccctgagcgcacacaaaacagcatggcatgtaagaggctcctgcatacctgccagtacatagtgccccggtgttccgttagcacagtttcattcgatgaagaaagttatgaagagttccgctcatcaccagccccaagctctgagactgacgaggccccgctaatatttacagcccgtggagaaaccgaggagagggctagaggtgcaccaaaacaggcatggaattcttcctttctcgaacagctggtgaaaaagccaaattgggctcatagcgtgaatcccgttcatttagaggctcagggtatccacatcagtcgccatacacgaccaaaaggacagcccttgtcctctccgaaaaagaactcgggttctgcagcacgacctagcacggccataggcttgtgccgaaggagtcagactcctggggccctgcagtcaaccggaccctccaataccgaattggagccagaggaacgcatggcagtaccggccggtgctcaggctcacccggatgacattcagtctcgcctcttgggtgcgtccgggaaccctgtgggtaaaggagcggtcgccatggcgcctgaaatgttgccgaaacatcctcacacccccagggatcgccggccccaggctgacacttccttgcatggcaacctcgccggcgctcctctgcctctgctggcaggagcgagtacacattttccttccaagcgactcatcaaagtctgttccagcgccccgccccgccccactcgtaggtttcacaccgtctgcagccaggcccttagcagaccagtagtgaacgcccatttacactag

SEQ ID NO: 260125 - DNA, 1083 bp, Artificial Sequence
  derived and/or modified sequence
atgagcaccgtgatctgcatgaagcagcgggaggaggagttcctgcttactattaggccctttgccaatagaatgcaaaaaagtccttgttacattcctatcgtgagctctgcaactctgtgggatcgctcaaccccctcagcaaagcacattccttgctatgagaggacaagtgtgccttgttctcggttcatcaaccacatgaaaaactttagcgaaagccctaagtttaggtcactccatttcttgaacttcccggtgtttcctgagcggacccagaattccatggcttgcaagcgcctcctgcatacctgccagtatatcgttcctaggtgcagcgtgagcaccgtgagcttcgacgaagaatcatacgaagaatttaggtcttcgcccgctccaagtagcgagaccgatgaagcgccgctcattttcacggctcggggtgaaacggaggaacgtgcgcgaggcgccccaaagcaagcctggaattcttctttcctggagcagctggtgaaaaaacctaactgggcacactctgtgaacccagtgcatctggaagcccaggggatacacatatcacggcacactaggcccaagggccaaccactgtctagcccaaagaagaactccggctctgctgctcgtcctagcactgccataggtttatgccgcaggagtcagacccccggtgcactccaatccacgggccctagcaatacagagctggaaccagaagagaggatggccgtgcctgctggcgcccaggcacacccggacgatattcagtcgagactgctgggtgccagtggaaatccagtcggtaaaggtgcagtggctatggcgccagagatgctacccaaacacccccatacccctcgcgatcgccgcccacaggccgataccagcctgcatggcaatctggctggagcccctttgccactcctggccggcgccagtactcactttccttccaaaaggctgattaaggtgtgttcttcagcacctccaagacctaccagacgatttcacacagtgtgttcccaagccctgtccagacccgtagtcaacgcccatctgcactag

SEQ ID NO: 260126 - DNA, 624 bp, Artificial Sequence
  derived and/or modified sequence
atgagcaccgtgatctgcatgaagcagcgggaggaggagttcctgctcacaattcggcccttcgccaatcggatgcagaagagcccctgctatattcccatcgtgagctctgcaaccctatgggaccggtctacccctagcgctaagcatattccctgttatgagcgcaccagtgtgccctgctctcgatttataaaccacatgaagaacttctctgagtctcctaagttcaggagcctgcacttcctcaatttcccagtgttcccagaacggacccaaaattctatggcctgcaagcggctactccacacctgtcagtacatagtgcccaggtgttctgtgtctacagtaagctttgacgaagagagctacgaggaattccgctctagccctgcccccagttccgagaccgacgaagcgcctttaattttcacggctaggggcgaaaccgaggaaagggcgcgcggcgccccaaagcaggcttggaactcatcattcttagaacagctcgtgaagaagccaaattgggctcactccgtgaaccccgtccaccttgaggcccagggaatccatattagcaggcacacccgcccaaagggtcaacccctgtcttcacctaagtag

SEQ ID NO: 260127 - DNA, 1083 bp, Artificial Sequence
  derived and/or modified sequence
atgtcaaccgtgatctgcatgaagcaaagggaagaggagttcctgctaaccatacggcctttcgctaatcggatgcagaagtccccctgctatattcctattgtttcttcagccaccttatgggataggtctacgccttccgctaagcacatcccctgctacgagcgcacctctgtgccctgttctcggtttatcaaccatatgaagaacttttccgagagccccaagttccgcagcctccatttcttaaactttcctgtgttccctgagagaacacagaacagcatggcatgcaaacggctgctgcacacgtgccaatacatcgtgccgaggtgcagtgtgtcaaccgtcagcttcgatgaggaatcatatgaagagtttcgcagttctcctgcaccctcttccgaaaccgatgaagctcctttgattttcacggcaaggggggagacagaagagcgtgctcgcggtgcccctaaacaggcctggaattcctcttttcttgagcagttggttaagaagcctaactgggcccactccgtgaacccagtccatctggaggcccagggaatccacatatcccggcacacccgaccaaagggacagccactgtcttcacccaaaaagaacagcgggtcagctgccaggccttccactgctatcggcctttgccgcagaagccagacaccaggagctcttcagtcgacgggtccctctaacacagagttggagccggaggaacgtatggccgtccccgctggtgcccaggctcatcctgatgacatccagagtagattgctcggcgcaagcggcaacccagtcggcaagggcgctgtggcaatggccccagaaatgctgcccaaacatccacacactccgagagacagacgccctcaggctgacacaagcctgcacggtaatttggcaggcgctcccctgccgctgttggcgggagcctcgacgcatttcccctctaaacgcctgatcaaggtgtgttcatccgcccctccaagaccaacacggaggttccatactgtctgctctcaggccctgagccggcctgtagtaaatgctcatttacactag

SEQ ID NO: 260128 - DNA, 1083 bp, Artificial Sequence
  derived and/or modified sequence
atgagtaccgtcatctgcatgaagcagcgcgaggaagagtttctgttgaccatccgtcccttcgctaatcgcatgcagaaaagcccgtgctacattcctattgtgtccagtgcgacactgtgggatcgtagcacaccaagcgccaagcatatcccttgttacgaacgaacctctgtaccttgctctaggttcattaaccatatgaagaatttctctgagagccccaagttccggagcttgcatttcctgaactttcccgtattcccagaaagaacgcagaatagtatggcctgtaagaggttgttgcatacctgtcagtacatagtccccagatgcagcgtgtctaccgtgtcctttgacgaggagagctatgaggagtttcggagctctccagcccctagctcggagactgacgaagccccactgatctttacagctagaggcgaaacagaggaaagagccaggggcgcacccaagcaggcctggaactcgtcctttctcgaacaactggtcaagaagcctaactgggcacattcagtgaacccagttcacctggaagcccagggcatccacatcagtcgccacactcgccctaaaggccagcctctcagcagtcctaagaagaattctggttctgcagcccgtccatccacggcaatcgggctgtgcaggagaagccagactcccggtgcgctgcagtctaccggtccctcaaatacagagctagagccggaggagcgcatggcggttccagctggggctcaagctcaccctgacgacattcagagtcgtttgctgggcgcaagcggaaacccagtgggcaaaggggctgtggcaatggccccagagatgctccctaaacacccccatacaccaagggacaggcgccctcaggcagacacctcattgcatgggaatcttgcaggcgctccactgcccctcctcgctggcgctagtacccatttcccatccaagcgactgatcaaagtgtgctcgagtgcccctcctaggccaacccgcaggtttcataccgtctgctcacaggccttgtctcggcctgtggtgaacgcccatttgcactag

SEQ ID NO: 260129 - DNA, 624 bp, Artificial Sequence
  derived and/or modified sequence
atgtcaaccgtcatttgtatgaagcaacgtgaggaagagtttcttctgacaattcgcccatttgctaaccgcatgcaaaagtccccctgttacattcccatcgtgtcatcagccaccctgtgggatagaagtacccccagcgccaagcacatcccttgttacgaaagaacatccgtgccttgctcccggtttattaaccacatgaagaatttcagtgagagtcctaagttccgaagtctccatttcttaaatttcccggtgttccccgagaggactcagaattccatggcgtgtaaacgtttactgcacacgtgccaatacattgtccctcggtgtagcgtgagcactgtgagcttcgacgaagagtcatacgaggagtttagaagctcccctgcaccttcttctgaaaccgatgaggcaccactgatcttcaccgccagaggggaaactgaggaaagagcacgaggtgccccaaagcaggcctggaattcatcttttctcgagcagctcgtcaagaaacctaattgggcccattccgtgaacccagtacacttggaggcgcagggtatccacatcagccgacacactcgcccaaaaggccagccactgagctcccccaaatag

SEQ ID NO: 260130 - protein, 1147 aa, Artificial Sequence
  derived and/or modified sequence
MADQIPLYPVRSAAAAAANRKRAAYYSAAGPRPGADRHSRYQLEDESAHLDEMPLMMSEEGFENEESDYHTLPRARIMQRKRGLEWFVCDGWKFLCTSCCGWLINICRRKKELKARTVWLGCPEKCEEKHPRNSIKNQKYNVFTFIPGVLYEQFKFFLNLYFLVISCSQFVPALKIGYLYTYWAPLGFVLAVTMTREAIDEFRRFQRDKEVNSQLYSKLTVRGKVQVKSSDIQVGDLIIVEKNQRIPSDMVFLRTSEKAGSCFIRTDQLDGETDWKLKVAVSCTQQLPALGDLFSISAYVYAQKPQMDIHSFEGTFTREDSDPPIHESLSIENTLWASTIVASGTVIGVVIYTGKETRSVMNTSNPKNKVGLLDLELNRLTKALFLALVALSIVMVTLQGFVGPWYRNLFRFLLLFSYIIPISLRVNLDMGKAVYGWMMMKDENIPGTVVRTSTIPEELGRLVYLLTDKTGTLTQNEMIFKRLHLGTVSYGADTMDEIQSHVRDSYSQMQSQAGGNNTGSTPLRKAQSSAPKVRKSVSSRIHEAVKAIVLCHNVTPVYESRAGVTEETEFAEADQDFSDENRTYQASSPDEVALVQWTESVGLTLVSRDLTSMQLKTPSGQVLSFCILQLFPFTSESKRMGVIVRDESTAEITFYMKGADVAMSPIVQYNDWLEEECGNMAREGLRTLVVAKKALTEEQYQDFESRYTQAKLSMHDRSLKVAAVVESLEREMELLCLTGVEDQLQADVRPTLEMLRNAGIKIWMLTGDKLETATCIAKSSHLVSRTQDIHIFRQVTSRGEAHLELNAFRRKHDCALVISGDSLEVCLKYYEHEFVELACQCPAVVCCRCSPTQKARIVTLLQQHTGRRTCAIGDGGNDVSMIQAADCGIGIEGKEGKQASLAADFSITQFRHIGRLLMVHGRNSYKRSAALGQFVMHRGLIISTMQAVFSSVFYFASVPLYQGFLMVGYATIYTMFPVFSLVLDQDVKPEMAMLYPELYKDLTKGRSLSFKTFLIWVLISIYQGGILMYGALVLFESEFVHVVAISFTALILTELLMVALTVRTWHWLMVVAEFLSLGCYVSSLAFLNEYFGIGRVSFGAFLDVAFITTVTFLWKVSAITVVSCLPLYVLKYLRRKLSPPSYCKLAS

SEQ ID NO: 260131 - DNA, 3444 bp, Artificial Sequence
  derived and/or modified sequence
atggcggaccaaattccgctgtatccagtgcggtcagccgccgccgctgcagctaaccgtaaacgagctgcttactacagtgcggcggggccgcgacctggagccgaccgtcatagccgataccagcttgaggacgaaagcgcgcacctggatgagatgcccctgatgatgtctgaggagggctttgagaacgaggagagtgactatcatacactgccccgggctcgtatcatgcaacgcaaacgcgggttggagtggttcgtttgtgatgggtggaagttcttatgcacaagctgttgtggttggctgattaatatatgccgtagaaaaaaggaactcaaggctagaactgtgtggctgggttgcccagaaaagtgcgaagagaagcatcctcgaaattctatcaagaaccagaaatacaatgtgtttacttttattcctggagttctgtatgaacaattcaaatttttcctgaacctctattttctggttatttcctgttcgcagttcgtgccggctctgaaaatagggtacttatacacatattgggcaccactgggatttgtattagccgtcaccatgacccgcgaggctatcgacgaattccggcgctttcagcgggacaaggaggtgaacagtcagttgtacagcaaacttactgtgcgcggaaaagtacaggtaaaatcctccgacattcaagttggtgatctgattatcgtggagaagaaccagcggatcccctcggacatggtttttctgaggacctcagagaaggcaggctcatgtttcatccgcacggatcaattggacggagaaactgactggaaattgaaggtcgcggtatcttgcacacaacaactgccagctcttggtgatttgttctccataagcgcgtatgtttatgcccagaaaccccagatggacatccattcctttgaaggcacattcactcgtgaagattctgacccgcccatccacgaatctttgagcatagagaatactctttgggcttctacaattgtcgcttctggcaccgtcatcggcgtggtgatttatacaggaaaagagactcgatccgtgatgaacaccagcaatccgaaaaacaaggtggggctcctagacctcgagctgaaccgactgaccaaagccttatttctggccctggtcgcactctctattgttatggtgaccctccagggtttcgtagggccttggtaccgcaacctctttcgcttcctgctactgttctcctatatcattcctatctccctccgggtgaatttggatatgggaaaggctgtgtacggctggatgatgatgaaggacgagaacattccaggcacagtggtgcgcacgtccacaattcccgaggaactgggccgcctcgtgtatctgcttaccgacaaaactggcaccctgacccaaaacgagatgatttttaaacgattgcatttgggaactgttagttatggcgctgacacaatggacgaaattcaaagccacgtgcgggattcctattcccagatgcagtcgcaggcgggcggcaacaacaccggatccactccactccgcaaagcacagtccagcgcccctaaagtccggaaatcagtctcttcaaggatccacgaggctgtgaaagcaattgtgctctgccataatgtcacaccggtctacgagagtcgggccggggtgacagaggaaactgaatttgccgaggctgaccaggatttcagcgacgagaacaggacctatcaggcctcttcacccgatgaggtcgcccttgttcagtggactgagagcgtgggcttgaccctggtaagcagagatcttaccagcatgcaactgaagaccccctctggacaggtgctctctttttgcattctgcaactcttcccgttcacctccgagtccaaacggatgggcgtcattgtacgggacgaatcaacggccgagatcacattctatatgaagggcgccgacgtggccatgagcccaatcgtccagtataatgattggctggaggaagaatgtgggaacatggcccgggaggggctaaggaccttagtcgtggccaaaaaagctcttaccgaagaacagtatcaagacttcgagagcagatacactcaagcaaagctttcaatgcacgatcgatctttaaaagtggccgcagtggtggagtccctggagagggagatggaacttctgtgcctgactggcgtggaagatcaactccaggctgacgtcaggcccaccctcgagatgctgaggaacgcgggaattaaaatatggatgcttaccggtgacaaactcgagactgccacttgcatcgccaaatccagccatcttgtaagtcgtactcaagacatccatatatttcggcaggtaaccagcagaggagaggcccatttggagctcaatgccttcagacgaaagcacgattgcgcgctcgttatttccggcgacagtcttgaagtatgtctgaagtactatgagcacgagttcgtcgaattagcatgtcaatgtcccgccgtcgtgtgctgtagatgctcaccgacccagaaagccaggattgtcactctgctgcagcagcacaccgggcgacgcacgtgtgccatcggagatggcggcaacgatgtgtcaatgatccaggccgcggattgcggcattggcatcgagggaaaagagggcaaacaggcatctctcgctgccgatttctctatcacccagttcagacatatcgggcgcctgttaatggtgcatgggaggaatagctataaacgatcagctgcgctcgggcaatttgtaatgcatagaggcctcatcatcagcacgatgcaggccgtcttttcctctgttttctacttcgcatctgtgcccttgtatcagggattcttgatggttggctatgctacaatttacacgatgttccccgtgttcagtctggttcttgaccaggatgtgaagcctgaaatggccatgctgtatcccgagctctataaggatttgacaaagggaaggtcactgagttttaagaccttcctgatctgggtcctcatcagcatatatcagggcggcatcctgatgtacggcgctctcgtgctgtttgagagtgagtttgtgcacgttgtggctattagttttaccgctctcattctcactgagctattgatggtggcacttacagtgagaacatggcactggcttatggtcgtggcagagttcctgtcactgggctgttacgtgagttccttggctttcctgaatgagtacttcgggattgggagggttagtttcggcgccttcttggacgtagccttcatcaccacagtgacctttctttggaaggtcagcgccattactgttgtgtcctgcttgcctctgtatgtgctcaaataccttaggcggaagttgagtcctccaagctattgtaaactggcttcgtag

SEQ ID NO: 260132 - DNA, 3444 bp, Artificial Sequence
  derived and/or modified sequence
atggctgaccagatccccctgtaccctgtgcgctctgctgctgctgctgctgccaacaggaagagagctgcctactacagcgctgctggccccaggcctggagctgacagacacagccgctaccagctggaggatgaaagtgcccacctggatgagatgcccctgatgatgtctgaggagggctttgaaaatgaggagagtgactaccacaccctgccccgggcccgcatcatgcagaggaagaggggcctggagtggtttgtgtgtgatggctggaagttcctgtgcaccagctgctgcggctggctgatcaacatctgcaggaggaagaaggagctgaaggccaggacagtgtggctgggctgcccagagaagtgtgaggagaagcaccccaggaacagcatcaagaaccagaagtacaacgtgttcaccttcatccctggggtgctgtatgagcagttcaagttcttcctgaacctgtacttcctggtgatcagctgcagccagtttgtgcctgccctgaagattggctacctgtacacctactgggcccccctgggctttgtgctggccgtgaccatgacccgggaggccattgatgagttccgccgcttccagagggacaaggaggtgaacagccagctgtacagcaagctgactgtgcggggcaaggtgcaggtgaagagcagtgacatccaggtgggggacctgatcatcgtggagaagaaccagaggatccccagcgacatggtgttcctgcggaccagcgagaaggccggcagctgcttcatcagaacagaccagctggatggagaaacagactggaagctgaaggtggccgtgtcctgcacccagcagctgcctgccctgggggacctcttcagcatcagcgcctacgtgtatgcccagaagccccagatggacatccacagctttgagggcaccttcaccagagaagattctgacccccccatccacgagagcctgagcattgagaacaccctgtgggccagcaccatcgtggccagcggcaccgtgattggagtggtgatctacacaggcaaggagaccaggtctgtgatgaacaccagcaaccccaagaacaaggtgggcctgctggacctggagctgaaccggctgaccaaggccctcttcctggccctggtggccctgagcatcgtgatggtgaccctgcagggctttgtgggcccctggtacagaaacctcttccgcttcctgctgctcttctcctacatcatccccatcagcctgcgggtgaacctggacatgggcaaggctgtgtatggctggatgatgatgaaggatgagaacatccctggcaccgtggtgaggaccagcaccatccctgaggagctgggccgcctggtgtacctgctgacagacaagacaggcaccctgacccagaatgagatgatcttcaagaggctgcacctgggcaccgtgtcctatggagctgacaccatggatgagatccagagccacgtgcgggacagctacagccagatgcagagccaggccggcggcaacaacacaggcagcacccccctgaggaaggcccagagcagcgcccccaaggtgaggaagtctgtgagcagccgcatccacgaggccgtgaaggccatcgtgctgtgccacaacgtgacccctgtgtatgagagccgggccggcgtgacagaggagacagaatttgctgaggccgaccaggacttcagtgatgagaacagaacctaccaggccagcagcccagatgaggtggccctggtgcagtggacagagagcgtgggcctgaccctggtgtcccgggacctgacctccatgcagctgaagaccccatctggccaggtgctgtccttctgcatcctgcagctgttccccttcaccagcgagagcaagaggatgggcgtgattgtgagagatgagagcacagctgagatcaccttctacatgaagggagcagatgtggccatgagccccatcgtgcagtacaatgactggctggaggaggagtgtggcaacatggcccgggagggcctgcggaccctggtggtggccaagaaggccctgacagaggagcagtaccaggactttgagagccgctacacccaggccaagctgtccatgcatgacaggagcctgaaggtggccgctgtggtggagagcctggagcgggagatggagctgctgtgcctgactggagtggaggaccagctgcaggctgatgtgcggcccaccctggagatgctgagaaatgccggcatcaagatctggatgctgaccggggacaagctggagacagccacctgcatcgccaagagcagccacctggtgtccaggacccaggacatccacatcttccggcaggtgaccagcagaggagaggcccacctggagctgaatgccttccggaggaagcatgactgtgccctggtgatcagcggggacagcctggaggtgtgcctgaagtactatgagcacgagtttgtggagctggcctgccagtgcccagctgtggtgtgctgccgctgcagccccacccagaaggccagaattgtgaccctgctgcagcagcacactggaagaaggacctgtgccatcggagatggcggcaatgatgtgtccatgatccaggccgctgactgtggcattggaattgagggcaaggagggcaagcaggccagcctggccgctgacttcagcatcacccagttccgccacatcggccgcctgctgatggtgcacggcaggaacagctacaagaggtctgctgccctgggccagtttgtgatgcaccggggcctcatcatcagcaccatgcaggccgtgttcagctctgtgttctactttgcctctgtgcccctgtaccagggcttcctgatggtgggctacgccaccatctacaccatgtttcctgtgttcagcctggtgctggaccaggatgtgaagccagagatggccatgctgtacccagagctgtacaaggacctgaccaagggccgcagcctgtccttcaagaccttcctgatctgggtgctgatcagcatctaccagggcggcatcctgatgtatggagccctggtgctgtttgaaagtgaatttgtgcacgtggtggccatctccttcaccgccctgatcctgacagagctgctgatggtggccctgactgtgaggacctggcactggctgatggtggtggccgagttcctgagcctgggctgctacgtgagcagcctggccttcctgaatgagtactttggaattggccgggtgtcctttggagccttcctggatgtggccttcatcaccaccgtgaccttcctgtggaaggtgtctgccatcaccgtggtgtcctgcctgcccctgtatgtgctgaagtacctgcggaggaagctgagccccccatcctactgcaagctggccagctag

SEQ ID NO: 260133 - DNA, 3444 bp, Artificial Sequence
  derived and/or modified sequence
atggccgaccagatccccctgtaccccgtgcggagcgccgccgccgctgccgccaacagaaagagggccgcatattactcagcagcaggacccagaccaggcgctgaccgccacagtaggtatcaacttgaagatgagtcagctcatctggacgaaatgccactgatgatgtcagaagaagggtttgagaacgaggagagtgattaccacaccctgccccgagcccgaattatgcagcgcaagcgcggtttggaatggtttgtgtgcgacggctggaagttcttatgtacttcctgctgtggatggctgatcaatatttgtcgcagaaagaaagagctgaaggcccgtactgtgtggctgggctgcccagagaagtgcgaggagaaacatccacgaaactcgatcaaaaaccagaagtacaacgtttttacctttattcctggggtcctttatgagcagttcaagtttttcctgaacctgtactttctggttatctcgtgcagccagttcgtgcccgccctaaagattggatacctgtacacatattgggcgcccttgggctttgtgctggcagtgacaatgacaagggaggccatagatgaattcagacggttccagcgggacaaagaggtcaactctcaactttactcaaaactcacagtgcgggggaaagtgcaggttaagagctccgacatccaagtaggcgacctgataattgttgagaagaaccaacgtatcccatcagatatggtcttcctgagaacatcggaaaaggccggaagctgtttcattaggacggaccagctggatggggaaacagattggaaactcaaagttgcagttagctgcacacagcagcttccagccttgggcgatctcttttccatcagcgcttatgtatacgcacagaaacctcagatggacattcattcctttgaaggcacgtttacgcgcgaagattctgatcctccaattcacgaaagcctgagtattgaaaacacgttgtgggcatccaccatcgttgcatctggaaccgtgataggggtcgtaatatacaccggcaaggaaaccagatcggtgatgaatacgtctaatccaaagaacaaagtgggactgctggatctcgagctgaatagactgactaaggccctatttctcgctctcgttgctcttagtatcgttatggtgaccttgcaggggttcgtggggccatggtatcgtaacctgttcagattcttgcttttattttcctatattataccaatcagcctgcgggtgaacttagacatgggcaaggccgtgtacggctggatgatgatgaaggatgaaaacattcccggcacggtggtgcggaccagcacaattcctgaagagctgggccgtcttgtgtacttattgacagataagacaggtaccttgacgcagaacgagatgattttcaagagattgcatctgggtacagtgagttacggagctgacaccatggatgaaatccagtcccatgttcgagatagttactctcagatgcagagccaggcaggggggaataatactgggagcacacccctccgaaaagcccagtcttctgcacccaaagttcggaaatctgtgtcatcccgaattcacgaggcggtgaaggcaattgttttgtgtcacaacgtgactcctgtgtacgagtccagagctggagtgacggaggagaccgagttcgccgaggccgatcaagacttcagtgacgagaatagaacatatcaggctagcagccccgatgaagtagcgttagtccaatggaccgagtctgtgggcctgacgctggttagcagggacctgaccagtatgcaactcaagaccccatctgggcaggttttgtcgttttgtatactgcagctttttccctttacgtcagagagcaaacgcatgggtgtgatagtaagggacgaaagtaccgctgaaattaccttttatatgaaaggagctgatgtcgcgatgagcccgattgtccagtataacgattggctggaggaggaatgcgggaacatggcccgggaaggcctgagaacacttgtggtggcaaaaaaggccctcaccgaagagcagtaccaggacttcgagtcccgatacacacaggctaagttgagtatgcacgatagatcccttaaagtggccgcggtggtcgagtctttggagcgcgagatggagttgctgtgccttaccggtgtcgaagaccagctccaggcggacgtgagacctactttggaaatgcttaggaacgctggcatcaagatctggatgctgacaggcgacaagctggagaccgctacctgcatagcgaaatccagccaccttgtctccagaactcaggacattcatatttttagacaggtgacgtcccggggcgaagcacacttggaactgaatgctttcagaagaaagcacgattgtgccctggtgatcagcggagactccttagaagtgtgtctgaagtactatgaacacgagttcgtggaactggcttgtcagtgccctgccgtcgtgtgctgcagatgcagcccaacacagaaggcacgcatcgtgacattgctgcagcagcatacaggtaggagaacttgcgcgatcggcgacggcggcaatgacgtaagcatgatccaggccgccgattgcggtataggaattgagggcaaagagggtaaacaagcctctctcgctgccgattttagcatcacccagttccgccatatcggtagactgcttatggttcacgggaggaactcatacaaacgttcagctgcattggggcagttcgtaatgcacagagggctcataatctctaccatgcaggcagtgttcagctctgttttctactttgcttcagtgcccctttaccagggcttcctcatggtggggtatgccactatctacaccatgttccccgtcttctccctcgtgctggatcaggatgtcaagcccgaaatggcgatgctgtatcccgaactatacaaggacctcactaagggcaggtcactgtcttttaagactttcttaatctgggtactgataagcatttaccagggaggaatcctcatgtatggtgcattagtgctatttgaatctgagtttgttcatgtcgtggcaatcagttttaccgccctgattctcaccgagttgctcatggtggccctgaccgtaagaacatggcactggttgatggtagtggctgagttcctctccctgggatgctatgttagcagcttagccttcctgaacgaatattttggcatcggtcgggtgagttttggagccttcctggacgtggctttcataactactgtgacctttttgtggaaggtgtccgctattactgtggtgagttgtttgccactgtacgtgttgaaatacttaaggcgtaaattgtccccacctagctattgtaagctggcaagctag

SEQ ID NO: 260134 - DNA, 3444 bp, Artificial Sequence
  derived and/or modified sequence
atggccgaccagatcccgctctaccctgtgagatcagctgccgcagccgctgccaacaggaagcgcgctgcctactactcagccgcagggcctaggccaggagctgataggcacagccgctaccagctagaggacgagagtgcacacctcgatgagatgccactgatgatgtctgaagaaggcttcgagaatgaagagagcgactatcatactctgcccagagcgagaattatgcagaggaaacggggtttggaatggttcgtctgtgacgggtggaagttcctatgcacgtcttgctgtggatggttaattaatatctgtcgcaggaagaaagagttgaaagcccgtactgtttggctgggatgtccagagaagtgcgaggaaaagcaccctaggaacagtatcaaaaaccagaagtacaatgtcttcactttcatccccggtgtgctgtatgaacagtttaagttttttttgaatctgtactttcttgttatctcctgttcacagtttgttcccgctctcaaaattggctacctgtatacctattgggctcctctcggctttgtgctcgctgtaaccatgacgcgcgaagctatcgacgaattccggaggttccagcgcgataaggaggtcaacagccaactgtactccaagttaaccgtccgtggaaaggttcaggtcaagtctagtgacatccaggtcggcgaccttattatcgttgaaaagaaccaaaggatcccctcagacatggtattcctgcgaacttctgaaaaggccggatcttgtttcatacgcactgatcagctggacggcgagaccgactggaagctgaaggtggccgtgagctgtacgcaacagttaccagcactgggagatttgttttctatcagtgcctacgtgtacgcccagaagccacagatggatattcactcctttgaagggaccttcaccagagaagacagtgacccgccaattcacgagagtttaagcattgaaaatacactgtgggcgtcaacaatcgtggctagtggaacagtcattggggtcgtgatctataccggcaaggagacgcgttctgtgatgaatacgtcaaatcccaaaaacaaagtgggcctgctcgacctggaactgaatcggctgactaaggcactgttcctcgccttagttgctctgtctattgtgatggtgaccctgcagggctttgttggcccttggtaccgtaacttgttccgctttttgcttctgttttcctacatcattcctattagtttaagggtaaatttggacatgggtaaagcagtgtacggctggatgatgatgaaagacgagaatatcccaggcaccgtggttcggacgtccacaattcctgaggagctgggacgactggtctacttgctgactgataagaccggtacccttactcagaatgagatgatctttaaacgcctgcatctgggaacggtctcttatggggcagatactatggacgaaatacaatcacatgtgagagactcctattcgcagatgcagagccaggccggagggaataacacagggtcaacccccttaaggaaagcccaaagcagcgcccctaaagtacggaagagcgtatcgagccggattcatgaggctgtgaaggccatagtcctttgtcataatgtcacaccagtgtacgagtcacgcgctggcgtaacagaggagaccgaatttgcggaggcagaccaagacttctcggacgagaatcggacctaccaagcttcgtcccccgacgaggttgcactagtgcagtggactgaaagtgttgggctcacactcgtgtcaagagatttaacatccatgcagctcaagacccctagtggccaggtactgtcgttctgcattctccagttattccctttcacaagcgaatctaaacggatgggcgtgattgttcgagacgagagtactgctgagataacattctatatgaagggcgctgacgtcgcaatgtccccaattgtccagtacaatgattggctcgaggaggaatgtgggaacatggctcgcgagggcctgcggacactggtcgtcgctaagaaggcactgactgaggaacagtaccaggatttcgagtctagatacacccaagctaaattgtctatgcatgaccgctccctgaaggtagcagctgtggtcgagagtctagaacgggaaatggagctcctgtgcttgaccggagtcgaagaccagttgcaggccgatgtcaggcccacgctcgaaatgctaagaaacgcgggtataaaaatttggatgctgaccggagacaaactggagactgccacatgcatagccaaaagtagccacctcgtttcacgtactcaagacattcatatcttccggcaggtcacgagtaggggtgaggcgcacctcgaattgaacgcatttcgtcggaagcatgattgcgctctggtgatttccggagacagcctcgaagtctgcttgaaatattatgaacacgagttcgttgaactcgcgtgtcagtgccccgcagtggtgtgctgcagatgttcccctacacagaaagccagaatagtaactctgctgcaacagcataccggtaggaggacctgcgctattggagacggtggcaacgacgttagtatgattcaggcagccgactgcggaattggcatcgaagggaaggaagggaaacaggcctcgcttgctgctgatttttctattactcaattccggcacattggcaggttactgatggtacatggtcgtaacagctacaagcgatcagctgccctgggccagtttgtcatgcatcgcggactcattatcagcaccatgcaggccgtcttcagctccgtcttttacttcgcttctgtgcccctgtatcagggattcttgatggtgggctatgccactatctatacgatgtttccggtgtttagtctcgttctcgatcaggatgtgaaaccggagatggccatgctctatccggagttatataaggatctgacaaagggaagatcactgagttttaaaacattcttgatctgggtcttaattagcatttaccagggaggcattctgatgtatggggctttagtgttatttgagtctgagttcgtgcacgtggttgcaatcagtttcacagccttgattctcactgaattactcatggttgccctgactgtacgcacatggcactggctgatggtggtcgccgaattcttgagtctcggctgctacgtgagcagcctcgccttcctgaatgagtattttggaataggaagagtctcgttcggcgcttttctggatgtggcgtttatcaccacagtcacctttctgtggaaggtgtcagccatcaccgttgtctcatgccttccgctgtatgttctcaagtacttgcgcaggaagctgagccctccaagctactgcaagcttgccagctag

SEQ ID NO: 260135 - DNA, 3457 bp, Artificial Sequence
  derived and/or modified sequence
ggtcggaacatggcggaccagatcccgctttacccggtgcgtagcgcagcggcggccgcagccaaccgcaaacgcgcggcctactacagcgccgcggggcccaggccgggagccgaccggcacagcaggtaccagctggaggatgagtctgcgcatttggatgaaatgccactaatgatgtctgaagaaggctttgagaatgaggaaagtgattaccacaccttaccacgagccaggataatgcaaaggaaaagaggactggagtggtttgtctgtgatggctggaagttcctctgtaccagttgctgtggttggctgataaatatttgtcgaagaaagaaagagctgaaagctcgcacagtatggcttggatgtcctgaaaagtgtgaagaaaaacatcccaggaattctataaaaaatcaaaaatacaatgtgtttacctttatacctggggttttgtatgaacaattcaagtttttcttgaatctctattttctagtaatatcctgctcacagtttgtaccagcattgaaaataggctatctctacacctactgggctcctctgggatttgtcttggctgttactatgacacgggaagcaattgatgaatttcggcgttttcagcgtgacaaggaagtgaattcacaactatatagcaagcttacagtaagaggtaaagtgcaagttaagagttcagacatacaagttggagacctcatcatagtggaaaagaatcaaagaattccatcggacatggtgtttcttaggacttcagaaaaagcaggttcgtgttttattcgaactgatcaactagatggtgaaactgactggaagctgaaggtggcagtgagctgcacgcaacagctgccggctctgggggaccttttttctatcagtgcttatgtttatgctcagaaaccacaaatggacattcacagtttcgaaggcacatttaccagggaagacagtgacccgcccattcatgaaagtctcagcatagaaaatacattgtgggcaagcaccattgttgcatcaggtactgtaataggtgttgtcatttataccggaaaagagactcgaagtgtaatgaacacatccaatccaaaaaataaggttggtttgttggaccttgaactcaatcggctgacgaaagcgctatttttggctttagttgctctttccattgttatggtaaccttacaaggatttgtgggtccatggtaccgcaatctttttcggttccttctcctcttttcttacatcattcccataagtttgcgtgtgaacttggacatgggcaaagcggtgtatggatggatgatgatgaaagatgagaacatccctggcacggtcgttcggaccagcactatcccagaggaacttgggcgcctggtgtatttattgacagacaaaacaggaaccctcacccagaatgaaatgatatttaagcggctgcacctgggcaccgtgtcctatggcgccgacacgatggatgagatccagagccatgtcagggactcctactcacagatgcagtctcaagctggtggaaacaatactggttcaactccactaagaaaagcccaatcttcagctcccaaagttaggaaaagtgtcagtagtcgaatccatgaagccgtgaaagccatcgtgctgtgtcacaacgtgacccccgtgtatgagtctcgggccggcgttactgaggagactgagttcgcagaggctgaccaagacttcagtgatgagaatcgcacctaccaggcttccagcccggatgaggtcgctctggtgcagtggacagagagtgtgggcctcacgctggtcagcagggacctcacctccatgcagctgaagacccccagtggccaggtcctcagcttctgcattctgcagctgtttcccttcacctccgagagcaagcggatgggcgtcatcgtcagggatgaatccacggcagaaatcacattctacatgaagggcgctgacgtggccatgtctcctatcgtgcagtataatgactggctggaagaggagtgcggaaacatggctcgcgaaggactgcggaccctcgtggttgcaaagaaggcgttgacagaggagcagtaccaggactttgagagccgatacactcaagccaagctgagcatgcacgacaggtccctcaaggtggccgcggtagtcgagagcctggagagggagatggaactgctgtgcctcaccggcgtggaggaccagctgcaggcagacgtgcggcccacgctggagatgctgcgcaacgccgggatcaagatatggatgctaacaggcgataaactcgagacagctacctgcattgccaaaagttcacatctcgtgtctagaacacaagatattcatattttcagacaggtaaccagtcggggagaggcacatttggagctgaatgcatttcgaaggaagcatgattgtgcactagtcatatctggggactctctggaggtttgtctaaagtactacgagcatgaatttgtggagctggcctgccagtgccctgccgtggtttgctgccgctgctcacccacccagaaggcccgcattgtgacactgctgcagcagcacacagggagacgcacctgcgccatcggtgatggaggaaatgatgtcagcatgattcaggcagcagactgtgggattgggattgagggaaaggagggtaaacaggcctcgctggcggccgacttctccatcacgcagttccggcacataggcaggctgctcatggtgcacgggcggaacagctacaagaggtcggcggcactcggccagttcgtcatgcacaggggccttatcatctccaccatgcaggctgtgttttcctcagtcttctacttcgcatccgtccctttgtatcagggcttcctcatggtggggtatgccaccatatacaccatgttcccagtgttctccttagtgctggaccaggacgtgaagccagagatggcgatgctctacccggagctgtacaaggacctcaccaagggaagatccttgtccttcaaaaccttcctcatctgggttttaataagtatttaccaaggcggcatcctcatgtatggggccctggtgctcttcgagtctgagttcgtccacgtggtggccatctccttcaccgcactgatcctgaccgagctgctgatggtggcgctgaccgtccgcacgtggcactggctgatggtggtggccgagttcctcagcttaggctgctacgtgtcctcactcgcttttctcaatgaatattttggtataggcagagtgtcttttggagctttcttagatgttgcctttatcaccaccgtgaccttcctgtggaaagtgtcggcgatcaccgtggtcagctgcctcccgctgtatgtcctcaagtacctgaggcgcaagctctctcctcccagctactgcaagctggcctcctaagggg

SEQ ID NO: 260136 - DNA, 3444 bp, Artificial Sequence
  derived and/or modified sequence
atggccgaccagatccccctgtaccccgtgagaagcgccgccgccgccgccgccaacagaaagagagccgcctactacagcgccgccggccccagacccggcgccgacagacacagcagataccagctggaggacgagagcgcccacctggacgagatgcccctgatgatgagcgaggagggcttcgagaacgaggagagcgactaccacaccctgcccagagccagaatcatgcagagaaagagaggcctggagtggttcgtgtgcgacggctggaagttcctgtgcaccagctgctgcggctggctgatcaacatctgcagaagaaagaaggagctgaaggccagaaccgtgtggctgggctgccccgagaagtgcgaggagaagcaccccagaaacagcatcaagaaccagaagtacaacgtgttcaccttcatccccggcgtgctgtacgagcagttcaagttcttcctgaacctgtacttcctggtgatcagctgcagccagttcgtgcccgccctgaagatcggctacctgtacacctactgggcccccctgggcttcgtgctggccgtgaccatgaccagagaggccatcgacgagttcagaagattccagagagacaaggaggtgaacagccagctgtacagcaagctgaccgtgagaggcaaggtgcaggtgaagagcagcgacatccaggtgggcgacctgatcatcgtggagaagaaccagagaatccccagcgacatggtgttcctgagaaccagcgagaaggccggcagctgcttcatcagaaccgaccagctggacggcgagaccgactggaagctgaaggtggccgtgagctgcacccagcagctgcccgccctgggcgacctgttcagcatcagcgcctacgtgtacgcccagaagccccagatggacatccacagcttcgagggcaccttcaccagagaggacagcgacccccccatccacgagagcctgagcatcgagaacaccctgtgggccagcaccatcgtggccagcggcaccgtgatcggcgtggtgatctacaccggcaaggagaccagaagcgtgatgaacaccagcaaccccaagaacaaggtgggcctgctggacctggagctgaacagactgaccaaggccctgttcctggccctggtggccctgagcatcgtgatggtgaccctgcagggcttcgtgggcccctggtacagaaacctgttcagattcctgctgctgttcagctacatcatccccatcagcctgagagtgaacctggacatgggcaaggccgtgtacggctggatgatgatgaaggacgagaacatccccggcaccgtggtgagaaccagcaccatccccgaggagctgggcagactggtgtacctgctgaccgacaagaccggcaccctgacccagaacgagatgatcttcaagagactgcacctgggcaccgtgagctacggcgccgacaccatggacgagatccagagccacgtgagagacagctacagccagatgcagagccaggccggcggcaacaacaccggcagcacccccctgagaaaggcccagagcagcgcccccaaggtgagaaagagcgtgagcagcagaatccacgaggccgtgaaggccatcgtgctgtgccacaacgtgacccccgtgtacgagagcagagccggcgtgaccgaggagaccgagttcgccgaggccgaccaggacttcagcgacgagaacagaacctaccaggccagcagccccgacgaggtggccctggtgcagtggaccgagagcgtgggcctgaccctggtgagcagagacctgaccagcatgcagctgaagacccccagcggccaggtgctgagcttctgcatcctgcagctgttccccttcaccagcgagagcaagagaatgggcgtgatcgtgagagacgagagcaccgccgagatcaccttctacatgaagggcgccgacgtggccatgagccccatcgtgcagtacaacgactggctggaggaggagtgcggcaacatggccagagagggcctgagaaccctggtggtggccaagaaggccctgaccgaggagcagtaccaggacttcgagagcagatacacccaggccaagctgagcatgcacgacagaagcctgaaggtggccgccgtggtggagagcctggagagagagatggagctgctgtgcctgaccggcgtggaggaccagctgcaggccgacgtgagacccaccctggagatgctgagaaacgccggcatcaagatctggatgctgaccggcgacaagctggagaccgccacctgcatcgccaagagcagccacctggtgagcagaacccaggacatccacatcttcagacaggtgaccagcagaggcgaggcccacctggagctgaacgccttcagaagaaagcacgactgcgccctggtgatcagcggcgacagcctggaggtgtgcctgaagtactacgagcacgagttcgtggagctggcctgccagtgccccgccgtggtgtgctgcagatgcagccccacccagaaggccagaatcgtgaccctgctgcagcagcacaccggcagaagaacctgcgccatcggcgacggcggcaacgacgtgagcatgatccaggccgccgactgcggcatcggcatcgagggcaaggagggcaagcaggccagcctggccgccgacttcagcatcacccagttcagacacatcggcagactgctgatggtgcacggcagaaacagctacaagagaagcgccgccctgggccagttcgtgatgcacagaggcctgatcatcagcaccatgcaggccgtgttcagcagcgtgttctacttcgccagcgtgcccctgtaccagggcttcctgatggtgggctacgccaccatctacaccatgttccccgtgttcagcctggtgctggaccaggacgtgaagcccgagatggccatgctgtaccccgagctgtacaaggacctgaccaagggcagaagcctgagcttcaagaccttcctgatctgggtgctgatcagcatctaccagggcggcatcctgatgtacggcgccctggtgctgttcgagagcgagttcgtgcacgtggtggccatcagcttcaccgccctgatcctgaccgagctgctgatggtggccctgaccgtgagaacctggcactggctgatggtggtggccgagttcctgagcctgggctgctacgtgagcagcctggccttcctgaacgagtacttcggcatcggcagagtgagcttcggcgccttcctggacgtggccttcatcaccaccgtgaccttcctgtggaaggtgagcgccatcaccgtggtgagctgcctgcccctgtacgtgctgaagtacctgagaagaaagctgagcccccccagctactgcaagctggccagctag

SEQ ID NO: 260137 - protein, 181 aa, Artificial Sequence
  derived and/or modified sequence
MQVNFVSYVQLTSRALPSLTDSKGSLVVVSSLLGRVPTSFSTPYSAAKFALDGFFGSLRRELDVQDVNVAITMCVLGLRDRASAAEAVRSSTSRPRQPEHRGVPLQSQTAMFLPPTVPGARTLTETPLRGWPQPKMKSSRQKSKTEKNDGHLEPVTAWEVQVPRVRRLCRGLARPHLFGHD

SEQ ID NO: 260138 - protein, 87 aa, Artificial Sequence
  derived and/or modified sequence
MKVLLLTGLGALFFAYYWDDNFDPASLQGARVLLTGANAGVGEELAYHYARLGSHLVLTAHTEALLQKARWLTLVVSTLGGRGKWIT

SEQ ID NO: 260139 - protein, 315 aa, Artificial Sequence
  derived and/or modified sequence
MKVLLLTGLGALFFAYYWDDNFDPASLQGARVLLTGANAGVGEELAYHYARLGSHLVLTAHTEALLQKVVGNCRKLGAPKVFYIAADMASPEAPESVVQFALDKLGGLDYLVLNHIGGAPAGTRARSPQATRWLMQVNFVSYVQLTSRALPSLTDSKGSLVVVSSLLGRVPTSFSTPYSAAKFALDGFFGSLRRELDVQDVNVAITMCVLGLRDRASAAEAVRSSTSRPRQPEHRGVPLQSQTAMFLPPTVPGARTLTETPLRGWPQPKMKSSRQKSKTEKNDGHLEPVTAWEVQVPRVRRLCRGLARPHLFGHD

SEQ ID NO: 260140 - protein, 75 aa, Artificial Sequence
  derived and/or modified sequence
MKVLLLTGLGALFFAYYWDDNFDPASLQGARVLLTGANAGVGEELAYHYARLGSHLVLTAHTEALLQKAGWTTSC

SEQ ID NO: 260141 - DNA, 948 bp, Artificial Sequence
  derived and/or modified sequence
atgaaggtgctcctgttgacaggactgggcgctttgttcttcgcctattactgggatgacaactttgacccagcctctttgcagggtgctcgggtattgttaacgggagctaatgctggcgtaggagaggaactggcctaccactacgccaggctgggtagccacctggtcctgactgcacacacggaagccctgctgcagaaagtcgtgggcaactgcagaaagctgggggctccaaaggtgttttacatcgcggctgacatggcatcacccgaagctccagagtctgtagtacagttcgctctggataaactgggtggtttagattatctggtgcttaaccacatcggaggagccccagccggtaccagagccagaagccctcaggcaacacggtggctgatgcaggtgaattttgtgtcttatgtacagttgacttccagggcactcccctctttgactgactccaaaggttcgctggtcgtggtctccagcttgctggggcgagtgccgacttccttcagcaccccatattccgccgctaagtttgcattggacggcttcttcggaagtttgagaagagaattggatgtgcaggatgtgaacgtggctattaccatgtgcgtcctcggtctcagggacagagcctcagccgcagaagctgttcggagcagcacttcccgacctaggcagcccgagcacagaggagttcctctgcagtctcagactgctatgttccttccaccgactgtacccggagctaggaccttgacggagacacccctccgcggatggccccagcccaagatgaaatcatcacggcagaagagcaaaaccgagaagaacgacggccatctggagccggtcacggcctgggaggtgcaggtgcctagagttcgccgactgtgccggggactggctcgtcctcatctgttcggccatgactag

SEQ ID NO: 260142 - DNA, 1524 bp, Artificial Sequence
  derived and/or modified sequence
cgaagaccaggcgggcactgttgcccggcgacgctccggcgctgggtccccgaggcccggcccctccccgggaggaggtgggcttcgagtcacgtgacccgtgccctacgggagggggtgcggtcggggacccggcaggaggcggccgagaagagaggaccgtgggggcgttcgcgtggctcccagcccgggaccccacccccgctggacagtgggggaaactgaggcctgagcgggcccacacaggaccatgaaggtgcttctcctcacagggctgggggccctgttcttcgcctattattgggatgacaacttcgacccagccagcctccagggagcgcgagtgctgctgacaggggccaacgctggtgttggtgaggagctggcctatcactacgcgcgtctgggctcccacctggtgctcactgcccacactgaggctctcctgcagaaggtggtagggaactgccggaagctgggcgcccccaaggtcttctacatcgcggcggacatggcctcccctgaggcgcccgagagcgtggtgcagtttgcgctggacaagctgggcgggctggactacctcgtgctgaaccacatcggcggcgccccggccggcacgcgagcccgcagcccccaggcaactcgctggctcatgcaggtaaactttgtgagctacgtgcaactgacgtcgcgggcgctgcccagcctgacggacagcaagggctccctggtggtggtgtcctcgctgctcggccgcgtgcccacgtcgttctccactccctactcggcggccaagtttgcgctggacggcttcttcggctccctgcggcgggagctggacgtgcaggacgtgaacgtggccatcaccatgtgcgtcctgggcctccgagatcgcgcctccgccgccgaggcagtcaggagctcaacgtcacggccgcggcagcctgagcaccggggggtgcccctccagtcccagacggcaatgttcctccctccaactgtccctggagccagaacactcacagagacacccctgagagggtggccacagcccaagatgaagtcatcaagacagaaaagcaaaaccgagaaaaacgacgggcacctggaaccagtcacggcttgggaggtgcaggtgccccgtgttaggcgcctttgtcggggacttgcaaggcctcacctgtttggccatgattgatgacgtgactgcttccattttgcagatgaggaaactaaggctcagagaggccacgccacccttgagccacccatggacccctctccatctcctgcctgcgcctttaagtccctgatttattctttccattcattccatctgggaggaacccccccaactcctgccagcttcccctagctggggtctctggtactcttcacacctgcaggggcgtctacactgttcgtctacctggtggcagggtctgagcgggaggaggagggaaagagtgtgttctgagctggacccagcctcttgttcgagaataaaaactcttcttctcttgc

SEQ ID NO: 260143 - DNA, 948 bp, Artificial Sequence
  derived and/or modified sequence
atgaaggtgcttttgctgaccggcctaggagctctgttcttcgcttactattgggacgataattttgaccctgcttcactgcaaggagcccgcgtcttactgaccggcgcgaatgctggtgtgggtgaagaactggcttatcattatgctcgactgggctcacaccttgtgctgaccgcccacacagaagctctgttgcaaaaagttgtaggaaattgtcggaagcttggggcccccaaggtgttttatattgctgcagatatggctagcccagaggcgcccgaatctgtggtgcaattcgcactggataaactgggagggctagactatcttgtcttaaaccatatcggaggagcacctgccggaacacgggctcgtagcccccaggctacacgctggctcatgcaagtcaattttgtctcatatgtacaacttactagtagagccctgccttctctgacggactccaaaggttcacttgtcgtcgtgtcctccctgttaggtagggtccctacatcattcagtactccctactctgcggcaaagttcgcgctggatgggttcttcggatccctacgccgagagctggacgttcaggacgtgaatgttgccatcaccatgtgcgtactcgggctcagggaccgggctagtgctgctgaagccgtacgctcctctacttcgaggcctcgccagccggaacatcgaggggtccctctacagagccagacggccatgtttttgcctccaacagtgcctggcgcccgtacgttaacagaaaccccactccgaggatggccacagccaaagatgaaatcatcacggcagaaatcaaagacagaaaaaaacgacggacatctcgaaccagtaacagcctgggaagtgcaggttcccagagttcggcggctgtgccgtggtcttgccaggccacatctttttgggcatgattag

SEQ ID NO: 260144 - DNA, 948 bp, Artificial Sequence
  derived and/or modified sequence
atgaaggtcctgctcctgacaggcctgggcgctctattcttcgcttattactgggacgacaactttgaccccgcatcgctgcagggagctcgcgtgctgctgactggggcgaacgccggcgttggagaagaactggcttaccattacgcacgactcggctcacatctcgttctgacagctcacacagaggccttgctccaaaaagtggtgggaaactgcagaaagcttggagcccctaaagtgttctatattgccgcagacatggccagccccgaggcacccgaaagcgtggtacagttcgcacttgacaaattgggcggcctggattacctggtgctgaaccatattggaggcgctcccgcaggtacacgcgcccggtcaccccaagctacgagatggctgatgcaggtgaactttgtgtcttatgtgcagttaactagtcgcgctctaccttcattaactgattctaagggaagccttgtggtggtgagctccctgctcggtagagttcccacatctttttccactccctattctgctgccaaattcgctttagacggatttttcggaagtctccgacgagaactggacgtgcaggacgtcaacgtcgccattacaatgtgtgtgctggggctccgagatagggcatctgctgcagaggccgtccgctcctctacatccagaccaagacagccagaacacaggggggtgcctttacagagtcagaccgcaatgtttttgccaccaacagtccctggcgcccgaaccctgaccgaaacgcccttgcgcgggtggccacagccaaaaatgaagagctctagacagaaatctaagaccgagaagaacgacggtcatctcgaacctgtaactgcatgggaggtgcaggtgccacgggtgcgacgcctttgccgtggattagctcgcccacacctgtttggtcatgattag

SEQ ID NO: 260145 - DNA, 948 bp, Artificial Sequence
  derived and/or modified sequence
atgaaggtgctgctgctgaccggcctgggcgccctgttcttcgcctactactgggacgacaacttcgaccccgccagcctgcagggcgccagagtgctgctgaccggcgccaacgccggcgtgggcgaggagctggcctaccactacgccagactgggcagccacctggtgctgaccgcccacaccgaggccctgctgcagaaggtggtgggcaactgcagaaagctgggcgcccccaaggtgttctacatcgccgccgacatggccagccccgaggcccccgagagcgtggtgcagttcgccctggacaagctgggcggcctggactacctggtgctgaaccacatcggcggcgcccccgccggcaccagagccagaagcccccaggccaccagatggctgatgcaggtgaacttcgtgagctacgtgcagctgaccagcagagccctgcccagcctgaccgacagcaagggcagcctggtggtggtgagcagcctgctgggcagagtgcccaccagcttcagcaccccctacagcgccgccaagttcgccctggacggcttcttcggcagcctgagaagagagctggacgtgcaggacgtgaacgtggccatcaccatgtgcgtgctgggcctgagagacagagccagcgccgccgaggccgtgagaagcagcaccagcagacccagacagcccgagcacagaggcgtgcccctgcagagccagaccgccatgttcctgccccccaccgtgcccggcgccagaaccctgaccgagacccccctgagaggctggccccagcccaagatgaagagcagcagacagaagagcaagaccgagaagaacgacggccacctggagcccgtgaccgcctgggaggtgcaggtgcccagagtgagaagactgtgcagaggcctggccagaccccacctgttcggccacgactag

SEQ ID NO: 260146 - DNA, 948 bp, Artificial Sequence
  derived and/or modified sequence
atgaaggttctgctgctaaccgggctgggagctctatttttcgcctattactgggacgacaattttgatcccgccagtcttcaaggagcccgagtccttctcacaggagctaacgcgggcgtcggagaggagttggcataccattatgcccgactcggatcacacctcgtgctcaccgctcacaccgaggccttattgcagaaagtcgttggcaattgcagaaagctcggggcccccaaggtcttttatatcgccgcggacatggcctctccagaggctcccgaatccgttgtacaatttgcgttggataagctaggaggcctcgattacctagtgttgaaccacattggaggagcgccagctggcacacgtgctagatcccctcaggcaacccgatggttgatgcaggtcaattttgtgagttacgtgcagctgacgtctagagccctcccctctctgaccgatagtaaagggtcactggtggtggtgagctccttgctggggagagtcccgaccagcttttccaccccctattctgctgccaaattcgccctggacggtttctttgggtctctgcggagggagttggatgtccaggatgttaacgtcgcgatcacaatgtgcgtcctcggactaagggacagggcaagcgccgccgaggccgtgcgcagctctactagccgtccaaggcaaccagagcacagaggggtgcctttgcagtctcaaaccgccatgttcctgccgccaacagtgccaggggcccgcacactgactgagaccccattaagaggctggccccaaccaaagatgaagagtagtagacaaaaatccaagacagagaaaaatgatggacatcttgaaccagtcacagcttgggaggtacaggttccacgagtgcggcgcctgtgcagaggactggcgcgacctcatttatttggccatgactag

SEQ ID NO: 260147 - DNA, 948 bp, Artificial Sequence
  derived and/or modified sequence
atgaaggtgctgctgctgaccggcctgggcgccctcttctttgcctactactgggatgacaactttgatcctgccagcctgcagggcgcccgggtgctgctgactggagccaatgccggcgtgggggaggagctggcctaccactacgcccggctgggcagccacctggtgctgacagcccacacagaggccctgctgcagaaggtggtgggcaactgcaggaagctgggcgcccccaaggtgttctacatcgctgctgacatggccagccctgaggcccctgagagcgtggtgcagtttgccctggacaagctgggcggcctggactacctggtgctgaaccacatcggcggggccccagctggcacccgggcccggagcccccaggccacccgctggctgatgcaggtgaactttgtgtcctatgtgcagctgaccagccgggccctgcccagcctgacagacagcaagggcagcctggtggtggtgagcagcctgctgggccgggtgcccaccagcttcagcaccccctacagcgctgccaagtttgccctggatggcttcttcggcagcctgcggcgggagctggatgtgcaggatgtgaatgtggccatcaccatgtgtgtgctgggcctgcgggaccgggccagcgctgctgaggccgtgcgcagcagcaccagccggccccggcagcctgagcaccggggcgtgcccctgcagagccagacagccatgttcctgccccccaccgtgcctggggcccggaccctgacagagacccccctgcggggctggccccagcccaagatgaagagcagccggcagaagagcaagacagagaagaatgatggccacctggagcctgtgacagcctgggaggtgcaggtgccccgggtgcggcggctgtgccggggcctggcccggccccacctgtttggacatgactag

SEQ ID NO: 260148 - DNA, 948 bp, Artificial Sequence
  derived and/or modified sequence
atgaaggtgctgctgctgaccggcctgggcgccctgttcttcgcctactattgggacgataacttcgatcccgcttcattgcaaggagcccgcgtgctgctgacaggcgctaacgccggcgtgggagaggagctcgcttaccactatgcccggttggggtctcacctggtgttgactgcccacacggaagcccttctgcaaaaggtggtggggaattgtcgtaagcttggagctcctaaggtcttttacatagcggcagatatggccagtcccgaggcccccgaaagcgttgtgcagtttgccttagacaagctcggaggcctggactatctcgtccttaaccacatcggaggagcccctgcagggacaagggctaggagtccacaggccaccagatggctcatgcaagtgaattttgtgtcatacgtccagttgacgagtagagctctacccagtctcacggattcgaaagggtccctagtcgtggttagcagtttgctgggacgagttccaactagtttctccactccttatagtgcagcgaagtttgcactcgacgggtttttcgggagcctgaggcgcgaactggatgtccaggatgtcaacgttgctatcactatgtgcgtgcttggattgagggaccgcgctagcgctgcagaggcagtgcgtagctctactagccgcccaaggcaacccgaacatcgaggcgtgccactgcaaagtcagacggccatgttcctgcctcctaccgtgcccggagctcggacactgacagaaacacctctccgggggtggcctcagccaaagatgaagagctctaggcagaaaagcaagacagagaagaacgatggacacctggaacccgtcacggcatgggaagtgcaggtgcctagggtgagacgtctttgccgcggtttggcccgaccgcatctctttggccatgactag

SEQ ID NO: 260149 - RNA, 948 nt, Artificial Sequence
  derived and/or modified sequence
augaaggugcuuuugcugaccggccuaggagcucuguucuucgcuuacuauugggacgauaauuuugacccugcuucacugcaaggagcccgcgucuuacugaccggcgcgaaugcuggugugggugaagaacuggcuuaucauuaugcucgacugggcucacaccuugugcugaccgcccacacagaagcucuguugcaaaaaguuguaggaaauugucggaagcuuggggcccccaagguguuuuauauugcugcagauauggcuagcccagaggcgcccgaaucuguggugcaauucgcacuggauaaacugggagggcuagacuaucuugucuuaaaccauaucggaggagcaccugccggaacacgggcucguagcccccaggcuacacgcuggcucaugcaagucaauuuugucucauauguacaacuuacuaguagagcccugccuucucugacggacuccaaagguucacuugucgucguguccucccuguuagguagggucccuacaucauucaguacucccuacucugcggcaaaguucgcgcuggauggguucuucggaucccuacgccgagagcuggacguucaggacgugaauguugccaucaccaugugcguacucgggcucagggaccgggcuagugcugcugaagccguacgcuccucuacuucgaggccucgccagccggaacaucgaggggucccucuacagagccagacggccauguuuuugccuccaacagugccuggcgcccguacguuaacagaaaccccacuccgaggauggccacagccaaagaugaaaucaucacggcagaaaucaaagacagaaaaaaacgacggacaucucgaaccaguaacagccugggaagugcagguucccagaguucggcggcugugccguggucuugccaggccacaucuuuuugggcaugauuag

SEQ ID NO: 260150 - RNA, 948 nt, Artificial Sequence
  derived and/or modified sequence
augaagguccugcuccugacaggccugggcgcucuauucuucgcuuauuacugggacgacaacuuugaccccgcaucgcugcagggagcucgcgugcugcugacuggggcgaacgccggcguuggagaagaacuggcuuaccauuacgcacgacucggcucacaucucguucugacagcucacacagaggccuugcuccaaaaaguggugggaaacugcagaaagcuuggagccccuaaaguguucuauauugccgcagacauggccagccccgaggcacccgaaagcgugguacaguucgcacuugacaaauugggcggccuggauuaccuggugcugaaccauauuggaggcgcucccgcagguacacgcgcccggucaccccaagcuacgagauggcugaugcaggugaacuuugugucuuaugugcaguuaacuagucgcgcucuaccuucauuaacugauucuaagggaagccuugugguggugagcucccugcucgguagaguucccacaucuuuuuccacucccuauucugcugccaaauucgcuuuagacggauuuuucggaagucuccgacgagaacuggacgugcaggacgucaacgucgccauuacaaugugugugcuggggcuccgagauagggcaucugcugcagaggccguccgcuccucuacauccagaccaagacagccagaacacaggggggugccuuuacagagucagaccgcaauguuuuugccaccaacagucccuggcgcccgaacccugaccgaaacgcccuugcgcggguggccacagccaaaaaugaagagcucuagacagaaaucuaagaccgagaagaacgacggucaucucgaaccuguaacugcaugggaggugcaggugccacgggugcgacgccuuugccguggauuagcucgcccacaccuguuuggucaugauuag

SEQ ID NO: 260151 - protein, 247 aa, Artificial Sequence
  derived and/or modified sequence
MHLARLVGSCSLLLLLGALSGWAASDDPIEKVIEGINRGLSNAEREVGKALDGINSGITHAGREVEKVFNGLSNMGSHTGKELDKGVQGLNHGMDKVAHEINHGIGQAGKEAEKLGHGVNNAAGQAGKEADKAVQGFHTGVHQAGKEAEKLGQGVNHAADQAGKEVEKLGQGAHHAAGQAGKELQNAHNGVNQASKEANQLLNGNHQSGSSSHQGGATTTPLASGASVNTPFINLPALWRSVANIMP

SEQ ID NO: 260152 - DNA, 744 bp, Artificial Sequence
  derived and/or modified sequence
atgcacctggccagactggtgggcagctgcagcctgctgctgctgctgggcgccctgagcggctgggccgccagcgacgaccccatcgagaaggtgatcgagggcatcaacagaggcctgagcaacgccgagagagaggtgggcaaggccctggacggcatcaacagcggcatcacccacgccggcagagaggtggagaaggtgttcaacggcctgagcaacatgggcagccacaccggcaaggagctggacaagggcgtgcagggcctgaaccacggcatggacaaggtggcccacgagatcaaccacggcatcggccaggccggcaaggaggccgagaagctgggccacggcgtgaacaacgccgccggccaggccggcaaggaggccgacaaggccgtgcagggcttccacaccggcgtgcaccaggccggcaaggaggccgagaagctgggccagggcgtgaaccacgccgccgaccaggccggcaaggaggtggagaagctgggccagggcgcccaccacgccgccggccaggccggcaaggagctgcagaacgcccacaacggcgtgaaccaggccagcaaggaggccaaccagctgctgaacggcaaccaccagagcggcagcagcagccaccagggcggcgccaccaccacccccctggccagcggcgccagcgtgaacacccccttcatcaacctgcccgccctgtggagaagcgtggccaacatcatgccctag

SEQ ID NO: 260153 - DNA, 744 bp, Artificial Sequence
  derived and/or modified sequence
atgcacctggcgcgactcgtgggatcatgttccctgttgctccttctgggcgccctgtccgggtgggccgcatccgacgaccccattgaaaaagtgattgaaggtatcaatagggggctgtcaaatgcagaacgcgaagtgggaaaggctttggacggcatcaatagcggcatcactcacgccggacgagaggtggaaaaagtgtttaacggactctcaaatatgggttcccataccgggaaagaactggataagggggttcagggactgaatcatggaatggataaagtggcccatgagattaatcatggtattgggcaggcaggcaaagaagccgagaaactcggacacggagtgaacaacgccgctggtcaagcagggaaagaagctgacaaggccgtgcagggctttcacaccggtgtccatcaggcgggcaaagaggccgaaaagctgggacaaggcgtcaatcacgcagctgaccaggccggcaaggaggtggagaagcttggtcaaggtgcccatcatgctgcgggacaggccggcaaagagctgcaaaacgcccataacggcgttaaccaagcctcaaaggaagctaatcaactccttaatggcaatcaccagagtggatctagttcccatcaggggggggcgacaaccacgcccctggctagcggggcttcagtgaataccccattcattaacctgcctgcactgtggagatccgtggccaacatcatgccttag

SEQ ID NO: 260154 - DNA, 744 bp, Artificial Sequence
  derived and/or modified sequence
atgcacctggcccggctggtgggcagctgcagcctgctgctgctgctgggcgccctgagcggctgggccgccagtgatgaccccatcgagaaggtgattgagggcatcaacagaggcctgagcaatgctgagcgggaggtgggcaaggccctggatggcatcaacagcggcatcacccatgctggccgggaggtggagaaggtgttcaacggcctgagcaacatgggcagccacacaggcaaggagctggacaagggcgtgcagggcctgaaccacggcatggacaaggtggcccacgagatcaaccacggcatcggccaggccggcaaggaggccgagaagctgggccatggagtgaacaatgctgctggccaggccggcaaggaggccgacaaggctgtgcagggcttccacactggagtgcaccaggccggcaaggaggccgagaagctgggccagggcgtgaaccacgccgctgaccaggccggcaaggaggtggagaagctgggccagggcgcccaccacgccgccggccaggccggcaaggagctgcagaatgcccacaatggagtgaaccaggccagcaaggaggccaaccagctgctgaatggaaaccaccagagcggcagcagcagccaccagggcggggccaccaccacccccctggccagcggggcctctgtgaacacccccttcatcaacctgcctgccctgtggaggtctgtggccaacatcatgccctag

SEQ ID NO: 260155 - DNA, 744 bp, Artificial Sequence
  derived and/or modified sequence
atgcacctggcccggctggtgggcagctgcagcctgctgctgctgcttggcgccctaagcgggtgggctgcctcggatgaccccatagagaaggttatcgagggaattaatcggggtttgtccaatgcagagcgggaagtcggcaaggccctcgacggcatcaattcaggaatcacacatgctggacgcgaggtggagaaagtcttcaatgggttatccaacatggggtctcatactgggaaagagctcgataaaggtgtgcaagggttgaaccacggcatggataaggttgcacacgagataaaccacggaatcggccaggctggaaaggaagcagaaaaactagggcatggcgtgaataacgcagcaggtcaggctgggaaagaggctgacaaggcagttcagggatttcacactggagtgcaccaggcaggcaaagaggcggagaaactggggcagggcgtcaaccatgccgcagatcaagcaggcaaagaggtcgaaaaactaggccagggagcacatcacgccgcaggacaagcaggcaaagaattgcagaacgctcataatggagtgaaccaggcatctaaggaagccaatcaactcctgaatggtaatcaccagagtggctcttcttcacaccaagggggcgctaccaccacccccctggccagtggggcctcggttaataccccgtttataaatttacccgctctgtggaggtccgttgcaaacatcatgccatag

SEQ ID NO: 260156 - DNA, 744 bp, Artificial Sequence
  derived and/or modified sequence
atgcacttggccagattggtcgggtcatgtagtctccttctgctgctaggtgccctgagcggatgggccgcttccgatgacccaattgaaaaggtgatcgagggcattaaccgagggctgagcaatgccgaacgggaggtgggcaaggcccttgacggaattaattccggcattacccacgcgggacgggaggtggagaaggtcttcaatgggctgagcaatatggggagtcacacagggaaggaactcgacaaaggcgtgcagggtctcaaccatggcatggacaaagtcgcccacgagataaaccacggaattggtcaagctggcaaagaagcggagaaactaggacacggtgtgaacaacgccgcaggacaggccggaaaagaagccgacaaggcagtgcaggggttccataccggcgtccaccaggctggaaaggaagccgagaaactgggccaaggcgtcaaccatgccgcagatcaagctggcaaggaggtggagaagcttggccagggggctcaccacgccgcaggccaggccggaaaggagctgcagaatgctcataacggagttaatcaagcttctaaagaagctaaccagctcctgaatggaaaccaccagagtggcagctcatctcaccaaggtggcgctaccactactcccctcgccagcggggcttctgtcaatacaccatttatcaacctgcctgccctgtggaggtccgtggccaacatcatgccatag

SEQ ID NO: 260157 - DNA, 957 bp, Artificial Sequence
  derived and/or modified sequence
gggagagaggataaatagcagcgtggcttccctggctcctctctgcatccttcccgaccttcccagcaatatgcatcttgcacgtctggtcggctcctgctccctccttctgctactgggggccctgtctggatgggcggccagcgatgaccccattgagaaggtcattgaagggatcaaccgagggctgagcaatgcagagagagaggtgggcaaggccctggatggcatcaacagtggaatcacgcatgccggaagggaagtggagaaggttttcaacggacttagcaacatggggagccacaccggcaaggagttggacaaaggcgtccaggggctcaaccacggcatggacaaggttgcccatgagatcaaccatggtattggacaagcaggaaaggaagcagagaagcttggccatggggtcaacaacgctgctggacaggccgggaaggaagcagacaaagcggtccaagggttccacactggggtccaccaggctgggaaggaagcagagaaacttggccaaggggtcaaccatgctgctgaccaggctggaaaggaagtggagaagcttggccaaggtgcccaccatgctgctggccaggccgggaaggagctgcagaatgctcataatggggtcaaccaagccagcaaggaggccaaccagctgctgaatggcaaccatcaaagcggatcttccagccatcaaggaggggccacaaccacgccgttagcctctggggcctcggtcaacacgcctttcatcaaccttcccgccctgtggaggagcgtcgccaacatcatgccctaaactggcatccggccttgctgggagaataatgtcgccgttgtcacatcagctgacatgacctggaggggttgggggtgggggacaggtttctgaaatccctgaagggggttgtactgggatttgtgaataaacttgatacacta

SEQ ID NO: 260158 - protein, 644 aa, Artificial Sequence
  derived and/or modified sequence
MTSQSSVISNSCVTMERLSHMMERKAWCSQESALSEEEEDTTRPLETVTFKDVAVDLTQEEWEQMKPAQRNLYRDVMLENYSNLVTVGCQVTKPDVIFKLEQEEEPWVMEEEMFGRHCPEVWEVDEQIKKQQETLVRKVTSISKKILIKEKVIECKKVAKIFPLSSDIVTSRQSFYDCDSLDKGLEHNLDLLRYEKGCVREKQSNEFGKPFYHCASYVVTPFKCNQCGQDFSHKFDLIRHERIHAGEKPYECKECGKAFSRKENLITHQKIHTGEKPYKCNECGKAFIQMSNLIRHHRIHTGEKPYACKDCWKAFSQKSNLIEHERIHTGEKPYECKECGKSFSQKQNLIEHEKIHTGEKPYACNECGRAFSRMSSVTLHMRSHTGEKPYKCNKCGKAFSQCSVFIIHMRSHTGEKPYVCSECGKAFSQSSSLTVHMRNHTAEKPYECKECGKAFSRKENLITHQKIHTGEKPYECSECGKAFIQMSNLIRHQRIHTGEKPYACTVCGKAFSQKSNLTEHEKIHTGEKPYHCNQCGKAFSQRQNLLEHEKIHTGEKPFKCNECGKAFSRISSLTLHVRSHTGEKPYECNKCGKAFSQCSLLIIHMRSHTGEKPFECNECGKAFSQRASLSIHKRGHTGERHQVY

SEQ ID NO: 260159 - protein, 580 aa, Artificial Sequence
  derived and/or modified sequence
MKPAQRNLYRDVMLENYSNLVTVGCQVTKPDVIFKLEQEEEPWVMEEEMFGRHCPEVWEVDEQIKKQQETLVRKVTSISKKILIKEKVIECKKVAKIFPLSSDIVTSRQSFYDCDSLDKGLEHNLDLLRYEKGCVREKQSNEFGKPFYHCASYVVTPFKCNQCGQDFSHKFDLIRHERIHAGEKPYECKECGKAFSRKENLITHQKIHTGEKPYKCNECGKAFIQMSNLIRHHRIHTGEKPYACKDCWKAFSQKSNLIEHERIHTGEKPYECKECGKSFSQKQNLIEHEKIHTGEKPYACNECGRAFSRMSSVTLHMRSHTGEKPYKCNKCGKAFSQCSVFIIHMRSHTGEKPYVCSECGKAFSQSSSLTVHMRNHTAEKPYECKECGKAFSRKENLITHQKIHTGEKPYECSECGKAFIQMSNLIRHQRIHTGEKPYACTVCGKAFSQKSNLTEHEKIHTGEKPYHCNQCGKAFSQRQNLLEHEKIHTGEKPFKCNECGKAFSRISSLTLHVRSHTGEKPYECNKCGKAFSQCSLLIIHMRSHTGEKPFECNECGKAFSQRASLSIHKRGHTGERHQVY

SEQ ID NO: 260160 - DNA, 1935 bp, Artificial Sequence
  derived and/or modified sequence
atgaccagccagagcagcgtgatcagcaacagctgcgtgaccatggagagactgagccacatgatggagagaaaggcctggtgcagccaggagagcgccctgagcgaggaggaggaggacaccaccagacccctggagaccgtgaccttcaaggacgtggccgtggacctgacccaggaggagtgggagcagatgaagcccgcccagagaaacctgtacagagacgtgatgctggagaactacagcaacctggtgaccgtgggctgccaggtgaccaagcccgacgtgatcttcaagctggagcaggaggaggagccctgggtgatggaggaggagatgttcggcagacactgccccgaggtgtgggaggtggacgagcagatcaagaagcagcaggagaccctggtgagaaaggtgaccagcatcagcaagaagatcctgatcaaggagaaggtgatcgagtgcaagaaggtggccaagatcttccccctgagcagcgacatcgtgaccagcagacagagcttctacgactgcgacagcctggacaagggcctggagcacaacctggacctgctgagatacgagaagggctgcgtgagagagaagcagagcaacgagttcggcaagcccttctaccactgcgccagctacgtggtgacccccttcaagtgcaaccagtgcggccaggacttcagccacaagttcgacctgatcagacacgagagaatccacgccggcgagaagccctacgagtgcaaggagtgcggcaaggccttcagcagaaaggagaacctgatcacccaccagaagatccacaccggcgagaagccctacaagtgcaacgagtgcggcaaggccttcatccagatgagcaacctgatcagacaccacagaatccacaccggcgagaagccctacgcctgcaaggactgctggaaggccttcagccagaagagcaacctgatcgagcacgagagaatccacaccggcgagaagccctacgagtgcaaggagtgcggcaagagcttcagccagaagcagaacctgatcgagcacgagaagatccacaccggcgagaagccctacgcctgcaacgagtgcggcagagccttcagcagaatgagcagcgtgaccctgcacatgagaagccacaccggcgagaagccctacaagtgcaacaagtgcggcaaggccttcagccagtgcagcgtgttcatcatccacatgagaagccacaccggcgagaagccctacgtgtgcagcgagtgcggcaaggccttcagccagagcagcagcctgaccgtgcacatgagaaaccacaccgccgagaagccctacgagtgcaaggagtgcggcaaggccttcagcagaaaggagaacctgatcacccaccagaagatccacaccggcgagaagccctacgagtgcagcgagtgcggcaaggccttcatccagatgagcaacctgatcagacaccagagaatccacaccggcgagaagccctacgcctgcaccgtgtgcggcaaggccttcagccagaagagcaacctgaccgagcacgagaagatccacaccggcgagaagccctaccactgcaaccagtgcggcaaggccttcagccagagacagaacctgctggagcacgagaagatccacaccggcgagaagcccttcaagtgcaacgagtgcggcaaggccttcagcagaatcagcagcctgaccctgcacgtgagaagccacaccggcgagaagccctacgagtgcaacaagtgcggcaaggccttcagccagtgcagcctgctgatcatccacatgagaagccacaccggcgagaagcccttcgagtgcaacgagtgcggcaaggccttcagccagagagccagcctgagcatccacaagagaggccacaccggcgagagacaccaggtgtactag

SEQ ID NO: 260161 - DNA, 1935 bp, Artificial Sequence
  derived and/or modified sequence
atgacttctcagtctagtgtaatctcaaattcctgcgtgacaatggaacggctttcacacatgatggaacggaaggcctggtgctcacaagaatccgctctgagtgaggaggaagaagacaccaccagacccctcgagaccgtgaccttcaaggacgtagcagttgacctgacacaggaggaatgggagcagatgaagcctgcccagcgaaacctctatcgggatgtgatgctggagaattactcaaatctcgtgacagtggggtgccaggtgaccaagcctgacgtcatcttcaagctggaacaagaggaagaaccttgggtgatggaggaagaaatgtttgggaggcactgtcctgaagtgtgggaggttgacgagcaaattaaaaagcagcaggagacacttgtgaggaaggtgacaagcatttcaaaaaaaatcttgattaaggagaaggtcatagagtgcaagaaggtggcgaagatttttccactgagttcggatatcgtgacttctcggcagtctttctacgactgcgattcccttgataaagggttggagcacaatcttgacctcctgcgctatgagaaaggctgcgtccgcgaaaagcagtcaaacgagttcggcaagcccttttaccattgcgcgagctacgtcgtgacaccttttaagtgtaaccagtgtgggcaggatttttcccataagtttgacttgatccgtcacgaacgcattcacgcgggcgaaaagccgtacgagtgcaaggagtgcggcaaggccttcagccggaaggaaaatttgattacacatcagaaaatccacactggcgagaaaccatacaagtgcaatgaatgtggcaaggcttttatccagatgagtaatttaatacggcatcatcgcatccacacaggagagaaaccatatgcctgcaaggattgttggaaggcatttagtcagaaaagtaacctgatcgagcatgagcggattcacaccggggagaagccttacgagtgtaaagaatgtggcaaaagcttctctcaaaagcagaatctcatagagcatgagaaaatccacactggagagaagccgtatgcctgtaatgaatgcgggcgagctttctcacgaatgtcctccgtgactctccatatgcgtagccatactggggagaaaccatacaaatgcaacaagtgtggaaaagcgttctcacagtgttccgtgttcattatccacatgaggtcgcataccggcgagaaaccctacgtttgctccgagtgtggaaaagcattttctcagtcctcatctcttaccgtgcacatgagaaatcacacagccgaaaagccttatgaatgtaaagagtgtggcaaagccttctccaggaaagagaatctcattacacatcagaaaatccacaccggagaaaaaccatacgaatgcagtgagtgcggaaaggcatttattcagatgagcaacctcatccgccaccagcggattcatacaggcgagaagccatacgcatgtaccgtctgcggcaaagcatttagtcagaagagtaatttgaccgaacacgagaagattcacaccggcgagaagccgtatcactgcaatcagtgtgggaaagccttcagccaacgacagaatttgctggagcatgagaaaatacacacgggtgagaagccatttaaatgcaatgagtgtggcaaagcattttcccgcatctcaagccttaccctgcacgtgaggtcccacaccggggagaagccatacgaatgtaataagtgtggtaaggctttctcgcagtgctcactgctcataattcatatgaggtcccacacaggcgagaaacctttcgagtgcaacgaatgtggcaaggctttcagtcagagagcttctctgtcgatccataaacgaggccacactggtgagaggcatcaagtgtattag

SEQ ID NO: 260162 - DNA, 1935 bp, Artificial Sequence
  derived and/or modified sequence
atgaccagccagagcagcgtcatcagcaacagctgtgtgaccatggagcggctgagccacatgatggagaggaaggcctggtgcagccaggagagcgccctgtctgaggaggaggaggacaccacccggcccctggagaccgtgaccttcaaggatgtggccgtggacctgacccaggaggagtgggagcagatgaagccagcccagaggaacctgtacagagatgtgatgctggagaactacagcaacctggtgacagtgggctgccaggtgaccaagccagatgtgatcttcaagctggagcaggaggaggagccctgggtgatggaggaggagatgtttggccgccactgcccagaggtgtgggaggtggatgagcagatcaagaagcagcaggagaccctggtgaggaaggtgaccagcatcagcaagaagatcctgatcaaggagaaggtgattgagtgcaagaaggtggccaagatcttccccctgagcagtgacatcgtgaccagccggcagagcttctatgactgtgacagcctggacaagggcctggagcacaacctggacctgctgcgctatgagaagggctgtgtgcgggagaagcagagcaatgaatttgggaagcccttctaccactgtgccagctatgtggtgacccccttcaagtgcaaccagtgtggccaggacttcagccacaagtttgacctgatcagacatgagcgcatccatgctggggagaagccctatgagtgcaaggaatgtgggaaggccttcagcaggaaagaaaatctcatcacccaccagaagatccacactggagagaagccctacaagtgcaatgaatgtgggaaggccttcatccagatgagcaacctgatccgccaccaccgcatccacactggagagaagccctatgcctgcaaggactgctggaaggccttcagccagaagagcaacctgattgagcacgagcgcatccacactggagagaagccctatgagtgcaaggaatgtgggaagagcttcagccagaagcagaacctgattgagcacgagaagatccacactggagagaagccctatgcctgcaatgaatgtggccgggccttcagcaggatgagctctgtgaccctgcacatgaggagccacactggagagaagccctacaagtgcaacaagtgtgggaaggccttcagccagtgcagcgtcttcatcatccacatgaggagccacactggagagaagccctacgtgtgcagtgaatgtgggaaggccttcagccagagcagcagcctgactgtgcacatgaggaaccacacagctgagaagccctatgagtgcaaggaatgtgggaaggccttcagcaggaaagaaaatctcatcacccaccagaagatccacactggagagaagccctatgaatgttctgaatgtgggaaggccttcatccagatgagcaacctgatccgccaccagaggatccacactggagagaagccctatgcctgcaccgtgtgtgggaaggccttcagccagaagagcaacctgacagagcacgagaagatccacactggagagaagccctaccactgcaaccagtgtgggaaggccttcagccagaggcagaacctgctggagcacgagaagatccacactggagagaagcccttcaagtgcaatgaatgtgggaaggccttcagccgcatcagcagcctgaccctgcacgtgcgcagccacactggagagaagccctatgagtgcaacaagtgtgggaaggccttcagccagtgcagcctgctgatcatccacatgaggagccacactggagagaagccctttgaatgtaatgaatgtgggaaggccttcagccagagggccagcctgagcatccacaagaggggccacactggagagcggcaccaggtgtactag

SEQ ID NO: 260163 - DNA, 1935 bp, Artificial Sequence
  derived and/or modified sequence
atgaccagccagagcagcgtgatcagcaacagctgcgtgaccatggagcggctgagtcacatgatggagagaaaggcatggtgctctcaggaatcagccctatccgaggaggaagaagatacaactcgaccgcttgaaacggtcacgtttaaggatgttgcggtggatttaacccaggaggagtgggaacaaatgaagcccgcccaacgaaacctctatcgtgacgtcatgttagagaattactccaacctggtgacagtaggctgccaagtaaccaaacccgacgtgatctttaagcttgagcaagaggaggagccatgggttatggaagaagagatgtttggccgccactgcccggaagtgtgggaagttgacgagcagataaagaagcagcaggagaccctggttcgaaaagtgacgtctatctccaagaagatactgattaaggagaaggtgatcgagtgcaagaaagtggcaaagattttcccactgtcctcagatattgtgacctctcgccaatctttctacgactgtgactccttagacaaagggctggagcataacctggacctgctgcggtatgagaaaggctgtgtgcgggagaaacaatcgaatgagttcgggaagcccttctatcactgtgcatcttacgtggtcaccccatttaaatgcaatcagtgcggtcaggatttcagtcacaaattcgacttaatccgtcacgaaagaatccatgccggtgagaaaccttacgaatgtaaagagtgcggtaaggccttcagcagaaaggagaatttaatcacccatcagaaaatacacaccggagagaagccctacaagtgtaatgaatgcggcaaagcctttatacaaatgtctaacctgatacggcatcaccgcattcatacaggagagaagccctatgcctgcaaggactgctggaaagccttttctcagaaatccaacctcatcgagcacgagaggatacatacaggcgaaaaaccatacgagtgtaaggagtgtggcaagtccttttcacagaagcagaacctgatcgagcacgagaagatccatacaggagaaaaaccctatgcgtgcaatgaatgtggaagagccttttccaggatgagctctgttacattacatatgcggagtcacactggagagaagccctataagtgcaataaatgcggaaaggccttttcgcagtgcagcgtgtttattatccatatgagaagccatacaggcgagaaaccttacgtatgctccgaatgcgggaaagcttttagccaatcctcaagcttgacagtacatatgagaaatcacaccgcggagaagccatatgagtgcaaagaatgcggaaaagcgtttagcagaaaagaaaatttgatcactcaccaaaaaattcatacgggggaaaaaccctacgaatgtagcgagtgtggaaaagctttcattcagatgtccaatctaattcgacaccagcgaattcacacaggggagaagccgtatgcctgcacggtgtgtggcaaagcttttagtcagaagtccaatctgactgagcacgagaaaattcatacaggggaaaaaccgtatcactgcaaccaatgcggcaaagcctttagtcagcgccagaatctgctggaacacgagaagatccacacgggcgagaagccctttaaatgtaacgagtgtggtaaggccttcagtagaattagctctctaactctgcatgtacgatctcacactggcgagaaaccctatgaatgtaataagtgcggcaaagctttttcacagtgctcactactcattattcacatgcgttctcacacaggagagaagccattcgagtgtaacgagtgcgggaaggccttttctcagagggcttccctgagtatccataagcgcggccatacaggggaacgacaccaggtgtactag

SEQ ID NO: 260164 - DNA, 1935 bp, Artificial Sequence
  derived and/or modified sequence
atgacaagtcagagctcggtaatttccaattcttgtgtcacaatggagcgattgtcacatatgatggagagaaaggcgtggtgttcgcaagagtccgcactgtctgaggaagaggaggacactaccaggcccctggagaccgtgaccttcaaagacgtggctgtggatctgactcaggaggagtgggaacagatgaagcctgcccagagaaacttatatagggacgtgatgctggagaactattctaatctggtgaccgtggggtgtcaggtgaccaagccggacgttatattcaagttggaacaggaagaagagccctgggtgatggaggaagaaatgtttggccgtcactgccctgaggtctgggaagttgacgaacagatcaagaaacagcaggagaccctggtgcggaaggttacatcaatctccaagaagatactcatcaaggaaaaggtgatcgagtgtaaaaaagtggccaagatctttcccctgagtagcgacatcgtcacctctaggcaatcgttctacgactgcgactcccttgataaaggtctggaacacaatctcgatttgctgagatacgagaaaggatgtgtaagggagaaacagagtaatgagtttggcaagcctttctaccactgtgctagttacgtggtcaccccattcaagtgcaaccagtgtgggcaggatttttcccacaaattcgacttaatacggcacgaaagaatccatgcaggggagaagccctacgagtgtaaagagtgcggtaaggccttttcccggaaagaaaacctgattactcatcagaaaatccacacaggcgagaaaccatataagtgcaacgaatgcggcaaggcattcattcagatgtcaaatctcatccgccaccatcgcatacacaccggagaaaagccatacgcctgcaaggactgctggaaggccttcagtcaaaaatcaaacctgatagaacacgaaagaattcataccggagaaaaaccatacgaatgtaaggaatgcgggaaatccttttcccagaagcaaaacctaatcgaacacgaaaagatccacacaggtgagaaaccttatgcatgcaacgagtgcggacgggcattcagcagaatgtccagtgttacccttcacatgaggtcgcacactggcgaaaaaccgtataagtgtaacaaatgtgggaaggcattttctcagtgttccgtcttcatcattcatatgcgttcccacactggcgaaaagccttacgtttgcagcgaatgcgggaaggccttcagccaatcgtcttcgcttaccgtgcacatgaggaaccacaccgcagaaaagccctatgagtgcaaggaatgcggcaaggcctttagcaggaaggaaaatcttatcacgcaccagaagatccacaccggcgagaaaccctatgagtgcagtgaatgcggcaaggccttcattcaaatgagcaatctgatacggcaccagagaattcataccggagaaaagccatacgcctgtaccgtgtgtggcaaagctttctcacagaagagcaacctgaccgagcatgagaaaatacacaccggcgagaaaccataccactgtaatcagtgtggaaaagctttttctcaacggcaaaacctactagagcatgagaagattcataccggggagaagcccttcaagtgtaatgaatgcggtaaggccttttccagaatatcctcactgacgctgcatgttcgctcgcatacgggcgagaagccttatgagtgcaacaagtgcggaaaggccttcagccaatgctctcttctgatcattcacatgcgttcacacacaggtgaaaaacccttcgaatgtaacgagtgtgggaaggcgtttagccaacgggcatccctgagcatacacaaaagaggtcacacgggcgaaaggcatcaagtctactag

SEQ ID NO: 260165 - DNA, 2441 bp, Artificial Sequence
  derived and/or modified sequence
ggaaacgtcgctggcgcggagggatggttcggcgctttaggcgtctgtcacagacctatctgcgggtcgccttcacccagcatctcagaaactgcgcgcgggatgaacattcgggtgtttccggcaggtgacgctgccgagtccccgcagcagggggcgagcaagggactcgcggttgacgggacacggatcctctaaggcccagagtgtcccgagtagcggcagtggggagtgctcagggtacgctaatgatctgtgtcttgtaaagagcatattgctgggcttacatccgtttatcttgtttgactgttattttaataggtcctggttccacaaggataaaacacatctgcagtgcaaatagaagtctgaggaacaggtgtcttatcatggaaggagacctgacctgagacctgccttagaggctggagagtcctgaaagagagtggaccctggagttgctggagcttgtcttgacccttctgcccagagcaggcagggtctgaatgacatctcaatcttcagtgatcagcaatagctgtgtgacaatggagcgtttgagccacatgatggaaaggaaagcttggtgttctcaagagtctgccctttccgaggaagaagaggatacaaccaggcctcttgaaacagtgacatttaaggatgtggctgttgaccttacccaggaggagtgggagcaaatgaaacctgctcaaagaaacttgtatcgagatgtgatgctggagaactacagcaacctagtcacagtgggctgtcaagtcaccaaaccggatgtgatattcaagttggagcaagaagaggagccctgggtgatggaggaagaaatgtttgggaggcactgtccagaagtttgggaagttgatgaacagatcaagaagcaacaggaaacacttgtgaggaaagtcacatccatctccaagaaaattctgataaaggaaaaagtcattgaatgtaaaaaagttgcgaaaatatttcctctgagttcagacattgttacttcaagacaaagcttctatgactgtgactcacttgataagggtttggaacataatttagacttacttagatatgagaaaggctgtgtaagagagaaacagagtaatgagtttgggaaaccattttaccattgtgcatcctatgttgtaaccccctttaagtgtaatcagtgtggacaagacttcagtcataaatttgacctcattagacatgagcgaattcatgctggagagaaaccttacgaatgtaaagaatgtggaaaagccttcagtaggaaggaaaatcttattacacatcagaaaattcatactggggaaaaaccgtataagtgtaatgaatgtggaaaagctttcattcagatgtcaaaccttattagacaccacagaattcatactggggagaaaccttatgcatgtaaggattgttggaaagccttcagtcagaaatcaaatctcattgaacatgagcgaattcacactggagagaaaccctatgaatgtaaggaatgtgggaaatccttcagccagaagcaaaatcttattgagcacgagaaaattcatactggggagaaaccttatgcatgtaatgaatgtggtagagctttttctcgaatgtcatctgttacgctacatatgagaagtcacacaggggagaaaccctataaatgtaataaatgtggaaaagctttctctcaatgctcagtatttattatacatatgagaagtcacactggtgagaaaccctatgtatgtagtgaatgtgggaaagccttctctcagagttcatccctaaccgtacatatgcgaaatcatacagctgagaaaccctatgaatgtaaggaatgtggaaaagccttcagcaggaaagaaaatctcattacacatcagaaaattcacactggagagaaaccttatgaatgcagtgaatgtgggaaagcttttattcagatgtcaaacctcattcgacaccagagaattcatacgggtgagaaaccctatgcatgtacagtatgtggaaaagcctttagtcagaaatcaaacctcactgaacatgagaaaattcatactggagagaaaccttatcattgtaatcaatgtgggaaagctttcagtcagagacaaaatcttcttgagcatgaaaaaattcatactggagagaaaccattcaaatgtaatgaatgtggtaaagccttctctcgaatctcatccctcactcttcatgtgagaagtcacacaggggagaaaccctatgaatgtaataaatgtgggaaagccttttctcagtgctcattacttattatacatatgagaagtcatactggtgagaaaccctttgaatgtaatgaatgtgggaaagcattctctcaaagagcatccctttctatacataagagaggtcatacaggtgagagacaccaagtatattaa

SEQ ID NO: 260166 - DNA, 3774 bp, Artificial Sequence
  derived and/or modified sequence
aaacgtcgctggcgcggagggatggttcggcgctttaggcgtctgtcacagacctatctgcgggtcgccttcacccagcatctcagaaactgcgcgcgggatgaacattcgggtgtttccggcaggtgacgctgccgagtccccgcagcagggggcgagcaagggactcgcggttgacgggacacggatcctctaaggcccagagtgtcccgagtagcggcagtggggagtgctcagggtacgctaatgatctgtgtcttgtaaagagcatattgctgggcttacatccgtttatcttgtttgactgttattttaataggaaacagtgacatttaaggatgtggctgttgaccttacccaggaggagtgggagcaaatgaaacctgctcaaagaaacttgtatcgagatgtgatgctggagaactacagcaacctagtcacagtgggctgtcaagtcaccaaaccggatgtgatattcaagttggagcaagaagaggagccctgggtgatggaggaagaaatgtttgggaggcactgtccagaagtttgggaagttgatgaacagatcaagaagcaacaggaaacacttgtgaggaaagtcacatccatctccaagaaaattctgataaaggaaaaagtcattgaatgtaaaaaagttgcgaaaatatttcctctgagttcagacattgttacttcaagacaaagcttctatgactgtgactcacttgataagggtttggaacataatttagacttacttagatatgagaaaggctgtgtaagagagaaacagagtaatgagtttgggaaaccattttaccattgtgcatcctatgttgtaaccccctttaagtgtaatcagtgtggacaagacttcagtcataaatttgacctcattagacatgagcgaattcatgctggagagaaaccttacgaatgtaaagaatgtggaaaagccttcagtaggaaggaaaatcttattacacatcagaaaattcatactggggaaaaaccgtataagtgtaatgaatgtggaaaagctttcattcagatgtcaaaccttattagacaccacagaattcatactggggagaaaccttatgcatgtaaggattgttggaaagccttcagtcagaaatcaaatctcattgaacatgagcgaattcacactggagagaaaccctatgaatgtaaggaatgtgggaaatccttcagccagaagcaaaatcttattgagcacgagaaaattcatactggggagaaaccttatgcatgtaatgaatgtggtagagctttttctcgaatgtcatctgttacgctacatatgagaagtcacacaggggagaaaccctataaatgtaataaatgtggaaaagctttctctcaatgctcagtatttattatacatatgagaagtcacactggtgagaaaccctatgtatgtagtgaatgtgggaaagccttctctcagagttcatccctaaccgtacatatgcgaaatcatacagctgagaaaccctatgaatgtaaggaatgtggaaaagccttcagcaggaaagaaaatctcattacacatcagaaaattcacactggagagaaaccttatgaatgcagtgaatgtgggaaagcttttattcagatgtcaaacctcattcgacaccagagaattcatacgggtgagaaaccctatgcatgtacagtatgtggaaaagcctttagtcagaaatcaaacctcactgaacatgagaaaattcatactggagagaaaccttatcattgtaatcaatgtgggaaagctttcagtcagagacaaaatcttcttgagcatgaaaaaattcatactggagagaaaccattcaaatgtaatgaatgtggtaaagccttctctcgaatctcatccctcactcttcatgtgagaagtcacacaggggagaaaccctatgaatgtaataaatgtgggaaagccttttctcagtgctcattacttattatacatatgagaagtcatactggtgagaaaccctttgaatgtaatgaatgtgggaaagcattctctcaaagagcatccctttctatacataagagaggtcatacaggtgagagacaccaagtatattaaatgaaagaaggcctcttaaattcaacccatgttttacttaaaatatcttggcataagctcaaaaaagccaggatctttatggaaaaattttaatactttgttaaaaggtgtaagactggaataaatggaaagaaataccatatacatagatggaaaaacccagtattataaaaacctcaattctgaaaatctatagactgaatgcagttccaaacaaaatcaactaagaattttctaggatctttcaaaaatgattataaaattcatgtgaaatagaagtgtatgaattgctgcgacaattttgaaaagaatagaggaaacaccctcactgtatgatataaagttatagtcatttaaaaatgtgtgatattagtacattagtaggtaaatgagcagattttaaagaatagaatatccagaagcagattcatgaatatatgtgaactcagtgtatgttagacctgacatcatgaattagtagggaaatgatgacctagtcaataaaattgctgggaatatttgactctccgtattggagaaaataaaattacaacattacgacatactaaaaaatcaatattcttttttttttttttttttttttgagacaagcgtctcactctgtcgcccaggctggagtacggtggtgcaatctcagctcactgcagcctctgctttccgggtttttttgttttgttttgttttgttttttgtatttttagtagagacggggtttcaccatgttggccagggtagtcttgaactcctgacttcaaaagtgatcgccctctttggcctcccaaagtgctggggtttacaggcttgagccactgcacctggccaaaaaattaacattctaaaggatttaaatactggaatttgaaaagccaaactgtgaaaccattgggagaaaatagatgatattgtctatgacgttgaggccaaggagctttttttttttttttttcaagacaaaaggactctgtaattccacttctaggtatatatacatcctatagaaactcacaaataatgcataagaaatatatatataatatatgtatgtatgtatagccagatgcagtggcacatgcctgtaatcccagctacttgggaggctgatagaagaagataacttgaggtcaggagttcaagaccagcctgggaaacatagcaagaccccatctcttaaaaaaaaagaaatatatagacatatatctgcattgaaaacaacctaaatattcatcagtggggtaatggatgaataaaatatgatatattcaaatgatagaatagtatacagcacttaaaagcagtgaaccagatccatattgtgtaacatggatagttaaaacaatgttgaatgaaaaaaatcaaaatacaaatgaaacattgtgtaataatatttatgtaaattggaatgaaatcatttataaagaacaactgtttctattattgaaaattgtatgtaaaactatttaaaatagaatagaaggatacacacccaattattgatagcattgtctctggagattgaatttgaggctgttgattaaaaggagactttagctttgcttgtagtttttataccttaaaaagactggtagcatataaaataaatcttaaaagctaattatacacaatgacaatatgaa

SEQ ID NO: 260167 - protein, 397 aa, Artificial Sequence
  derived and/or modified sequence
MRCPKCLLCLSALLTLLGLKVYIEWTSESRLSKAYPSPRGTPPSPTPANPEPTLPANLSTRLGQTIPLPFAYWNQQQWRLGSLPSGDSTETGGCQAWGAAAATEIPDFASYPKDLRRFLLSAACRSFPQWLPGGGGSQVSSCSDTDVPYLLLAVKSEPGRFAERQAVRETWGSPAPGIRLLFLLGSPVGEAGPDLDSLVAWESRRYSDLLLWDFLDVPFNQTLKDLLLLAWLGRHCPTVSFVLRAQDDAFVHTPALLAHLRALPPASARSLYLGEVFTQAMPLRKPGGPFYVPESFFEGGYPAYASGGGYVIAGRLAPWLLRAAARVAPFPFEDVYTGLCIRALGLVPQAHPGFLTAWPADRTADHCAFRNLLLVRPLGPQASIRLWKQLQDPRLQC

SEQ ID NO: 260168 - DNA, 1194 bp, Artificial Sequence
  derived and/or modified sequence
atgagatgccccaagtgcctgctgtgcctgagcgccctgctgaccctgctgggcctgaaggtgtacatcgagtggaccagcgagagcagactgagcaaggcctaccccagccccagaggcaccccccccagccccacccccgccaaccccgagcccaccctgcccgccaacctgagcaccagactgggccagaccatccccctgcccttcgcctactggaaccagcagcagtggagactgggcagcctgcccagcggcgacagcaccgagaccggcggctgccaggcctggggcgccgccgccgccaccgagatccccgacttcgccagctaccccaaggacctgagaagattcctgctgagcgccgcctgcagaagcttcccccagtggctgcccggcggcggcggcagccaggtgagcagctgcagcgacaccgacgtgccctacctgctgctggccgtgaagagcgagcccggcagattcgccgagagacaggccgtgagagagacctggggcagccccgcccccggcatcagactgctgttcctgctgggcagccccgtgggcgaggccggccccgacctggacagcctggtggcctgggagagcagaagatacagcgacctgctgctgtgggacttcctggacgtgcccttcaaccagaccctgaaggacctgctgctgctggcctggctgggcagacactgccccaccgtgagcttcgtgctgagagcccaggacgacgccttcgtgcacacccccgccctgctggcccacctgagagccctgccccccgccagcgccagaagcctgtacctgggcgaggtgttcacccaggccatgcccctgagaaagcccggcggccccttctacgtgcccgagagcttcttcgagggcggctaccccgcctacgccagcggcggcggctacgtgatcgccggcagactggccccctggctgctgagagccgccgccagagtggcccccttccccttcgaggacgtgtacaccggcctgtgcatcagagccctgggcctggtgccccaggcccaccccggcttcctgaccgcctggcccgccgacagaaccgccgaccactgcgccttcagaaacctgctgctggtgagacccctgggcccccaggccagcatcagactgtggaagcagctgcaggaccccagactgcagtgctag

SEQ ID NO: 260169 - DNA, 1194 bp, Artificial Sequence
  derived and/or modified sequence
atgcgctgtcctaagtgcttgctctgtctgtctgccctcttgacacttttaggtctgaaggtctacatcgagtggacctccgaatcccgcctaagcaaagcctatccttcaccacgcggaaccccgccatcccctactcctgccaaccctgaaccaactctgcctgcaaatctgagcacacgtcttggtcagacaatccctttgccctttgcctactggaaccagcagcagtggaggctgggaagtctaccaagcggcgattctactgagacagggggatgtcaggcctggggggccgccgcggcaactgagatcccagattttgcaagctatccaaaggatttgcgacgcttcttactgtccgctgcttgtaggagctttccacaatggctgccaggtggtggaggaagccaggtgtctagctgttcggataccgacgtcccatacctacttctcgcagtgaagtctgagcctggacgattcgcagagaggcaggccgtgcgcgagacatggggctccccggcgcccggcattcggttattgttcctgttgggcagcccagtaggcgaggccggcccagatctcgattctctcgttgcctgggagtcccggaggtactctgacctacttttgtgggattttcttgacgtgccttttaaccaaaccctgaaggatcttctactgttagcctggctcggacggcattgcccaactgtgagctttgtgcttcgcgcccaggatgatgctttcgttcatacgcccgctctgcttgcacacctacgcgctctgccccccgcgagcgctagaagcctgtatcttggtgaagtgttcactcaagcgatgccactgcggaaacctggggggcctttttacgtacccgaaagtttttttgaagggggctatccggcttacgcatcgggaggaggctacgtaattgcaggcagactggccccttggctgttaagggcagccgcgagagtggctcccttcccattcgaagatgtgtatactggcctctgcatccgcgcgctcggtttagtgcctcaggctcatccagggttcctgacagcatggcctgccgataggactgccgaccattgtgcgttccggaatctactcttggtgcgcccgctggggccccaagcatccatacgcctctggaaacagctccaggatccaaggctgcaatgctag

SEQ ID NO: 260170 - DNA, 1194 bp, Artificial Sequence
  derived and/or modified sequence
atgcgctgccccaagtgcctgctgtgcctgagcgccctgctgaccctgctgggcctgaaggtgtacatcgagtggaccagcgagagccggctgagcaaggcctaccccagcccccggggcaccccacccagccccaccccagccaaccctgagcccaccctgcctgccaacctgagcacccggctgggccagaccatccccctgccctttgcctactggaaccagcagcagtggaggctgggcagcctgcccagcggggacagcacagaaacaggaggctgccaggcctggggcgctgctgctgccacagagatcccagactttgccagctaccccaaggacctgcggcgcttcctgctgtctgctgcctgccgctccttcccccagtggctgcccggcggcggcggcagccaggtgagcagctgcagcgacacagatgtgccctacctgctgctggccgtgaagtctgagcccggccgctttgctgagcggcaggccgtgcgggagacctggggcagccctgcccctggcatccggctgctcttcctgctgggcagccctgtgggggaggccggccctgacctggacagcctggtggcctgggagagccgccgctacagcgacctgctgctgtgggacttcctggatgtgcccttcaaccagaccctgaaggacctgctgctgctggcctggctgggccgccactgccccaccgtgtcctttgtgctgcgggcccaggatgatgcctttgtgcacaccccagccctgctggcccacctgcgggccctgcccccagccagcgcccggagcctgtacctgggggaggtgttcacccaggccatgcccctgaggaagccaggcggccccttctacgtgcctgagagcttctttgaaggaggctacccagcctatgccagcggcggcggctacgtgattgctggccgcctggccccctggctgctgcgggccgccgcccgggtggcccccttcccctttgaagatgtgtacacaggcctgtgcatccgggccctgggcctggtgccccaggcccaccctggcttcctgacagcctggccagctgacagaacagctgaccactgtgccttcaggaacctgctgctggtgcggcccctgggcccccaggccagcatccggctgtggaagcagctgcaggacccccggctgcagtgctag

SEQ ID NO: 260171 - DNA, 1194 bp, Artificial Sequence
  derived and/or modified sequence
atgcggtgccccaagtgcctgctgtgcctgagcgccctgctgaccctgctcggcctgaaggtgtacatcgagtggacatccgaaagtcgcctatctaaagcatatccttctcctcggggaaccccccctagccctacacccgccaacccagagcccacattgcccgccaacctgagcacccggctgggtcagacgatcccactcccattcgcgtactggaaccagcaacagtggaggctgggcagtttgcccagtggggacagtactgaaaccggaggctgtcaggcttggggggccgctgcagccaccgagatcccagatttcgcgtcttatcctaaggatctaagaaggttcctgttgtccgccgcctgtagatcctttccacagtggttaccaggcggcggcggaagccaggtgtccagctgctccgatacggatgtgccttatctgcttctggctgtgaagtccgaacccggtcggttcgcggagaggcaggctgttcgcgaaacatggggaagtcccgcgcccggcatccgtctgctgtttctattaggctccccggttggtgaggctgggcctgacctggacagtctggtcgcttgggagagccgtaggtactccgacctgctcctctgggatttcctcgacgtgccttttaatcaaactctgaaagacctgctcttactggcatggctcggcaggcactgcccaaccgtgtctttcgtcttacgagcccaagacgatgccttcgtgcacacgccagcactattagcgcaccttcgggccctgcctcctgcttctgctcgctcattatatctgggcgaggtgttcacacaggccatgccacttcgcaagcccggcggtccattttacgtacctgagagtttctttgaaggcggttatcctgcttatgcttctggcggggggtatgttattgctggcagactagccccatggttactaagagctgctgccagagtggctccatttccttttgaggacgtatacacaggtctctgtatccgcgctctggggctcgtgcctcaagcccatcccggtttcctcaccgcatggcccgccgacagaaccgccgatcattgtgccttccgcaatctgctcctcgtgcgccctcttggcccacaagccagcatccgtctgtggaagcagctgcaggacccccggctgcagtgctag

SEQ ID NO: 260172 - DNA, 1194 bp, Artificial Sequence
  derived and/or modified sequence
atgcgctgccctaaatgtttactttgtctgtctgcgctgttgactctgctggggttgaaagtgtatatagagtggacaagtgaatccagattgagtaaggcctatccatcacctcgaggcaccccaccttcacccacaccggctaaccctgaacccactttacccgcaaacctgagcacgaggctcggacaaactattcccttgcccttcgcctactggaaccaacagcaatggcggctaggaagtttgccttccggggactccactgaaactggtggttgtcaggcatggggggcagcggctgccacggagattccagacttcgcatcttaccccaaggatcttcggagattcctgctgtctgcagcttgtagatcgtttccacagtggctgcctggcggtgggggttcccaagttagctcctgtagcgatacagatgtgccatacctgttactcgcagtgaagagtgaaccgggacgctttgcagagaggcaggcagtgcgtgagacgtggggatcgccggctccagggatccgcctgctattcctacttggcagccctgtgggcgaggcgggaccggacctggactctctcgtggcctgggaaagcagaagatactccgacctcctgctgtgggattttctcgatgtcccgttcaatcagactttgaaggacctgctgctccttgcctggcttggcaggcactgtcctaccgtctcttttgtgcttcgggcacaggatgacgctttcgtgcacacccccgctctgttagcccatttgcgtgctctcccccctgcctctgccaggagtctctacctcggggaggtgttcacccaggctatgccgctgcgcaaacctggaggaccattctacgtacctgagagcttctttgaaggcggttaccccgcttatgcttctggcggaggttacgttattgccggaaggcttgcaccatggctgcttcgtgccgcagctagggtagcccctttccctttcgaggatgtctatacaggcttgtgtataagggcccttggcctggtgccacaggcccatccaggattcttgacagcatggcccgctgaccggacggccgatcactgtgcctttaggaatcttctcctggtacgtcctttgggccctcaggcctctatccgcctgtggaagcaactgcaggatcccaggctgcagtgctag

SEQ ID NO: 260173 - DNA, 1873 bp, Artificial Sequence
  derived and/or modified sequence
tcttcctccagctgttcccacaggctccattattcaaactttgggggaggaaatcagggctggacagatcatcaactgctgctgctgacagactgtgttcctgccatgatggggacaggcctgccccaaaccaggctgtctcaccagaaaccagccctaacacgccagagccccatctctcaggtcggcctcctgccctcctccctccctccctccctccctctctcctgcctcagccccgccccggcccctggggccctccctgctcccgctccactcccctccccgcccctctggactggctgggcagggctgggccccgccggtcgacaacacaggggctggggcaggcagatcagagggagctgagggaggcctgacctgaggccggcacccggagctggcgggagccagacccagagctcccgcggccgccccttccctgggccgggtcatgcgctgccccaagtgccttctctgcctgtcagcactgctcacactcctgggcctcaaagtgtacatcgagtggacatccgagtcccggctcagcaaggcctaccccagccctcggggcaccccgccaagccccacgccagccaaccctgagcccaccctacctgccaacctctccacccgcctgggccagactatcccgctgccctttgcttactggaaccagcagcagtggcggctggggtccctgcccagtggggacagcactgaaacggggggctgccaggcttggggggccgccgccgccaccgagatccctgacttcgcctcctaccccaaggacctccgccgcttcttgctgtcagcagcctgccggagcttcccacagtggctgcctggaggtggtggcagccaagtctccagctgctcagatactgatgtcccctacctgctgttggccgtcaagtcagaaccagggcgctttgcagaacgacaggccgtgagagagacgtggggcagtccagctccagggatccggctgctcttcctgctagggtctccggtgggtgaggcggggcctgacctagactcactagtggcctgggagagccgtcgctacagtgacctgctgctctgggacttcctcgacgtcccattcaaccagacgctcaaagacctgctgctgctggcctggctgggccgccactgccccaccgtgagttttgtcttgcgagctcaggacgatgcctttgtacacacccctgccctgctggctcacctgcgggccctgccacctgcctcggcccgaagcctctacctgggtgaggtctttacccaggccatgcctctccggaagccaggaggacccttctatgtgcccgagtccttcttcgaaggtggctacccagcctatgcaagcgggggtggctacgtcattgccgggcgcctggcaccctggctgctgcgggcggcagcccgtgtggcacccttcccctttgaggacgtctacactggcctttgcatccgagccctgggcctggtgccccaggcccacccaggcttcctcacagcctggccagcagaccgcactgcggaccactgtgctttccgcaacctgctgctggtacggcccctgggcccccaggccagcattcggctctggaaacaactgcaagacccaaggctccagtgctgactctcattggggagggcggaggtgctgacctggcctgggcctctggggccggcccctggctcagcccctccttccaggtcttgatgggagggaggagggcccagaagctggacaacttaagccactccttggcctcccccagccaggggcctgggcaggaaagatggggtggtggactgtttttgcctactttttgtttttgaaaaacatgcactccccactctg

SEQ ID NO: 260174 - protein, 110 aa, Artificial Sequence
  derived and/or modified sequence
MAPRGCIVAVFAIFCISRLLCSHGAPVAPMTPYLMLCQPHKRCGDKFYDPLQHCCYDDAVVPLARTQTCGNCTFRVCFEQCCPWTFMVKLINQNCDSARTSDDRLCRSVS

SEQ ID NO: 260175 - DNA, 333 bp, Artificial Sequence
  derived and/or modified sequence
atggctcccaggggttgcatcgtggccgtcttcgctatattttgcatttcacggctgctgtgtagccacggcgcacccgtggcccccatgactccgtacctaatgctatgccagccgcacaaaagatgcggggataaattttatgatccccttcagcactgctgttacgacgacgcagtggtcccccttgccagaacacagacgtgcggaaactgtacctttcgggtctgttttgagcagtgctgtccgtggacattcatggtgaagctgattaaccaaaattgtgattcagcaagaacatctgacgaccgtctttgccggtctgtgagttag

SEQ ID NO: 260176 - DNA, 769 bp, Artificial Sequence
  derived and/or modified sequence
ctccactgcaaccacccagagccatggctccccgaggctgcatcgtagctgtctttgccattttctgcatctccaggctcctctgctcacacggagccccagtggcccccatgactccttacctgatgctgtgccagccacacaagagatgtggggacaagttctacgaccccctgcagcactgttgctatgatgatgccgtcgtgcccttggccaggacccagacgtgtggaaactgcaccttcagagtctgctttgagcagtgctgcccctggaccttcatggtgaagctgataaaccagaactgcgactcagcccggacctcggatgacaggctttgtcgcagtgtcagctaatggaacatcaggggaacgatgactcctggattctccttcctgggtgggcctggagaaagaggctggtgttacctgagatctgggatgctgagtggctgtttgggggccagagaaacacacactcaactgcccacttcattctgtgacctgtctgaggcccaccctgcagctgccctgaggaggcccacaggtccccttctagaattctggacagcatgagatgcgtgtgctgatgggggcccagggactctgaaccctcctgatgacccctatggccaacatcaacccggcaccaccccaaggctggctggggaacccttcacccttctgtgagattttccatcatctcaagttctcttctatccaggagcaaagcacaggatcataataaatttatgtactttataaatgaa

SEQ ID NO: 260177 - DNA, 333 bp, Artificial Sequence
  derived and/or modified sequence
atggccccccggggctgcatcgtggccgtgtttgccatcttctgcatcagccggctgctgtgcagccatggagcccctgtggcccccatgaccccctacctgatgctgtgccagccccacaagagatgtggggacaagttctatgaccccctgcagcactgctgctatgatgatgctgtggtgcccctggcccggacccagacctgtggcaactgcaccttccgggtgtgctttgagcagtgctgcccctggaccttcatggtgaagctgatcaaccagaactgtgacagcgcccggaccagtgatgaccggctgtgccgctctgtgtcctag

SEQ ID NO: 260178 - DNA, 333 bp, Artificial Sequence
  derived and/or modified sequence
atggccccccggggctgcatcgtggccgtgttcgccatcttctgcatcagtcgtctgctctgctcccatggcgcgcccgtggcgcccatgacgccatatctgatgctgtgccagcctcataagaggtgcggagataagttctatgatccgctgcagcattgctgctatgatgacgctgtcgtccctcttgccaggacccagacttgcgggaattgcacattcagagtctgtttcgaacaatgctgtccctggaccttcatggtcaaacttatcaatcagaattgcgactccgcccggaccagtgatgatcgtctgtgtcggagtgtcagctag

SEQ ID NO: 260179 - DNA, 333 bp, Artificial Sequence
  derived and/or modified sequence
atggctccacgaggctgtatcgtggctgtgttcgccattttctgtatcagccgactcctatgctcccacggtgcgcctgtggcccctatgactccctatcttatgctctgtcaacctcataaaagatgtggggataaattctatgaccctcttcaacactgctgttatgatgacgcggtcgtgccacttgctcgaacccagacctgtgggaattgtaccttccgagtatgtttcgaacagtgctgcccatggactttcatggtgaaattgatcaatcagaattgcgattccgcacgtaccagtgacgacaggttgtgccgtagcgtgtcttag

SEQ ID NO: 260180 - DNA, 333 bp, Artificial Sequence
  derived and/or modified sequence
atggcccccagaggctgcatcgtggccgtgttcgccatcttctgcatcagcagactgctgtgcagccacggcgcccccgtggcccccatgaccccctacctgatgctgtgccagccccacaagagatgcggcgacaagttctacgaccccctgcagcactgctgctacgacgacgccgtggtgcccctggccagaacccagacctgcggcaactgcaccttcagagtgtgcttcgagcagtgctgcccctggaccttcatggtgaagctgatcaaccagaactgcgacagcgccagaaccagcgacgacagactgtgcagaagcgtgagctag

SEQ ID NO: 260181 - protein, 1907 aa, Artificial Sequence
  derived and/or modified sequence
MAAAPGLLVWLLVLRLPWRVPGQLDPSTGRRFSEHKLCADDECSMLMYRGEALEDFTGPDCRFVNFKKGDPVYVYYKLARGWPEVWAGSVGRTFGYFPKDLIQVVHEYTKEELQVPTDETDFVCFDGGRDDFHNYNVEELLGFLELYNSAATDSEKAVEKTLQDMEKNPELSKEREPEPEPVEANSEESDSVFSENTEDLQEQFTTQKHHSHANSQANHAQGEQASFESFEEMLQDKLKVPESENNKTSNSSQVSNEQDKIDAYKLLKKEMTLDLKTKFGSTADALVSDDETTRLVTSLEDDFDEELDTEYYAVGKEDEENQEDFDELPLLTFTDGEDMKTPAKSGVEKYPTDKEQNSNEEDKVQLTVPPGIKNDDKNILTTWGDTIFSIVTGGEETRDTMDLESSSSEEEKEDDDDALVPDSKQGKPQSATDYSDPDNVDDGLFIVDIPKTNNDKEVNAEHHIKGKGRGVQESKRGLVQDKTELEDENQEGMTVHSSVHSNNLNSMPAAEKGKDTLKSAYDDTENDLKGAAIHISKGMLHEEKPGEQILEGGSESESAQKAAGNQMNDRKIQQESLGSAPLMGDDHPNASRDSVEGDALVNGAKLHTLSVEHQREELKEELVLKTQNQPRFSSPDEIDLPRELEDEVPILGRNLPWQQERDVAATASKQMSEKIRLSEGEAKEDSLDEEFFHHKAMQGTEVGQTDQTDSTGGPAFLSKVEEDDYPSEELLEDENAINAKRSKEKNPGNQGRQFDVNLQVPDRAVLGTIHPDPEIEESKQETSMILDSEKTSETAAKGVNTGGREPNTMVEKERPLADKKAQRPFERSDFSDSIKIQTPELGEVFQNKDSDYLKNDNPEEHLKTSGLAGEPEGELSKEDHENTEKYMGTESQGSAAAEPEDDSFHWTPHTSVEPGHSDKREDLLIISSFFKEQQSLQRFQKYFNVHELEALLQEMSSKLKSAQQESLPYNMEKVLDKVFRASESQILSIAEKMLDTRVAENRDLGMNENNIFEEAAVLDDIQDLIYFVRYKHSTAEETATLVMAPPLEEGLGGAMEEMQPLHEDNFSREKTAELNVQVPEEPTHLDQRVIGDTHASEVSQKPNTEKDLDPGPVTTEDTPMDAIDANKQPETAAEEPASVTPLENAILLIYSFMFYLTKSLVATLPDDVQPGPDFYGLPWKPVFITAFLGIASFAIFLWRTVLVVSNTVYYVTEQQISEKLKTIMKENTELVQKLSNYEQKIKESKKHVQETRKQNMILSDEAIKYKDKIKTLEKNQEILDDTAKNLRVMLESEREQNVKNQDLISENKKSIEKLKDVISMNASEFSEVQIALNEAKLSEEKVKSECHRVQEENARLKKKKEQLQQEIEDWSKLHAELSEQIKSFEKSQKDLEVALTHKDDNINALTNCITQLNLLECESESEGQNKGGNDSDELANGEVGGDRNEKMKNQIKQMMDVSRTQTAISVVEEDLKLLQLKLRASVSTKCNLEDQVKKLEDDRNSLQAAKAGLEDECKTLRQKVEILNELYQQKEMALQKKLSQEEYERQEREHRLSAADEKAVSAAEEVKTYKRRIEEMEDELQKTERSFKNQIATHEKKAHENWLKARAAERAIAEEKREAANLRHKLLELTQKMAMLQEEPVIVKPMPGKPNTQNPPRRGPLSQNGSFGPSPVSGGECSPPLTVEPPVRPLSATLNRRDMPRSEFGSVDGPLPHPRWSAEASGKPSPSDPGSGTATMMNSSSRGSSPTRVLDEGKVNMAPKGPPPFPGVPLMSTPMGGPVPPPIRYGPPPQLCGPFGPRPLPPPFGPGMRPPLGLREFAPGVPPGRRDLPLHPRGFLPGHAPFRPLGSLGPREYFIPGTRLPPPTHGPQEYPPPPAVRDLLPSGSRDEPPPASQSTSQDCSQALKQSP

SEQ ID NO: 260182 - protein, 1907 aa, Artificial Sequence
  derived and/or modified sequence
MAAAPGLLVWLLVLRLPWRVPGQLDPSTGRRFSEHKLCADDECSMLMYRGEALEDFTGPDCRFVNFKKGDPVYVYYKLARGWPEVWAGSVGRTFGYFPKDLIQVVHEYTKEELQVPTDETDFVCFDGGRDDFHNYNVEELLGFLELYNSAATDSEKAVEKTLQDMEKNPELSKEREPEPEPVEANSEESDSVFSENTEDLQEQFTTQKHHSHANSQANHAQGEQASFESFEEMLQDKLKVPESENNKTSNSSQVSNEQDKIDAYKLLKKEMTLDLKTKFGSTADALVSDDETTRLVTSLEDDFDEELDTEYYAVGKEDEENQEDFDELPLLTFTDGEDMKTPAKSGVEKYPTDKEQNSNEEDKVQLTVPPGIKNDDKNILTTWGDTIFSIVTGGEETRDTMDLESSSSEEEKEDDDDALVPDSKQGKPQSATDYSDPDNVDDGLFIVDIPKTNNDKEVNAEHHIKGKGRGVQESKRGLVQDKTELEDENQEGMTVHSSVHSNNLNSMPAAEKGKDTLKSAYDDTENDLKGAAIHISKGMLHEEKPGEQILEGGSESESAQKAAGNQMNDRKIQQESLGSAPLMGDDHPNASRDSVEGDALVNGAKLHTLSVEHQREELKEELVLKTQNQPRFSSPDEIDLPRELEDEVPILGRNLPWQQERDVAATASKQMSEKIRLSEGEAKEDSLDEEFFHHKAMQGTEVGQTDQTDSTGGPAFLSKVEEDDYPSEELLEDENAINAKRSKEKNPGNQGRQFDVNLQVPDRAVLGTIHPDPEIEESKQETSMILDSEKTSETAAKGVNTGGREPNTMVEKERPLADKKAQRPFERSDFSDSIKIQTPELGEVFQNKDSDYLKNDNPEEHLKTSGLAGEPEGELSKEDHENTEKYMGTESQGSAAAEPEDDSFHWTPHTSVEPGHSDKREDLLIISSFFKEQQSLQRFQKYFNVHELEALLQEMSSKLKSAQQESLPYNMEKVLDKVFRASESQILSIAEKMLDTRVAENRDLGMNENNIFEEAAVLDDIQDLIYFVRYKHSTAEETATLVMAPPLEEGLGGAMEEMQPLHEDNFSREKTAELNVQVPEEPTHLDQRVIGDTHASEVSQKPNTEKDLDPGPVTTEDTPMDAIDANKQPETAAEEPASVTPLENAILLIYSFMFYLTKSLVATLPDDVQPGPDFYGLPWKPVFITAFLGIASFAIFLWRTVLVVKDRVYQVTEQQISEKLKTIMKENTELVQKLSNYEQKIKESKKHVQETRKQNMILSDEAIKYKDKIKTLEKNQEILDDTAKNLRVMLESEREQNVKNQDLISENKKSIEKLKDVISMNASEFSEVQIALNEAKLSEEKVKSECHRVQEENARLKKKKEQLQQEIEDWSKLHAELSEQIKSFEKSQKDLEVALTHKDDNINALTNCITQLNLLECESESEGQNKGGNDSDELANGEVGGDRNEKMKNQIKQMMDVSRTQTAISVVEEDLKLLQLKLRASVSTKCNLEDQVKKLEDDRNSLQAAKAGLEDECKTLRQKVEILNELYQQKEMALQKKLSQEEYERQEREHRLSAADEKAVSAAEEVKTYKRRIEEMEDELQKTERSFKNQIATHEKKAHENWLKARAAERAIAEEKREAANLRHKLLELTQKMAMLQEEPVIVKPMPGKPNTQNPPRRGPLSQNGSFGPSPVSGGECSPPLTVEPPVRPLSATLNRRDMPRSEFGSVDGPLPHPRWSAEASGKPSPSDPGSGTATMMNSSSRGSSPTRVLDEGKVNMAPKGPPPFPGVPLMSTPMGGPVPPPIRYGPPPQLCGPFGPRPLPPPFGPGMRPPLGLREFAPGVPPGRRDLPLHPRGFLPGHAPFRPLGSLGPREYFIPGTRLPPPTHGPQEYPPPPAVRDLLPSGSRDEPPPASQSTSQDCSQALKQSP

SEQ ID NO: 260183 - DNA, 5724 bp, Artificial Sequence
  derived and/or modified sequence
atggcggctgccccagggctcctggtgtggcttctcgttctgaggctcccttggagagttccggggcagttggacccctctaccggaaggagattttcagaacacaagttatgcgctgacgacgaatgcagcatgctgatgtataggggagaagcactcgaggacttcaccggccccgactgtaggttcgtaaactttaaaaagggtgaccctgtgtacgtctattacaaacttgccaggggctggcctgaggtctgggccggaagcgtggggcggacctttggctacttcccgaaagatctcatccaagtggtgcatgagtacacaaaggaagaacttcaggtaccaaccgatgaaacggattttgtatgcttcgacggtggtcgggatgacttccataattataatgtagaggaactgctgggttttcttgagctgtacaattcggccgccaccgactcagagaaagccgttgagaaaactctgcaggacatggaaaaaaatccagagctgagtaaagaacgggaacccgagccagagccagtagaagccaattcagaagagtccgatagtgtgttcagcgagaataccgaggatctgcaggaacagtttaccacccagaagcatcattcccatgcgaactcacaagctaatcatgcccagggcgagcaggcaagttttgagtcgtttgaggaaatgctacaggacaagcttaaggtccctgagagcgaaaacaataagacatcaaactcctctcaagtgtccaacgagcaggacaaaatagacgcatataagttacttaaaaaagagatgactttggacttgaaaacaaagtttggttccacggctgatgccctagtctccgatgacgagaccaccagactagtgacttccttggaggatgatttcgacgaagagctggacaccgaatactacgcagtgggcaaagaagacgaagagaatcaagaggacttcgatgaattgcctttactgacattcaccgatggcgaggatatgaagactccggcgaaaagtggcgtggagaagtatcctaccgataaagagcagaactccaacgaggaggacaaagtgcagctcacagtcccccctggcataaagaatgatgacaagaacatactcaccacatggggtgataccatcttttcaatcgtcacaggtggggaggagactagagacaccatggacctggagtcttcatcttctgaagaggaaaaggaggatgacgatgatgcacttgtccccgacagtaaacagggtaaaccccagagtgctacagactacagcgacccagataacgtcgatgacggcttgtttattgtcgacatacccaaaacaaataacgacaaagaggtaaacgcggagcaccatatcaagggcaaagggcgaggggtgcaggagagcaagaggggcctagtgcaagataagacggaattggaggatgagaatcaagaaggtatgacggttcactcaagcgtccatagtaataatctcaactcaatgcccgcggccgaaaagggcaaagacactctgaagtctgcctacgatgatactgagaacgacctcaaaggggcggcaatccatattagtaagggtatgcttcacgaggagaagcccggcgagcaaatccttgaaggaggatctgaatccgagtccgcccagaaggctgcaggaaaccagatgaatgataggaagattcaacaggaatctctgggttccgcaccacttatgggagatgaccacccaaatgcatccagagacagcgtggagggcgacgccctcgttaatggagcgaaactgcacacactgtctgtggagcatcagcgtgaggagttgaaagaggaattagtgctgaaaacccaaaatcagcctcggttttcatctcctgatgagatcgaccttccgagagaactggaagatgaggtgcctatacttggccgcaatctcccttggcagcaggaaagagacgtggccgcaacagcaagtaagcaaatgagcgagaagatccgcttgtccgaaggcgaagcaaaggaggactccttggacgaagagtttttccaccacaaagccatgcagggaaccgaggtggggcaaacggaccaaacagatagtacaggaggacccgcctttctcagcaaggtggaggaagacgattatccctcagaggaactcctggaggatgagaacgcaataaatgctaaacggagcaaggaaaaaaaccctggtaaccaggggagacagttcgatgtgaatttacaggttcccgacagggctgtgctgggaaccatacatccagaccctgaaatagaggagtctaaacaagaaacctctatgatattagactctgagaaaacatccgaaaccgccgcaaagggtgtgaataccggtggccgtgagcctaatacaatggtggagaaagagcgcccgttagccgataaaaaagcccaaaggcctttcgaacgatcagacttctcagactcaattaagatccagacacctgaactgggtgaggtctttcagaacaaggactcggactacctcaaaaacgacaatcctgaggagcacctgaaaacttcaggtttagccggggaacccgaaggggaactgagcaaggaggaccacgaaaacacggaaaagtacatgggaaccgagtctcaggggagcgctgctgccgagcccgaagacgattcatttcactggactccgcatactagcgtagaacctgggcactccgataagcgagaggacctcctgattatctcgtccttttttaaggagcagcagtctctacagagattccagaaatactttaacgtgcatgaattggaagcactgcttcaggagatgtcaagtaaattaaagagtgcccaacaagaatccctgccttacaatatggagaaagtgctggataaagtgttcagagcatcagagagccagatcttatccattgccgaaaagatgttggacacccgagttgccgagaatcgagatctcggtatgaatgaaaataatatcttcgaagaggcggccgtcctcgatgatatccaagatttgatatattttgtgagatataaacattctacagcagaggagactgccaccctggttatggcaccgccactagaagaaggactgggaggcgcaatggaggagatgcaacctctgcacgaggataatttttcgagggagaagacagccgagctcaacgtgcaggtccccgaggaaccaactcatttggaccagagggtaattggtgatacccacgcttcagaggtgtcccagaagcctaacacagagaaagatctggatcctggacctgtgaccacagaggatactcctatggacgctatcgacgccaataaacagcctgagacagccgcagaggaaccagccagcgtcaccccactggaaaacgcgattctgctgatatattctttcatgttctatctaactaagtcactggttgcaacactccccgacgacgtccaaccaggacctgacttctacggcctgccttggaagcctgtattcattacagctttcttaggcattgctagcttcgctattttcctatggcgcacagtgctcgtggtgagtaacaccgtgtattacgtgaccgaacagcaaattagcgaaaagctcaaaactatcatgaaagagaacactgaactcgtgcagaagctgtctaactacgagcagaaaataaaggaatccaaaaaacacgttcaagagacccgaaaacaaaatatgattctgtcggacgaggccatcaagtataaggataagattaagaccctggaaaaaaaccaagaaattctggatgacactgccaagaacctgcgcgtgatgttagagtctgaacgagagcagaatgttaagaatcaggacctgatatctgagaataagaaaagtattgagaaactgaaagacgttattagtatgaatgccagtgaatttagtgaggtgcagattgccctgaacgaagcgaaactctccgaggagaaggtgaagtctgaatgccatcgcgtgcaagaagaaaacgcacggctgaaaaaaaaaaaggaacagctccagcaggagattgaggactggtctaagctccatgcagagctgtccgagcagattaagtcattcgaaaagtctcagaaggatctcgaggtggcgctcacccacaaggacgataatattaacgcgcttaccaactgtatcacacagttaaacctgttggaatgtgagtcagagtcagaaggtcagaacaagggcggtaatgactcagatgagttggcgaatggggaggtcggtggagaccggaacgagaaaatgaaaaaccagatcaaacagatgatggacgtctcgaggactcagaccgccataagcgtcgtagaagaagacttgaaactgctccaacttaagctccgggctagcgtttctaccaagtgcaatctggaagatcaggttaaaaaactggaggacgatagaaacagcctgcaagctgccaaagccggcctggaagatgaatgcaaaactcttaggcagaaagtggagatcctgaacgaactttaccagcagaaggaaatggctctgcagaagaagttgagtcaggaggagtacgagagacaggagagggagcacaggctcagcgcagctgacgagaaggccgtgagtgccgctgaagaggtgaagacgtacaagaggaggattgaagagatggaggacgagctccagaagactgagcgctctttcaagaaccagatcgccacccacgagaagaaggcgcacgaaaactggctgaaagctcgagcagccgagagggcaattgcggaggaaaagagggaggcggccaacctcagacacaaactgctggagctaactcagaaaatggccatgctgcaagaagaacctgtgatcgttaaacccatgccaggcaaaccaaacacccaaaatccccctagacgggggccactctcacagaatggatcgtttgggccctctcccgtgtcaggcggggagtgcagcccccccctgactgtggagcccccggtgcggccactgagtgctacactgaatcgacgggacatgcctaggtccgaattcggcagtgtagatggtcctttgccccaccctcgctggtctgccgaagcaagtggcaagccgagtccatctgatccagggagcggcacagccacaatgatgaattcctcatccagaggaagctcacctacccgggtactagacgaagggaaggtcaacatggccccaaagggcccccctccctttccgggtgttcccctgatgtcaacacccatggggggacccgtgcccccccctattaggtatggccctcccccgcagttgtgtggcccattcggtccacgtcctttgccccccccctttggtcccggcatgcgccccccactgggcctgagagaattcgcacccggcgtgccccctgggagacgcgacctgccattgcatcctcgggggttcctccccgggcatgccccattccggcccctcggatcactgggccctcgggagtattttattcctggcaccaggctaccaccccctacccatggccctcaggagtatccacctccccctgccgtccgggacctgctccctagtgggtcacgcgatgaacctccaccagcctcgcagtctacttctcaggattgcagccaggccttgaagcaatccccatag

SEQ ID NO: 260184 - DNA, 5724 bp, Artificial Sequence
  derived and/or modified sequence
atggcagcggccccaggccttctggtgtggttacttgtactgcgcctcccatggcgagtgcctgggcagctggacccttctaccgggcgaaggttctccgagcataagctctgtgctgacgatgagtgcagtatgctgatgtatcgaggggaagctctcgaagattttaccggacccgactgtcgcttcgtgaactttaagaagggtgatcctgtctatgtgtactacaagttggcacggggctggcctgaagtctgggcgggtagcgtgggaagaacgttcggctattttcctaaggacctgatccaggtcgttcatgagtatactaaagaggagctgcaagtgcctaccgacgagacggactttgtttgcttcgacggaggccgggacgatttccacaactacaacgtcgaggagctactggggttcctggagctgtacaatagcgccgctacggatagcgagaaggccgtcgaaaagacactgcaggacatggagaaaaatccggaactgtctaaggaacgcgagcccgaaccggagcctgtggaggctaacagcgaggagtcagactctgtcttctccgaaaataccgaggatctgcaggagcagtttacaacacagaaacatcacagtcatgcaaacagccaggcaaaccacgcccagggcgagcaggcaagttttgagagcttcgaggagatgttgcaggacaaactaaaggtgccagagtccgaaaacaataaaacctctaattccagccaggtaagcaacgagcaagataagattgacgcatacaaactgctgaagaaagaaatgacacttgacctgaagacaaaatttggcagcactgccgatgccttggtgtctgatgacgaaactacccgactcgtgacatcactggaagatgacttcgacgaggagctagacacagagtactacgccgtgggtaaagaggacgaggagaaccaggaggactttgacgagctacctctactaacatttacggatggcgaggacatgaaaacacctgccaagtccggtgtcgaaaagtatcctacggataaagagcagaacagcaacgaggaggataaggtgcaactcaccgttccacctgggattaagaacgatgataagaatattctgaccacatggggtgataccatcttctctattgtcaccgggggagaggagacaagagataccatggacctcgaaagttcttctagcgaggaggaaaaagaagatgacgatgatgctctggtacctgactccaagcaagggaaacctcagtctgcaacagactacagcgaccctgacaacgtggatgacggattgtttatcgtcgatatcccaaagacaaacaacgacaaggaggttaacgccgaacatcacataaaaggaaaaggcaggggcgttcaagagtctaagcgaggcttggtgcaagacaagaccgagctagaggacgaaaatcaggaagggatgactgtgcactcatcagtacactccaataaccttaacagtatgcccgcagcggaaaagggtaaggacacactaaagtcagcatacgatgatactgagaacgacctgaagggggctgctatccacatctctaagggcatgctacacgaagagaaaccaggcgagcagatcctcgaaggaggatcggagagcgagagtgctcaaaaggcagcggggaaccagatgaacgacaggaagatacagcaggaatctctgggctcagcacctctaatgggggatgaccacccaaacgccagtcgagactccgttgagggtgacgctcttgttaatggcgctaaattgcacactctaagcgtcgagcaccagcgcgaagagttaaaggaggaactggtactgaagactcagaatcaaccaagattttcttctccagatgaaattgatttgcccagagaacttgaggacgaagtgccgatactcggtaggaatctgccctggcagcaggagcgggacgtggccgcaaccgcaagtaagcagatgagcgagaagatccgcttgtctgagggagaagcaaaagaggattcgttggacgaagaattttttcatcacaaggccatgcaaggcaccgaggtcgggcagacggaccagactgattctactggaggacctgctttcctgtcgaaagttgaggaggacgactaccccagtgaagaactgttagaggacgaaaatgctattaatgcgaaaagatccaaagagaaaaaccctgggaatcagggcaggcagttcgacgtgaatctgcaggtcccagacagagctgtgctgggcaccattcatccagaccccgaaattgaggagtcaaaacaggagacgtccatgatccttgacagtgagaagaccagtgagaccgcagcaaagggcgtaaatactggtggaagggagccaaacacgatggttgagaaggagcgcccacttgctgacaaaaaggcccagagacctttcgagcggtcagacttcagcgactctatcaaaatacagacccccgagctgggcgaggtgttccagaataaggactccgactacctgaagaacgataatccagaggaacacctgaagacctctgggctggccggagagcccgagggagagttgagtaaggaggaccacgaaaatacagagaaatacatgggcacagaaagccagggatctgctgccgccgaacctgaagacgatagtttccactggacccctcacaccagcgtcgaaccagggcactcagataaacgggaggacctcctgattatatctagtttctttaaagaacaacaatcattgcaacgcttccagaagtactttaacgtgcatgaactggaggccttgctacaagaaatgtcgtctaagctgaaaagcgcccagcaggaatccttaccatacaatatggagaaggttcttgacaaagtctttcgcgcttccgaaagccagatcctgtctattgcggaaaaaatgctggacactagggtggccgaaaaccgagacctgggcatgaatgagaacaacatttttgaagaggctgccgtcctggacgatatccaggacctgatttacttcgtgcggtacaagcacagtaccgcagaggaaactgctacacttgtaatggctcctccattagaggaagggctcggcggagccatggaagaaatgcagccgctgcacgaagacaatttttctagggagaagactgctgagctcaatgtccaggtgcccgaagagcctacccatctggatcaacgagtgataggcgatacacatgccagcgaggtgagccagaagcccaacacagaaaaggacctcgacccagggccagtaacaactgaggatacacctatggacgccatcgatgcaaataagcagcctgagacagccgctgaggagcccgcctcagtgacgccactggaaaatgccatcctgttaatctattcattcatgttctacctgaccaagtccctcgtggctactctccccgacgacgtgcagcccggcccggacttctatggcctaccctggaagcccgtgtttattacagcctttcttgggatcgccagttttgccatcttcctttggcggacagttctggtcgttaaggaccgagtgtaccaagtaacagaacagcagatttccgaaaagctgaaaaccatcatgaaggaaaatacagagttagtgcagaagctctctaactacgagcagaagattaaggaaagtaagaaacatgtccaagaaacgagaaagcagaacatgattttatctgacgaagcaatcaagtacaaggacaaaatcaagacattagagaagaatcaagagatattggatgacactgctaaaaacttgcgtgttatgctcgaatctgagagggaacaaaacgtaaaaaatcaagatctgataagcgaaaacaagaaaagcatcgagaaattgaaagacgtgatctctatgaacgccagcgaattctcagaagtgcagatcgcactcaatgaagccaagctgagtgaggaaaaggtgaagtccgagtgtcatcgggtgcaagaggagaacgctcggctgaaaaaaaagaaagaacagcttcagcaggagatcgaagactggtctaagctgcatgccgagctctctgagcagataaagagttttgagaagagtcagaaagatctggaggtggcgcttacgcacaaggacgacaacattaacgccttgacaaactgtataacccagttaaacctgctggagtgcgagtcagaatccgagggccagaacaaaggaggaaatgacagcgatgaattggccaatggggaggtgggtggcgatcgcaacgaaaagatgaagaaccagattaaacagatgatggatgtatccaggacccagactgccatctcggtggtcgaagaagatctcaagctcctccagttgaagctcagagcctccgtgtcaactaagtgtaaccttgaggaccaggttaaaaaactggaagacgacagaaattctctgcaggccgctaaggctgggctcgaagacgaatgcaagactttgcgacagaaggtcgagattctcaacgagctttaccagcagaaggaaatggctcttcaaaaaaagctgtctcaagaagagtacgaacgccaggagcgagagcaccgcctgagcgcagctgatgagaaagccgtgtccgcagccgaagaagtgaaaacatataagcgacgaatcgaggagatggaggatgaactccagaaaacagagcgctcgtttaagaatcagattgccacccatgaaaagaaagcgcatgaaaattggctgaaggctcgcgccgctgaaagggcgattgccgaagagaagcgtgaagctgccaacctccggcataaactcctcgagctgacgcagaaaatggccatgctgcaagaagaacccgtcatcgttaagcccatgcccggaaagcccaacactcaaaaccctccgaggaggggtccactttcacagaacggcagttttggccctagtccagttagtggcggggagtgttctccgcctctcacagttgaaccacccgtgagaccgctgtctgccaccctgaaccgtcgggacatgccacgctcagagttcggtagtgtggacggtcctctgccacaccctaggtggtcagccgaagcctccgggaagccctcccctagtgatcccgggtctggtactgctactatgatgaatagttcgtccaggggcagtagccccacccgtgttttagatgaaggcaaggtgaacatggcgcctaaagggccaccccccttccctggggttccactgatgagcactcctatgggcggcccagtaccccctccgattaggtacggccctccaccgcagttatgcggcccattcggacctagaccactgcctcctcctttcggtccgggcatgcgtccacctctcggtctccgcgaattcgctccaggagtgccccccggaagaagggacctgcctcttcatccgagggggttcttacccggacatgctccgttccggcccctaggctcactgggaccacgggagtactttattcccggaactagacttccacctcccacccatgggcctcaagagtaccccccgccaccagctgtcagggacctgttaccaagcggatccagggatgaaccccctcctgcatctcagtctacaagccaggactgtagccaggccttgaagcaaagtccttag

SEQ ID NO: 260185 - DNA, 5724 bp, Artificial Sequence
  derived and/or modified sequence
atggctgctgcccctggcctgctggtgtggctgctggtgctgcggctgccctggagggtgcccggccagctggaccccagcacaggccgccgcttcagcgagcacaagctgtgtgctgatgatgagtgcagcatgctgatgtacagaggagaggccctggaggacttcaccggccctgactgccgctttgtgaacttcaagaagggggaccctgtgtatgtgtactacaagctggcccggggctggccagaggtgtgggccggctctgtgggccgcaccttcggctacttccccaaggacctgatccaggtggtgcatgagtacaccaaggaggagctgcaggtgcccacagatgaaacagactttgtgtgctttgatggcggcagagatgacttccacaactacaacgtggaggagctgctgggcttcctggagctgtacaacagcgctgccacagacagcgagaaggctgtggagaagaccctgcaggacatggagaagaaccctgagctgagcaaggagcgggagcctgagcctgagcctgtggaggccaacagcgaggagagtgacagcgtcttctctgaaaatacagaggacctgcaggagcagttcaccacccagaagcaccacagccacgccaacagccaggccaaccacgcccagggcgagcaggccagctttgagagctttgaggagatgctgcaggacaagctgaaggtgcctgagagcgagaacaacaagaccagcaacagcagccaggtgtccaatgagcaggacaagattgatgcctacaagctgctgaagaaggagatgaccctggacctgaagaccaagtttggcagcacagcagatgccctggtgtctgatgatgagaccacccggctggtgaccagcctggaggatgactttgatgaggagctggacacagagtactatgctgtgggcaaggaggatgaggagaaccaggaggactttgatgagctgcccctgctgaccttcacagatggagaggacatgaagaccccagccaagtctggagtggagaagtaccccacagacaaggagcagaacagcaatgaggaggacaaggtgcagctgactgtgcccccaggcatcaagaatgatgacaagaacatcctgaccacctggggagacaccatcttcagcatcgtgactggaggagaggagacccgggacaccatggacctggagagcagcagcagcgaggaggagaaggaggatgatgatgatgccctggtgcctgacagcaagcagggcaagccccagagcgccacagactacagcgaccctgacaacgtggatgatggcctcttcatcgtggacatccccaagaccaacaatgacaaggaggtgaatgctgagcaccacatcaagggcaagggccggggcgtgcaggagagcaagaggggcctggtgcaggacaagacagagctggaggatgagaaccaggagggcatgacagtgcacagctctgtgcacagcaacaacctgaacagcatgcctgctgctgagaagggcaaggacaccctgaagagcgcctatgatgacacagaaaatgacctgaagggagctgccatccacatcagcaagggcatgctgcacgaggagaagccaggagagcagatcctggagggcggcagcgagagcgagagcgcccagaaggctgctggcaaccagatgaatgacaggaagatccagcaggagagcctgggcagcgcccccctgatgggagatgaccaccccaatgccagccgggacagcgtggagggagatgccctggtgaatggagccaagctgcacaccctgtctgtggagcaccagcgggaggagctgaaggaggagctggtgctgaagacccagaaccagccccgcttcagcagcccagatgaaattgacctgccccgggagctggaggatgaggtgcccatcctgggcaggaacctgccctggcagcaggagagagatgtggccgccacagccagcaagcagatgtctgagaagatccggctgtctgagggggaggccaaggaggacagcctggatgaggagttcttccaccacaaggccatgcagggcacagaggtgggccagacagaccagacagacagcactggaggccctgccttcctgagcaaggtggaggaggatgactaccccagcgaggagctgctggaggatgaaaatgccatcaatgccaagaggagcaaggagaagaaccctggcaaccagggccggcagtttgatgtgaacctgcaggtgcctgacagagctgtgctgggcaccatccacccagaccctgagattgaggagagcaagcaggagacctccatgatcctggacagcgagaagaccagcgagacagctgccaagggcgtgaacacaggaggccgggagcccaacaccatggtggagaaggagcggcccctggccgacaagaaggcccagaggccctttgagaggagtgacttcagtgacagcatcaagatccagaccccagagctgggggaggtgttccagaacaaggacagcgactacctgaagaatgacaaccctgaggagcacctgaagaccagcggcctggccggggagcctgagggggagctgagcaaggaggaccatgaaaatacagagaagtacatgggcacagagagccagggcagcgctgctgctgagccagaagatgacagcttccactggaccccccacacctctgtggagcccggccacagcgacaagcgggaggacctgctgatcatcagcagcttcttcaaggagcagcagagcctgcagcgcttccagaagtacttcaacgtgcatgagctggaggccctgctgcaggagatgagcagcaagctgaagagcgcccagcaggagagcctgccctacaacatggagaaggtgctggacaaggtgttccgggccagcgagagccagatcctgagcattgctgagaagatgctggacaccagggtggccgagaacagagacctgggcatgaatgaaaacaacatctttgaggaggccgctgtgctggatgacatccaggacctgatctactttgtgcgctacaagcacagcacagctgaggagacagccaccctggtgatggccccacccctggaggagggcctgggcggggccatggaggagatgcagcccctgcacgaggacaacttcagccgggagaagacagctgagctgaatgtgcaggtgcctgaggagcccacccacctggaccagagggtcatcggggacacccacgccagcgaggtgtcccagaagcccaacacagagaaggacctggaccccggccctgtgaccacagaggacacccccatggatgccattgatgccaacaagcagcctgagacagctgctgaggagcccgcctctgtgacccccctggagaatgccatcctgctgatctacagcttcatgttctacctgaccaagagcctggtggccaccctgcctgatgatgtgcagcccggccctgacttctacggcctgccctggaagcctgtgttcatcacagccttcctgggcatcgccagctttgccatcttcctgtggaggacagtgctggtggtgagcaacacagtgtactacgtgacagagcagcagatcagcgagaagctgaagaccatcatgaaggagaacacagagctggtgcagaagctgagcaactatgagcagaagatcaaggagagcaagaagcacgtgcaggagaccaggaagcagaacatgatcctgagtgatgaggccatcaagtacaaggacaagatcaagaccctggagaagaaccaggagatcctggatgacacagccaagaacctgcgggtgatgctggagagcgagcgggagcagaatgtgaagaaccaggacctgatcagcgagaacaagaagagcattgagaagctgaaggatgtgatctccatgaatgccagcgagttcagcgaggtgcagatcgccctgaatgaggccaagctgtctgaggagaaggtgaagtctgagtgccaccgggtgcaggaggagaatgcccggctgaagaagaagaaggagcagctgcagcaggagattgaggactggagcaagctgcatgctgagctgtctgagcagatcaagagctttgagaagagccagaaggacctggaggtggccctgacccacaaggatgacaacatcaatgccctgaccaactgcatcacccagctgaacctgctggagtgtgagagcgagagcgagggccagaacaagggcggcaatgacagtgatgagctggccaacggggaggtgggcggggacagaaatgagaagatgaagaaccagatcaagcagatgatggatgtgtccaggacccagacagccatctctgtggtggaggaggacctgaagctgctgcagctgaagctgcgggcctctgtgtccaccaagtgcaacctggaggaccaggtgaagaagctggaggatgacaggaacagcctgcaggccgccaaggccggcctggaggatgagtgcaagaccctgcggcagaaggtggagatcctgaatgagctgtaccagcagaaggagatggccctgcagaagaagctgagccaggaggagtatgagcggcaggagcgggagcaccggctgtctgctgctgatgagaaggctgtgtctgctgctgaggaggtgaagacctacaagagaagaattgaggagatggaggatgagctgcagaagacagagaggagcttcaagaaccagatcgccacccatgagaagaaggcccacgagaactggctgaaggcccgggctgctgagcgggccatcgccgaggagaagcgggaggccgccaacctgcggcacaagctgctggagctgacccagaagatggccatgctgcaggaggagcccgtcatcgtgaagcccatgcctgggaagcccaacacccagaaccccccaagaagaggccccctgagccagaatggcagctttggccccagccctgtgtctggaggagagtgcagcccccccctgactgtggagccccctgtgcggcccctgagcgccaccctgaacagaagagacatgcccaggagtgaatttggatctgtggatggccccctgccccacccccgctggagcgctgaggccagcggcaagcccagccccagcgaccccggcagcggcacagccaccatgatgaacagcagcagccggggcagcagccccaccagggtgctggatgagggcaaggtgaacatggcccccaagggccccccacccttccctggggtgcccctgatgagcacccccatgggcggccctgtgcccccacccatccgctatggccccccaccccagctgtgtggccccttcggcccccggcccctgcccccacccttcggccctggcatgaggcctcccctgggcctgcgggagtttgcccctggggtgcccccaggaagaagagacctgcccctgcacccccggggcttcctgcccggccacgcccccttccggcccctgggcagcctgggcccccgggagtacttcatccctggcacccggctgcccccacccacccacggcccccaggagtacccacctcctcctgctgtgcgggacctgctgcccagcggcagcagagatgagcccccaccagccagccagagcaccagccaggactgcagccaggccctgaagcagagcccctag

SEQ ID NO: 260186 - DNA, 5724 bp, Artificial Sequence
  derived and/or modified sequence
atggctgctgcccctggcctgctggtgtggctgctggtgctgcggctgccctggagggtgcccggccagctggaccccagcacaggccgccgcttcagcgagcacaagctgtgtgctgatgatgagtgcagcatgctgatgtacagaggagaggccctggaggacttcaccggccctgactgccgctttgtgaacttcaagaagggggaccctgtgtatgtgtactacaagctggcccggggctggccagaggtgtgggccggctctgtgggccgcaccttcggctacttccccaaggacctgatccaggtggtgcatgagtacaccaaggaggagctgcaggtgcccacagatgaaacagactttgtgtgctttgatggcggcagagatgacttccacaactacaacgtggaggagctgctgggcttcctggagctgtacaacagcgctgccacagacagcgagaaggctgtggagaagaccctgcaggacatggagaagaaccctgagctgagcaaggagcgggagcctgagcctgagcctgtggaggccaacagcgaggagagtgacagcgtcttctctgaaaatacagaggacctgcaggagcagttcaccacccagaagcaccacagccacgccaacagccaggccaaccacgcccagggcgagcaggccagctttgagagctttgaggagatgctgcaggacaagctgaaggtgcctgagagcgagaacaacaagaccagcaacagcagccaggtgtccaatgagcaggacaagattgatgcctacaagctgctgaagaaggagatgaccctggacctgaagaccaagtttggcagcacagcagatgccctggtgtctgatgatgagaccacccggctggtgaccagcctggaggatgactttgatgaggagctggacacagagtactatgctgtgggcaaggaggatgaggagaaccaggaggactttgatgagctgcccctgctgaccttcacagatggagaggacatgaagaccccagccaagtctggagtggagaagtaccccacagacaaggagcagaacagcaatgaggaggacaaggtgcagctgactgtgcccccaggcatcaagaatgatgacaagaacatcctgaccacctggggagacaccatcttcagcatcgtgactggaggagaggagacccgggacaccatggacctggagagcagcagcagcgaggaggagaaggaggatgatgatgatgccctggtgcctgacagcaagcagggcaagccccagagcgccacagactacagcgaccctgacaacgtggatgatggcctcttcatcgtggacatccccaagaccaacaatgacaaggaggtgaatgctgagcaccacatcaagggcaagggccggggcgtgcaggagagcaagaggggcctggtgcaggacaagacagagctggaggatgagaaccaggagggcatgacagtgcacagctctgtgcacagcaacaacctgaacagcatgcctgctgctgagaagggcaaggacaccctgaagagcgcctatgatgacacagaaaatgacctgaagggagctgccatccacatcagcaagggcatgctgcacgaggagaagccaggagagcagatcctggagggcggcagcgagagcgagagcgcccagaaggctgctggcaaccagatgaatgacaggaagatccagcaggagagcctgggcagcgcccccctgatgggagatgaccaccccaatgccagccgggacagcgtggagggagatgccctggtgaatggagccaagctgcacaccctgtctgtggagcaccagcgggaggagctgaaggaggagctggtgctgaagacccagaaccagccccgcttcagcagcccagatgaaattgacctgccccgggagctggaggatgaggtgcccatcctgggcaggaacctgccctggcagcaggagagagatgtggccgccacagccagcaagcagatgtctgagaagatccggctgtctgagggggaggccaaggaggacagcctggatgaggagttcttccaccacaaggccatgcagggcacagaggtgggccagacagaccagacagacagcactggaggccctgccttcctgagcaaggtggaggaggatgactaccccagcgaggagctgctggaggatgaaaatgccatcaatgccaagaggagcaaggagaagaaccctggcaaccagggccggcagtttgatgtgaacctgcaggtgcctgacagagctgtgctgggcaccatccacccagaccctgagattgaggagagcaagcaggagacctccatgatcctggacagcgagaagaccagcgagacagctgccaagggcgtgaacacaggaggccgggagcccaacaccatggtggagaaggagcggcccctggccgacaagaaggcccagaggccctttgagaggagtgacttcagtgacagcatcaagatccagaccccagagctgggggaggtgttccagaacaaggacagcgactacctgaagaatgacaaccctgaggagcacctgaagaccagcggcctggccggggagcctgagggggagctgagcaaggaggaccatgaaaatacagagaagtacatgggcacagagagccagggcagcgctgctgctgagccagaagatgacagcttccactggaccccccacacctctgtggagcccggccacagcgacaagcgggaggacctgctgatcatcagcagcttcttcaaggagcagcagagcctgcagcgcttccagaagtacttcaacgtgcatgagctggaggccctgctgcaggagatgagcagcaagctgaagagcgcccagcaggagagcctgccctacaacatggagaaggtgctggacaaggtgttccgggccagcgagagccagatcctgagcattgctgagaagatgctggacaccagggtggccgagaacagagacctgggcatgaatgaaaacaacatctttgaggaggccgctgtgctggatgacatccaggacctgatctactttgtgcgctacaagcacagcacagctgaggagacagccaccctggtgatggccccacccctggaggagggcctgggcggggccatggaggagatgcagcccctgcacgaggacaacttcagccgggagaagacagctgagctgaatgtgcaggtgcctgaggagcccacccacctggaccagagggtcatcggggacacccacgccagcgaggtgtcccagaagcccaacacagagaaggacctggaccccggccctgtgaccacagaggacacccccatggatgccattgatgccaacaagcagcctgagacagctgctgaggagcccgcctctgtgacccccctggagaatgccatcctgctgatctacagcttcatgttctacctgaccaagagcctggtggccaccctgcctgatgatgtgcagcccggccctgacttctacggcctgccctggaagcctgtgttcatcacagccttcctgggcatcgccagctttgccatcttcctgtggaggacagtgctggtggtgaaggacagagtgtaccaggtgacagagcagcagatcagcgagaagctgaagaccatcatgaaggagaacacagagctggtgcagaagctgagcaactatgagcagaagatcaaggagagcaagaagcacgtgcaggagaccaggaagcagaacatgatcctgagtgatgaggccatcaagtacaaggacaagatcaagaccctggagaagaaccaggagatcctggatgacacagccaagaacctgcgggtgatgctggagagcgagcgggagcagaatgtgaagaaccaggacctgatcagcgagaacaagaagagcattgagaagctgaaggatgtgatctccatgaatgccagcgagttcagcgaggtgcagatcgccctgaatgaggccaagctgtctgaggagaaggtgaagtctgagtgccaccgggtgcaggaggagaatgcccggctgaagaagaagaaggagcagctgcagcaggagattgaggactggagcaagctgcatgctgagctgtctgagcagatcaagagctttgagaagagccagaaggacctggaggtggccctgacccacaaggatgacaacatcaatgccctgaccaactgcatcacccagctgaacctgctggagtgtgagagcgagagcgagggccagaacaagggcggcaatgacagtgatgagctggccaacggggaggtgggcggggacagaaatgagaagatgaagaaccagatcaagcagatgatggatgtgtccaggacccagacagccatctctgtggtggaggaggacctgaagctgctgcagctgaagctgcgggcctctgtgtccaccaagtgcaacctggaggaccaggtgaagaagctggaggatgacaggaacagcctgcaggccgccaaggccggcctggaggatgagtgcaagaccctgcggcagaaggtggagatcctgaatgagctgtaccagcagaaggagatggccctgcagaagaagctgagccaggaggagtatgagcggcaggagcgggagcaccggctgtctgctgctgatgagaaggctgtgtctgctgctgaggaggtgaagacctacaagagaagaattgaggagatggaggatgagctgcagaagacagagaggagcttcaagaaccagatcgccacccatgagaagaaggcccacgagaactggctgaaggcccgggctgctgagcgggccatcgccgaggagaagcgggaggccgccaacctgcggcacaagctgctggagctgacccagaagatggccatgctgcaggaggagcccgtcatcgtgaagcccatgcctgggaagcccaacacccagaaccccccaagaagaggccccctgagccagaatggcagctttggccccagccctgtgtctggaggagagtgcagcccccccctgactgtggagccccctgtgcggcccctgagcgccaccctgaacagaagagacatgcccaggagtgaatttggatctgtggatggccccctgccccacccccgctggagcgctgaggccagcggcaagcccagccccagcgaccccggcagcggcacagccaccatgatgaacagcagcagccggggcagcagccccaccagggtgctggatgagggcaaggtgaacatggcccccaagggccccccacccttccctggggtgcccctgatgagcacccccatgggcggccctgtgcccccacccatccgctatggccccccaccccagctgtgtggccccttcggcccccggcccctgcccccacccttcggccctggcatgaggcctcccctgggcctgcgggagtttgcccctggggtgcccccaggaagaagagacctgcccctgcacccccggggcttcctgcccggccacgcccccttccggcccctgggcagcctgggcccccgggagtacttcatccctggcacccggctgcccccacccacccacggcccccaggagtacccacctcctcctgctgtgcgggacctgctgcccagcggcagcagagatgagcccccaccagccagccagagcaccagccaggactgcagccaggccctgaagcagagcccctag

SEQ ID NO: 260187 - DNA, 8123 bp, Artificial Sequence
  derived and/or modified sequence
gaccacaacatggctgcggcgcctgggctgctcgtctggctgctcgtgctccggctgccctggcgggtgccgggccagctggaccccagcactggccggcggttctcggagcacaaactctgcgcggacgacgaatgcagcatgttaatgtaccgcggtgaggctcttgaagatttcacaggcccggattgtcgttttgtgaattttaaaaaaggtgatcctgtatatgtttactataaactggcaagaggatggcctgaagtttgggctggaagtgttggacgcacttttggatattttccaaaagatttaatccaggtagttcatgaatataccaaagaagagctacaagttccaacagatgagacggattttgtttgttttgatggaggaagagatgattttcataattataatgtagaagaacttttagggtttttggaactgtacaattctgcagctacagattctgagaaagctgtagaaaaaactttacaggatatggaaaaaaaccctgaattatctaaggaaagggaacctgaacctgaaccagtagaagccaactcagaggaaagtgatagtgtattctcagaaaacactgaggatcttcaggaacagtttacaactcagaagcaccactcccatgcaaacagccaagcaaatcatgctcagggagagcaggcttcatttgaatcttttgaagaaatgctgcaagataaactaaaagtgccagaaagtgaaaacaacaaaaccagcaatagttctcaggtctcaaatgaacaggataagattgatgcctataaacttttgaaaaaagaaatgactctagacttgaaaaccaaatttggctcaacagctgatgcacttgtatctgatgatgagacaaccagactcgttacttcattagaagatgattttgatgaggaattggatactgagtattatgcagttggaaaggaagatgaggagaaccaagaagactttgatgagttgccattacttacctttacagatggggaagatatgaaaactccagcaaagtctggcgttgagaaatatccaacagataaagagcagaattcaaatgaagaggacaaggttcagctaactgtgccccctggcatcaaaaatgatgataaaaatatactaacaacctggggggacactatcttctctattgtcacaggaggtgaagaaacaagagatacgatggatttagagagctctagttcagaggaagaaaaagaagatgatgatgatgcattagtcccagatagcaaacaggggaaaccacagtcagcaacagattatagtgaccctgacaatgtagatgatggtctttttattgtagacattcctaaaacaaataatgacaaagaagtaaacgcagaacatcacattaaaggaaaagggaggggagttcaggaatccaagaggggcctggtacaagataagacagaattagaggatgaaaatcaagaaggcatgactgtgcacagttctgttcacagcaataacctcaactctatgccagctgctgaaaagggtaaagacacattaaaatcagcttatgatgatacagaaaatgacctaaaaggagcagctattcatatctcaaaaggaatgctccacgaagaaaagcctggagagcagattttggaaggtggctcagagagtgaatctgcacagaaagctgcagggaatcaaatgaatgacagaaagattcaacaggaatccctgggtagtgcaccactcatgggagatgaccaccctaacgcatccagagacagtgtggagggagacgctttggtaaatggggccaaactgcacacgctttcagtggagcatcaacgtgaggaattgaaagaggaattagttcttaaaactcaaaaccaacctagattctcctctccagatgagattgatttgcccagagaactggaagacgaggttcccattctgggaagaaatcttccctggcaacaagaaagagatgtggctgccacagccagtaagcaaatgagtgagaagataaggctctctgagggagaagccaaagaggactccttggatgaagagttttttcatcacaaggcaatgcagggcacagaggtaggacagacagaccaaactgacagcacaggaggaccagctttcctttctaaagtagaagaggatgattatccctctgaagaactactagaggatgaaaacgctataaatgcaaaacggtctaaagaaaaaaaccctgggaatcagggcaggcagtttgatgttaatctgcaagtccctgacagagcagttttagggaccattcatccagatccagaaattgaagaaagcaagcaagaaactagtatgattttggatagcgaaaaaacaagtgagactgctgccaaaggggtcaacacaggaggcagggaaccaaatacaatggtggaaaaagaacgccctctggcagataagaaagcacagagaccatttgaacgaagtgacttttctgacagcataaaaattcagactccagaattaggtgaagtgtttcagaataaagattctgattatctgaagaacgacaaccctgaggaacatctgaagacctcagggcttgcaggggagcctgagggagaactctcaaaagaggaccatgagaacacagagaagtacatgggcacagaaagccaggggtctgctgctgcagaacctgaagatgactcgttccactggactccacatacaagtgtagagccagggcatagtgacaagagggaggacttacttatcataagcagcttctttaaagaacaacagtctttgcagcggttccagaagtactttaatgtccatgagctggaagccttgctacaagaaatgtcatcaaaactgaagtcagcgcagcaggagagcctgccctataatatggaaaaagtcctagataaggtcttccgtgcttctgagtcacaaattctgagcatagcagaaaaaatgcttgatactcgtgtggctgaaaatagagatctgggaatgaacgaaaataacatatttgaagaggctgcagtgcttgatgacattcaagacctcatctattttgtcaggtacaagcactccacagcagaggagacagccacactggtgatggcaccacctctagaggaaggcttgggtggagcaatggaagagatgcaaccactgcatgaagataatttctcacgagagaagacagcagaacttaatgtgcaggttcctgaagaacccacccacttggaccaacgtgtgattggggacactcatgcctcagaagtgtcacagaagccaaatactgagaaagacctggacccagggccagttacaacagaagacactcctatggatgctattgatgcaaacaagcaaccagagacagccgccgaagagccggcaagtgtcacacctttggaaaacgcaatccttctaatatattcattcatgttttatttaactaagtcgctagttgctacattgcctgatgatgttcagcctgggcctgatttttatggactgccatggaaacctgtatttatcactgccttcttgggaattgcttcgtttgccattttcttatggagaactgtccttgttgtgagtaatacagtatattatgtcacggaacagcaaatttctgagaagttgaagactatcatgaaagaaaatacagaacttgtacaaaaattgtcaaattatgaacagaagatcaaggaatcaaagaaacatgttcaggaaaccaggaaacaaaatatgattctctctgatgaagcaattaaatataaggataaaatcaagacacttgaaaaaaatcaggaaattctggatgacacagctaaaaatcttcgtgttatgctagaatctgagagagaacagaatgtcaagaatcaggacttgatatcagaaaacaagaaatctatagagaagttaaaggatgttatttcaatgaatgcctcagaattttcagaggttcagattgcacttaatgaagctaagcttagtgaagagaaggtgaagtctgaatgccatcgggttcaagaagaaaatgctaggcttaagaagaaaaaagagcagttgcagcaggaaatcgaagactggagtaaattacatgctgagctcagtgagcaaatcaaatcatttgagaagtctcagaaagatttggaagtagctcttactcacaaggatgataatattaatgctttgactaactgcattacacagttgaatctgttagagtgtgaatctgaatctgagggtcaaaataaaggtggaaatgattcagatgaattagcaaatggagaagtgggaggtgaccggaatgagaagatgaaaaatcaaattaagcagatgatggatgtctctcggacacagactgcaatatcggtagttgaagaggatctaaagcttttacagcttaagctaagagcctccgtgtccactaaatgtaacctggaagaccaggtaaagaaattggaagatgaccgcaactcactacaagctgccaaagctggactggaagatgaatgcaaaaccttgaggcagaaagtggagattctgaatgagctctatcagcagaaggagatggctttgcaaaagaaactgagtcaagaagagtatgaacggcaagaaagagagcacaggctgtcagctgcagatgaaaaggcagtttcggctgcagaggaagtaaaaacttacaagcggagaattgaagaaatggaggatgaattacagaagacagagcggtcatttaaaaaccagatcgctacccatgagaagaaagctcatgaaaactggctcaaagctcgtgctgcagaaagagctatagctgaagagaaaagggaagctgccaatttgagacacaaattattagaattaacacaaaagatggcaatgctgcaagaagaacctgtgattgtaaaaccaatgccaggaaaaccaaatacacaaaaccctccacggagaggtcctctgagccagaatggctcttttggcccatcccctgtgagtggtggagaatgctcccctccattgacagtggagccacctgtgagacctctctctgctactctcaatcgaagagatatgcctagaagtgaatttggatcagtggacgggcctctacctcatcctcgatggtcagctgaggcatctgggaaaccctctccttctgatccaggatctggtacagctaccatgatgaacagcagctcaagaggctcttcccctaccagggtactcgatgaaggcaaggttaatatggctccaaaagggccccctcctttcccaggagtccctctcatgagcacccccatgggaggccctgtaccaccacccattcgatatggaccaccacctcagctctgcggaccttttgggcctcggccacttcctccaccctttggccctggtatgcgtccaccactaggcttaagagaatttgcaccaggcgttccaccaggaagacgggacctgcctctccaccctcggggatttttacctggacacgcaccatttagacctttaggttcacttggcccaagagagtactttattcctggtacccgattaccacccccaacccatggtccccaggaatacccaccaccacctgctgtaagagacttactgccgtcaggctctagagatgagcctccacctgcctctcagagcactagccaggactgttcacaggctttaaaacagagcccataaaactatgacctctgaggtttcattggaaagaaagtgtactgtgcattatccattacagtaaaggatttcattggcttcaaaatccaaaagtttattttaaaaggtttgttgttagaactaagctgccttggcagtgtgcatttttgagccaaacaattcaaaaatgtcatttcttccctaaataaaaatcaccttttaagctagagcgtccttacaactttgaaatgtgcaataaagaatacctgtgttttagctaatgtagcatatgtaattgcaaaatgatttagaatgtcatgaaaaatatgaacatttcctgtggaaatgctttaagaacatgtatttccattatcctatttttagtgtacaccagctgaatacggagcaatggtgtttataagcgtttttttaaactatctggtcacaaagactgttacgctaaaaatgtttactaaaagatcactaaactatctcccctcttgctgaagttctttgtagtaatagctcataaaaatttgtttattaatatttcccaagtgtctgttgactcattggactgttatgaggcttgtgccatttggggaacatgtaaactcaggctcccagaactgaagatggtggctggtggcacacttccggctgctcctccgtcacctgtgaactctacaagtgacgtctttttatttcaaagaagtttatttcccacttgtatagcattcacatgctttctttacgatcctcattgtctatttgagaatggttttctgagagtgagtttacattagtagcaagagttgtttgacctgatgttccattgtttttaccattcctgtagaaaaagggtgcacaacagaaaaatgaaaatgatgtgtcatggccataaaagtatagaaatctttaaaaattttaaaatgtacagtcccttatctatctttcccattccttgccactgatttttgaggaatataataaaaagattggaagagtataatgccatgagaaagaatgatttaggactgtgagggttataacatgccctaggtcagcaaccaagggttgaaatcagttctgttttagggggaaatgggggcgacagatattattccaaaattaatattaattaatatttaaacgttggtgtttttatttaaaaatcagtaactaaccatctggaattgcaccatacttaaagtcttatccattactacactgtctttaaaacaatgtttctttaaatactctacaacgtttctaagaacgaacttcagacattttaattacagtaataatagcactccttttaaggagtttcagatccacactaaaactaaaatcataaaaggctgatacttttgtttgctgctaggctatattcttccattctttgaagtcctatgatgtaatatttttgaaacctagtgtatgtcttgtcactgttgtgatatttaatcgattaagaataccttgtaaaaaggagcaaaagcttcaatgtgaaacaattttctctctttatactaaacaactgaagatagatagtttagaaagataaggacctttgaaagaagacaactctgtcaaagttcataaggaatataaaaattcttcaggaaaagagaattcaatctatatgtcctcccgtttaatatcaagaatagaagaaattaagaggaaaactccacagaagagcataggccacttttagccatgtaaaaataagattaagtcacaaatacaacttttgaatttacctgtcaatatctctttaggacacaaaacaatgctgaagttaatataatttctaattttaaatgtcatttaagtgtagattatgccatctaggaaggtaagtaggaaaggtaaattaaatctatttttaaaattcaaaatattagagtatttttcccctctaaagccttttttggtgattattctgtatctgacataattgagaaactggtaagctgtaaagattccagtgtagcttctctgagaagttgtgagccagtccataactgcttcctcacatccatctgattgcaccatttctgcagcaaaccccaaagcagggtgccaatatgcagatggcatagggagtatcatccctcagccaaatcacttttccatctctaaagtttcatctattttggaagtcatctccaactaattgtgtctggatttagttgctaaaattgtcttatttatgaagcagcaatattcagcctgaaagcatttctgccatagttgttgtagttatatcgccaatggctgatttttttcattggaaagtaaatttaagtaattcgtgggatgtggtatattctgtgtcaacttcaagataatcactcattttctcgttatattcaggtctgaattaaagttaagttaatcacaca

SEQ ID NO: 260188 - DNA, 8142 bp, Artificial Sequence
  derived and/or modified sequence
accggctccccgaggtgaccacaacatggctgcggcgcctgggctgctcgtctggctgctcgtgctccggctgccctggcgggtgccgggccagctggaccccagcactggccggcggttctcggagcacaaactctgcgcggacgacgaatgcagcatgttaatgtaccgcggtgaggctcttgaagatttcacaggcccggattgtcgttttgtgaattttaaaaaaggtgatcctgtatatgtttactataaactggcaagaggatggcctgaagtttgggctggaagtgttggacgcacttttggatattttccaaaagatttaatccaggtagttcatgaatataccaaagaagagctacaagttccaacagatgagacggattttgtttgttttgatggaggaagagatgattttcataattataatgtagaagaacttttagggtttttggaactgtacaattctgcagctacagattctgagaaagctgtagaaaaaactttacaggatatggaaaaaaaccctgaattatctaaggaaagggaacctgaacctgaaccagtagaagccaactcagaggaaagtgatagtgtattctcagaaaacactgaggatcttcaggaacagtttacaactcagaagcaccactcccatgcaaacagccaagcaaatcatgctcagggagagcaggcttcatttgaatcttttgaagaaatgctgcaagataaactaaaagtgccagaaagtgaaaacaacaaaaccagcaatagttctcaggtctcaaatgaacaggataagattgatgcctataaacttttgaaaaaagaaatgactctagacttgaaaaccaaatttggctcaacagctgatgcacttgtatctgatgatgagacaaccagactcgttacttcattagaagatgattttgatgaggaattggatactgagtattatgcagttggaaaggaagatgaggagaaccaagaagactttgatgagttgccattacttacctttacagatggggaagatatgaaaactccagcaaagtctggcgttgagaaatatccaacagataaagagcagaattcaaatgaagaggacaaggttcagctaactgtgccccctggcatcaaaaatgatgataaaaatatactaacaacctggggggacactatcttctctattgtcacaggaggtgaagaaacaagagatacgatggatttagagagctctagttcagaggaagaaaaagaagatgatgatgatgcattagtcccagatagcaaacaggggaaaccacagtcagcaacagattatagtgaccctgacaatgtagatgatggtctttttattgtagacattcctaaaacaaataatgacaaagaagtaaacgcagaacatcacattaaaggaaaagggaggggagttcaggaatccaagaggggcctggtacaagataagacagaattagaggatgaaaatcaagaaggcatgactgtgcacagttctgttcacagcaataacctcaactctatgccagctgctgaaaagggtaaagacacattaaaatcagcttatgatgatacagaaaatgacctaaaaggagcagctattcatatctcaaaaggaatgctccacgaagaaaagcctggagagcagattttggaaggtggctcagagagtgaatctgcacagaaagctgcagggaatcaaatgaatgacagaaagattcaacaggaatccctgggtagtgcaccactcatgggagatgaccaccctaacgcatccagagacagtgtggagggagacgctttggtaaatggggccaaactgcacacgctttcagtggagcatcaacgtgaggaattgaaagaggaattagttcttaaaactcaaaaccaacctagattctcctctccagatgagattgatttgcccagagaactggaagacgaggttcccattctgggaagaaatcttccctggcaacaagaaagagatgtggctgccacagccagtaagcaaatgagtgagaagataaggctctctgagggagaagccaaagaggactccttggatgaagagttttttcatcacaaggcaatgcagggcacagaggtaggacagacagaccaaactgacagcacaggaggaccagctttcctttctaaagtagaagaggatgattatccctctgaagaactactagaggatgaaaacgctataaatgcaaaacggtctaaagaaaaaaaccctgggaatcagggcaggcagtttgatgttaatctgcaagtccctgacagagcagttttagggaccattcatccagatccagaaattgaagaaagcaagcaagaaactagtatgattttggatagcgaaaaaacaagtgagactgctgccaaaggggtcaacacaggaggcagggaaccaaatacaatggtggaaaaagaacgccctctggcagataagaaagcacagagaccatttgaacgaagtgacttttctgacagcataaaaattcagactccagaattaggtgaagtgtttcagaataaagattctgattatctgaagaacgacaaccctgaggaacatctgaagacctcagggcttgcaggggagcctgagggagaactctcaaaagaggaccatgagaacacagagaagtacatgggcacagaaagccaggggtctgctgctgcagaacctgaagatgactcgttccactggactccacatacaagtgtagagccagggcatagtgacaagagggaggacttacttatcataagcagcttctttaaagaacaacagtctttgcagcggttccagaagtactttaatgtccatgagctggaagccttgctacaagaaatgtcatcaaaactgaagtcagcgcagcaggagagcctgccctataatatggaaaaagtcctagataaggtcttccgtgcttctgagtcacaaattctgagcatagcagaaaaaatgcttgatactcgtgtggctgaaaatagagatctgggaatgaacgaaaataacatatttgaagaggctgcagtgcttgatgacattcaagacctcatctattttgtcaggtacaagcactccacagcagaggagacagccacactggtgatggcaccacctctagaggaaggcttgggtggagcaatggaagagatgcaaccactgcatgaagataatttctcacgagagaagacagcagaacttaatgtgcaggttcctgaagaacccacccacttggaccaacgtgtgattggggacactcatgcctcagaagtgtcacagaagccaaatactgagaaagacctggacccagggccagttacaacagaagacactcctatggatgctattgatgcaaacaagcaaccagagacagccgccgaagagccggcaagtgtcacacctttggaaaacgcaatccttctaatatattcattcatgttttatttaactaagtcgctagttgctacattgcctgatgatgttcagcctgggcctgatttttatggactgccatggaaacctgtatttatcactgccttcttgggaattgcttcgtttgccattttcttatggagaactgtccttgttgtgaaggatagagtatatcaagtcacggaacagcaaatttctgagaagttgaagactatcatgaaagaaaatacagaacttgtacaaaaattgtcaaattatgaacagaagatcaaggaatcaaagaaacatgttcaggaaaccaggaaacaaaatatgattctctctgatgaagcaattaaatataaggataaaatcaagacacttgaaaaaaatcaggaaattctggatgacacagctaaaaatcttcgtgttatgctagaatctgagagagaacagaatgtcaagaatcaggacttgatatcagaaaacaagaaatctatagagaagttaaaggatgttatttcaatgaatgcctcagaattttcagaggttcagattgcacttaatgaagctaagcttagtgaagagaaggtgaagtctgaatgccatcgggttcaagaagaaaatgctaggcttaagaagaaaaaagagcagttgcagcaggaaatcgaagactggagtaaattacatgctgagctcagtgagcaaatcaaatcatttgagaagtctcagaaagatttggaagtagctcttactcacaaggatgataatattaatgctttgactaactgcattacacagttgaatctgttagagtgtgaatctgaatctgagggtcaaaataaaggtggaaatgattcagatgaattagcaaatggagaagtgggaggtgaccggaatgagaagatgaaaaatcaaattaagcagatgatggatgtctctcggacacagactgcaatatcggtagttgaagaggatctaaagcttttacagcttaagctaagagcctccgtgtccactaaatgtaacctggaagaccaggtaaagaaattggaagatgaccgcaactcactacaagctgccaaagctggactggaagatgaatgcaaaaccttgaggcagaaagtggagattctgaatgagctctatcagcagaaggagatggctttgcaaaagaaactgagtcaagaagagtatgaacggcaagaaagagagcacaggctgtcagctgcagatgaaaaggcagtttcggctgcagaggaagtaaaaacttacaagcggagaattgaagaaatggaggatgaattacagaagacagagcggtcatttaaaaaccagatcgctacccatgagaagaaagctcatgaaaactggctcaaagctcgtgctgcagaaagagctatagctgaagagaaaagggaagctgccaatttgagacacaaattattagaattaacacaaaagatggcaatgctgcaagaagaacctgtgattgtaaaaccaatgccaggaaaaccaaatacacaaaaccctccacggagaggtcctctgagccagaatggctcttttggcccatcccctgtgagtggtggagaatgctcccctccattgacagtggagccacctgtgagacctctctctgctactctcaatcgaagagatatgcctagaagtgaatttggatcagtggacgggcctctacctcatcctcgatggtcagctgaggcatctgggaaaccctctccttctgatccaggatctggtacagctaccatgatgaacagcagctcaagaggctcttcccctaccagggtactcgatgaaggcaaggttaatatggctccaaaagggccccctcctttcccaggagtccctctcatgagcacccccatgggaggccctgtaccaccacccattcgatatggaccaccacctcagctctgcggaccttttgggcctcggccacttcctccaccctttggccctggtatgcgtccaccactaggcttaagagaatttgcaccaggcgttccaccaggaagacgggacctgcctctccaccctcggggatttttacctggacacgcaccatttagacctttaggttcacttggcccaagagagtactttattcctggtacccgattaccacccccaacccatggtccccaggaatacccaccaccacctgctgtaagagacttactgccgtcaggctctagagatgagcctccacctgcctctcagagcactagccaggactgttcacaggctttaaaacagagcccataaaactatgacctctgaggtttcattggaaagaaagtgtactgtgcattatccattacagtaaaggatttcattggcttcaaaatccaaaagtttattttaaaaggtttgttgttagaactaagctgccttggcagtgtgcatttttgagccaaacaattcaaaaatgtcatttcttccctaaataaaaatcaccttttaagctagagcgtccttacaactttgaaatgtgcaataaagaatacctgtgttttagctaatgtagcatatgtaattgcaaaatgatttagaatgtcatgaaaaatatgaacatttcctgtggaaatgctttaagaacatgtatttccattatcctatttttagtgtacaccagctgaatacggagcaatggtgtttataagcgtttttttaaactatctggtcacaaagactgttacgctaaaaatgtttactaaaagatcactaaactatctcccctcttgctgaagttctttgtagtaatagctcataaaaatttgtttattaatatttcccaagtgtctgttgactcattggactgttatgaggcttgtgccatttggggaacatgtaaactcaggctcccagaactgaagatggtggctggtggcacacttccggctgctcctccgtcacctgtgaactctacaagtgacgtctttttatttcaaagaagtttatttcccacttgtatagcattcacatgctttctttacgatcctcattgtctatttgagaatggttttctgagagtgagtttacattagtagcaagagttgtttgacctgatgttccattgtttttaccattcctgtagaaaaagggtgcacaacagaaaaatgaaaatgatgtgtcatggccataaaagtatagaaatctttaaaaattttaaaatgtacagtcccttatctatctttcccattccttgccactgatttttgaggaatataataaaaagattggaagagtataatgccatgagaaagaatgatttaggactgtgagggttataacatgccctaggtcagcaaccaagggttgaaatcagttctgttttagggggaaatgggggcgacagatattattccaaaattaatattaattaatatttaaacgttggtgtttttatttaaaaatcagtaactaaccatctggaattgcaccatacttaaagtcttatccattactacactgtctttaaaacaatgtttctttaaatactctacaacgtttctaagaacgaacttcagacattttaattacagtaataatagcactccttttaaggagtttcagatccacactaaaactaaaatcataaaaggctgatacttttgtttgctgctaggctatattcttccattctttgaagtcctatgatgtaatatttttgaaacctagtgtatgtcttgtcactgttgtgatatttaatcgattaagaataccttgtaaaaaggagcaaaagcttcaatgtgaaacaattttctctctttatactaaacaactgaagatagatagtttagaaagataaggacctttgaaagaagacaactctgtcaaagttcataaggaatataaaaattcttcaggaaaagagaattcaatctatatgtcctcccgtttaatatcaagaatagaagaaattaagaggaaaactccacagaagagcataggccacttttagccatgtaaaaataagattaagtcacaaatacaacttttgaatttacctgtcaatatctctttaggacacaaaacaatgctgaagttaatataatttctaattttaaatgtcatttaagtgtagattatgccatctaggaaggtaagtaggaaaggtaaattaaatctatttttaaaattcaaaatattagagtatttttcccctctaaagccttttttggtgattattctgtatctgacataattgagaaactggtaagctgtaaagattccagtgtagcttctctgagaagttgtgagccagtccataactgcttcctcacatccatctgattgcaccatttctgcagcaaaccccaaagcagggtgccaatatgcagatggcatagggagtatcatccctcagccaaatcacttttccatctctaaagtttcatctattttggaagtcatctccaactaattgtgtctggatttagttgctaaaattgtcttatttatgaagcagcaatattcagcctgaaagcatttctgccatagttgttgtagttatatcgccaatggctgatttttttcattggaaagtaaatttaagtaattcgtgggatgtggtatattctgtgtcaacttcaagataatcactcattttctcgttatattcaggtctgaattaaagttaagttaatcacacagtg

SEQ ID NO: 260189 - DNA, 5724 bp, Artificial Sequence
  derived and/or modified sequence
atggccgccgcccccggcctgctggtgtggctgctggtgctgcggttgccctggagagtaccagggcagctcgaccccagtactggaaggaggtttagcgagcacaagttatgcgccgatgacgagtgctctatgctcatgtacaggggggaagctctggaagactttacaggccccgattgtagattcgtgaattttaaaaaaggagatcctgtttatgtctattacaaattagcaagaggttggcccgaggtgtgggctggttcagtggggaggacattcgggtatttccctaaggatctgattcaggtagtgcatgagtacaccaaagaagaactgcaggtgcctacagacgagacggattttgtgtgtttcgatggggggcgggacgacttccataactataatgtggaagagttgttaggcttcttagaactgtacaatagcgctgccacagactccgaaaaggcggttgagaagacactccaagacatggagaagaatcctgaactgtcaaaagaacgcgaacccgagcccgagccagtcgaggcaaattcggaggaatctgattccgtctttagcgagaatacagaggatttacaggagcagttcacaactcagaaacatcatagtcacgcaaacagccaggcgaatcatgctcagggcgaacaggcctcttttgaatctttcgaagagatgctgcaggacaaattgaaagtgccagaatccgagaataacaagacgtcaaacagcagccaggtgtctaacgagcaggacaagatcgacgcgtataagctattgaaaaaggagatgaccctagacctcaagaccaagtttgggagtacggccgatgccctggtgagcgatgacgagacaactaggctcgtgacgtccctcgaagacgattttgatgaagaacttgatacagagtactatgccgtagggaaagaggatgaagaaaatcaggaagatttcgatgaactacccctgctgacctttactgacggtgaagacatgaaaactcccgccaagtccggggtagaaaagtaccccacagacaaggagcagaactctaacgaggaggataaagtgcagctgacagtgccccctggcatcaaaaatgacgacaagaatatcctgacaacatggggagatactatcttctcaattgtgaccggcggagaagaaacacgggacactatggacctcgagtctagcagcagtgaggaggaaaaagaggacgacgatgacgcactggtgcccgattccaagcagggcaaacctcagagcgccacggattacagcgatcccgacaacgtagatgacggcttgttcattgttgatatccctaaaacaaacaatgataaggaagtaaacgctgaacaccacattaaaggaaaaggaagaggggtccaagaatcaaaacggggtttggtgcaggataaaactgaactggaggatgagaatcaggaggggatgacagttcactcctccgtgcacagcaataatctcaactcgatgccagccgctgagaaaggcaaagataccttaaagtccgcctacgatgacactgaaaacgatctgaagggagctgccattcacatttccaaagggatgttacacgaagagaaacctggagagcagatcttggaaggagggtccgaatcggagagtgcacagaaggctgccgggaaccagatgaacgataggaaaattcaacaagaaagcctaggaagcgctcccctgatgggggacgatcatccaaacgcctccagagattctgtagagggagatgcgctagttaatggcgccaaacttcataccttaagcgtggagcaccagagagaggagctgaaggaagaactagttctgaaaactcagaatcaaccaagattcagtagtccggacgagatagacttgccccgggaattggaggacgaggtcccaatccttgggcggaacctcccttggcagcaagaacgggacgtcgcagccactgccagcaaacagatgtccgagaagattcggctgtccgagggcgaggccaaagaggacagcctcgacgaggagttcttccaccacaaggccatgcaggggaccgaggtcgggcaaacagatcaaactgatagcaccggaggaccagcctttttatctaaggtcgaggaagatgactatcctagcgaggaactcctcgaggacgagaacgccataaacgcgaaaagatcgaaagagaagaacccgggtaaccagggcagacagtttgatgtcaatttacaggtgcctgatagggctgtgctcggaactatccatcccgatcccgagatagaagaaagcaagcaggagacttctatgatcctcgacagcgagaagacctcagaaacagccgcgaagggggtaaacactggcggacgggagcctaacaccatggtcgagaaggagcgccctctcgcggataagaaagcgcagagaccttttgagcggagcgacttttcggatagtattaagatccagacacctgagctaggcgaagtcttccagaacaaggatagcgattatctgaagaatgacaatccagaggagcacttgaaaacttccggcctggctggagagcccgaaggggaattaagcaaagaagaccacgaaaacacggaaaagtacatggggaccgagtcccagggttccgcagcggctgagccagaggacgattcttttcactggaccccgcataccagcgtggaacctggccacagcgataagagagaagacctgctaatcatatcatctttctttaaagagcaacaaagtctgcaacgctttcaaaaatacttcaatgtgcatgaattggaagcattgctccaagagatgtccagtaagctgaaatccgcgcaacaagagtcactcccgtataacatggagaaggtgctagataaagtgttccgggcctccgagagccagatcctgtccatcgccgagaaaatgttggatactcgagtggccgagaacagagacctcggcatgaatgaaaataatatttttgaagaagcggcagtgctggacgatatacaggacctaatttacttcgtgcgctataagcactcgacagcagaagagacggccacactggtgatggcaccaccactagaggagggactcgggggggcaatggaggaaatgcagccactgcacgaagataacttttctagagagaaaaccgccgaactgaatgtgcaggtccctgaagagcctacccacttggaccagcgcgtgattggagacacccacgcttccgaggtgtcccagaagcccaacacagagaaggatctggatccaggcccagttacgactgaggatacaccgatggatgcaatcgatgctaacaaacagccagagacagcagccgaagaacctgccagcgtgaccccgctcgagaacgctatcctgctaatatattcctttatgttttacctgaccaaaagtctcgtcgcaacgctgcccgacgacgtgcagcccggacccgacttctacggcctgccgtggaagcctgtattcatcaccgctttcttaggcatcgcatccttcgccatattcctgtggaggaccgtcctggtagtgtccaataccgtctattatgtgactgaacagcagatcagcgaaaaactcaagacaataatgaaggaaaacaccgagctggtgcagaaactgagcaactacgaacagaagatcaaagagagcaagaaacacgtccaggaaacgcgaaaacagaacatgatcctcagcgacgaggctattaagtataaagataaaatcaagactctcgaaaagaaccaggaaatcctggacgatactgccaaaaatctccgggtcatgctggaatctgagcgagaacaaaatgttaagaaccaggatctgatctccgagaacaagaagagcatcgaaaaactcaaagatgttatctccatgaacgcaagcgaattttctgaagtccaaatcgctctgaacgaggctaagctctcggaggaaaaagtgaagagcgaatgccatcgcgtccaggaggaaaatgctcggctgaaaaagaagaaagaacagctacagcaggagattgaagattggtcaaagctccatgccgagctctccgaacagataaagtcattcgagaagagccagaaagacttggaagttgctctcacccacaaggatgataatattaatgcactaactaattgtattactcaattgaatcttcttgagtgtgaatctgagtcagaggggcagaacaagggcggtaatgattccgatgaactggctaacggggaggttggcggagaccggaacgaaaagatgaaaaatcagattaaacagatgatggacgtgagccgcacccagactgcaatcagcgtggtcgaggaggacttgaagcttctccagctgaaactgagggctagcgtgtcgaccaagtgcaatttggaggatcaggtcaaaaagctcgaagatgaccgcaactctctgcaggcagcaaaagccgggctggaagatgaatgcaagacactgaggcagaaggtcgagatcttaaacgaactgtaccagcagaaggagatggctctccagaaaaagttgagccaggaggaatacgaacggcaggagagggagcatcggcttagcgccgctgacgagaaagcagtgtctgcagcagaagaagtgaaaacatataagaggagaattgaagaaatggaggacgaactacaaaagaccgaaagatcctttaagaaccaaatcgcaactcacgagaaaaaagcccacgagaactggttgaaagctcgcgctgccgagcgggctatagccgaagagaaacgagaggctgctaacttaaggcataagctcctcgaactgactcagaagatggctatgctgcaggaggagcctgtgattgttaagcccatgcccggcaagcctaacacccaaaatcctcccagacgagggccactcagtcaaaacggatccttcggaccctctcccgtgagtggaggcgagtgttccccgcccctgaccgttgaaccacccgttaggccactctccgctaccctgaatcggagagacatgccccgaagtgagttcggaagcgtagatggcccacttccgcatcctcgctggagtgccgaagcctcaggtaaaccgtccccttccgacccgggatcaggcacagctacgatgatgaattcttcaagccggggcagcagcccaaccagggtgctggatgagggcaaagtgaatatggccccaaaagggcccccgcccttcccaggtgttcctcttatgtcaacccccatgggtggacctgttccacctcctatccgctatggcccccctcctcagctgtgcggaccatttggaccccggcccctgccgccacccttcggccccgggatgcggcctcccttaggcctgagggagtttgctccaggcgtcccaccaggccggcgggacctgccactgcatccaagaggcttcctgcctggacacgctccatttcgaccgttgggctctctgggtccccgcgaatatttcatccctggtacaagactccctccccctacacacggacctcaagagtatccccctcctccggcagtgcgagacttactcccttctgggtctagggatgagccacctccggcctcccagtccactagtcaagactgctcgcaggctctcaaacagtccccgtag

SEQ ID NO: 260190 - DNA, 5724 bp, Artificial Sequence
  derived and/or modified sequence
atggccgccgcccccggcctgctggtgtggctgctggtgctgcggctaccctggcgagttcccggccagttagatccgtccactggtaggagattcagtgagcataagctgtgtgccgacgatgagtgttccatgctgatgtaccgcggggaagccctggaagatttcactggcccagattgccgcttcgttaattttaaaaaaggagacccggtctatgtttattataaactcgcccgcggctggccggaggtctgggccggctccgttgggcgtactttcgggtacttcccgaaggatttgattcaggtcgttcacgagtacacaaaggaagaacttcaggtgccaaccgatgagaccgacttcgtgtgttttgatggaggcagagatgacttccacaactataatgtggaagagctgttaggctttctggagttgtacaattccgctgctacagattctgagaaagccgtcgagaaaaccctacaggacatggagaaaaaccccgaactcagcaaagaaagggaacctgaacccgagccagtggaagccaacagcgaagagagcgactcagtctttagtgagaacacggaggacctgcaggaacagtttactactcagaaacatcacagccacgctaactcacaggcaaatcacgcccagggagaacaggccagctttgagtccttcgaggaaatgctccaggataaactcaaagtacctgagagcgaaaataataaaacaagcaacagctctcaggtgtctaacgaacaagacaaaatcgatgcctataaacttctcaagaaagagatgacattagatttgaagaccaaatttggcagcaccgctgatgccctcgtgtccgatgatgaaactactcggttagttacctccctggaggacgattttgacgaagaactggacacagaatactatgcagtgggtaaggaagacgaggaaaaccaagaggacttcgacgaattacctttgctcaccttcaccgatggggaggatatgaaaacccctgcaaaatctggagtcgaaaagtaccctacagacaaggagcagaactcaaatgaagaggacaaagtccagttgaccgtgcctcccggcatcaagaacgatgataagaacattctcaccacgtggggtgacaccattttctccattgttacaggcggagaggaaacacgggataccatggacctcgaatctagctccagtgaggaggaaaaagaggatgacgacgacgccctcgtaccggatagtaagcagggcaagcctcagagtgcaaccgactactccgacccagataacgtggacgatggactttttattgtcgacataccgaaaaccaataatgataaggaagtcaacgccgagcaccatattaaggggaagggccgcggagtgcaggagtcaaagcggggccttgttcaggacaagaccgagctggaggacgagaatcaggagggtatgacagtacattcttccgtccattctaataatctgaattccatgcccgccgctgagaagggtaaagacactctcaagtccgcatacgacgatacagagaacgatcttaagggggcggcaatccacatctcaaagggaatgctgcacgaagagaaacccggcgagcaaattctggagggcgggagcgaaagcgagagcgctcagaaggccgcggggaatcagatgaacgaccggaagatccagcaggagagcctggggagcgctcccctcatgggggatgaccaccccaatgccagtagggatagtgttgaaggcgacgcgctcgtcaacggggcaaaactgcacaccttgtccgttgagcaccagcgagaggaactgaaggaggaattagttttgaaaactcaaaatcagcctaggttctctagccccgacgagatcgatctacccagagaactcgaggacgaggtccctatcctaggccggaatttgccctggcagcaggagcgcgatgtggctgcaaccgcctcaaaacaaatgtctgaaaagatcagactgtctgagggggaagctaaggaggattcccttgatgaggagttcttccaccacaaggcgatgcaggggactgaagtcggccaaacagaccaaacagattctaccgggggccccgcattcctgtccaaggtggaggaggatgactaccctagcgaagagctattagaagacgagaatgctattaatgccaaacgcagcaaagagaagaatccaggcaaccaaggaagacagtttgacgtaaacttacaggttcccgatagggctgtgctcggtacgatccatcccgaccctgaaatcgaagagagcaagcaggaaacaagcatgattcttgattcagagaagacatcagagaccgctgcaaagggtgttaacacaggcggccgggagcctaatacaatggtggaaaaggagcgtcccctggctgacaaaaaagcacaaagaccctttgagcgtagcgatttctcagactcaattaagatccaaaccccagagctgggggaggtatttcagaataaggactcagactacctgaagaatgacaatccagaggaacacttgaagacctccggacttgctggggaacccgaaggcgagctcagcaaggaggaccatgagaatactgagaagtatatgggaactgagtcacagggatcagcagccgcagaaccggaggacgactccttccactggacaccccatacctcagtggagccaggtcactccgataagagggaagatttactcatcatatcgagtttctttaaagagcagcagagccttcagagattccagaagtattttaacgttcatgaactggaagccctgttgcaggagatgagtagcaagttgaaatcggcgcagcaagagtctctgccctacaatatggagaaggtcctggataaggtgttccgggcctccgagtcacagatcctctctatcgctgaaaagatgctggacacacgggtggctgaaaacagggacctcgggatgaatgaaaataatattttcgaagaggcggctgtattggatgacatacaggatctgatctatttcgttcggtataagcatagtactgccgaagaaacggccactctcgtcatggccccccctctagaagaagggttgggcggagccatggaggagatgcagccactacatgaagacaatttctcccgcgaaaagacggccgagctcaatgttcaggtgccagaggagccaactcatctggaccaaagagtcatcggcgacactcacgcttcagaagtctcccagaaacccaatactgaaaaggatctggaccccggtcccgtgactaccgaggatacgcctatggatgccattgatgccaacaagcagcccgaaaccgccgcagaggaaccggcctctgtcacacccctggagaatgctattttgctgatatacagctttatgttctatttgacaaaatcactcgtggccaccttgccagatgacgtgcagccagggcccgatttctacggcttaccctggaagcccgtgtttatcactgcattccttgggattgccagcttcgctatctttctttggcgtaccgtcctcgtggtgaaagaccgagtttatcaagtaaccgaacagcagatttctgaaaagctgaaaactatcatgaaagagaacactgagctggtgcaaaagctgtccaattatgagcagaaaattaaagaaagcaaaaagcatgttcaggaaacgcgcaaacagaacatgattctttccgacgaggccattaagtacaaggacaagataaagaccctcgaaaagaaccaggaaatacttgacgataccgcaaaaaacctcagagtcatgctggaaagcgaacgcgaacagaatgtgaagaaccaggacctgatttcagagaacaagaaaagcatcgagaaactcaaggacgtgatttcgatgaacgccagcgagttttcggaagtccagatcgctttgaacgaggcaaagcttagcgaggagaaagtgaagagtgaatgccaccgggtacaagaggaaaatgccagactaaaaaagaaaaaggaacagttacagcaggagattgaggactggagtaagcttcatgctgagctgagcgagcagatcaaatcatttgagaaaagccagaaagacctggaggtggcgctgacccacaaggatgacaacattaatgcactgacaaactgtattacccagctgaacctactggaatgtgaatcggaaagcgaaggccagaataaaggtgggaatgattcagatgagctggcaaatggtgaggtgggcggtgatagaaacgagaagatgaagaatcagattaaacagatgatggatgtttcaagaacacaaactgcgatctccgtggtggaagaagaccttaagcttctacagcttaagttacgcgcaagcgtatccacgaaatgcaacctagaggatcaggtgaagaagctcgaggatgataggaattcactacaggcagccaaggccggcctggaagacgaatgcaagactcttcgtcagaaagtcgagatcctgaacgaactttatcaacagaaagaaatggccttgcagaagaagctgagccaggaagaatacgaacggcaggagagagaacatcgattgagcgcggccgacgagaaggcagtgagcgctgccgaggaagtaaaaacttacaagagacgtatagaagagatggaagatgaattgcaaaaaactgagaggtccttcaagaatcagattgccacgcacgagaaaaaggcccatgaaaactggttgaaggcaagggccgccgagcgggccattgcagaggagaagcgggaggctgcgaatttgagacataagttacttgagcttacccagaagatggctatgttacaggaggagcccgtcatcgtcaagcctatgcccggaaagcctaatacgcaaaacccaccgcgccggggtcccctttcacaaaatggcagctttggacctagccccgtcagtggtggggagtgtagccccccactaactgttgagcctcccgtgcggcccctcagcgcaaccctgaaccgcagagatatgccgaggtctgagtttgggagcgtggatggcccactgcctcatccgaggtggagtgctgaggcctcgggcaaaccctcgccgtccgatccaggatcaggaacagccaccatgatgaattcgtcttctcgcggctcgtctcctacaagggtgctcgacgaggggaaagtgaacatggccccaaagggaccgccccctttccccggagtccccttgatgtccacccccatgggcggccctgtcccacccccaattaggtatgggcccccacctcagctctgcggcccattcgggccacggcccttacctccaccctttggtcctggcatgagaccacccctcgggcttcgagagttcgctcctggagtgcctcctggcagaagggacctccctcttcacccccggggcttcctccccggccatgcgccattccgtcctttgggcagcttaggcccgcgagaatacttcataccggggactagactgcccccaccaacccacggaccgcaggaatacccccccccacctgccgtgcgagacctgctaccaagtggaagtcgggatgagccaccgcccgcaagccagagtacctcgcaggattgctctcaagccttgaagcagtctccttag

SEQ ID NO: 260191 - DNA, 5723 bp, Artificial Sequence
  derived and/or modified sequence
atggcagccgctcccggactgctggtatggctgctggtcctgcggttaccatggagagtacctgggcaactggacccttctaccggtcgacgcttctccgaacacaagctgtgcgccgacgatgagtgttctatgctgatgtatcgcggagaggcactagaggactttactggacctgattgccgctttgtgaattttaagaagggagaccccgtttacgtatattataaactcgctaggggctggccggaggtctgggctgggtcagtcggccgaacctttggctacttcccaaaagatcttatacaggtcgtgcacgaatataccaaagaggaattgcaggttccgacagacgagactgactttgtgtgttttgatggtgggagggacgactttcataactataacgtggaggagctcctgggatttcttgaattgtataactccgccgctaccgacagtgagaaggctgtggaaaaaaccctgcaggatatggagaaaaaccctgagctttccaaagagcgggagccagagcccgagcccgtcgaggccaactccgaggagtcagactctgtcttcagcgagaacaccgaggacctgcaggaacagtttacaactcaaaaacatcattcccatgcgaacagccaggcgaatcacgctcagggggagcaggccagcttcgagagcttcgaagagatgctgcaagacaagttgaaagtccccgaatctgagaacaataagacgtcaaatagttctcaagtttccaatgagcaggacaaaatcgatgcatacaaactgctgaagaaagaaatgacgctcgatttgaagactaagttcgggagcaccgcagatgctttagtttcagatgatgagacgacgagactcgttacaagcctggaggatgattttgatgaggaactggatacggagtattacgctgtggggaaggaggacgaagagaatcaggaggattttgatgaactgccactactgacctttaccgatggagaagacatgaagacccccgcaaaaagcggagtggaaaaataccctactgacaaggagcagaactccaatgaagaggacaaggtgcagctcaccgtccccccaggaatcaagaatgatgataaaaacatccttaccacatggggagatacaatcttctccatcgtgacgggtggtgaggaaacccgggatactatggaccttgagtcttctagtagcgaggaagaaaaagaggacgacgacgacgctctagttccggacagcaaacaaggcaagccacagagcgcaacggactacagtgatcctgataatgtggacgacggtctgtttatagtggatatccctaagacaaacaacgataaagaagtcaatgccgaacaccacataaagggaaaggggagaggtgtgcaagaaagcaagcgcggtttggtccaggacaagacggaactagaggatgagaatcaagaaggcatgacagtccactcctcagtccactcaaacaacctcaactcaatgcccgctgcggagaaagggaaggatacccttaaatccgcttatgacgacaccgagaatgacctgaagggtgccgctatccatatttcaaaaggaatgctgcatgaggagaaacctggggagcagattctcgagggcggaagtgagtccgagtcagcccagaaggccgcaggcaaccagatgaacgatcggaagatccagcaagaaagtctgggttctgctccactgatgggggatgatcacccaaacgcaagccgcgattctgtggaaggcgacgccctggtcaatggagccaagctgcatacactgagcgtagagcaccagagggaggaactgaaggaggagctggtgttgaagacccagaaccagcctcggttctcttcccctgacgagatcgatctgcccagagagctggaggacgaggttcctatcctcggtcggaacttgccctggcagcaggagcgagatgtggctgccactgcatccaagcagatgtctgagaagatacgcttgagcgagggtgaagccaaagaggattctttggatgaggaattcttccaccacaaggctatgcaaggaaccgaggtggggcaaacagatcagacagactcgactggagggcctgcattcctttctaaagtcgaagaggacgactatccctcagaggagctgctggaagacgagaacgccatcaatgccaaacgatcaaaagagaagaatcctggcaaccagggacggcagtttgacgtgaacttacaagtgcccgacagggcagtgctgggcactattcaccccgacccggagattgaggaaagcaaacaggagacaagcatgattttagattctgagaaaacaagcgaaaccgctgccaagggagtgaatacgggtgggcgagaacccaacaccatggtggaaaaggagagacctcttgctgacaagaaggctcagagacctttcgaaaggtccgactttagtgactccataaaaatacagactcccgagctgggtgaagtgttccagaataaggacagcgattacttgaaaaacgacaaccccgaggagcacttgaaaacatcggggctggcaggagagcccgagggtgaactctccaaggaagatcatgaaaatacagaaaagtacatgggcaccgagagccagggaagtgcagcagccgaacccgaggacgacagttttcactggaccccacatactagtgtggaaccagggcactctgataaaagagaagacctgttgataatttcgtcattttttaaggagcaacaaagcctccagcggtttcagaagtactttaacgtccacgaactggaggcgctacttcaggaaatgtcctcgaagttgaagtccgctcagcaggagagtcttccctataatatggagaaggttttggacaaggtatttagggcatctgagagccagattctcagtatcgctgagaaaatgctcgacacgcgagtggccgaaaaccgcgacctgggtatgaatgagaacaatatcttcgaggaggccgctgttcttgacgatatacaagatctaatctattttgtgcgatacaaacactcaaccgcagaagagaccgctactctggtgatggcaccacccctcgaggagggcctcgggggagccatggaggaaatgcaacccttacatgaggataacttctccagggagaaaacagctgaactgaacgtccaggtgcctgaggaaccgacgcatttggaccagcgcgtgatcggtgacacacacgcctcagaggtgtctcaaaaaccaaatacggaaaaagatcttgaccccggacctgtaactaccgaggatacccccatggatgccattgatgccaacaagcagccagaaacggccgctgaggagcccgcttcagtgaccccactagaaaatgcaattctattgatttatagttttatgttttacttaactaaatcattagtagccactctacctgacgatgttcaacctgggccagatttctatggcttgccttggaagccagtattcataacagcgttcctgggcattgcaagcttcgctattttcttgtggagaacagttctagtggtgagcaacactgtctattacgtgacggagcagcaaataagcgagaaactgaagacaattatgaaagagaatacagaattggtacaaaagctcagcaattacgagcagaaaattaaggaatccaaaaagcatgtccaggaaacaagaaagcaaaacatgattctgtctgacgaggcaataaagtacaaggataagatcaaaaccctcgagaagaaccaggagatcctcgacgataccgcaaaaaatttacgagtgatgctggaatctgagcgagaacagaatgtcaagaaccaggatttgatatctgagaataaaaagtccatagaaaaactgaaggacgttatcagcatgaacgcttctgagttctccgaggtccagattgcactcaacgaggcaaagttgtctgaagaaaaggtgaagagcgagtgtcatagagtgcaggaagagaacgcgagactgaaaaagaaaaaggagcagctgcagcaagagattgaagattggagcaagctgcatgcagagctttcagaacagataaaatccttcgagaaaagccagaaagatcttgaggtggcgctgactcataaggacgataatataaacgccctgacgaactgtataacccagcttaatttactcgagtgtgaaagcgagagcgagggccagaataaaggtgggaacgatagcgacgagctggcaaacggagaggtgggtggcgacagaaacgagaagatgaaaaatcagattaagcaaatgatggacgtaagccgcactcagacggcaatcagtgttgtggaagaggatctgaagcttctccagctgaaactccgggcaagcgtttccacgaaatgcaatctggaggaccaggtgaagaaacttgaggatgacagaaatagtctccaggcagccaaggcaggactggaagatgaatgcaaaacattgcgccaaaaggtggaaatactcaatgagttgtatcagcagaaagagatggcactccagaagaagcttagtcaggaggagtatgaaagacaggagcgggagcatcggctgtcggcggctgacgaaaaggctgtgtccgctgctgaggaagtcaagacatataagagaagaattgaagagatggaggatgagctgcagaagaccgaacggtcttttaagaaccaaattgctacacatgagaaaaaggctcacgaaaattggcttaaggctagggccgctgagcgggcaattgccgaagagaaacgagaggctgcaaatctgagacataagcttctggagctgactcagaagatggccatgcttcaggaagaacctgtgatcgtcaaaccaatgcctggcaaacctaacactcagaacccaccccgtcgtggccctctgagtcagaacgggtcctttggaccatcccctgtgtccgggggagagtgctcccccccattgactgtagaaccaccggtgagacctttaagtgccacactgaatagaagagacatgcctcggagcgaattcggatcagtggacgggcctctgccacatcctcgctggtctgcggaagcctcaggtaagccaagccccagcgatcctgggagcggcaccgcaacaatgatgaattcaagttctcgcggttctagccctactcgagtgttggacgaaggtaaggtgaacatggcaccaaaggggccacccccattccctggagtcccattgatgtcaacacctatgggaggtccagtgcctcctcccatccgatacgggcctccgcctcaactttgtgggccattcggccctaggccgttacctcccccattcgggcctgggatgcgacctcctctcggcttgagagaattcgccccaggcgtacccccagggcgacgtgatctacctttacacccgcgaggctttctgcctggacacgctccatttaggcctcttgggtcacttgggccaagggagtatttcatacccggaacaagattacctcccccaacacacggaccgcaagagtaccctcctcctcctgcagtgagggatctcctgccaagcggatccagggacgaacctccacccgcttctcagagcacaagccaagactgtagccaggctctgaagcagtcccccta

SEQ ID NO: 260192 - DNA, 5723 bp, Artificial Sequence
  derived and/or modified sequence
atggctgccgctcccggtttacttgtctggctgctcgtgctgcggttgccatggagagttccaggtcagctggatccaagcactgggaggaggtttagtgaacataagctgtgtgctgacgatgagtgctccatgctaatgtatcgcggtgaggccttagaggatttcaccgggcctgactgtagattcgtgaacttcaaaaagggcgacccggtctacgtgtattacaagctggcacggggttggccggaagtgtgggcaggttcagtaggtagaaccttcggctacttccctaaagatctgatacaggtagtccacgaatatacgaaggaagagctgcaggtccccacagatgaaacagacttcgtctgttttgatgggggacgtgacgattttcacaactacaatgtggaggagctactaggctttttagagctgtataattcagctgctacggacagcgaaaaagccgtggagaaaacgctgcaggatatggagaagaaccccgagttgtcaaaagagcgcgagccagaacccgaacccgtggaagcaaatagtgaagaatcggatagtgtgttcagtgagaacaccgaggacctacaagagcagttcaccacacagaagcaccactcacacgctaatagccaagccaatcatgctcagggagagcaggcaagcttcgagtcttttgaggaaatgctgcaagacaaactcaaagtgcccgagtccgaaaataacaagacttccaattcttcacaggtgagcaatgagcaggataagatcgacgcatacaaactactaaagaaagaaatgactcttgatctcaagaccaaattcggatccactgctgatgcactggtgtccgacgatgagacaacgaggcttgtaaccagtctagaggatgacttcgatgaagagctggacacagagtattatgccgtgggaaaagaggatgaggagaaccaagaggactttgacgaactgcccctgctcactttcactgacggggaggacatgaagactccggctaagtctggcgtcgaaaaatatcccacagacaaggaacagaattctaacgaggaggataaagtgcagctgaccgtgcctccagggattaaaaatgatgacaaaaacatccttaccacttggggcgacactattttctcgattgtgaccggtggcgaagagactagggacaccatggatctggagagctctagctctgaagaggagaaggaggatgacgacgatgctttagttccggattctaaacagggaaaacctcagtcggcgacagattattcagaccctgacaatgtcgatgatggacttttcatcgtagatattcctaaaacgaacaacgacaaggaggtcaacgccgagcaccacatcaaaggcaagggcagaggagtgcaagagtctaaaaggggactggtccaggacaagacagagttggaggacgaaaatcaggaagggatgaccgtccactctagtgtgcattctaacaaccttaacagtatgccggcagctgaaaagggcaaggatactctgaaatctgcctacgatgatactgagaatgacctgaaaggagcagccatacacatcagcaagggcatgctacacgaggagaagcctggggaacagatcctcgaaggcggatccgagagcgagagcgctcaaaaggcggctggaaaccagatgaacgaccggaagattcaacaagaatcactggggagcgcacctctgatgggggacgaccacccgaatgcctcacgcgactccgtggagggcgatgccctagtgaacggagccaaacttcataccctgagcgtggagcatcaacgagaggagctcaaggaagagttagtgctgaaaacacaaaatcagcctcggtttagcagtcccgacgaaattgacctgccaagggaactggaggatgaagtgcctattctggggagaaatttaccttggcagcaggagcgcgatgtggcagcaactgcatcaaaacagatgtctgagaagattagactatccgaaggcgaagctaaggaagatagcctagacgaggaattcttccaccataaggcaatgcaaggaactgaggtgggtcagacagatcaaactgacagtacggggggtcccgctttcctctcaaaggtggaagaggacgattaccctagcgaggagctgctggaggacgaaaatgccattaatgccaaacgaagcaaagaaaaaaatcctggaaaccaggggaggcaattcgacgtgaatctgcaagtgcctgatcgggctgttctggggactattcaccccgatccggagatcgaggagtcaaagcaggaaacttccatgatcctggattcggagaaaaccagcgaaacagccgcaaagggagtaaatacgggagggagagagccaaacaccatggttgaaaaagagagaccgttggccgataagaaggcccagaggccctttgaaaggagcgatttttccgatagcataaagatccagacccccgaactgggtgaggtttttcagaataaagattccgactatcttaaaaacgataaccctgaggaacaccttaaaaccagtgggctagctggggaaccggaaggagaactaagtaaggaggatcacgaaaataccgaaaagtacatgggcacagaatctcaggggtcagcggctgcggagccagaagatgatagctttcactggactcctcacaccagcgtagaacctgggcacagcgacaaacgtgaggatctcctcattatctcatctttctttaaagagcagcagtccctgcagcgcttccagaaatactttaacgtccacgaacttgaggcactgctgcaggaaatgtcctccaagctgaaatcagcccagcaggagtcccttccatacaacatggagaaggtcctggataaagtattcagggcaagcgagagccagattctctctattgctgagaagatgctggacactcgtgtagcagagaatagggacctgggaatgaacgaaaataacatcttcgaagaggccgctgttctggacgatattcaggacttgatttacttcgtacgctataagcatagtacggcagaggaaaccgccactttagtgatggctccccctcttgaggagggactcggaggagctatggaggagatgcagccactgcatgaggataacttttcgcgggagaagactgcagaactaaacgttcaagtgccagaagagccaacccatctcgaccaacgcgtgatcggcgacactcacgctagtgaagttagccagaagccgaacacagaaaaagacctggacccaggaccagtcactactgaagatactcctatggacgctattgatgctaacaaacaacccgagactgctgcggaggaaccggctagtgtgactccccttgagaacgccattttgctgatctatagcttcatgttttatctcacgaaaagccttgtggccacactgcccgatgacgtgcaaccaggccctgatttctacggtctcccttggaaaccagtcttcattaccgcatttctgggtatcgctagctttgctatcttcctgtggcgaactgtgctggtggtgaaggaccgcgtctaccaggtcacagagcagcaaatcagcgaaaagcttaaaacaattatgaaagagaacacagagcttgttcagaagctgtccaactatgaacaaaagattaaggagtcaaagaagcacgtccaggagacacggaagcagaatatgatcctgtcagatgaagctattaaatacaaagataagataaaaacactcgagaagaaccaagagatactagacgataccgcaaaaaatctcagggtaatgttggaatctgagagggagcagaacgtgaaaaatcaggacctaatttcagagaacaagaaatctatagaaaagttgaaggacgtcatttctatgaacgcatcagaattctcagaggttcagattgcgctcaacgaagctaaactttctgaagaaaaggtcaagagcgaatgtcatcgggtgcaggaagagaacgcacggctcaaaaagaaaaaggaacagcttcagcaagaaatcgaagattggtcaaagctccacgccgagctctccgagcagatcaaatcattcgaaaaatcccagaaggatctggaggtggccttaacccataaggacgataacattaatgccctcaccaattgtattactcagctgaatctgctggagtgcgagagtgagagcgagggacaaaataaaggaggcaacgacagcgatgagctggctaatggagaagttggaggagacaggaacgaaaaaatgaaaaatcagatcaaacaaatgatggatgtgtccaggacacagactgctattagcgtcgttgaggaagaccttaaactgttgcaactgaagctccgagcctccgtatctaccaagtgcaatcttgaagatcaggtgaagaaattggaagatgacagaaactccttgcaggcagccaaggcaggactagaggatgagtgtaagacgttgagacagaaagtggagatcctgaacgaactctatcagcagaaggagatggccctacagaagaaactgtctcaggaggaatacgaacgccaggagcgtgagcacaggctgagcgccgctgatgagaaagcggtgtctgcagccgaagaagtgaagacatataagagacgaatagaagaaatggaggatgagttgcagaaaacagaacgaagctttaagaaccagatcgcaacccacgagaaaaaggctcatgaaaactggctgaaggcgagggctgcagagcgagcaatcgcggaagagaagcgtgaagctgcgaacctgcgccacaagctccttgaattgacccagaagatggcaatgctgcaggaggagcccgtgattgtgaagcctatgcctggaaagcccaatacacagaaccctccaagacgcggacccctcagtcaaaatggcagcttcgggccttccccagtttcaggaggggagtgtagccctccgctgacagtggagccacctgtccggccactttccgccaccctgaatagaagagacatgcctcgctctgagtttggcagtgtagatggccctctgcctcaccctagatggagcgctgaggcttctggcaaaccatccccgagtgacccaggcagcggcactgctaccatgatgaactctagtagccgaggctctagtcctactcgcgtactggacgaagggaaggtaaatatggccccaaagggccctcctccattccccggtgttcctttgatgagcacacccatgggcggacccgttccccctcctatccgctatggcccaccccctcagctgtgcggcccattcgggcctaggccactaccccctccatttgggccaggcatgaggcctcccttaggattacgggagttcgctccaggagttcctccagggaggcgggatctgcctctgcaccccagggggtttctgccagggcacgccccatttcggcctctcggcagcttgggacctagagagtacttcatacctgggactcgtctgcctcccccaactcatggaccccaggagtaccccccaccaccagccgttcgagatctgctcccaagtgggtcgagggatgagccccctccggcttctcagtccaccagccaggactgttcacaggctctcaagcagtcacctta

SEQ ID NO: 260193 - DNA, 5724 bp, Artificial Sequence
  derived and/or modified sequence
atggccgccgcccccggcctgctggtgtggctgctggtgctgagactgccctggagagtgcccggccagctggaccccagcaccggcagaagattcagcgagcacaagctgtgcgccgacgacgagtgcagcatgctgatgtacagaggcgaggccctggaggacttcaccggccccgactgcagattcgtgaacttcaagaagggcgaccccgtgtacgtgtactacaagctggccagaggctggcccgaggtgtgggccggcagcgtgggcagaaccttcggctacttccccaaggacctgatccaggtggtgcacgagtacaccaaggaggagctgcaggtgcccaccgacgagaccgacttcgtgtgcttcgacggcggcagagacgacttccacaactacaacgtggaggagctgctgggcttcctggagctgtacaacagcgccgccaccgacagcgagaaggccgtggagaagaccctgcaggacatggagaagaaccccgagctgagcaaggagagagagcccgagcccgagcccgtggaggccaacagcgaggagagcgacagcgtgttcagcgagaacaccgaggacctgcaggagcagttcaccacccagaagcaccacagccacgccaacagccaggccaaccacgcccagggcgagcaggccagcttcgagagcttcgaggagatgctgcaggacaagctgaaggtgcccgagagcgagaacaacaagaccagcaacagcagccaggtgagcaacgagcaggacaagatcgacgcctacaagctgctgaagaaggagatgaccctggacctgaagaccaagttcggcagcaccgccgacgccctggtgagcgacgacgagaccaccagactggtgaccagcctggaggacgacttcgacgaggagctggacaccgagtactacgccgtgggcaaggaggacgaggagaaccaggaggacttcgacgagctgcccctgctgaccttcaccgacggcgaggacatgaagacccccgccaagagcggcgtggagaagtaccccaccgacaaggagcagaacagcaacgaggaggacaaggtgcagctgaccgtgccccccggcatcaagaacgacgacaagaacatcctgaccacctggggcgacaccatcttcagcatcgtgaccggcggcgaggagaccagagacaccatggacctggagagcagcagcagcgaggaggagaaggaggacgacgacgacgccctggtgcccgacagcaagcagggcaagccccagagcgccaccgactacagcgaccccgacaacgtggacgacggcctgttcatcgtggacatccccaagaccaacaacgacaaggaggtgaacgccgagcaccacatcaagggcaagggcagaggcgtgcaggagagcaagagaggcctggtgcaggacaagaccgagctggaggacgagaaccaggagggcatgaccgtgcacagcagcgtgcacagcaacaacctgaacagcatgcccgccgccgagaagggcaaggacaccctgaagagcgcctacgacgacaccgagaacgacctgaagggcgccgccatccacatcagcaagggcatgctgcacgaggagaagcccggcgagcagatcctggagggcggcagcgagagcgagagcgcccagaaggccgccggcaaccagatgaacgacagaaagatccagcaggagagcctgggcagcgcccccctgatgggcgacgaccaccccaacgccagcagagacagcgtggagggcgacgccctggtgaacggcgccaagctgcacaccctgagcgtggagcaccagagagaggagctgaaggaggagctggtgctgaagacccagaaccagcccagattcagcagccccgacgagatcgacctgcccagagagctggaggacgaggtgcccatcctgggcagaaacctgccctggcagcaggagagagacgtggccgccaccgccagcaagcagatgagcgagaagatcagactgagcgagggcgaggccaaggaggacagcctggacgaggagttcttccaccacaaggccatgcagggcaccgaggtgggccagaccgaccagaccgacagcaccggcggccccgccttcctgagcaaggtggaggaggacgactaccccagcgaggagctgctggaggacgagaacgccatcaacgccaagagaagcaaggagaagaaccccggcaaccagggcagacagttcgacgtgaacctgcaggtgcccgacagagccgtgctgggcaccatccaccccgaccccgagatcgaggagagcaagcaggagaccagcatgatcctggacagcgagaagaccagcgagaccgccgccaagggcgtgaacaccggcggcagagagcccaacaccatggtggagaaggagagacccctggccgacaagaaggcccagagacccttcgagagaagcgacttcagcgacagcatcaagatccagacccccgagctgggcgaggtgttccagaacaaggacagcgactacctgaagaacgacaaccccgaggagcacctgaagaccagcggcctggccggcgagcccgagggcgagctgagcaaggaggaccacgagaacaccgagaagtacatgggcaccgagagccagggcagcgccgccgccgagcccgaggacgacagcttccactggaccccccacaccagcgtggagcccggccacagcgacaagagagaggacctgctgatcatcagcagcttcttcaaggagcagcagagcctgcagagattccagaagtacttcaacgtgcacgagctggaggccctgctgcaggagatgagcagcaagctgaagagcgcccagcaggagagcctgccctacaacatggagaaggtgctggacaaggtgttcagagccagcgagagccagatcctgagcatcgccgagaagatgctggacaccagagtggccgagaacagagacctgggcatgaacgagaacaacatcttcgaggaggccgccgtgctggacgacatccaggacctgatctacttcgtgagatacaagcacagcaccgccgaggagaccgccaccctggtgatggccccccccctggaggagggcctgggcggcgccatggaggagatgcagcccctgcacgaggacaacttcagcagagagaagaccgccgagctgaacgtgcaggtgcccgaggagcccacccacctggaccagagagtgatcggcgacacccacgccagcgaggtgagccagaagcccaacaccgagaaggacctggaccccggccccgtgaccaccgaggacacccccatggacgccatcgacgccaacaagcagcccgagaccgccgccgaggagcccgccagcgtgacccccctggagaacgccatcctgctgatctacagcttcatgttctacctgaccaagagcctggtggccaccctgcccgacgacgtgcagcccggccccgacttctacggcctgccctggaagcccgtgttcatcaccgccttcctgggcatcgccagcttcgccatcttcctgtggagaaccgtgctggtggtgagcaacaccgtgtactacgtgaccgagcagcagatcagcgagaagctgaagaccatcatgaaggagaacaccgagctggtgcagaagctgagcaactacgagcagaagatcaaggagagcaagaagcacgtgcaggagaccagaaagcagaacatgatcctgagcgacgaggccatcaagtacaaggacaagatcaagaccctggagaagaaccaggagatcctggacgacaccgccaagaacctgagagtgatgctggagagcgagagagagcagaacgtgaagaaccaggacctgatcagcgagaacaagaagagcatcgagaagctgaaggacgtgatcagcatgaacgccagcgagttcagcgaggtgcagatcgccctgaacgaggccaagctgagcgaggagaaggtgaagagcgagtgccacagagtgcaggaggagaacgccagactgaagaagaagaaggagcagctgcagcaggagatcgaggactggagcaagctgcacgccgagctgagcgagcagatcaagagcttcgagaagagccagaaggacctggaggtggccctgacccacaaggacgacaacatcaacgccctgaccaactgcatcacccagctgaacctgctggagtgcgagagcgagagcgagggccagaacaagggcggcaacgacagcgacgagctggccaacggcgaggtgggcggcgacagaaacgagaagatgaagaaccagatcaagcagatgatggacgtgagcagaacccagaccgccatcagcgtggtggaggaggacctgaagctgctgcagctgaagctgagagccagcgtgagcaccaagtgcaacctggaggaccaggtgaagaagctggaggacgacagaaacagcctgcaggccgccaaggccggcctggaggacgagtgcaagaccctgagacagaaggtggagatcctgaacgagctgtaccagcagaaggagatggccctgcagaagaagctgagccaggaggagtacgagagacaggagagagagcacagactgagcgccgccgacgagaaggccgtgagcgccgccgaggaggtgaagacctacaagagaagaatcgaggagatggaggacgagctgcagaagaccgagagaagcttcaagaaccagatcgccacccacgagaagaaggcccacgagaactggctgaaggccagagccgccgagagagccatcgccgaggagaagagagaggccgccaacctgagacacaagctgctggagctgacccagaagatggccatgctgcaggaggagcccgtgatcgtgaagcccatgcccggcaagcccaacacccagaacccccccagaagaggccccctgagccagaacggcagcttcggccccagccccgtgagcggcggcgagtgcagcccccccctgaccgtggagccccccgtgagacccctgagcgccaccctgaacagaagagacatgcccagaagcgagttcggcagcgtggacggccccctgccccaccccagatggagcgccgaggccagcggcaagcccagccccagcgaccccggcagcggcaccgccaccatgatgaacagcagcagcagaggcagcagccccaccagagtgctggacgagggcaaggtgaacatggcccccaagggccccccccccttccccggcgtgcccctgatgagcacccccatgggcggccccgtgcccccccccatcagatacggcccccccccccagctgtgcggccccttcggccccagacccctgcccccccccttcggccccggcatgagaccccccctgggcctgagagagttcgcccccggcgtgccccccggcagaagagacctgcccctgcaccccagaggcttcctgcccggccacgcccccttcagacccctgggcagcctgggccccagagagtacttcatccccggcaccagactgcccccccccacccacggcccccaggagtacccccccccccccgccgtgagagacctgctgcccagcggcagcagagacgagcccccccccgccagccagagcaccagccaggactgcagccaggccctgaagcagagcccctag

SEQ ID NO: 260194 - DNA, 5724 bp, Artificial Sequence
  derived and/or modified sequence
atggccgccgcccccggcctgctggtgtggctgctggtgctgagactgccctggagagtgcccggccagctggaccccagcaccggcagaagattcagcgagcacaagctgtgcgccgacgacgagtgcagcatgctgatgtacagaggcgaggccctggaggacttcaccggccccgactgcagattcgtgaacttcaagaagggcgaccccgtgtacgtgtactacaagctggccagaggctggcccgaggtgtgggccggcagcgtgggcagaaccttcggctacttccccaaggacctgatccaggtggtgcacgagtacaccaaggaggagctgcaggtgcccaccgacgagaccgacttcgtgtgcttcgacggcggcagagacgacttccacaactacaacgtggaggagctgctgggcttcctggagctgtacaacagcgccgccaccgacagcgagaaggccgtggagaagaccctgcaggacatggagaagaaccccgagctgagcaaggagagagagcccgagcccgagcccgtggaggccaacagcgaggagagcgacagcgtgttcagcgagaacaccgaggacctgcaggagcagttcaccacccagaagcaccacagccacgccaacagccaggccaaccacgcccagggcgagcaggccagcttcgagagcttcgaggagatgctgcaggacaagctgaaggtgcccgagagcgagaacaacaagaccagcaacagcagccaggtgagcaacgagcaggacaagatcgacgcctacaagctgctgaagaaggagatgaccctggacctgaagaccaagttcggcagcaccgccgacgccctggtgagcgacgacgagaccaccagactggtgaccagcctggaggacgacttcgacgaggagctggacaccgagtactacgccgtgggcaaggaggacgaggagaaccaggaggacttcgacgagctgcccctgctgaccttcaccgacggcgaggacatgaagacccccgccaagagcggcgtggagaagtaccccaccgacaaggagcagaacagcaacgaggaggacaaggtgcagctgaccgtgccccccggcatcaagaacgacgacaagaacatcctgaccacctggggcgacaccatcttcagcatcgtgaccggcggcgaggagaccagagacaccatggacctggagagcagcagcagcgaggaggagaaggaggacgacgacgacgccctggtgcccgacagcaagcagggcaagccccagagcgccaccgactacagcgaccccgacaacgtggacgacggcctgttcatcgtggacatccccaagaccaacaacgacaaggaggtgaacgccgagcaccacatcaagggcaagggcagaggcgtgcaggagagcaagagaggcctggtgcaggacaagaccgagctggaggacgagaaccaggagggcatgaccgtgcacagcagcgtgcacagcaacaacctgaacagcatgcccgccgccgagaagggcaaggacaccctgaagagcgcctacgacgacaccgagaacgacctgaagggcgccgccatccacatcagcaagggcatgctgcacgaggagaagcccggcgagcagatcctggagggcggcagcgagagcgagagcgcccagaaggccgccggcaaccagatgaacgacagaaagatccagcaggagagcctgggcagcgcccccctgatgggcgacgaccaccccaacgccagcagagacagcgtggagggcgacgccctggtgaacggcgccaagctgcacaccctgagcgtggagcaccagagagaggagctgaaggaggagctggtgctgaagacccagaaccagcccagattcagcagccccgacgagatcgacctgcccagagagctggaggacgaggtgcccatcctgggcagaaacctgccctggcagcaggagagagacgtggccgccaccgccagcaagcagatgagcgagaagatcagactgagcgagggcgaggccaaggaggacagcctggacgaggagttcttccaccacaaggccatgcagggcaccgaggtgggccagaccgaccagaccgacagcaccggcggccccgccttcctgagcaaggtggaggaggacgactaccccagcgaggagctgctggaggacgagaacgccatcaacgccaagagaagcaaggagaagaaccccggcaaccagggcagacagttcgacgtgaacctgcaggtgcccgacagagccgtgctgggcaccatccaccccgaccccgagatcgaggagagcaagcaggagaccagcatgatcctggacagcgagaagaccagcgagaccgccgccaagggcgtgaacaccggcggcagagagcccaacaccatggtggagaaggagagacccctggccgacaagaaggcccagagacccttcgagagaagcgacttcagcgacagcatcaagatccagacccccgagctgggcgaggtgttccagaacaaggacagcgactacctgaagaacgacaaccccgaggagcacctgaagaccagcggcctggccggcgagcccgagggcgagctgagcaaggaggaccacgagaacaccgagaagtacatgggcaccgagagccagggcagcgccgccgccgagcccgaggacgacagcttccactggaccccccacaccagcgtggagcccggccacagcgacaagagagaggacctgctgatcatcagcagcttcttcaaggagcagcagagcctgcagagattccagaagtacttcaacgtgcacgagctggaggccctgctgcaggagatgagcagcaagctgaagagcgcccagcaggagagcctgccctacaacatggagaaggtgctggacaaggtgttcagagccagcgagagccagatcctgagcatcgccgagaagatgctggacaccagagtggccgagaacagagacctgggcatgaacgagaacaacatcttcgaggaggccgccgtgctggacgacatccaggacctgatctacttcgtgagatacaagcacagcaccgccgaggagaccgccaccctggtgatggccccccccctggaggagggcctgggcggcgccatggaggagatgcagcccctgcacgaggacaacttcagcagagagaagaccgccgagctgaacgtgcaggtgcccgaggagcccacccacctggaccagagagtgatcggcgacacccacgccagcgaggtgagccagaagcccaacaccgagaaggacctggaccccggccccgtgaccaccgaggacacccccatggacgccatcgacgccaacaagcagcccgagaccgccgccgaggagcccgccagcgtgacccccctggagaacgccatcctgctgatctacagcttcatgttctacctgaccaagagcctggtggccaccctgcccgacgacgtgcagcccggccccgacttctacggcctgccctggaagcccgtgttcatcaccgccttcctgggcatcgccagcttcgccatcttcctgtggagaaccgtgctggtggtgaaggacagagtgtaccaggtgaccgagcagcagatcagcgagaagctgaagaccatcatgaaggagaacaccgagctggtgcagaagctgagcaactacgagcagaagatcaaggagagcaagaagcacgtgcaggagaccagaaagcagaacatgatcctgagcgacgaggccatcaagtacaaggacaagatcaagaccctggagaagaaccaggagatcctggacgacaccgccaagaacctgagagtgatgctggagagcgagagagagcagaacgtgaagaaccaggacctgatcagcgagaacaagaagagcatcgagaagctgaaggacgtgatcagcatgaacgccagcgagttcagcgaggtgcagatcgccctgaacgaggccaagctgagcgaggagaaggtgaagagcgagtgccacagagtgcaggaggagaacgccagactgaagaagaagaaggagcagctgcagcaggagatcgaggactggagcaagctgcacgccgagctgagcgagcagatcaagagcttcgagaagagccagaaggacctggaggtggccctgacccacaaggacgacaacatcaacgccctgaccaactgcatcacccagctgaacctgctggagtgcgagagcgagagcgagggccagaacaagggcggcaacgacagcgacgagctggccaacggcgaggtgggcggcgacagaaacgagaagatgaagaaccagatcaagcagatgatggacgtgagcagaacccagaccgccatcagcgtggtggaggaggacctgaagctgctgcagctgaagctgagagccagcgtgagcaccaagtgcaacctggaggaccaggtgaagaagctggaggacgacagaaacagcctgcaggccgccaaggccggcctggaggacgagtgcaagaccctgagacagaaggtggagatcctgaacgagctgtaccagcagaaggagatggccctgcagaagaagctgagccaggaggagtacgagagacaggagagagagcacagactgagcgccgccgacgagaaggccgtgagcgccgccgaggaggtgaagacctacaagagaagaatcgaggagatggaggacgagctgcagaagaccgagagaagcttcaagaaccagatcgccacccacgagaagaaggcccacgagaactggctgaaggccagagccgccgagagagccatcgccgaggagaagagagaggccgccaacctgagacacaagctgctggagctgacccagaagatggccatgctgcaggaggagcccgtgatcgtgaagcccatgcccggcaagcccaacacccagaacccccccagaagaggccccctgagccagaacggcagcttcggccccagccccgtgagcggcggcgagtgcagcccccccctgaccgtggagccccccgtgagacccctgagcgccaccctgaacagaagagacatgcccagaagcgagttcggcagcgtggacggccccctgccccaccccagatggagcgccgaggccagcggcaagcccagccccagcgaccccggcagcggcaccgccaccatgatgaacagcagcagcagaggcagcagccccaccagagtgctggacgagggcaaggtgaacatggcccccaagggccccccccccttccccggcgtgcccctgatgagcacccccatgggcggccccgtgcccccccccatcagatacggcccccccccccagctgtgcggccccttcggccccagacccctgcccccccccttcggccccggcatgagaccccccctgggcctgagagagttcgcccccggcgtgccccccggcagaagagacctgcccctgcaccccagaggcttcctgcccggccacgcccccttcagacccctgggcagcctgggccccagagagtacttcatccccggcaccagactgcccccccccacccacggcccccaggagtacccccccccccccgccgtgagagacctgctgcccagcggcagcagagacgagcccccccccgccagccagagcaccagccaggactgcagccaggccctgaagcagagcccctag

SEQ ID NO: 260195 - protein, 184 aa, Artificial Sequence
  derived and/or modified sequence
MSGARAAPGAAGNGAVRGLRVDGLPPLPKSLSGLLHSASGGGASGGWRHLERLYAQKSRIQDELSRGGPGGGGARAAALPAKPPNLDAALALLRKEMVGLRQLDMSLLCQLYSLYESIQEYKGACQAASSPDCTYALENGFFDEEEEYFQEQNSLHDRRDRGPPRDLSLPVSSLSSSDWILESI

SEQ ID NO: 260196 - DNA, 555 bp, Artificial Sequence
  derived and/or modified sequence
atgagcggcgccagagccgcccccggcgccgccggcaacggcgccgtgagaggcctgagagtggacggcctgccccccctgcccaagagcctgagcggcctgctgcacagcgccagcggcggcggcgccagcggcggctggagacacctggagagactgtacgcccagaagagcagaatccaggacgagctgagcagaggcggccccggcggcggcggcgccagagccgccgccctgcccgccaagccccccaacctggacgccgccctggccctgctgagaaaggagatggtgggcctgagacagctggacatgagcctgctgtgccagctgtacagcctgtacgagagcatccaggagtacaagggcgcctgccaggccgccagcagccccgactgcacctacgccctggagaacggcttcttcgacgaggaggaggagtacttccaggagcagaacagcctgcacgacagaagagacagaggcccccccagagacctgagcctgcccgtgagcagcctgagcagcagcgactggatcctggagagcatctag

SEQ ID NO: 260197 - DNA, 555 bp, Artificial Sequence
  derived and/or modified sequence
atgtcaggagcaagagccgcccccggagccgccggcaatggggcagtgcgcgggcttagagtcgacggcctaccccctttaccgaaatccctgtccgggctgttgcacagcgcctcagggggcggggcaagcgggggctggaggcacttggaacggctatatgcacagaaatccaggattcaggatgagctatccagaggggggccaggaggcggcggagctagagctgccgcgctgcctgctaaacctcccaatctggacgccgcattagcattgctgagaaaagaaatggtggggctgcgccagttggatatgagtcttttatgccagctgtacagtctttacgagtctatccaggaatacaagggggcctgccaggccgctagctctcccgactgtacatatgctttagagaacggctttttcgacgaggaggaggagtatttccaggaacagaacagcctgcacgatagaagggatcgtggtcccccccgggacctgagcttgcccgtgagctccttgtcaagctccgattggattttggagagcatctag

SEQ ID NO: 260198 - DNA, 1495 bp, Artificial Sequence
  derived and/or modified sequence
gcagcggggcaggcgcgtggccgggccgcggcgcgatgagtggggcccgggcggcgcccggggccgcgggcaacggcgcggtccgggggctgcgggtggacgggctgcccccgctgccaaagagcttgagcgggctgctgcactcggcgtcgggcggcggcgcgtctgggggctggcggcacctggagcggctgtacgcgcagaagtcgcgcatccaggacgagctgagccgcgggggcccgggcggcggcggggcccgggcggcagcgctgcccgccaagcctcccaacctggacgccgctctggcgctgctccgcaaagagatggttggtctccgccagctggacatgtccttgctctgccaactgtacagcctctacgagtcgattcaggagtacaagggggcatgccaggcagcctccagcccagactgcacttacgctctggagaacggcttcttcgatgaagaggaggaatatttccaggagcagaactccctgcacgacaggagggaccgaggccctcctcgggacttgtcactgcctgtctcctccctctccagcagcgactggattctggagtccatctagagggtcttgggagggatgtgactgttgggaagcccttcctactggacacgctgtcatcatttgctgcttctcttgcaagaaagcacctccgttgtggacggtcctcgggcacaggggatgagcgctaccagtttcatttgtaggcagggagttctccgcggatgcatggtggcagtctgctttgatggcagcagtttctgcttaggtgacctagaggtcctcagcagtatcctccacacctatttattgaggtgcacctgctggggattcataatgagaatataacaagaggatctcggtgaaaggccttagtgggtgttttgtgtgaggtggcttgtagctagctacttccttacagatggtagagtattccaatcctctttgtgttagggttcttgcttccagtttgggatgtattaaaaccaccatttcactgcttcccttcctcaatatgctctgcagcttttcttgctgtttaaacctctcgcctcagctttatttatttgtaagctgcattactaactgcccagtgattcggtgaaagctttttactgaaaaagttaacatttctagtcatcccaatcaactggcttttttcaaccaaaattttatatcattctttgtctatcagatacgagaggaaggaagataatacgaagacatgttgaatagtgaaaaaaaaaaaaagaacacaaaaactggggcaagccaatgtgatgtatcactcactgtaagatggcaaatgttttcatttttaagattccgaatgtaaactagtgtgctagaaagcaaaccacccgccactcaaaccagtaattaccttaagccttaatatatttattaaaatactttatgagaacattacactttgtaggttaaaaatgaggataaaatgctaaactatc

SEQ ID NO: 260199 - DNA, 555 bp, Artificial Sequence
  derived and/or modified sequence
atgtctggggcccgggccgcccctggagctgctggaaatggagctgtgcggggcctgcgggtggatggcctgccccccctgcccaagagcctgagcggcctgctgcacagcgccagcggcggcggggccagcggcggctggaggcacctggagcggctgtatgcccagaagagccgcatccaggatgagctgagcagaggaggccctgggggcggcggggcccgggctgctgccctgcctgccaagccacccaacctggatgctgccctggccctgctgaggaaggagatggtgggcctgcggcagctggacatgagcctgctgtgccagctgtacagcctgtatgagagcatccaggagtacaagggggcctgccaggccgccagcagcccagactgcacctacgccctggagaatggcttctttgatgaggaggaggagtacttccaggagcagaacagcctgcatgaccggcgggaccggggccccccccgggacctgagcctgcctgtgagcagcctgagcagcagtgactggatcctggagagcatctag

SEQ ID NO: 260200 - DNA, 555 bp, Artificial Sequence
  derived and/or modified sequence
atgagcggcgcccgggccgcccccggcgccgccggcaacggcgccgtccggggcttgagagttgatggtcttccacctctgcccaaatcactgtctggtctcctgcacagcgcttctggcgggggagcctccgggggatggcgacacctggaacgtttgtacgcacagaagtcacgcatccaagatgagttgtcacgaggcggcccgggcggcggcggtgctagggctgccgcactgccagcgaagccccccaatcttgacgccgctctcgccctcttacgtaaagagatggtagggcttaggcagcttgacatgtctctgctgtgtcagctgtacagcttgtacgaatcaattcaggaatacaaaggcgcatgtcaggcggccagttctccagactgcacttacgccctcgagaatggcttctttgatgaagaggaagagtactttcaagagcagaactctctgcacgatcgacgggacagaggaccacctcgcgacttgagcctgccagtcagctcgttaagctccagcgattggatcctggagtctatctag

SEQ ID NO: 260201 - DNA, 555 bp, Artificial Sequence
  derived and/or modified sequence
atgagcggcgcacgcgctgcacctggcgctgccggtaatggagccgtgaggggtcttagggtggacggactgcccccactgcccaagtctctttccggccttttacattctgctagcggaggcggagcaagtggcggttggagacatctggagcggctgtacgctcagaagtctagaatccaggatgagctgagccgcggtggacccggaggcggtggagcgagggccgcagctcttccggctaaacctcctaacctcgacgctgccttagccctcctgaggaaggaaatggtgggcctgagacaattagatatgagcctattgtgtcaattatattcactgtacgagagtatacaagaatacaagggagcgtgtcaggccgcttctagccctgattgtacctatgccctagaaaacggttttttcgacgaggaagaagaatatttccaagaacaaaattctctccacgacaggcgcgaccgcggacctccacgagatctatcactgccagtctcatccctgtctagttcagattggatcctggagtctatttag

SEQ ID NO: 260202 - protein, 457 aa, Artificial Sequence
  derived and/or modified sequence
MSDANKAAIAAEKEALNLKLPPIVHLPENIGVDTPTQSKLLKYRRSKEQQQKINQLVIDGAKRNLDRTLGKRTPLLPPPDYPQTMTSEMKKKGFNYIYMKQCVESSPLVPIQQEWLDHMLRLIPESLKEGKEREELLESLINEVSSDFENSMKRYLVQSVLVKPPVKSLEDEGGPLPESPVGLDYSNPWHSSYVQARNQIFSNLHIIHPTMKMLLDLGYTTFADTVLLDFTGIRAKGPIDCESLKTDLSIQTRNAEEKIMNTWYPKVINLFTKKEALEGVKPEKLDAFYSCVSTLMSNQLKDLLRRTVEGFVKLFDPKDQQRLPIFKIELTFDDDKMEFYPTFQDLEDNVLSLVERIAEALQNVQTIPSWLSGTSTPVNLDTELPEHVLHWAVDTLKAAVHRNLEGARKHYETYVEKYNWLLDGTAVENIETFQTEDHTFDEYTEELDCWVVWEVYF

SEQ ID NO: 260203 - DNA, 1374 bp, Artificial Sequence
  derived and/or modified sequence
atgtctgatgcaaacaaggcagccattgcagccgaaaaagaggctctgaacctgaaactgcctccaatcgtgcatttgcctgagaacatcggtgtggatacgcccacacaatccaagctcctcaagtatcgcagaagcaaagaacagcagcagaagatcaaccagctggtcatcgacggcgctaaaaggaacctggataggactcttggaaagcgaaccccattgctcccaccaccagattacccacagacaatgactagtgaaatgaagaaaaaaggtttcaactatatttacatgaagcagtgcgtggaatccagtccacttgttcccatacagcaagagtggcttgaccatatgctaagattgatccctgaatccctaaaggaagggaaggaaagagaggaacttctggagtcccttatcaatgaagtgtctagcgacttcgagaacagcatgaagcgctatctagtgcagagcgtgctggtcaagcctccagtgaaatcgttggaagacgaagggggtcccttacctgagtctccggttggtctcgattattccaacccttggcatagcagctatgttcaggcccggaaccagattttcagcaatttacatattatacacccgactatgaaaatgttactggatttggggtacaccacattcgctgatactgtacttctggactttacagggattagagccaagggtcccatcgactgcgagagcctcaagacagaccttagcatccaaacacgcaacgctgaggagaagatcatgaacacgtggtacccgaaggtcataaatctctttacaaagaaggaagccctggagggggtgaaacccgagaaactcgacgcgttctactcgtgtgtgtctaccctaatgtctaatcagttaaaggacttgctccggcgcacggtagagggattcgtgaagctgtttgatccgaaggatcaacagcgactgcctatctttaagattgagttgacgttcgacgatgataagatggagttctacccgactttccaggatcttgaagacaacgttctatcacttgttgagagaattgcagaggccctccaaaatgtccagactatcccctcctggctgtcagggacttcaacaccagtgaacctggatactgagctgccagaacacgtgcttcactgggccgttgatactcttaaagctgcggtacaccgaaacctggagggtgcacgaaaacactacgagacatacgtggaaaagtataattggctgctggacggaaccgcggtggagaacatcgagacgtttcagactgaggaccacactttcgatgagtacactgaggagctcgactgttgggttgtttgggaggtgtatttctag

SEQ ID NO: 260204 - DNA, 1374 bp, Artificial Sequence
  derived and/or modified sequence
atgtctgatgccaacaaggccgccatcgctgctgagaaggaggccctgaacctgaagctgccccccatcgtgcacctgcctgagaacatcggcgtggacacccccacccagagcaagctgctgaagtaccgccgcagcaaggagcagcagcagaagatcaaccagctggtgattgatggagccaagaggaacctggacaggaccctgggcaagaggacccccctgctgcccccaccagactacccccagaccatgaccagcgagatgaagaagaagggcttcaactacatctacatgaagcagtgtgtggagagcagccccctggtgcccatccagcaggagtggctggaccacatgctgcggctcatccctgagagcctgaaggagggcaaggagcgggaggagctgctggagagcctcatcaatgaggtgtccagtgactttgaaaattccatgaagcgctacctggtgcagagcgtgctggtgaagccccctgtgaagagcctggaggatgaaggaggccccctgcctgagagccctgtgggcctggactacagcaacccctggcacagcagctatgtgcaggccaggaaccagatcttcagcaacctgcacatcatccaccccaccatgaagatgctgctggacctgggctacaccacctttgctgacacagtgctgctggacttcaccggcatccgggccaagggccccatcgactgtgagagcctgaagacagacctgagcatccagaccagaaatgctgaggagaagatcatgaacacctggtaccccaaggtgatcaacctcttcaccaagaaggaggccctggagggcgtgaagccagagaagctggatgccttctacagctgtgtgtccaccctgatgagcaaccagctgaaggacctgctgcggaggacagtggagggctttgtgaagctgtttgaccccaaggaccagcagaggctgcccatcttcaagattgagctgacctttgatgatgacaagatggagttctaccccaccttccaggacctggaggacaacgtgctgagcctggtggagagaattgctgaggccctgcagaatgtgcagaccatccccagctggctgagcggcaccagcacccctgtgaacctggacacagagctgcctgagcacgtgctgcactgggccgtggacaccctgaaggctgctgtgcacaggaacctggagggcgccaggaagcactatgagacctacgtggagaagtacaactggctgctggatggaacagctgtggagaacatcgagaccttccagacagaggaccacacctttgatgagtacacagaggagctggactgctgggtggtgtgggaggtgtacttctag

SEQ ID NO: 260205 - DNA, 1374 bp, Artificial Sequence
  derived and/or modified sequence
atgagcgacgccaacaaggccgccatcgccgccgagaaggaggccctcaacctgaaactcccaccgatcgtgcacctgcctgaaaacattggtgtggacacgccgacccaaagcaagctgctaaagtaccgaaggagtaaagaacagcagcagaaaattaaccagctggtgatcgacggggcgaaacggaaccttgaccgcaccttgggtaagcggacgcctctgttgcctccccccgactatccccagacaatgacttcagaaatgaaaaagaaaggatttaattacatctatatgaagcaatgtgtagaaagtagtcccctagtgcccattcagcaagaatggctggaccacatgttgcggttaatcccagagtcactaaaggaaggtaaagagagagaagaactcctcgagtccttgattaatgaggtgtctagcgactttgaaaactccatgaagaggtacttagttcaatcagtactggtgaagccaccggtcaaaagtctggaggacgaagggggcccccttcctgaatcgcctgtgggcctggattacagtaatccttggcactccagttatgtccaggcacggaatcagatcttttccaatcttcacataattcaccctactatgaaaatgctgctggatctaggctatacgaccttcgccgacaccgtcctgctggattttaccggcattagagctaagggacccatcgactgtgagagtctcaaaaccgatctgtccatccaaaccagaaacgccgaggaaaagattatgaacacatggtaccctaaggtgattaacctgttcaccaaaaaggaagcactcgaaggtgtcaagcctgaaaagctggatgcattctacagctgtgtgagcaccttgatgagcaaccagctaaaggacttactgaggcgcacagtggagggcttcgtaaaactgttcgacccaaaggatcagcagagactgcccatcttcaaaattgagctaacctttgacgacgataagatggagttttatcccaccttccaggacttggaagacaacgtcctgtctctcgtggagcgtattgccgaagcactacagaatgttcagactatcccctcttggctgtctgggaccagcacacctgtaaaccttgataccgagctgcctgagcacgtcctgcactgggctgtagacacattgaaggctgcagttcaccgaaatctggaaggcgccaggaaacattatgaaacatacgttgaaaagtataattggttattggatggcacggctgtagaaaacattgagacgttccagaccgaggatcacacattcgatgagtacacggaagaactggactgttgggtggtctgggaggtgtacttctag

SEQ ID NO: 260206 - DNA, 1374 bp, Artificial Sequence
  derived and/or modified sequence
atgagcgacgccaataaggcagccattgccgctgagaaggaagccctgaacctgaagttacctccaatcgttcaccttcctgaaaatataggggttgacactccaactcaaagcaagctgctgaagtaccgccgttctaaggagcagcagcaaaaaatcaatcagctcgtcatcgatggcgctaaaagaaatttggatcggactctgggtaagcgcactcctctattgcctcccccagattatccccaaacaatgaccagtgaaatgaagaaaaaaggttttaattatatctatatgaagcaatgcgtcgagtcatcaccgctggtgccgatccagcaggagtggttagatcacatgctgcgtctgattccagagtccttaaaggaagggaaggagcgcgaagagcttctggaatcgctgattaacgaggtttccagtgatttcgagaactcaatgaaaagatacttagtgcagagtgtgctggtcaagcctccagtcaagtcactggaagacgaagggggtcccctacctgagtcgcctgtggggctggactactctaacccttggcatagctcctatgtgcaggcgaggaatcaaatcttctctaatctgcacattatccatccgacaatgaagatgctgctggacctcgggtatacgactttcgccgacacagtccttctagacttcacaggcattagagctaaagggcctattgactgcgagtctttaaagaccgacctgtcaattcagacccgaaatgcagaggagaagatcatgaatacatggtatcccaaagtcatcaacctgtttacaaagaaggaggccctcgagggagtgaagccggagaagctcgatgccttttatagctgtgtgtccaccctgatgtcaaatcagctaaaagatttgctccgacgcaccgtggaaggcttcgtcaagttgtttgatcctaaggatcagcaaagactacccatcttcaaaattgaactaaccttcgacgatgacaagatggagttttaccccacgtttcaggacttggaagataatgtgttgtcactggtcgaacggattgccgaagcactgcaaaacgtccagactattccctcctggctgtctggtacgtctacccctgtgaatctggacactgagttgcccgagcacgtgctgcactgggccgttgataccttaaaggctgccgttcacaggaatctcgagggtgctcggaagcactacgaaacatatgtggaaaaatacaactggcttctcgacgggactgctgtggagaacatcgagacatttcagacagaggaccacaccttcgacgagtatactgaggagctggactgctgggtagtatgggaagtctatttttag

SEQ ID NO: 260207 - DNA, 1374 bp, Artificial Sequence
  derived and/or modified sequence
atgagcgacgccaacaaggccgccatcgccgccgagaaggaggccctgaacctgaagctgccccccatcgtgcacctgcccgagaacatcggcgtggacacccccacccagagcaagctgctgaagtacagaagaagcaaggagcagcagcagaagatcaaccagctggtgatcgacggcgccaagagaaacctggacagaaccctgggcaagagaacccccctgctgcccccccccgactacccccagaccatgaccagcgagatgaagaagaagggcttcaactacatctacatgaagcagtgcgtggagagcagccccctggtgcccatccagcaggagtggctggaccacatgctgagactgatccccgagagcctgaaggagggcaaggagagagaggagctgctggagagcctgatcaacgaggtgagcagcgacttcgagaacagcatgaagagatacctggtgcagagcgtgctggtgaagccccccgtgaagagcctggaggacgagggcggccccctgcccgagagccccgtgggcctggactacagcaacccctggcacagcagctacgtgcaggccagaaaccagatcttcagcaacctgcacatcatccaccccaccatgaagatgctgctggacctgggctacaccaccttcgccgacaccgtgctgctggacttcaccggcatcagagccaagggccccatcgactgcgagagcctgaagaccgacctgagcatccagaccagaaacgccgaggagaagatcatgaacacctggtaccccaaggtgatcaacctgttcaccaagaaggaggccctggagggcgtgaagcccgagaagctggacgccttctacagctgcgtgagcaccctgatgagcaaccagctgaaggacctgctgagaagaaccgtggagggcttcgtgaagctgttcgaccccaaggaccagcagagactgcccatcttcaagatcgagctgaccttcgacgacgacaagatggagttctaccccaccttccaggacctggaggacaacgtgctgagcctggtggagagaatcgccgaggccctgcagaacgtgcagaccatccccagctggctgagcggcaccagcacccccgtgaacctggacaccgagctgcccgagcacgtgctgcactgggccgtggacaccctgaaggccgccgtgcacagaaacctggagggcgccagaaagcactacgagacctacgtggagaagtacaactggctgctggacggcaccgccgtggagaacatcgagaccttccagaccgaggaccacaccttcgacgagtacaccgaggagctggactgctgggtggtgtgggaggtgtacttctag

SEQ ID NO: 260208 - DNA, 2048 bp, Artificial Sequence
  derived and/or modified sequence
cttctccagctactcgtttgagagccggtggcgttccggaggtttctccctcgttatccccctgcctttcacctgaggagaggctctgactgtctctctctctctctggcgtctgcgcagcggggaagtagtgagaaacaatcagagtacagagtattttaatctttaggggatcaagatgtcagatgcaaacaaagctgccattgcagcagaaaaggaagctctgaacttgaagttaccccccattgtccatctcccagaaaacataggcgttgatacaccaacacaaagtaagctgctaaaatacagaagatccaaggagcagcagcagaaaattaatcagttagtaattgatggagccaaaagaaatttagacagaacactgggtaaaagaacacctctattaccaccacctgattatcctcaaactatgaccagtgaaatgaaaaaaaaaggattcaactatatttatatgaagcaatgtgtagaaagtagtcctttagtacctattcagcaggaatggctggatcacatgttaaggctgatacctgagtctttaaaggaagggaaagaaagagaagaacttcttgaaagtctcataaatgaggtgtcaagtgactttgaaaacagcatgaagagatatttggtgcagagcgttcttgtgaaaccaccagttaaatcgcttgaagatgaaggaggtcctttacctgaatctcctgtaggcctagattattctaatccttggcattctagctatgtgcaggcaagaaatcaaatattctctaatttgcacattattcatccaactatgaaaatgttactggaccttggttatacaacatttgctgatacagttttgttggacttcacaggaattagagctaaaggtccaattgactgtgaatcactgaaaactgatctatcaatacaaactagaaacgcagaagagaagataatgaatacatggtatccaaaggttataaatctctttaccaagaaggaggcactagaaggtgttaaacctgaaaaattggatgcattttatagctgtgtttccacacttatgtcaaatcagctaaaggatctattaaggagaactgtagaaggatttgtaaaactctttgacccaaaagatcaacaaaggctgccaatatttaagatagaattgacatttgatgacgacaaaatggaattttatcctacctttcaagatttggaagataatgtcttgagtttggtggaacgaatagccgaagctctgcagaatgtccaaacaatcccctcttggctatcaggaacttcaacaccagtaaatcttgacacagaacttcctgaacacgtgttacactgggctgttgatacactgaaggcagcagtacatcggaacttagaaggtgcaagaaagcattatgagacatatgttgaaaaatataattggctccttgatgggactgcagttgagaatatagagacttttcagacagaagatcatacttttgatgaatatacagaggagctggattgctgggtggtatgggaagtgtatttttaactttttaagaaactgttaagccaggcatagtagcttgcacctgtagtctcagctactcaggaggctgaggtgaaaggattactggagcctaggagttcgagtctgcagtgagttatgatcatgccactgcactccaacttgagtgacagagcaaaactctttgtctcaaaaaacagaagaaacttaaatttctttcaaagttgttataccatttacaatctcaccagcagtgtatgagatttccagttcttccacatccttttcaacctttgggcttatcagtcttttactttttactattgttttattttttcccactgcactttcacatctagattatcagtctttttaatttcatgtgtatattggtatcccactgtggttttaatttgcatttccctgatgactaatgatgtttagcatcttttaacatgtcatgttccatctgtgtatctttttactaataaaaataaagtgtcttttgtttgtacatttt

SEQ ID NO: 260209 - protein, 638 aa, Artificial Sequence
  derived and/or modified sequence
MAAELRMILYEDDSVQVQYVDGSTLQLSPCGTEFLFEKSPPVSAHPLEQPERIRQRTHFVISTYREQLQRALDFRNSSATCPFLSETIIPSERKKHIFIDITEVRWPSLDTDGTMIYMESGIVKITSLDGHAYLCLPRSQHEFTVHFLCKVSQKSDSSAVLSETNNKAPKDKLVEKTGKICIRGNLPGQRLKNKENEFHCQIMKSKETLKKMSCVNGTEGREELPSPGTKHTCVYTWVKQCWSVAACPEEWKYPLSLALHFHNKISNMSKIDAHITQSRFLTSDISEERGKVVSVLPRALSLSCPVPHLHRWNFCDSLLQRQSDEYSYPELVKMVWYKGVTYRLTHQNMNSIEIYSGDGSVFKSEGAYFGNYFTYYSIQEGSGKREEKTYSVNNLPPDRPGSPFTVGSLIKQATRILQHCVKMRLSLSHNYRICCWKMVPGINDSNILPLVLKESLIPSVGRFLAYSDDKVHAIFLDGITLTLNWNFSSPIEKRQVNQGLNLGWCKLTFPDGQEQLIQIEHPEPYERYVTTVTSWCRRLTQTSPREMPTHSSSSVLQENWSVASELEKIQKFNLLLENSGILNQISNKKNEQQSFDHYKPGSSETLLGEVNENRVSIALKKTSEILHDIDCLLSNSKK

SEQ ID NO: 260210 - DNA, 2507 bp, Artificial Sequence
  derived and/or modified sequence
gcggagctctgaagcggctccctgagggcgctggttttgaactggtcttgtgcggtttgcgctttctcttagtggttacagttggcgctgtctccgctttcctgtttcgtggcgggcatcttggccaaaacactctccctgccaccttattcctctagggttgtgatttttttctttcaccaagaaatatcactcgctggtaatttgtcaaactgaagaaacccctgaagaagcagtcgtgggcaggcgccgacgctgcggcttccagagcattttggcaaatcaaagccagggaccgttgctgggcctcatttccgcaacttttcggctccgaactgcttctttgacttagaagatatcttatcctgccgttgtaatggcagctgaactgcgaatgatactttatgaagatgattcagtacaagtacaatatgttgatggttccacattgcaactttctccctgtggcactgaatttttatttgaaaagtcaccacctgtttcagcacatcctttagaacaaccagaaagaattcgtcaaaggacacattttgtcattagcacttacagagagcaactacagcgagccctagattttcgaaactcttcagctacttgcccttttttatctgaaaccatcataccttctgaaagaaaaaagcatatcttcattgacataacagaagtgagatggcccagtcttgatacagatggtaccatgatatatatggagagtggcattgtgaagataacatctttagatggtcatgcatacctctgcctgcccagatctcagcatgaatttacagtacattttttgtgtaaagttagccagaagtcagactcatctgcagtgttgtcagaaacaaataataaagccccaaaagataaactagttgaaaaaactggcaaaatctgtatacgtggaaatttaccaggacagagactgaagaataaagaaaatgagtttcattgccagatcatgaaatccaaagaaactttaaagaagatgagttgtgtaaatggaactgaagggagggaagagctgccttcgcctggtacaaagcacacatgtgtatacacatgggtcaagcagtgctggtctgtggctgcctgtccagaggaatggaaatatcctttgtctttagcacttcattttcataataaaatcagcaatatgtctaaaattgatgcacatataactcagagtagatttttaacttctgatatttcagaggaaagaggaaaagtggtttctgttcttcccagggccctgtcactcagctgtccagtcccacacctacacaggtggaatttttgtgattcacttttacagagacaatctgatgaatattcctatcctgaactagtgaaaatggtttggtacaaaggtgttacatatagacttacccatcaaaatatgaactcaatagagatttattctggggatggatctgttttcaaatcagaaggggcttattttgggaactattttacttattattctattcaagaaggatcaggaaagagagaagagaaaacttactcagtaaataaccttcctccagatagaccgggaagtccattcactgtcggttctctaattaaacaggcaacaagaattcttcaacattgtgtgaagatgagactttctttaagccataactatcgtatatgctgctggaaaatggtacctgggataaacgatagcaatatactgcctttggttttgaaagagtcactcatacccagtgtgggaagatttcttgcctactctgatgacaaagtacatgctatctttttagatggcattactctaaccctaaattggaatttcagctctcctattgagaagagacaggtaaatcaaggtcttaacttaggttggtgtaagttaacttttcctgatggacaagagcagttaattcagattgaacaccctgaaccatatgaaagatatgtgacaacagtaacatcatggtgcaggagactgacccagactagtcccagagagatgcccactcattcgtcatcttctgttctccaagaaaattggtctgttgcttctgaacttgaaaagatacagaagtttaacttgctactagaaaatagtggtatcctaaaccagatttctaacaagaaaaatgaacaacagtcttttgatcattataaaccaggatcttcagaaaccttgctaggagaagttaatgaaaatagagtatcaatagcattgaaaaaaacctctgaaatccttcacgatattgactgtcttctatcaaactctaaaaagtgaaaaatggaattattacaacatattattaaagtttaaggatgttgtttcaagtgactggtataaaattactagtaagccaagatattgtacgtattaccccggcacaatgattgtgaaagaactgacatttaactttgaaggtatttttaacttgtacatttttaaaatatgtatttatatcttaataataaatatttcgaagttttgaacgttt

SEQ ID NO: 260211 - DNA, 1917 bp, Artificial Sequence
  derived and/or modified sequence
atggccgccgagctgagaatgatcctgtacgaggacgacagcgtgcaggtgcagtacgtggacggcagcaccctgcagctgagcccctgcggcaccgagttcctgttcgagaagagcccccccgtgagcgcccaccccctggagcagcccgagagaatcagacagagaacccacttcgtgatcagcacctacagagagcagctgcagagagccctggacttcagaaacagcagcgccacctgccccttcctgagcgagaccatcatccccagcgagagaaagaagcacatcttcatcgacatcaccgaggtgagatggcccagcctggacaccgacggcaccatgatctacatggagagcggcatcgtgaagatcaccagcctggacggccacgcctacctgtgcctgcccagaagccagcacgagttcaccgtgcacttcctgtgcaaggtgagccagaagagcgacagcagcgccgtgctgagcgagaccaacaacaaggcccccaaggacaagctggtggagaagaccggcaagatctgcatcagaggcaacctgcccggccagagactgaagaacaaggagaacgagttccactgccagatcatgaagagcaaggagaccctgaagaagatgagctgcgtgaacggcaccgagggcagagaggagctgcccagccccggcaccaagcacacctgcgtgtacacctgggtgaagcagtgctggagcgtggccgcctgccccgaggagtggaagtaccccctgagcctggccctgcacttccacaacaagatcagcaacatgagcaagatcgacgcccacatcacccagagcagattcctgaccagcgacatcagcgaggagagaggcaaggtggtgagcgtgctgcccagagccctgagcctgagctgccccgtgccccacctgcacagatggaacttctgcgacagcctgctgcagagacagagcgacgagtacagctaccccgagctggtgaagatggtgtggtacaagggcgtgacctacagactgacccaccagaacatgaacagcatcgagatctacagcggcgacggcagcgtgttcaagagcgagggcgcctacttcggcaactacttcacctactacagcatccaggagggcagcggcaagagagaggagaagacctacagcgtgaacaacctgccccccgacagacccggcagccccttcaccgtgggcagcctgatcaagcaggccaccagaatcctgcagcactgcgtgaagatgagactgagcctgagccacaactacagaatctgctgctggaagatggtgcccggcatcaacgacagcaacatcctgcccctggtgctgaaggagagcctgatccccagcgtgggcagattcctggcctacagcgacgacaaggtgcacgccatcttcctggacggcatcaccctgaccctgaactggaacttcagcagccccatcgagaagagacaggtgaaccagggcctgaacctgggctggtgcaagctgaccttccccgacggccaggagcagctgatccagatcgagcaccccgagccctacgagagatacgtgaccaccgtgaccagctggtgcagaagactgacccagaccagccccagagagatgcccacccacagcagcagcagcgtgctgcaggagaactggagcgtggccagcgagctggagaagatccagaagttcaacctgctgctggagaacagcggcatcctgaaccagatcagcaacaagaagaacgagcagcagagcttcgaccactacaagcccggcagcagcgagaccctgctgggcgaggtgaacgagaacagagtgagcatcgccctgaagaagaccagcgagatcctgcacgacatcgactgcctgctgagcaacagcaagaagtag

SEQ ID NO: 260212 - DNA, 1917 bp, Artificial Sequence
  derived and/or modified sequence
atggccgcagaacttagaatgattctgtacgaagacgactcagttcaagtccagtacgttgacgggagcaccctgcagctctccccatgtggcacagagtttttattcgagaagagcccccccgtctctgctcatccactggaacaacctgagaggattaggcagcgaacccacttcgtgatatctacttacagggaacagttacagcgggccctcgatttcagaaactctagcgcaacttgtcccttcttgagtgagactatcatcccgtctgaaagaaagaagcatatatttatagatatcaccgaggtgaggtggccttcactcgacaccgatggaacaatgatttacatggagtccgggattgtgaagattacatccctggacggacacgcatacctttgcctgccacgtagtcagcacgagttcacagtgcattttttatgcaaggtttcccagaagagtgatagtagcgcagtgctgagcgaaactaacaacaaggctccaaaggacaaactagtggagaaaaccggaaagatctgtatccgtgggaaccttcccgggcagcgtctcaaaaacaaagagaacgagtttcattgccagatcatgaagtctaaggagacacttaaaaagatgtcatgcgtgaacggcacagaggggagagaagagctgccctcaccagggacaaagcacacttgcgtctatacctgggtgaaacaatgctggtctgtggctgcctgcccagaggagtggaagtaccccctgtccttagcgctgcactttcataataagatttccaacatgtctaaaattgatgctcacattacccaatcgcgattcctgacttcggacataagcgaagagcgcgggaaggtcgtcagcgtgctgccccgggctctatccctgtcttgtcctgttccccatttgcacagatggaacttttgtgattccctcctgcagaggcagagtgatgaatattcctatccagagctcgtgaagatggtctggtacaagggagtcacgtatcgcctgacccaccagaatatgaacagtattgagatctactctggagatggctccgtcttcaagtctgagggagcctatttcggaaattactttacatactattccatacaggagggatcagggaagagggaagagaaaacctactcagttaataatcttcctccagacagacctggcagccccttcaccgtggggtccttaattaagcaagcaaccagaatcctccagcactgcgttaagatgcgtctctcactcagccacaattaccgcatctgttgttggaaaatggtgccagggattaatgatagcaacatcttgcccctggtgctcaaagaatccctgatcccctcagttggccgctttctcgcctatagtgacgacaaagtccatgcaatctttcttgatggtatcaccctgaccctcaattggaattttagctcacccattgagaagagacaagtcaatcagggattaaatctggggtggtgcaagttaacattccctgatggtcaggaacagctgatccaaatcgaacatcccgagccctatgaacgatacgtaaccaccgtgacgtcttggtgccggcgtctgacacagacaagccctcgagaaatgcctacacatagtagtagctcagtgctgcaggagaattggtccgttgcgtcggagctcgaaaagattcagaaatttaacctcctgctcgaaaacagtgggatcctgaaccaaatatctaacaaaaagaatgagcagcagtcgtttgaccattacaagccgggctcctccgaaactcttcttggggaggtgaacgaaaatagggtgagcatcgccctcaaaaagacaagcgagatcctacatgacatagattgtttgttgtccaactcaaagaagtag

SEQ ID NO: 260213 - DNA, 1917 bp, Artificial Sequence
  derived and/or modified sequence
atggctgctgagctgaggatgatcctgtatgaagatgacagcgtgcaggtgcagtatgtggatggcagcaccctgcagctgagcccctgtggcacagagttcctgtttgagaagagcccccctgtgtctgcccaccccctggagcagcctgagcgcatccggcagaggacccactttgtgatcagcacctaccgggagcagctgcagagggccctggacttcaggaacagcagcgccacctgccccttcctgtctgagaccatcatccccagcgagaggaagaagcacatcttcatcgacatcacagaggtgcgctggcccagcctggacacagatggcaccatgatctacatggagagcggcatcgtgaagatcaccagcctggatggccacgcctacctgtgcctgcccaggagccagcacgagttcaccgtgcacttcctgtgcaaggtgtcccagaagagtgacagcagcgctgtgctgtctgagaccaacaacaaggcccccaaggacaagctggtggagaagacaggcaagatctgcatccggggcaacctgcccggccagaggctgaagaacaaggaaaatgagttccactgccagatcatgaagagcaaggagaccctgaagaagatgagctgtgtgaatggaacagagggccgggaggagctgcccagccctggcaccaagcacacctgtgtgtacacctgggtgaagcagtgctggagcgtggccgcctgcccagaggagtggaagtaccccctgagcctggccctgcacttccacaacaagatcagcaacatgagcaagattgatgcccacatcacccagagccgcttcctgaccagtgacatcagcgaggagcggggcaaggtggtgtctgtgctgccccgggccctgagcctgagctgccctgtgccccacctgcaccgctggaacttctgtgacagcctgctgcagaggcagagtgatgagtacagctacccagagctggtgaagatggtgtggtacaagggcgtgacctaccgcctgacccaccagaacatgaacagcattgagatctacagcggagatggcagcgtcttcaagtctgagggcgcctactttggaaactacttcacctactacagcatccaggagggcagcggcaagcgggaggagaagacctacagcgtgaacaacctgcccccagaccggcccggcagccccttcaccgtgggcagcctcatcaagcaggccacccgcatcctgcagcactgtgtgaagatgaggctgagcctgagccacaactaccgcatctgctgctggaagatggtgcccggcatcaatgacagcaacatcctgcccctggtgctgaaggagagcctcatccccagcgtgggccgcttcctggcctacagtgatgacaaggtgcacgccatcttcctggatggcatcaccctgaccctgaactggaacttcagcagccccatcgagaagaggcaggtgaaccagggcctgaacctgggctggtgcaagctgaccttcccagatggccaggagcagctgatccagatcgagcaccctgagccctatgagcgctacgtgaccaccgtgacctcctggtgccggcggctgacccagaccagcccccgggagatgcccacccacagcagcagctctgtgctgcaggagaactggagcgtggccagcgagctggagaagatccagaagttcaacctgctgctggagaacagcggcatcctgaaccagatcagcaacaagaagaatgagcagcagagctttgaccactacaagccaggcagcagcgagaccctgctgggggaggtgaatgaaaatagagtgtccatcgccctgaagaagaccagcgagatcctgcatgacatcgactgcctgctgagcaacagcaagaagtag

SEQ ID NO: 260214 - DNA, 1917 bp, Artificial Sequence
  derived and/or modified sequence
atggccgccgagctgcggatgatcctgtacgaggacgacagcgtgcaggtgcaatacgtggacgggtctactctgcaattgagcccctgcggcaccgaattcttgtttgagaagtccccccctgtgagcgcccacccattggagcagcctgagcggataagacagcgcacccacttcgtcataagcacttatcgggaacagctccagagagcgctggacttccggaattccagtgcaacttgccctttcttaagcgaaactattatccctagtgagaggaaaaagcacatttttatcgacattacagaggttagatggccctcattggatactgatggaacaatgatttatatggagagtgggatagtgaaaataacttcactggacgggcatgcatacctgtgtctgccccgttctcaacacgagtttaccgtgcactttttgtgcaaggtgtcgcaaaaatctgattccagcgccgtactgtctgagacgaacaacaaggctccaaaagataagctagttgaaaaaacgggcaagatttgtattagaggaaaccttccaggccagcgactgaagaataaggaaaacgagtttcattgtcagattatgaaatctaaagagactctgaaaaaaatgtcctgtgtgaacggaacagagggcagagaagaactcccatccccaggcacgaaacatacctgtgtgtatacttgggtgaaacagtgctggtccgttgcagcctgtccggaggaatggaaatacccactgtccctggccctccactttcataacaaaattagcaatatgtcaaaaattgatgcacatatcactcagagccgcttcctaacgtctgacatctcagaggagcgcggtaaggtagttagcgtcctaccccgggcgctttcgctctcctgtcccgtccctcatctacaccgttggaacttttgtgacagtctgctgcagcgtcagagcgatgagtacagctatccagagttggtaaagatggtgtggtataagggggtcacttaccgtctcactcatcagaatatgaattcaatcgaaatttattcgggtgacggatccgtgtttaagtcagagggcgcatacttcgggaattattttacttactactctatccaggagggcagcggaaagagagaagaaaagacctattctgtaaataacctgccccccgataggccagggtccccttttacagtcggctcacttattaagcaagccacgaggatcctgcagcattgcgtaaaaatgaggctatcgctcagccacaactatcgcatctgttgctggaagatggtgcccggaatcaatgacagtaatatcctgccactggtcctcaaggaatctctaatcccctctgtcgggcgattcttggcctattccgatgataaggtccacgccatcttcctggacggtattaccctgacgctcaactggaatttctcttcccccattgagaaaaggcaggtcaaccagggtctaaatttagggtggtgtaaactgacttttcctgacggccaggaacagcttatccagatcgagcatcccgaaccctatgaaaggtatgtgacgacagtcacaagctggtgtcgccgccttacccagacatccccgcgcgaaatgcctacccactctagttcatccgtgctgcaggagaactggtctgtcgccagcgaattagagaaaatacaaaagttcaacctactattagaaaactctggcatattgaaccagattagcaacaaaaaaaatgagcagcagagctttgatcactacaaacccggctcctcagaaactctcctgggtgaagtcaatgaaaatagggtttctatcgccctcaaaaagacaagcgagatccttcatgatattgattgcctcctgtcgaattcaaaaaagtag

SEQ ID NO: 260215 - DNA, 1917 bp, Artificial Sequence
  derived and/or modified sequence
atggccgctgaattgcgcatgatattgtacgaagatgactctgtgcaggtgcagtacgtggacggatcaactttacagctgtctccatgtgggaccgaattcctgttcgagaagtcaccacccgtaagcgcccaccctctggaacaacctgaacgcatacggcagcgtactcacttcgtgatctctacctacagagagcagctccagagagcgttggacttcaggaactcatccgccacctgccctttcctgagcgagactataataccatcggagcgaaagaaacatattttcatcgatattacagaagttcgatggcccagtctagacaccgacggtaccatgatttatatggagtcaggtattgtcaagatcaccagcttagatggccacgcctacttatgtctgcctcgatcccagcatgaatttacggtgcattttctgtgcaaagtgagtcaaaaatcagacagtagtgctgttctctcagagaccaataataaagcacccaaggataagcttgtggagaaaacaggcaagatctgcattaggggcaatctcccagggcagaggttgaaaaataaggagaacgagttccattgtcagatcatgaagagtaaggagacgcttaaaaagatgagttgcgtgaatgggactgagggccgtgaagagctgccttcacccggaacaaagcatacgtgcgtgtacacctgggtcaagcagtgttggtcggtagccgcttgccctgaggaatggaaatatccactgagcttagcactgcatttccataacaaaatttcaaacatgtcaaagattgacgcccacattactcagagcagattcctgacttctgacatcagtgaggaaaggggtaaagtagtctccgttctgcccagggccctgagtctgtcatgcccggtgcctcatctccacagatggaatttctgtgatagcttgctgcaacgtcagtccgatgaatatagctaccccgagctggtgaagatggtttggtataaaggggtcacttacagactcacccatcagaatatgaacagcatcgaaatttattccggagacggatccgtgttcaaatccgaaggcgcatatttcgggaattacttcacgtactattccatacaggagggttccggcaaacgcgaggaaaagacatattcagttaataatctccccccagaccgcccagggtcgccatttaccgttggttctctcattaaacaggccaccagaatcttgcagcattgtgtgaaaatgaggctttcactgtctcataattatcggatttgttgctggaagatggtgcctggcattaatgatagcaatattctgccactggtcttgaaggagtccttgatcccaagcgttgggcgtttcctcgcctattcggatgacaaagtacatgctattttcttggatggaatcaccctgacgctgaattggaatttctctagccctattgagaagcgacaggtgaaccagggtcttaacctcggatggtgcaagttgactttcccagatggacaagagcagctcattcagatcgaacaccccgaaccttacgagcggtacgtcaccaccgtgacatcttggtgcaggagactcactcaaacctcccctagggaaatgcctacccactcctcttcgtccgtcttgcaggagaattggtctgtagcctctgagctggaaaagattcagaagttcaatctgctactggagaattccggtattttaaatcagatctctaataaaaagaacgagcagcagtcatttgaccattataagcctggaagctcagaaactctgctaggggaggttaatgagaacagagtctctattgccctgaagaagaccagtgagatattgcatgatattgactgtctcctctcaaattcgaagaaatag

SEQ ID NO: 260216 - protein, 1250 aa, Artificial Sequence
  derived and/or modified sequence
MMFRSDRMWSCHWKWKPSPLLFLFALYIMCVPHSVWGCANCRVVLSNPSGTFTSPCYPNDYPNSQACMWTLRAPTGYIIQITFNDFDIEEAPNCIYDSLSLDNGESQTKFCGATAKGLSFNSSANEMHVSFSSDFSIQKKGFNASYIRVAVSLRNQKVILPQTSDAYQVSVAKSISIPELSAFTLCFEATKVGHEDSDWTAFSYSNASFTQLLSFGKAKSGYFLSISDSKCLLNNALPVKEKEDIFAESFEQLCLVWNNSLGSIGVNFKRNYETVPCDSTISKVIPGNGKLLLGSNQNEIVSLKGDIYNFRLWNFTMNAKILSNLSCNVKGNVVDWQNDFWNIPNLALKAESNLSCGSYLIPLPAAELASCADLGTLCQATVNSPSTTPPTVTTNMPVTNRIDKQRNDGIIYRISVVIQNILRHPEVKVQSKVAEWLNSTFQNWNYTVYVVNISFHLSAGEDKIKVKRSLEDEPRLVLWALLVYNATNNTNLEGKIIQQKLLKNNESLDEGLRLHTVNVRQLGHCLAMEEPKGYYWPSIQPSEYVLPCPDKPGFSASRICFYNATNPLVTYWGPVDISNCLKEANEVANQILNLTADGQNLTSANITNIVEQVKRIVNKEENIDITLGSTLMNIFSNILSSSDSDLLESSSEALKTIDELAFKIDLNSTSHVNITTRNLALSVSSLLPGTNAISNFSIGLPSNNESYFQMDFESGQVDPLASVILPPNLLENLSPEDSVLVRRAQFTFFNKTGLFQDVGPQRKTLVSYVMACSIGNITIQNLKDPVQIKIKHTRTQEVHHPICAFWDLNKNKSFGGWNTSGCVAHRDSDASETVCLCNHFTHFGVLMDLPRSASQLDARNTKVLTFISYIGCGISAIFSAATLLTYVAFEKLRRDYPSKILMNLSTALLFLNLLFLLDGWITSFNVDGLCIAVAVLLHFFLLATFTWMGLEAIHMYIALVKVFNTYIRRYILKFCIIGWGLPALVVSVVLASRNNNEVYGKESYGKEKGDEFCWIQDPVIFYVTCAGYFGVMFFLNIAMFIVVMVQICGRNGKRSNRTLREEVLRNLRSVVSLTFLLGMTWGFAFFAWGPLNIPFMYLFSIFNSLQGLFIFIFHCAMKENVQKQWRQHLCCGRFRLADNSDWSKTATNIIKKSSDNLGKSLSSSSIGSNSTYLTSKSKSSSTTYFKRNSHTDSASMDKSLSKLAHADGDQTSIIPVHQVIDKVKGYCNAHSDNFYKNIIMSDTFSHSTKF

SEQ ID NO: 260217 - DNA, 6887 bp, Artificial Sequence
  derived and/or modified sequence
ccaagtacctagggtggtggccgagtcccgcctcccgccagcgggggcgaggacctgcgacgcgcacccctgcctggcccggtctcctcagcaccagccccacgcacaccctacttcctcagcttctcgccctcaccctgccaacttccctgcgaggagggacctgccgccagcctgcttcctcgtccgcaggccctgcgctgaacgctgccgcgcccagggttcaccttgcgccgtcgggaaagcccatgaactctccagaaacggcgtaaaggagggtcccgccgcggcgcagggctggggcgcctgggttccccctgggtggagcagcggcagcagagcgggaaagtggtggaggatgatcttgcggccaaaggggacctcggcgcagtaatgtcaacatgatgtttcgctcagatcgaatgtggagctgccattggaaatggaagcccagtcctctcctgttcttatttgctttatatatcatgtgtgttcctcactcagtgtggggatgtgccaactgccgagtggttttgtccaacccttctgggacctttacttctccatgctaccctaacgactacccaaacagccaggcttgcatgtggacgctccgagcccccaccggttatatcattcagataacatttaacgactttgacattgaagaagctcccaattgcatttatgactcattatcccttgataatggagagagccagactaaattttgtggagcaactgccaaaggcctatcatttaactcaagtgcgaatgagatgcatgtgtccttttcaagtgactttagcatccagaagaaaggtttcaatgccagctacatcagagttgccgtgtccttaaggaatcaaaaggtcattttaccccagacatcagatgcttaccaggtatctgttgcaaaaagcatctctattccagagctcagtgctttcacactctgctttgaagcaaccaaagttggccatgaagacagtgattggacagctttctcctactcaaatgcatccttcacacaattgctcagttttggaaaggccaagagtggctactttctatccatttctgattcaaaatgtttgttgaataatgcattacctgtcaaagaaaaagaagacatttttgcagaaagctttgaacagctctgccttgtttggaataattctttgggctctattggtgtaaatttcaaaagaaactatgaaacagttccatgtgattctaccattagtaaagttattcctgggaatgggaaattgttgttgggctccaatcaaaatgaaattgtctctctaaaaggggacatttataactttcgactttggaattttaccatgaatgccaaaatcctctccaacctcagctgtaatgtgaaagggaatgtagtcgactggcaaaatgacttctggaatatcccaaacctagctctgaaagctgaaagcaacctaagctgtggttcctacctgatcccgctcccagcagcagaactggccagctgtgcagacctggggaccctctgtcaagctactgtaaactctcctagtactacaccacccactgtcaccactaacatgcctgttactaacagaatcgataaacaaaggaatgatggaattatctatagaatatccgtagtgattcagaacatccttcgtcaccctgaggtaaaagtacagagcaaggtggcagaatggctcaattcaaccttccaaaattggaactacacggtttatgtcgttaatatcagttttcacctgagtgctggagaggacaagattaaagtcaagagaagccttgaggatgagccaaggttggtgctttgggcccttctagtttacaatgctaccaacaatactaatttggaaggaaaaatcattcagcagaagctcctaaaaaataatgagtccttggatgaaggcttgaggctacatacagtgaatgtgagacaactgggtcattgtcttgccatggaggaacccaaaggctactactggccatctatccaaccttctgaatacgttcttccttgtccagacaagcctggcttttctgcttctcggatatgtttttacaatgctaccaacccattggtaacctactggggacctgttgatatctccaactgtttaaaagaagcaaatgaagttgctaaccagattttaaatttaactgctgatgggcagaacttaacctcagccaatattaccaacattgtggaacaggtcaaaagaattgtgaataaagaagaaaacattgatataacacttggctcaactctaatgaatatattttctaatatcttaagcagttcagacagtgacttgcttgagtcatcttctgaagctttaaaaacaattgatgaattggccttcaagatagacctaaatagcacatcacatgtgaatattacaactcggaacttggctctcagcgtatcatccctgttaccagggacaaatgcaatttcaaattttagcattggtcttccaagcaataatgaatcgtatttccagatggattttgagagtggacaagtggatccactggcatctgtaattttgcctccaaacttacttgagaatttaagtccagaagattctgtattagttagaagagcacagtttactttcttcaacaaaactggacttttccaggatgtaggaccccaaagaaaaactttagtgagttatgtgatggcgtgcagtattggaaacattactatccagaatctgaaggatcctgttcaaataaaaatcaaacatacaagaactcaggaagtgcatcatcccatctgtgccttctgggatctgaacaaaaacaaaagttttggaggatggaacacgtcaggatgtgttgcacacagagattcagatgcaagtgagacagtctgcctgtgtaaccacttcacacactttggagttctgatggaccttccaagaagtgcctcacagttagatgcaagaaacactaaagtcctcactttcatcagctatattgggtgtggaatatctgctattttttcagcagcaactctcctgacatatgttgcttttgagaaattgcgaagggattatccctccaaaatcttgatgaacctgagcacagccctgctgttcctgaatctcctcttcctcctagatggctggatcacctccttcaatgtggatggactttgcattgctgttgcagtcctgttgcatttcttccttctggcaacctttacctggatggggctagaagcaattcacatgtacattgctctagttaaagtatttaacacttacattcgccgatacattctaaaattctgcatcattggctggggtttgcctgccttagtggtgtcagttgttctagcgagcagaaacaacaatgaagtctatggaaaagaaagttatgggaaagaaaaaggtgatgaattctgttggattcaagatccagtcatattttatgtgacctgtgctgggtattttggagtcatgttttttctgaacattgccatgttcattgtggtaatggtgcagatctgtgggaggaatggcaagagaagcaaccggaccctgagagaagaagtgttaaggaacctgcgcagtgtggttagcttgacctttctgttgggcatgacatggggttttgcattctttgcctggggacccttaaatatccccttcatgtacctcttctccatcttcaattcattacaaggcttatttatattcatcttccactgtgctatgaaggagaatgttcagaaacagtggcggcagcatctctgctgtggtagatttcggttagcagataactcagattggagtaagacagctaccaatatcatcaagaaaagttctgataatctaggaaaatctttgtcttcaagctccattggttccaactcaacctatcttacatccaaatctaaatccagctctaccacctatttcaaaaggaatagccacacagacagtgcttccatggacaagtccttgtcaaaactggcccatgctgatggagatcaaacatcaatcatccctgtccatcaggtcattgataaggtcaagggttattgcaatgctcattcagacaacttctataaaaatattatcatgtcagacaccttcagccacagcacaaagttttaatgtctttaagaaaaagaaatcaatctgcagaaatgtgaagatttgcaagcagtgtaaactgcaactagtgatgtaaatgtgctattacctaggtaactgcatatatataaggaatgtattttgttaagaaggcttttgtgaaattcagaatttttctttttaatatatttcttccatggaagagttgtcatcactaaaacttcagtactgagagtaacatgactcagtagccacagaagctatgatttgtaaaatatataattgaatcagagtaatcataatgcaggggagacattcaaattagagacaagggagaagcaatgctgaggaagaccctagatagagctcattttactccacctaatcgttatatctggatatacccattttctgcatcttctttctcaacaataaaaaatgtaactattttgaatgcccacaaatcccattccagtgttactttctgtgaatgcagtaccatattctcattttcaatgacatttcaaccacaggcagaaaagactgtttactccttgacccaaagattaaaaaggattttttattattttaaatattacaccttcagaaccataacatgcttaagaaaactttcccaaaatgttgacctagttaaatgaggctatataaatttctaatattttacttattctattcaaggcatagggccaaagcattaagtataatttaatcccatacattcgagttaagtttagtgttgatgttccatcattctggacctcccaggagttgtttaagaatgaatctcttacacctctacttttgcccctctactgtatattaagcccataggcttgtgggaggaaggagaatttccattaggcaagctgtatgcagtggaattttccttttaggagacacacaattaagactctctggttctgtccttgctttggagactttaagacatttcctaaagcacaaataaaagcctcgtatttccccattgagagttttgttccaaggaatatgaagtgagacatatgggtgagtcataataatcaaaataatttatgaagagctgggtctgcaatagctagtctaaaaactacttgtgtgtcagtcctctggttatagtatataagagcctgaggaggtctggcaagatagatggtgtattatttatggatcaggctgctgcatacaaaccttgcatactattatgcagcttacctaactctcagactattctgagtaatgcttgcttgctaatgaatgtataggagaccacattgtaattgttcttagatgatggagtccatgcagtttcttagaaatcggtctcagtgcatgctgtgctttttcacatttgctctgggttatctgggaagtatcaggttctgggaggcaacagcattaagtgataagaaaaggagacattctggcaaagccaatctgcttaaaggcaaagtccagaacctggaacctagaggcctttctctctgcacgaaaaacaggtagtttgcagtctgagatatgggagagcttttaggctacacagcaacccaagggacctctcaccttttgctgagcttcaatcaggaagctatttgcctggctccagcagatgatgagataatgaggtagtgggttttttattactgttccattttgcaacatcctgcaacaccatcctgggagacaagagcattacccagcttggctttcacgggggagggttgtattcagtaaaaaagaatagtaaatataaggtcactgagattctaagtaagatagtaaatctaaggtcactgagccaaatccttttcaataggcatatattaacaggctgcttattttggcggaggttacatatggatgaaaatgaatcttagtcactgaatattcatatacatttcccccaaaaccttagacattcatagtagattttaattagttagctttctaactagtcagatttctgcccaaagtgcttagtcaatagtaattaagatatagcttcaaaaatggctttgcttttgatttctactcatattcgtatggctccagaaaaatatttttttcatatttgacaatgtcagctccactttagaaattttcaataaccagatgagaaaaaaattaagaaattgctcaagggaaacatttgtaaatggatttgaaagattgagccaaattctgttgtcagttctaagcatgcagttctcacctccatttagtcccccatcagaacagaggtcaggaatttagctggggagcctaaatttagttcagcttacctttgagaatagcatcaattcagactctcttttcattatgttttcttttctttttccctctttttaaactacattgtgttagagtcatagtctaggatcctgagagattttccattcttgtcaccattcacttgcattgtaaagattttctttgtctgttgttggcatagattcttttgtacatatttatttatttgtgtttatatatgtcaattggtttcctttcttagcttgatattgcctagctttgttgttttaattaactttctattagagagactgtatatattttttctaaatactttgtgaaatcatttttggtagcaatatctttgaatatgatgaataaaagtgactgtgagtgcaaatagaattagcagtaagaagctactctagctaatttgccattttacttaaatggaaaatgtttttcaaataaatacttatgttgttc

SEQ ID NO: 260218 - DNA, 3753 bp, Artificial Sequence
  derived and/or modified sequence
atgatgttcagaagtgatcgaatgtggagttgtcactggaagtggaagccatcgcctttgctatttcttttcgccctatatattatgtgtgtgcctcactcagtgtggggatgtgccaattgccgggttgtcctgtccaatcccagtggcacatttaccagtccatgttaccccaacgactatcccaactctcaggcctgcatgtggaccctccgcgcgcccaccggctacattatccagatcacgttcaatgacttcgatatcgaggaggccccaaattgcatttatgattccctgtccctggacaatggcgagtctcaaaccaagttctgtggcgcaaccgccaaagggctgagctttaactcatctgctaatgagatgcatgtgtctttcagtagcgatttctccatccagaagaagggattcaatgcctcatatatccgcgtcgcagtgtcactgcgcaatcagaaggtgatcctgcctcaaacaagcgatgcttaccaggtatcagtggcaaaaagcatctcaatcccggaattgtccgcgttcactctctgtttcgaggctactaaggtgggccacgaggatagtgactggactgcattctcctactctaacgcctctttcacccagctgttgtccttcggcaaagccaagtccgggtactttctgagcatctcggacagtaagtgtttactaaataacgccttgcccgtgaaagagaaggaagacatatttgccgagtcttttgagcagctgtgcctggtatggaataacagtttaggtagtataggcgtgaatttcaagaggaactacgaaactgtgccttgcgatagtactatttcaaaggttatccccggaaatgggaagttgctcctgggaagcaaccagaacgaaattgtgtcactcaaaggagatatttataatttccggctctggaactttactatgaatgcgaagattttatcgaatcttagttgtaacgtgaaagggaatgtggtggactggcagaatgatttctggaacatcccgaacctggcactgaaggcagaatccaatctatcctgcggttcctatctcatcccactaccagccgctgagctggcaagctgtgctgacctgggaaccctatgtcaggccacagtgaattctccatcaaccaccccaccgacagttaccaccaatatgccagtcaccaatcgaatcgataagcagcggaatgatggcatcatctacaggatatcagtggttattcagaatatcctgcgacacccagaggtaaaggtccaatcaaaggtggcggagtggttgaattcgacttttcagaactggaattacaccgtgtacgttgtcaacatctcattccatttatccgcaggggaggataagataaaagtgaaaagatctctggaagatgaaccacgcttggtcctctgggcactgctcgtatataacgccacgaacaacactaatctagagggcaaaattattcagcaaaaactgctgaaaaacaacgaaagcctggacgaggggttaagactgcacaccgttaacgttcggcagctaggccattgcttggctatggaagaacccaagggctattattggccttcaatccaaccctcagagtacgttctgccatgtccagacaagcctggtttttccgctagtagaatttgtttctataacgcaacaaaccctctcgttacatattggggccccgttgatatcagtaactgtctaaaggaagccaacgaggtcgcaaatcagatcctgaatctaaccgctgatgggcagaacctcacgtccgctaacattaccaacattgtagaacaggtcaagcggattgttaacaaagaagaaaacatcgacattacgcttggatccacactgatgaacattttctctaatatcttgagttctagcgacagcgatctgctcgagagctctagcgaggcacttaagaccatcgacgagctcgccttcaagattgacctgaactctactagccacgtcaacattacaacaagaaacttggcactgagtgtaagctctctcctgcctggcaccaacgctatctccaatttctctatcggactgccctccaacaatgagtcatacttccagatggatttcgagtccgggcaagtagaccccctcgccagtgttatcctcccacccaatctcctggaaaaccttagcccagaggacagcgtcctggtgcgcagagcccaattcaccttttttaataaaactggcctgttccaggacgttggcccacagcgaaagacgctcgtctcttacgtgatggcgtgtagcattgggaacatcacgatccagaacctgaaggacccagtgcagattaaaatcaagcacacacggacacaggaggttcaccatccgatctgcgcgttctgggacttgaataaaaataagagcttcggaggctggaacacgagcggatgcgtcgcacaccgcgactccgacgcctctgaaactgtgtgtctttgtaatcatttcacacacttcggcgttctaatggacctgcctcgaagcgcctcccagctggatgcaagaaacaccaaggtgcttaccttcatttcttatatcgggtgcggcatctcagcaattttcagtgcagctactctgctgacttatgtggcctttgaaaagctgcggcgcgattaccccagtaagatcctaatgaacctgtctactgcgctgttatttctcaacttgttgtttcttctggatgggtggataacaagcttcaatgtagacggcctttgtattgcagtagctgtgctgctccatttcttcctcctagcaactttcacttggatggggctggaggcgatccacatgtatatcgcgcttgtaaaggtttttaacacatacatcaggaggtatatcttgaagttttgcattataggctggggcttgccggctctcgtcgttagtgtcgtgctagcaagtagaaataataacgaagtgtacgggaaagaatcatacggcaaagagaaaggcgatgagttctgctggatccaggatcctgtaatcttctacgtgacttgtgcaggatacttcggtgtgatgtttttcttgaacatcgcaatgtttatcgtggtcatggtccaaatatgtgggcggaacggcaaacggtccaatcgcacgctccgggaggaagtcctgaggaacctgcggagtgtcgtgagcctgaccttcttactcggaatgacatggggcttcgccttctttgcctggggaccacttaacataccattcatgtatctgttcagcatcttcaactcgttgcaaggcctgttcatctttattttccactgcgctatgaaagaaaatgttcagaagcaatggaggcaacacttgtgctgcggaagattcagactagccgataattccgattggtccaaaacagccacaaacatcattaagaaatcgtctgacaatttaggtaagagcttgtcttccagctccatcggcagtaactcaacctacctgacaagcaagtcaaagtctagtagtaccacatactttaaacgaaattctcataccgactcagcctccatggataaatcactatccaaactggctcatgccgatggtgaccaaacaagtattattcctgtccatcaagtgatagataaggtgaagggttattgcaacgcgcattccgacaacttctataaaaatataatcatgagcgatactttttcccattcgacgaagttttag

SEQ ID NO: 260219 - DNA, 3753 bp, Artificial Sequence
  derived and/or modified sequence
atgatgttcagaagtgacaggatgtggagctgccactggaagtggaagcccagccccctgctcttcctgtttgccctgtacatcatgtgtgtgccccacagcgtgtggggctgtgccaactgccgggtggtgctgagcaaccccagcggcaccttcaccagcccctgctacccaaatgactaccccaacagccaggcctgcatgtggaccctgcgggcccccaccggctacatcatccagatcaccttcaatgactttgacatcgaggaggcccccaactgcatctatgacagcctgagcctggacaatggagagagccagaccaagttctgtggggccacagccaagggcctgtccttcaacagcagcgccaatgagatgcacgtgtccttcagcagtgacttcagcatccagaagaagggcttcaatgccagctacatccgggtggccgtgtccctgaggaaccagaaggtgatcctgccccagaccagtgatgcctaccaggtgtctgtggccaagagcatcagcatccctgagctgagcgccttcaccctgtgctttgaggccaccaaggtgggccatgaagattctgactggacagccttctcctacagcaatgccagcttcacccagctgctgagctttgggaaggccaagagcggctacttcctgagcatcagtgacagcaagtgcctgctgaacaatgccctgcctgtgaaggagaaggaggacatctttgctgagagctttgagcagctgtgcctggtgtggaacaacagcctgggcagcattggagtgaacttcaagaggaactatgagaccgtgccctgtgacagcaccatcagcaaggtgattcctggaaatggcaagctgctgctgggcagcaaccagaatgagatcgtgtccctgaagggggacatctacaacttccggctgtggaacttcaccatgaatgccaagatcctgagcaacctgagctgcaatgtgaagggaaatgtggtggactggcagaatgacttctggaacatccccaacctggccctgaaggccgagagcaacctgagctgtggcagctacctgatccccctgcctgctgctgagctggccagctgtgccgacctgggcaccctgtgccaggccaccgtgaacagccccagcaccaccccacccaccgtgaccaccaacatgcctgtgaccaacagaattgacaagcagagaaatgatggcatcatctaccgcatctctgtggtgatccagaacatcctgcggcaccctgaggtgaaggtgcagagcaaggtggccgagtggctgaacagcaccttccagaactggaactacacagtgtatgtggtgaacatctccttccacctgtctgctggggaggacaagatcaaggtgaagaggagcctggaggatgagccccggctggtgctgtgggccctgctggtgtacaatgccaccaacaacaccaacctggagggcaagatcatccagcagaagctgctgaagaacaatgaaagcctggatgagggcctgcggctgcacacagtgaatgtgcggcagctgggccactgcctggccatggaggagcccaagggctactactggcccagcatccagcccagtgaatatgtgctgccctgcccagacaagccaggcttcagcgccagccgcatctgcttctacaatgccaccaaccccctggtgacctactggggccctgtggacatcagcaactgcctgaaggaggccaatgaggtggccaaccagatcctgaacctgacagcagatggccagaacctgaccagcgccaacatcaccaacatcgtggagcaggtgaagagaattgtgaacaaggaggagaacatcgacatcaccctgggcagcaccctgatgaacatcttcagcaacatcctgagcagcagtgacagcgacctgctggagagcagcagcgaggccctgaagaccattgatgagctggccttcaagattgacctgaacagcaccagccacgtgaacatcaccaccaggaacctggccctgtctgtgagcagcctgctgcccggcaccaatgccatcagcaacttcagcatcggcctgcccagcaacaatgaaagctacttccagatggactttgagagcggccaggtggaccccctggccagcgtcatcctgccccccaacctgctggagaacctgagccctgaggacagcgtgctggtgcggcgggcccagttcaccttcttcaacaagacaggcctcttccaggatgtgggcccccagaggaagaccctggtgtcctatgtgatggcctgcagcatcggcaacatcaccatccagaacctgaaggaccctgtgcagatcaagatcaagcacaccaggacccaggaggtgcaccaccccatctgtgccttctgggacctgaacaagaacaagagctttggaggctggaacaccagcggctgtgtggcccaccgggacagtgatgccagcgagaccgtgtgcctgtgcaaccacttcacccactttggagtgctgatggacctgcccaggtctgccagccagctggatgccaggaacaccaaggtgctgaccttcatctcctacatcggctgcggcatcagcgccatcttctctgctgccaccctgctgacctacgtggcctttgagaagctgcggcgggactaccccagcaagatcctgatgaacctgagcacagccctgctcttcctgaacctgctcttcctgctggatggctggatcaccagcttcaacgtggatggcctgtgcatcgctgtggccgtgctgctgcacttcttcctgctggccaccttcacctggatgggcctggaggccatccacatgtacatcgccctggtgaaggtgttcaacacctacatccgccgctacatcctgaagttctgcatcatcggctggggcctgcctgccctggtggtgtctgtggtgctggccagcaggaacaacaatgaggtgtatggcaaggagagctatggcaaggagaagggagatgagttctgctggatccaggaccccgtcatcttctacgtgacctgtgccggctactttggagtgatgttcttcctgaacatcgccatgtttattgtggtgatggtgcagatctgtggcagaaatggcaagaggagcaacagaaccctgcgggaggaggtgctgaggaacctgcggtctgtggtgtccctgaccttcctgctgggcatgacctggggctttgccttctttgcctggggccccctgaacatccccttcatgtacctgttcagcatcttcaacagcctgcagggcctcttcatcttcatcttccactgtgccatgaaggaaaatgtgcagaagcagtggaggcagcacctgtgctgcggccgcttccggctggccgacaacagcgactggagcaagacagccaccaacatcatcaagaagagcagtgacaacctgggcaagagcctgagcagcagcagcatcggcagcaacagcacctacctgaccagcaagagcaagagcagcagcaccacctacttcaagaggaacagccacacagattctgcctccatggacaagagcctgagcaagctggcccacgcagatggagaccagaccagcatcatccctgtgcaccaggtgattgacaaggtgaagggctactgcaatgcccacagcgacaacttctacaagaacatcatcatgtctgacaccttcagccacagcaccaagttctag

SEQ ID NO: 260220 - DNA, 3753 bp, Artificial Sequence
  derived and/or modified sequence
atgatgttccggagcgaccggatgtggagctgccactggaagtggaaaccctcccccctgttattcttgttcgcactctatatcatgtgtgtgcctcacagtgtctggggctgtgctaattgccgggtggtgttgtctaacccctctgggaccttcacatccccctgctacccgaacgattatcccaattcccaggcttgcatgtggaccctaagagctcctactggctacattatccaaataactttcaacgattttgatatcgaggaggcaccaaattgcatatatgattctcttagcttagataacggagaatcccaaaccaagttttgtggggcaaccgccaaagggctgagttttaattctagcgctaacgaaatgcacgtctctttctctagcgatttctccattcaaaaaaaaggcttcaatgcctcctacatccgtgtggccgtgtctcttagaaatcaaaaggtgatccttcctcagaccagcgacgcctatcaggtgtcagtggcaaagtccatttccatcccggaactttcagcctttacgttgtgcttcgaggcaactaaagtcggtcacgaagattccgactggaccgcgttctcctatagcaacgcttccttcacccagctgctgtcatttggcaaggccaaatcaggctatttcctcagtatttcggattccaagtgcctattaaacaatgcactgccagtcaaggagaaagaagacattttcgctgaatctttcgagcagctctgccttgtgtggaacaactcacttggcagcatcggggtgaattttaaacgtaattacgaaacagtgccatgtgactctacgatctccaaggtgatccccggcaatgggaaactgttgctcgggtccaaccagaacgaaattgtgtccctcaagggagatatctacaacttccgtctctggaacttcactatgaacgctaagatcctgagtaacctctcttgtaacgttaaaggaaacgtcgtggactggcagaacgacttttggaatatcccgaatctggccttgaaagcagagtccaatctgtcatgtggcagttacctgatccctctccctgctgcagaactggcctcttgcgcagacttgggcactctgtgccaggcgacggttaactctccatctacaacccccccgactgtaacgaccaacatgcctgttacaaaccgaatcgacaagcaaagaaacgacggcatcatctacagaatttccgtcgttattcagaatatcctcaggcatccggaagtaaaggtccagagcaaagtggctgaatggctcaactcaaccttccagaattggaattacacggtatacgtggtaaatatcagcttccatctgtccgcaggtgaggacaaaatcaaagtaaaacgtagtctagaggacgagcctcgtctcgtgctatgggccttactcgtgtacaatgccacaaataataccaatctggaaggaaagatcatccagcaaaagttattgaagaataacgagtccctggatgaaggtttgcgcctccacactgtgaacgtccggcaactgggccactgcctcgccatggaggagcctaaagggtattactggccctcaattcagcccagcgaatatgtacttccgtgccccgacaaacccgggttctcagcctccagaatctgtttctacaacgctactaatcccctcgtgacgtactggggccctgttgacattagcaactgcctcaaagaggcaaatgaagtggctaaccaaatcctcaaccttacagcggacggacagaatctaacctctgccaatataaccaacattgtggaacaggtcaaaagaatcgtaaacaaagaagaaaacatcgacattaccctcggctccacactgatgaacatattctctaatatcctgtcctcaagcgatagcgatttattggagagttctagcgaggcactcaagaccatcgacgagctggcctttaaaattgatttgaattctactagccatgtcaacatcactacaagaaacctggcgctctccgtgtcctccctgctgcctggcaccaacgccatcagcaactttagtatcggactgccttcaaataatgaatcctatttccagatggactttgaaagcggacaagtcgacccactggctagcgtcattcttccccccaaccttctggagaacttgagccctgaggactccgtactcgtacgtagagcgcagtttacgttcttcaacaaaacagggctgtttcaagacgtagggccacaacggaaaaccctggttagctacgtcatggcctgtagtatcggcaacatcacgatccaaaatttgaaggatcctgttcagattaaaattaaacacacgcggactcaggaggtgcatcaccccatctgtgcgttttgggacctgaataagaataagtccttcggtggctggaatacatcaggttgtgtcgcacatcgggacagcgacgcatccgagacggtctgcctatgtaaccattttacccatttcggagtcctcatggacctgccccgcagtgcgagccagctcgacgctcgaaatacaaaggttttaactttcatctcatatatcgggtgcggcatttcagctatcttctctgcagcaaccctgctcacatatgtggcgttcgaaaaactgcggcgtgattaccccagcaaaatactcatgaatctttcaactgccttactcttcctaaatctgctattcctcctggatggctggattacaagctttaacgtggatggactgtgcatcgctgtggcagtgctcctccacttctttttactggctaccttcacatggatgggactggaagccatacacatgtacatcgcgcttgtgaaggtctttaatacctatatccgaaggtacattctcaaattctgtattataggctggggtctgcctgcactggtggtctccgtggtgctggccagtcgtaataacaacgaggtgtacggcaaagaaagctacgggaaggaaaagggagacgagttctgttggatccaggatccagtgattttttacgtcacttgcgctggttattttggcgtgatgttctttctgaacattgccatgtttatcgtggtgatggttcaaatttgtggccggaacggaaagagatccaatagaacattacgtgaagaggtcctgaggaatctaagatcagtagtgagtctgacatttctcttgggaatgacatgggggttcgcatttttcgcttggggtcctttaaacatccccttcatgtacctattcagcatctttaattcactgcaggggctatttatctttattttccactgcgcgatgaaagagaatgtgcaaaagcagtggcgacaacacctgtgttgcgggcggttcaggctggcagataacagcgactggtccaagacggccacaaacattattaagaaaagctctgacaacctgggcaagagcttgtcttcaagctccataggctccaacagtacatacctcacctcaaaatcgaagagctcctccaccacctactttaaacgcaatagtcataccgattctgccagtatggacaaatctctgtcaaagctagctcacgcagacggcgaccaaacgagcattattcctgtacaccaggtcatcgacaaagttaagggttattgcaacgctcactccgacaacttctataagaatataatcatgagcgacacattctcccattctactaagttctag

SEQ ID NO: 260221 - DNA, 3753 bp, Artificial Sequence
  derived and/or modified sequence
atgatgtttcggtcagatcgtatgtggtcttgtcactggaagtggaaaccttcacctcttttgtttttgttcgcattgtacattatgtgcgtgcctcatagtgtttggggatgtgctaactgtagagtagtgctctctaatccgtcaggcactttcacttcaccctgctatccaaacgactacccaaacagtcaggcatgtatgtggaccttgagagcccctaccggatatattatccagattacctttaatgactttgatatcgaagaagcaccaaattgcatttatgattccctgagcttggacaatggcgaaagccagaccaagttctgcggggctaccgccaaggggctctccttcaactcatcagctaatgagatgcacgtcagtttctcttctgactttagcattcagaaaaaaggattcaatgcttcttatattcgcgtcgctgtgagcctgaggaaccagaaggtcattctccctcaaacctcggacgcttatcaggtgtccgtggccaaatcaatcagcataccagaattgtccgcatttacactgtgtttcgaagcgactaaggtcggtcacgaagatagtgactggactgccttcagttacagtaatgcatcttttacacagctacttagctttggcaaagccaagtcaggttacttcctaagcatttcggatagcaaatgcctcctgaacaatgctctgcctgtgaaggaaaaggaggacatcttcgccgaatcgtttgaacaactgtgcctcgtctggaataactcactcgggtccataggggttaacttcaaacgtaattacgagactgtaccctgtgattctaccatctccaaggtcataccaggcaatggcaagctactcctcggctcaaaccagaacgaaattgtgagtctgaagggagacatctacaactttagactatggaacttcacgatgaacgccaagatcctctctaacctctcctgcaatgtgaagggcaatgtggtcgactggcagaatgacttctggaacatcccaaacctggctctgaaagccgagtccaatttgagttgcggttcctacttgatcccattgccggcagccgagctggcatcatgtgccgacctgggaacgctttgccaggcaacagtgaatagtccatcaactacgccgcctaccgtgaccacaaacatgccagtgacaaatcgcatcgataaacagagaaatgacggcattatttatcggatttctgttgttatacagaatatcctccgccaccctgaggtgaaggtgcagtctaaggtcgctgagtggctcaactcgacttttcagaactggaattataccgtatacgtcgtaaatatctcattccatctgtccgccggagaggacaaaatcaaggtgaaacgatcgttggaggatgagcccaggctggtgctgtgggcgctgctagtatacaacgcaacaaacaatacaaacctcgaagggaaaatcattcaacagaagctccttaagaataatgagagcctcgacgagggcctgcggctacacacagtcaatgtacgccagctcggacattgccttgccatggaggaaccaaaggggtattactggcccagcattcaacccagcgagtatgtcttgccttgccccgacaagcctggatttagcgcctcacgtatctgcttctataatgcgacaaaccccttggttacctactggggccctgtcgacatttcaaactgcctcaaggaagcgaatgaggtggcgaaccagatcctgaacctgaccgcagacggccagaatctcacatcagcgaatattacaaatattgtggagcaggtgaagcggattgtcaacaaagaagaaaacattgacatcactttgggttccacacttatgaacattttcagcaatattttatcctcctctgacagtgacttgctggaatccagcagcgaggcactaaagacaatcgatgagctggcatttaaaatcgacctgaattcaaccagtcacgtcaacataacaactcgcaacctggcccttagcgtctcgagcttgctgccaggtacaaacgctatcagcaatttcagtatcggcctgccgtccaataatgaatcttacttccagatggactttgagtctgggcaggtagatccactagcttctgtgattctgccaccaaacctgctcgaaaatctctcccccgaggattccgtgctggttaggcgcgctcagttcacctttttcaacaaaaccggactcttccaggatgtgggcccacaaagaaaaacgcttgtttcgtatgtgatggcctgttctatcggtaacataaccatccagaacctcaaagatccggtgcagatcaaaatcaagcacaccaggacccaggaggtacaccatcccatctgcgccttttgggacctgaataagaataaatcattcgggggatggaatacttccggatgcgtcgcccaccgagattcagatgcctctgagaccgtatgcttgtgtaatcattttacccacttcggtgttctaatggatctgcccaggagcgcaagccagttggacgctcgaaatactaaagtcctcacttttatttcctacatcgggtgcgggatttccgccatattcagtgccgctactctcctgacatacgtggcttttgaaaagctgcgcagagactatccttctaaaattctgatgaacctgtctactgctctcctcttcttgaatctgcttttcttgctcgacggctggattacgtcatttaatgtggacgggctctgtattgcagtcgcagtactcttgcacttttttcttctcgccacattcacttggatggggcttgaagccatccatatgtacattgctctggtcaaggtgttcaacacgtatatcaggagatacatattgaagttctgtattattgggtggggcctccccgcacttgtcgtttcagtggtgctggcctcaaggaataataatgaggtatacggcaaggaaagctacggaaaagaaaagggtgacgagttctgttggattcaggatcctgttattttctacgtgacctgtgctggatacttcggcgttatgttcttcctaaacatcgccatgtttatcgtcgtcatggttcagatctgtggtagaaacgggaagagaagtaacagaaccctccgggaggaagtgctgcgcaacctgcgatccgttgtcagtctaacatttttattaggcatgacatgggggttcgccttcttcgcctggggccctctaaatattccttttatgtatctgttctccatttttaattctctgcagggcttgtttatctttatttttcactgtgcaatgaaagagaacgttcagaaacagtggagacagcatttgtgttgtggcaggttcaggctcgccgataatagtgactggtcaaagaccgccacgaacatcatcaagaaatcgtcagataacctgggcaagtcactgtccagcagtagtattggatctaattctacttatttgacctccaagagtaaaagttccagcactacctacttcaaacgcaattctcatacagattcagcaagcatggacaaaagcctgtctaaacttgcgcatgcagatggcgaccagacctcaattatccccgtgcatcaggtgatcgacaaagttaaaggatattgcaacgcacacagcgataacttctacaagaatattatcatgtctgataccttctcccactccactaaattttag

SEQ ID NO: 260222 - DNA, 3753 bp, Artificial Sequence
  derived and/or modified sequence
atgatgttcagaagcgacagaatgtggagctgccactggaagtggaagcccagccccctgctgttcctgttcgccctgtacatcatgtgcgtgccccacagcgtgtggggctgcgccaactgcagagtggtgctgagcaaccccagcggcaccttcaccagcccctgctaccccaacgactaccccaacagccaggcctgcatgtggaccctgagagcccccaccggctacatcatccagatcaccttcaacgacttcgacatcgaggaggcccccaactgcatctacgacagcctgagcctggacaacggcgagagccagaccaagttctgcggcgccaccgccaagggcctgagcttcaacagcagcgccaacgagatgcacgtgagcttcagcagcgacttcagcatccagaagaagggcttcaacgccagctacatcagagtggccgtgagcctgagaaaccagaaggtgatcctgccccagaccagcgacgcctaccaggtgagcgtggccaagagcatcagcatccccgagctgagcgccttcaccctgtgcttcgaggccaccaaggtgggccacgaggacagcgactggaccgccttcagctacagcaacgccagcttcacccagctgctgagcttcggcaaggccaagagcggctacttcctgagcatcagcgacagcaagtgcctgctgaacaacgccctgcccgtgaaggagaaggaggacatcttcgccgagagcttcgagcagctgtgcctggtgtggaacaacagcctgggcagcatcggcgtgaacttcaagagaaactacgagaccgtgccctgcgacagcaccatcagcaaggtgatccccggcaacggcaagctgctgctgggcagcaaccagaacgagatcgtgagcctgaagggcgacatctacaacttcagactgtggaacttcaccatgaacgccaagatcctgagcaacctgagctgcaacgtgaagggcaacgtggtggactggcagaacgacttctggaacatccccaacctggccctgaaggccgagagcaacctgagctgcggcagctacctgatccccctgcccgccgccgagctggccagctgcgccgacctgggcaccctgtgccaggccaccgtgaacagccccagcaccaccccccccaccgtgaccaccaacatgcccgtgaccaacagaatcgacaagcagagaaacgacggcatcatctacagaatcagcgtggtgatccagaacatcctgagacaccccgaggtgaaggtgcagagcaaggtggccgagtggctgaacagcaccttccagaactggaactacaccgtgtacgtggtgaacatcagcttccacctgagcgccggcgaggacaagatcaaggtgaagagaagcctggaggacgagcccagactggtgctgtgggccctgctggtgtacaacgccaccaacaacaccaacctggagggcaagatcatccagcagaagctgctgaagaacaacgagagcctggacgagggcctgagactgcacaccgtgaacgtgagacagctgggccactgcctggccatggaggagcccaagggctactactggcccagcatccagcccagcgagtacgtgctgccctgccccgacaagcccggcttcagcgccagcagaatctgcttctacaacgccaccaaccccctggtgacctactggggccccgtggacatcagcaactgcctgaaggaggccaacgaggtggccaaccagatcctgaacctgaccgccgacggccagaacctgaccagcgccaacatcaccaacatcgtggagcaggtgaagagaatcgtgaacaaggaggagaacatcgacatcaccctgggcagcaccctgatgaacatcttcagcaacatcctgagcagcagcgacagcgacctgctggagagcagcagcgaggccctgaagaccatcgacgagctggccttcaagatcgacctgaacagcaccagccacgtgaacatcaccaccagaaacctggccctgagcgtgagcagcctgctgcccggcaccaacgccatcagcaacttcagcatcggcctgcccagcaacaacgagagctacttccagatggacttcgagagcggccaggtggaccccctggccagcgtgatcctgccccccaacctgctggagaacctgagccccgaggacagcgtgctggtgagaagagcccagttcaccttcttcaacaagaccggcctgttccaggacgtgggcccccagagaaagaccctggtgagctacgtgatggcctgcagcatcggcaacatcaccatccagaacctgaaggaccccgtgcagatcaagatcaagcacaccagaacccaggaggtgcaccaccccatctgcgccttctgggacctgaacaagaacaagagcttcggcggctggaacaccagcggctgcgtggcccacagagacagcgacgccagcgagaccgtgtgcctgtgcaaccacttcacccacttcggcgtgctgatggacctgcccagaagcgccagccagctggacgccagaaacaccaaggtgctgaccttcatcagctacatcggctgcggcatcagcgccatcttcagcgccgccaccctgctgacctacgtggccttcgagaagctgagaagagactaccccagcaagatcctgatgaacctgagcaccgccctgctgttcctgaacctgctgttcctgctggacggctggatcaccagcttcaacgtggacggcctgtgcatcgccgtggccgtgctgctgcacttcttcctgctggccaccttcacctggatgggcctggaggccatccacatgtacatcgccctggtgaaggtgttcaacacctacatcagaagatacatcctgaagttctgcatcatcggctggggcctgcccgccctggtggtgagcgtggtgctggccagcagaaacaacaacgaggtgtacggcaaggagagctacggcaaggagaagggcgacgagttctgctggatccaggaccccgtgatcttctacgtgacctgcgccggctacttcggcgtgatgttcttcctgaacatcgccatgttcatcgtggtgatggtgcagatctgcggcagaaacggcaagagaagcaacagaaccctgagagaggaggtgctgagaaacctgagaagcgtggtgagcctgaccttcctgctgggcatgacctggggcttcgccttcttcgcctggggccccctgaacatccccttcatgtacctgttcagcatcttcaacagcctgcagggcctgttcatcttcatcttccactgcgccatgaaggagaacgtgcagaagcagtggagacagcacctgtgctgcggcagattcagactggccgacaacagcgactggagcaagaccgccaccaacatcatcaagaagagcagcgacaacctgggcaagagcctgagcagcagcagcatcggcagcaacagcacctacctgaccagcaagagcaagagcagcagcaccacctacttcaagagaaacagccacaccgacagcgccagcatggacaagagcctgagcaagctggcccacgccgacggcgaccagaccagcatcatccccgtgcaccaggtgatcgacaaggtgaagggctactgcaacgcccacagcgacaacttctacaagaacatcatcatgagcgacaccttcagccacagcaccaagttctag

SEQ ID NO: 260223 - protein, 591 aa, Artificial Sequence
  derived and/or modified sequence
MSLLTNYEGLRHQIERLVRENEELKKLVRLIRENHELKSAIKTQAGGLGISGFTSGLGEATAGLSSRQNNGVFLPPSPAVANERVLEEVGIMALAPLAEMLTSLQPSATPGSLMSPLTGTLSTLLSGPAPTSQSSPLTSFLTSPIAGPLTGTLASSLGLPSTGTLTPSSLVAGPVAMSQSSPLIAPVMGTVAVSLSSPLLSSTATPPGVSQNLLANPMSNLVLPEAPRLRLAEPLRGGPTGPQSPACVVPTATTKVPLSTEPPQSTQDPEPLSMAFAGAPLQTSTPIGAMGTPAPKTAFSFNTSDTQAQPSAAQEQVVPASVPTSPTTSPTVTVLASAPALAPQVATSYTPSSTTHIAQGAPHPPSRMHNSPTQNLPVPHCPPHNAHSPPRTSSSPASVNDSRGPRTTEPSTKSMMEVERKLAHRKTSKFPENPRESKQLAWERLVGEIAFQLDRRILSSIFPERVRLYGFTVSNIPEKIIQASLNPSDHKLDEKLCQRLTQRYVSVMNRLQSLGYNGRVHPALTEQLVNAYGILRERPELAASEGGPYTVDFLQRVVVETVHPGMLADALLLLSCLSQLAHDDGKPMFIW

SEQ ID NO: 260224 - DNA, 1776 bp, Artificial Sequence
  derived and/or modified sequence
atgagcctgctgaccaactacgagggcctgagacaccagatcgagagactggtgagagagaacgaggagctgaagaagctggtgagactgatcagagagaaccacgagctgaagagcgccatcaagacccaggccggcggcctgggcatcagcggcttcaccagcggcctgggcgaggccaccgccggcctgagcagcagacagaacaacggcgtgttcctgccccccagccccgccgtggccaacgagagagtgctggaggaggtgggcatcatggccctggcccccctggccgagatgctgaccagcctgcagcccagcgccacccccggcagcctgatgagccccctgaccggcaccctgagcaccctgctgagcggccccgcccccaccagccagagcagccccctgaccagcttcctgaccagccccatcgccggccccctgaccggcaccctggccagcagcctgggcctgcccagcaccggcaccctgacccccagcagcctggtggccggccccgtggccatgagccagagcagccccctgatcgcccccgtgatgggcaccgtggccgtgagcctgagcagccccctgctgagcagcaccgccaccccccccggcgtgagccagaacctgctggccaaccccatgagcaacctggtgctgcccgaggcccccagactgagactggccgagcccctgagaggcggccccaccggcccccagagccccgcctgcgtggtgcccaccgccaccaccaaggtgcccctgagcaccgagcccccccagagcacccaggaccccgagcccctgagcatggccttcgccggcgcccccctgcagaccagcacccccatcggcgccatgggcacccccgcccccaagaccgccttcagcttcaacaccagcgacacccaggcccagcccagcgccgcccaggagcaggtggtgcccgccagcgtgcccaccagccccaccaccagccccaccgtgaccgtgctggccagcgcccccgccctggccccccaggtggccaccagctacacccccagcagcaccacccacatcgcccagggcgccccccacccccccagcagaatgcacaacagccccacccagaacctgcccgtgccccactgccccccccacaacgcccacagcccccccagaaccagcagcagccccgccagcgtgaacgacagcagaggccccagaaccaccgagcccagcaccaagagcatgatggaggtggagagaaagctggcccacagaaagaccagcaagttccccgagaaccccagagagagcaagcagctggcctgggagagactggtgggcgagatcgccttccagctggacagaagaatcctgagcagcatcttccccgagagagtgagactgtacggcttcaccgtgagcaacatccccgagaagatcatccaggccagcctgaaccccagcgaccacaagctggacgagaagctgtgccagagactgacccagagatacgtgagcgtgatgaacagactgcagagcctgggctacaacggcagagtgcaccccgccctgaccgagcagctggtgaacgcctacggcatcctgagagagagacccgagctggccgccagcgagggcggcccctacaccgtggacttcctgcagagagtggtggtggagaccgtgcaccccggcatgctggccgacgccctgctgctgctgagctgcctgagccagctggcccacgacgacggcaagcccatgttcatctggtag

SEQ ID NO: 260225 - DNA, 1776 bp, Artificial Sequence
  derived and/or modified sequence
atgtcccttctcactaattatgaaggtttgcgacatcagatcgaaaggctagtgagagaaaatgaagagctcaaaaagctcgtaagattgatcagagagaatcacgaactgaagagcgccattaaaacgcaggctggaggtctgggcattagtggctttactagcgggctgggggaggcaacagccggcttgtcctcacgccagaataacggagtttttttgcctccatcccctgctgtggcaaacgaaagggtgctcgaggaagttggaattatggccctagcccctctcgcagaaatgttaacgtctctgcagcccagcgccaccccgggaagcctgatgtctccactaaccggaacgctatccaccctgctgtcagggccagctcctacttctcaatcaagccccttaacatcgttcctcacatcgcctatcgcggggccactcactggcaccctggctagttcattaggcctcccctctaccggcacccttactcccagcagcctggttgcgggacctgtggctatgtcccagagctctcctttaattgcaccggtgatggggaccgtagccgtttccctatcctcgcctttgctctcttcgacagccacaccccctggggttagccagaacttattagctaaccccatgagtaatctggtgctgcctgaggcgcctcggctgagactggcagagccccttcgcggaggcccaacaggtccacaaagccctgcttgcgtggttcctacggctaccactaaagttcccctatcgactgagcctccccagagcacgcaggatcctgagcccctgtccatggccttcgcaggggcccctttacagacatctacacccataggggctatggggactcctgctcccaaaacggctttcagctttaatacatcagatacacaggcccagccttctgccgctcaggaacaggtggtgccggcttctgttccaacgtctcctacgacaagtcccactgtgacagtcctggcctcagctcctgccctcgcaccgcaggtggccacgagctacaccccatcgtcaactacacatatagcccaaggggctccccacccaccatcacgtatgcataattccccaacccagaacctccctgtgcctcactgcccccctcataacgcccacagcccgccccgtacaagctccagcccagcatctgtgaacgacagcaggggcccccgaaccacagaaccgtctacaaagtccatgatggaagtagagcgcaagttagcccacagaaaaaccagcaaattcccggaaaatcctagagagagtaaacaattggcatgggaacggttggtgggagagatagcctttcagctggaccgcagaatcttgagcagtattttcccggaaagagtgcgcctctacggtttcaccgtcagcaacatcccagaaaagatcatccaggccagtcttaatccttctgatcataagcttgatgaaaagttgtgtcagcggctcacacaacggtacgtgtcagtgatgaacaggctccagtcccttggctataatgggcgggtgcatcccgcactaaccgagcagctggttaatgcctacggaattctccgcgaaaggcccgaacttgcagcctcagaggggggcccctacactgtggacttcctgcaaagagtagtggtggagacagtgcatccaggcatgctggcggatgcgctactgttactctcttgtcttagtcagctagctcatgacgacggcaagcctatgtttatctggtag

SEQ ID NO: 260226 - DNA, 1776 bp, Artificial Sequence
  derived and/or modified sequence
atgagcctgctgaccaactatgagggcctgcggcaccagatcgagcggctggtgcgggagaatgaggagctgaagaagctggtgcggctcatcagagaaaatcatgagctgaagagcgccatcaagacccaggccggcggcctgggcatcagcggcttcaccagcggcctgggggaggccacagctggcctgagcagccggcagaacaacggggtcttcctgccccccagccctgctgtggccaatgaaagagtgctggaggaggtgggcatcatggccctggcccccctggccgagatgctgaccagcctgcagcccagcgccaccccaggcagcctgatgagccccctgaccggcaccctgagcaccctgctgagcggccctgcccccaccagccagagcagccccctgaccagcttcctgaccagccccatcgccggccccctgaccggcaccctggccagcagcctgggcctgcccagcacaggcaccctgacccccagcagcctggtggccggccctgtggccatgagccagagcagccccctcatcgcccctgtgatgggcaccgtggccgtgtccctgagcagccccctgctgagcagcacagccaccccacctggggtgtcccagaacctgctggccaaccccatgagcaacctggtgctgcctgaggccccccggctgcggctggccgagcccctgcggggcggccccaccggcccccagagccctgcctgtgtggtgcccacagccaccaccaaggtgcccctgagcacagagcccccccagagcacccaggaccctgagcccctgtccatggcctttgctggggcccccctgcagaccagcacccccatcggggccatgggcaccccagcccccaagacagccttctccttcaacaccagtgacacccaggcccagcccagcgctgcccaggagcaggtggtgcctgcctctgtgcccaccagccccaccaccagccccaccgtgacagtgctggccagcgccccagccctggccccccaggtggccaccagctacacccccagcagcaccacccacatcgcccagggcgccccccacccccccagcaggatgcacaacagccccacccagaacctgcctgtgccccactgccccccccacaatgcccacagcccccccaggaccagcagcagccctgcctctgtgaatgacagccggggccccaggaccacagagcccagcaccaagtccatgatggaggtggagaggaagctggcccacaggaagaccagcaagtttcctgagaacccccgggagagcaagcagctggcctgggagcggctggtgggggagatcgccttccagctggaccggcgcatcctgagcagcatcttccctgagcgggtgcggctgtatggcttcaccgtgagcaacatccctgagaagatcatccaggccagcctgaaccccagcgaccacaagctggatgagaagctgtgccagaggctgacccagcgctacgtgtctgtgatgaaccggctgcagagcctgggctacaacggccgggtgcacccagccctgacagagcagctggtgaatgcctacggcatcctgcgggagaggcctgagctggccgccagcgagggcggcccctacacagtggacttcctgcagagggtggtggtggagaccgtgcaccctggcatgctggctgatgccctgctgctgctgagctgcctgagccagctggcccatgatgatggcaagcccatgttcatctggtag

SEQ ID NO: 260227 - DNA, 1776 bp, Artificial Sequence
  derived and/or modified sequence
atgagcctgctgaccaactacgagggcctgcggcaccagatcgagagactagttagggagaacgaggagctgaagaaactggtccgcttgatccgggagaatcacgaactcaagtcagccataaaaacacaggctggcggacttggaatcagcggctttacctcaggactcggggaagcaactgctgggttgagctccaggcagaataacggtgtctttctcccaccgagcccagccgtggctaacgaaagagtccttgaagaggtcggaataatggcactcgctccgctggccgagatgttgacctccctgcagccgagcgccaccccagggagccttatgtccccactaactggtacactctctaccctcttgagcggcccagcccccacttcccagtcaagccctttaacctccttccttactagccccatcgccggccctctgacaggtaccttagcttcgtcactgggactgccctccacgggtaccctgacaccttcctccttggttgctggacctgtggccatgagccagtctagcccattgatcgcccccgttatgggaactgtcgcggtgtctttgtccagtccactgctgagctctacagccactccacctggtgtctcacagaacttactcgctaatcccatgagtaatttggtgcttccggaagcaccgcgtctgcgcctagcagagccgctccgaggtgggcccactggcccacagtctcctgcctgtgtcgttcctaccgcaacaacgaaagtcccgctttccaccgaacccccacagtccacccaggaccccgaacctctgagcatggccttcgccggggcgccgttgcagacctcaacgcccattggggctatgggcacaccagcacctaagaccgcattttcctttaatacatcagacacccaagcccaaccgagcgcagcccaagaacaagtcgtgcccgcctccgtgcccacatctcccactacatcccccaccgtcaccgtactggcaagtgctccagccctggccccacaagtcgctacatcctacactccttcaagcactactcatattgcacagggtgcacctcaccctcccagccgtatgcataactcccctacccaaaaccttccagttccgcactgtccacctcacaacgctcattcacccccaagaacatcatcgtcacccgccagcgtcaacgattcgcggggaccaaggaccaccgaacccagcactaagtcaatgatggaggtggaaaggaagttggcccaccgcaaaacctccaagttcccagaaaaccccagggagagtaagcagctcgcgtgggagaggctagtgggtgaaatagcttttcagttggataggcggattttgtccagtatcttcccagaaagggtgcggctgtacggatttactgtctctaatatcccagaaaagatcattcaggctagtctcaacccttcagaccacaaattagatgaaaagctgtgccagagactgacccaaagatatgtaagtgtcatgaaccgactccagtcactgggatataacggtcgggtgcatcccgccctaacggagcagctcgtgaacgcttacggcatattgcgagaaagacccgaactggcagcgtcagaaggcgggccctatactgtggacttccttcagcgggtggtggtggaaacagtgcacccaggcatgctcgccgatgccttactgttgcttagctgcctgagtcagttggcccacgatgatggtaaacccatgttcatctggtag

SEQ ID NO: 260228 - DNA, 1776 bp, Artificial Sequence
  derived and/or modified sequence
atgtccctcctaacaaactatgagggccttcgccaccagatcgaacgtctggtgcgcgaaaatgaagagctaaagaaactcgtgcgacttatcagggagaaccatgagctgaaaagcgcaatcaagactcaggccggtggtctgggcatctcggggttcacatcgggccttggggaagccacggccggactttcatcgagacagaacaatggagtcttcttgcccccttccccagcagtggctaacgaacgcgtgctggaagaagtggggatcatggccctagcacccctggccgaaatgcttacatctttgcaaccttctgcaacccccggaagcctgatgtcgccccttacaggtacgctgagcacactgctatctggcccagcccctacatcccagagcagccctttgacttcttttcttactagccctattgcagggccactcactggaactttggcgtcctccctgggcctgccgtcgactggcactctgacccccagttccctcgtggccggacctgtcgcaatgtcccagagtagcccactcatcgcacccgttatgggcaccgtcgcagtgagcctctccagcccactgctgagtagtacagcgacgccacctggcgtcagtcagaatttactcgctaatccgatgagcaatctggtactgccagaggctcccagattaaggctggccgagccactccggggagggccaaccggaccccagtcacctgcctgcgtggtgccaactgccaccactaaggtgcccctgagtaccgagccaccccaatctacccaggatccggagcctttatcaatggctttcgctggagcaccactgcagacttctactcccatcggagccatgggtacgcctgcgcctaaaactgcattttcctttaatactagcgacacgcaggctcaaccttccgctgcacaggagcaggtggtgccagcgagcgtgccaacttccccaacaacctctccaacagtgactgtcttggcctcagcgcctgcactggcccctcaggtggctacttcctatacacccagttctaccacacatatcgcccagggagctccgcatccaccctctcgtatgcacaattcaccgacacaaaatctgcccgtcccccattgtcctccgcataacgctcacagcccaccacgcactagttcaagccctgcttccgtaaacgattcccgcggtccccgaacaacggagccttcaactaagtctatgatggaggtggagcgtaaactggcgcaccggaagactagcaagtttccggaaaaccccagggaatccaaacagcttgcttgggagcggctggtcggggaaatcgcattccaactcgaccgaagaatccttagtagtatcttccccgagagggtccggctgtacggcttcactgtgtcaaatattccggagaagatcatccaggcttcccttaatccgagtgaccacaaattagatgagaagctgtgtcaaagattgactcagcgctatgtcagtgtgatgaataggctccagtcactgggctataacggcagggtgcatccggctcttactgaacagttagtgaatgcctacggcatattgcgagagcgacccgaactagccgcatcagaggggggtccctacaccgtggacttcctccaacgggtagtggtggaaacagtgcaccccggaatgctggccgatgccctgctgctgttgtcctgcctctcacagctggcccatgatgatggcaaacccatgttcatttggtag

SEQ ID NO: 260229 - DNA, 1954 bp, Artificial Sequence
  derived and/or modified sequence
agactctgcaccctccttcagcccaggcaaggcctggggccctgggcagcctccaggtgcagtgccctcccgtgggccgcacccttgccactgccccagggcatgtctctactcaccaattatgaagggcttcggcatcagatagagaggctggtgcgggaaaatgaggaactgaagaagttggtgcggctcattcgggagaatcacgagctcaagtcagcgatcaagactcaggcaggcgggctcggcatcagcgggttcacgagtgggcttggtgaggcaacagcaggcctttcctcacgccagaacaatggtgtcttcctgcccccgtccccagcagtggcaaacgaacgagtcctcgaagaagtggggatcatggccttggcacccctggccgagatgctaaccagcttgcagcccagcgccacaccgggctcactcatgagccccctgacaggcaccctcagcacgctgctgtctggcccagcacccacgtcacagagcagccccctcaccagcttcctgaccagtcccattgcgggacccctaacaggcacactggccagttccctgggcctgccctccactggcaccctgactcccagcagcctcgtggcaggccctgtggccatgtcccagagcagccccctgatagcccctgtgatgggcacggtggctgtctctctgagcagccccctcctcagctccactgccaccccaccaggggtctctcagaacctgctggccaaccccatgagcaacctggtcctgccagaggccccaaggctgcggctggctgagccactccgcggaggccccactgggccccagtccccagcttgcgtggtacccactgccaccaccaaagtcccactctccactgagcccccccagtcgacccaggacccagagcctctcagcatggcgtttgcaggagcacccctccagacctccacccctatcggagccatgggcacacctgctcccaagacggccttctccttcaacacttcggacacacaggcccagcccagtgccgcccaggaacaagtggtccctgcatctgtccccacctcccccaccacctcccccacggtcaccgtccttgcctctgcccccgcccttgccccccaggttgccaccagctacacaccctcaagcaccacccacatcgcccagggtgccccccatcccccttcccgaatgcataattccccaacccagaacctgcctgtcccccactgtcctccacacaacgcccactccccacctcgtacctcatcctccccggcttcagtcaatgactctcgaggtccacgcaccacagaaccgtcgacgaagagcatgatggaggtggaacggaagctggcccaccgcaagaccagcaagttccccgagaacccccgagagtcgaagcagctggcctgggagaggctggtgggtgagattgccttccagctggaccgcaggatcctgtccagcatcttcccagagcgcgtacggctctacggcttcactgtctccaacatcccagagaagatcatccaggcttccctgaaccccagtgaccacaagctggatgagaagctgtgccagaggctcacacagcgctatgtgagcgtcatgaacaggctgcagagtctgggctacaacgggcgggtgcaccctgcgctgaccgagcagctggtgaacgcttatggcatcctgcgagagcgcccggagctggcggcgtctgagggcggcccctacaccgtggacttcctgcagcgtgtggtggtggagaccgtgcaccccggcatgctcgccgacgcgctgctgctgctctcctgcctcagccagctggcgcacgatgacggcaagcccatgttcatctggtgacgctggagctgggaggtccaggctcgctcagccccacagccctgtgcacggccattaaagcttcccacagacactg

SEQ ID NO: 260230 - protein, 75 aa, Artificial Sequence
  derived and/or modified sequence
MGAAISQGALIAIVCNGLVGFLLLLLWVILCWACHSRSADVDSLSESRTQESACLELDPAAQSLASLAPIGAQWP

SEQ ID NO: 260231 - protein, 76 aa, Artificial Sequence
  derived and/or modified sequence
MGAAISQGALIAIVCNGLVGFLLLLLWVILCWACHSRSADVDSLSESSPNSSPGPCPEKAPPPQKPSHEGSYLLQP

SEQ ID NO: 260232 - DNA, 228 bp, Artificial Sequence
  derived and/or modified sequence
atgggcgctgctattagtcaaggcgcactgattgcgatcgtatgcaatggactcgtgggtttcctgcttcttctcttgtgggtgatactgtgctgggcatgccacagccgcagcgcagacgtggatagtttgtcagaaagccggactcaggagtctgcttgcctggagctggaccccgctgcgcaatcactagcatctctcgccccaattggagctcagtggccctag

SEQ ID NO: 260233 - DNA, 1082 bp, Artificial Sequence
  derived and/or modified sequence
gcggccgcggaggaggtgcggccccaaggggaggaggtgcccgctcaccgcagaccgcccgcggcagaggccgccccggtcgcgccgcggcgggagcggccggtggaggctgcgcggccgagggggagggccgggggagcggacgtcgcctctgctggtctcccacctcccgccgccccccgcccgcaggctcccaagccttagtcggcgccgagcatcccgctgccccggaccctcccgcgggcgcgcaccaggctcaactcaggctcaggactgcaggtagacatctccactgcccaggaatcactgagcgtgcagacagcacagcctcctctgaaggccggccataccagagtcctgcctcggcatgggcctcaccattgaggcagctccactgtctgtgctggtctgagggtgctgcctgtcatgggggcagccatctcccagggggccctcatcgccatcgtctgcaacggtctcgtgggcttcttgctgctgctgctctgggtcatcctctgctgggcctgccattctcgctctgccgacgttgactctctctctgaatccagtcccaactccagccctggcccctgtcctgagaaggccccaccaccccagaagcccagccatgaaggcagctacctgctgcagccctgaaggcccctggcctagcctggagcccaggacctaagtccacctcacctagagcctggaattaggatcccagagttcagccagcctggggtccagaactcaagagtccgcctgcttggagctggacccagcggcccagagtctagccagcttggctccaataggagctcagtggccctaaggagatgggcctggggtgggggcttatgagttggtgctagagccagggccatctggactatgctccatcccaagggccaagggtcaggggccgggtccactctttccctaggctgagcacctctaggccctctaggctggggaagcaaactggaacccatggcaataataggagggtgtccaggctgggcccctcccctggtcctcccagtgtttgctggataataaatggaactatggctctaccc

SEQ ID NO: 260234 - DNA, 231 bp, Artificial Sequence
  derived and/or modified sequence
atgggtgcggctatctcccagggcgcattgatcgcaatcgtttgtaatgggctcgtcggattcctgctgctgttactttgggttatcctctgttgggcttgccatagccggagcgctgatgtcgactccctgtccgagtcctctccaaattcgagtcctggcccatgccccgaaaaagcccctccacctcagaagccatcacacgaaggcagctacttgctgcagccttag

SEQ ID NO: 260235 - DNA, 228 bp, Artificial Sequence
  derived and/or modified sequence
atgggagctgccataagccagggagctttaattgccatagtttgtaacggcctggtggggttcctccttttgctgctctgggttatcctgtgttgggcttgccactcccggtcagctgatgttgatagcttgtctgaaagtcgcacacaggaatctgcatgtctcgagcttgatcccgccgcccaatccctcgcctcattagcccctatcggtgctcagtggccctag

SEQ ID NO: 260236 - DNA, 231 bp, Artificial Sequence
  derived and/or modified sequence
atgggcgcagctatctcccagggcgctcttatcgcgatcgtgtgcaacgggttagtagggtttcttcttctcctgttgtgggtgatcctgtgctgggcctgtcatagtagatccgctgacgtcgatagtctttctgaatcttcccccaatagctcacccggtccctgccctgaaaaagcccctccaccccaaaaaccaagtcacgagggatcttatctgctccaaccttag

SEQ ID NO: 260237 - DNA, 228 bp, Artificial Sequence
  derived and/or modified sequence
atgggcgccgccatcagccagggcgccctgatcgccatcgtgtgcaacggcctggtgggcttcctgctgctgctgctgtgggtgatcctgtgctgggcctgccacagcagaagcgccgacgtggacagcctgagcgagagcagaacccaggagagcgcctgcctggagctggaccccgccgcccagagcctggccagcctggcccccatcggcgcccagtggccctag

SEQ ID NO: 260238 - DNA, 885 bp, Artificial Sequence
  derived and/or modified sequence
gaggtgcggccccaaggggaggaggtgcccgctcaccgcagaccgcccgcggcagaggccgccccggtcgcgccgcggcgggagcggccggtggaggctgcgcggccgagggggagggccgggggagcggacgtcgcctctgctggtctcccacctcccgccgccccccgcccgcaggctcccaagccttagtcggcgccgagcatcccgctgccccggaccctcccgcgggcgcgcaccaggctcaactcaggctcaggactgcaggtagacatctccactgcccaggaatcactgagcgtgcagacagcacagcctcctctgaaggccggccataccagagtcctgcctcggcatgggcctcaccattgaggcagctccactgtctgtgctggtctgagggtgctgcctgtcatgggggcagccatctcccagggggccctcatcgccatcgtctgcaacggtctcgtgggcttcttgctgctgctgctctgggtcatcctctgctgggcctgccattctcgctctgccgacgttgactctctctctgaatccagaactcaagagtccgcctgcttggagctggacccagcggcccagagtctagccagcttggctccaataggagctcagtggccctaaggagatgggcctggggtgggggcttatgagttggtgctagagccagggccatctggactatgctccatcccaagggccaagggtcaggggccgggtccactctttccctaggctgagcacctctaggccctctaggctggggaagcaaactggaacccatggcaataataggagggtgtccaggctgggcccctcccctggtcctcccagtgtttgctggataataaatggaactatggctct

SEQ ID NO: 260239 - DNA, 231 bp, Artificial Sequence
  derived and/or modified sequence
atgggcgccgccatcagccagggcgccctgatcgccatcgtgtgcaacggcctggtgggcttcctgctgctgctgctgtgggtgatcctgtgctgggcctgccacagcagaagcgccgacgtggacagcctgagcgagagcagccccaacagcagccccggcccctgccccgagaaggccccccccccccagaagcccagccacgagggcagctacctgctgcagccctag

SEQ ID NO: 260240 - DNA, 228 bp, Artificial Sequence
  derived and/or modified sequence
atgggcgccgcaatttcacaaggtgccctgattgccatcgtgtgcaacggcctcgtgggctttttgctgcttctgttgtgggtcatcctgtgctgggcgtgtcatagcagatctgccgacgtagatagcctgtcagagtcgcggacccaggagtcggcttgcctcgaactggatcctgctgcccaaagcttggctagcctcgcccccattggggcccagtggccatag

SEQ ID NO: 260241 - DNA, 231 bp, Artificial Sequence
  derived and/or modified sequence
atgggagccgccatctctcagggagcgttgatcgccattgtgtgtaatggactggtgggctttctactcctgctgctttgggtcatcctgtgctgggcttgccatagtaggagtgctgacgtcgactccctgagtgaatccagtccgaactcttcacccggaccatgcccagaaaaggccccacccccccaaaagccaagtcacgagggaagctatctgctacagccctag

SEQ ID NO: 260242 - DNA, 228 bp, Artificial Sequence
  derived and/or modified sequence
atgggcgccgccatcagccagggcgccctgattgccatcgtgtgcaatggcctggtgggcttcctgctgctgctgctgtgggtgatcctgtgctgggcctgccacagccgctctgcagatgtggacagcctgtctgagagcaggacccaggagagcgcctgcctggagctggaccctgctgcccagagcctggccagcctggcccccatcggggcccagtggccctag

SEQ ID NO: 260243 - DNA, 231 bp, Artificial Sequence
  derived and/or modified sequence
atgggcgccgccatcagccagggcgccctgattgccatcgtgtgcaatggcctggtgggcttcctgctgctgctgctgtgggtgatcctgtgctgggcctgccacagccgctctgcagatgtggacagcctgtctgagagcagccccaacagcagccctggcccctgcccagagaaggcccccccaccccagaagcccagccatgagggcagctacctgctgcagccctag

SEQ ID NO: 260244 - DNA, 228 bp, Artificial Sequence
  derived and/or modified sequence
atgggcgccgccatcagccagggcgccctgatcgccatcgtgtgcaatggccttgtgggttttctattgctgctcctgtgggtgatcctgtgttgggcttgccacagtaggtcagctgatgtcgacagtttgtccgaaagccggacacaggagagtgcttgcctagagttagatcccgccgctcagtcgttggcttccctcgcccctataggagcgcagtggccctag

SEQ ID NO: 260245 - DNA, 231 bp, Artificial Sequence
  derived and/or modified sequence
atgggcgccgccatcagccagggcgccctgatcgccatcgtgtgcaacggtctcgtggggttcctgctgctgctcctctgggtaatcctttgttgggcatgccactccagaagcgccgatgtggattccctgtccgagagctcaccaaactcctcgccggggccctgcccggaaaaggccccaccccctcagaaaccttcacacgaagggtcttacctcctccagccgtag

SEQ ID NO: 260246 - RNA, 228 nt, Artificial Sequence
  derived and/or modified sequence
augggagcugccauaagccagggagcuuuaauugccauaguuuguaacggccuggugggguuccuccuuuugcugcucuggguuauccuguguugggcuugccacucccggucagcugauguugauagcuugucugaaagucgcacacaggaaucugcaugucucgagcuugaucccgccgcccaaucccucgccucauuagccccuaucggugcucaguggcccuag

SEQ ID NO: 260247 - RNA, 231 nt, Artificial Sequence
  derived and/or modified sequence
augggcgcagcuaucucccagggcgcucuuaucgcgaucgugugcaacggguuaguaggguuucuucuucuccuguugugggugauccugugcugggccugucauaguagauccgcugacgucgauagucuuucugaaucuucccccaauagcucacccggucccugcccugaaaaagccccuccaccccaaaaaccaagucacgagggaucuuaucugcuccaaccuuag

SEQ ID NO: 260248 - protein, 2527 aa, Artificial Sequence
  derived and/or modified sequence
MASGSCQGCEEDEETLKKLIVRLNNVQEGKQIETLVQILEDLLVFTYSERASKLFQGKNIHVPLLIVLDSYMRVASVQQVGWSLLCKLIEVCPGTMQSLMGPQDVGNDWEVLGVHQLILKMLTVHNASVNLSVIGLKTLDLLLTSGKITLLILDEESDIFMLIFDAMHSFPANDEVQKLGCKALHVLFERVSEEQLTEFVENKDYMILLSALTNFKDEEEIVLHVLHCLHSLAIPCNNVEVLMSGNVRCYNIVVEAMKAFPMSERIQEVSCCLLHRLTLGNFFNILVLNEVHEFVVKAVQQYPENAALQISALSCLALLTETIFLNQDLEEKNENQENDDEGEEDKLFWLEACYKALTWHRKNKHVQEAACWALNNLLMYQNSLHEKIGDEDGHFPAHREVMLSMLMHSSSKEVFQASANALSTLLEQNVNFRKILLSKGIHLNVLELMQKHIHSPEVAESGCKMLNHLFEGSNTSLDIMAAVVPKILTVMKRHETSLPVQLEALRAILHFIVPGMPEESREDTEFHHKLNMVKKQCFKNDIHKLVLAALNRFIGNPGIQKCGLKVISSIVHFPDALEMLSLEGAMDSVLHTLQMYPDDQEIQCLGLSLIGYLITKKNVFIGTGHLLAKILVSSLYRFKDVAEIQTKGFQTILAILKLSASFSKLLVHHSFDLVIFHQMSSNIMEQKDQQFLNLCCKCFAKVAMDDYLKNVMLERACDQNNSIMVECLLLLGADANQAKEGSSLICQVCEKESSPKLVELLLNSGSREQDVRKALTISIGKGDSQIISLLLRRLALDVANNSICLGGFCIGKVEPSWLGPLFPDKTSNLRKQTNIASTLARMVIRYQMKSAVEEGTASGSDGNFSEDVLSKFDEWTFIPDSSMDSVFAQSDDLDSEGSEGSFLVKKKSNSISVGEFYRDAVLQRCSPNLQRHSNSLGPIFDHEDLLKRKRKILSSDDSLRSSKLQSHMRHSDSISSLASEREYITSLDLSANELRDIDALSQKCCISVHLEHLEKLELHQNALTSFPQQLCETLKSLTHLDLHSNKFTSFPSYLLKMSCIANLDVSRNDIGPSVVLDPTVKCPTLKQFNLSYNQLSFVPENLTDVVEKLEQLILEGNKISGICSPLRLKELKILNLSKNHISSLSENFLEACPKVESFSARMNFLAAMPFLPPSMTILKLSQNKFSCIPEAILNLPHLRSLDMSSNDIQYLPGPAHWKSLNLRELLFSHNQISILDLSEKAYLWSRVEKLHLSHNKLKEIPPEIGCLENLTSLDVSYNLELRSFPNEMGKLSKIWDLPLDELHLNFDFKHIGCKAKDIIRFLQQRLKKAVPYNRMKLMIVGNTGSGKTTLLQQLMKTKKSDLGMQSATVGIDVKDWPIQIRDKRKRDLVLNVWDFAGREEFYSTHPHFMTQRALYLAVYDLSKGQAEVDAMKPWLFNIKARASSSPVILVGTHLDVSDEKQRKACMSKITKELLNKRGFPAIRDYHFVNATEESDALAKLRKTIINESLNFKIRDQLVVGQLIPDCYVELEKIILSERKNVPIEFPVIDRKRLLQLVRENQLQLDENELPHAVHFLNESGVLLHFQDPALQLSDLYFVEPKWLCKIMAQILTVKVEGCPKHPKGIISRRDVEKFLSKKRKFPKNYMSQYFKLLEKFQIALPIGEEYLLVPSSLSDHRPVIELPHCENSEIIIRLYEMPYFPMGFWSRLINRLLEISPYMLSGRERALRPNRMYWRQGIYLNWSPEAYCLVGSEVLDNHPESFLKITVPSCRKGCILLGQVVDHIDSLMEEWFPGLLEIDICGEGETLLKKWALYSFNDGEEHQKILLDDLMKKAEEGDLLVNPDQPRLTIPISQIAPDLILADLPRNIMLNNDELEFEQAPEFLLGDGSFGSVYRAAYEGEEVAVKIFNKHTSLRLLRQELVVLCHLHHPSLISLLAAGIRPRMLVMELASKGSLDRLLQQDKASLTRTLQHRIALHVADGLRYLHSAMIIYRDLKPHNVLLFTLYPNAAIIAKIADYGIAQYCCRMGIKTSEGTPGFRAPEVARGNVIYNQQADVYSFGLLLYDILTTGGRIVEGLKFPNEFDELEIQGKLPDPVKEYGCAPWPMVEKLIKQCLKENPQERPTSAQVFDILNSAELVCLTRRILLPKNVIVECMVATHHNSRNASIWLGCGHTDRGQLSFLDLNTEGYTSEEVADSRILCLALVHLPVEKESWIVSGTQSGTLLVINTEDGKKRHTLEKMTDSVTCLYCNSFSKQSKQKNFLLVGTADGKLAIFEDKTVKLKGAAPLKILNIGNVSTPLMCLSESTNSTERNVMWGGCGTKIFSFSNDFTIQKLIETRTSQLFSYAAFSDSNIITVVVDTALYIAKQNSPVVEVWDKKTEKLCGLIDCVHFLREVMVKENKESKHKMSYSGRVKTLCLQKNTALWIGTGGGHILLLDLSTRRLIRVIYNFCNSVRVMMTAQLGSLKNVMLVLGYNRKNTEGTQKQKEIQSCLTVWDINLPHEVQNLEKHIEVRKELAEKMRRTSVE

SEQ ID NO: 260249 - DNA, 69 bp, Artificial Sequence
  derived and/or modified sequence
cccagcagcacccagtaccacgtgctggcctgcctgcacctgctggtggtgccctgcctggcctggtag

SEQ ID NO: 260250 - DNA, 69 bp, Artificial Sequence
  derived and/or modified sequence
ccctctagcacccagtaccatgtactggcatgcttacacttgctggtcgtgccatgtctcgcttggtag

SEQ ID NO: 260251 - DNA, 69 bp, Artificial Sequence
  derived and/or modified sequence
cccagcagcacccagtaccacgtgctggcctgcctgcacctgctggtggtgccatgccttgcctggtag

SEQ ID NO: 260252 - DNA, 69 bp, Artificial Sequence
  derived and/or modified sequence
ccttcaagcacccagtatcatgtgttagcttgcctgcacttacttgtggtgccttgcttggcctggtag

SEQ ID NO: 260253 - DNA, 66 bp, Artificial Sequence
  derived and/or modified sequence
ccgtcctccacccagtaccatgtcctagcctgtctgcatttgttagtggtcccttgtctggcttgg

SEQ ID NO: 260254 - DNA, 7584 bp, Artificial Sequence
  derived and/or modified sequence
atggcaagcggatcttgccagggctgcgaagaagatgaagagaccctgaagaagctgatcgtcaggctcaacaatgtgcaggagggcaaacagattgaaactctggtgcagattctcgaagatcttctggtgttcacgtattctgagcgcgcttctaagctgtttcagggcaagaacatccatgtccccctgttgatagtgctcgactcctatatgcgggtcgcatctgtccagcaggtggggtggtccctgttgtgcaaattgatcgaagtgtgtcccgggacgatgcagtccctcatgggcccccaggacgttggaaacgactgggaagttcttggcgtccaccaactcattctgaagatgctgactgtccataatgcatctgtcaatctgtccgtgatagggttaaaaactctcgatctgctcctcacatccggaaagattacactgttgattttggacgaagaaagcgacatctttatgctaatttttgatgccatgcacagcttcccagcgaacgatgaagtccagaaactgggatgcaaggctctccatgtccttttcgagagggtgtccgaagagcagctgacggaatttgttgaaaacaaagactatatgatccttctgagcgccttgaccaatttcaaggatgaggaggagatagtgctccacgtgcttcactgcctccattctttagccatcccatgtaataatgtcgaagtcctgatgtccggaaatgtgcgctgttacaacattgtagtcgaggctatgaaagcctttcctatgtcagagagaatccaggaggttagttgctgtctgcttcaccgcctcactttagggaacttttttaacatactggtcctgaatgaggtacacgagttcgtcgtgaaggctgttcagcaatacccggaaaatgccgcactgcagatcagtgcgctgtcctgccttgcactgctcaccgagacaatttttctgaatcaggatctcgaagaaaaaaacgagaatcaagaaaacgatgacgagggcgaggaagacaagcttttctggctggaggcttgttacaaagcgcttacgtggcacagaaagaataaacatgtgcaggaagcagcctgttgggctttgaacaacctcttgatgtaccagaactccctccatgaaaagataggtgatgaagatggccatttccccgctcatcgggaggttatgctttcaatgcttatgcactcatcatccaaggaagtgtttcaggcttctgcaaatgcattgagcactcttctggagcagaacgtgaatttcagaaaaatcttgctgtcaaagggcatccaccttaacgttctggaattgatgcagaagcacatccactctcctgaggtcgcagagtccggctgcaaaatgctcaatcatctgttcgaggggagcaacacttctttagacataatggccgccgtggttccgaagatcctcacagtgatgaagcgacacgagacctctctgccagtgcagctggaagcactgagggccatactgcattttatcgtccctgggatgccagaagaatctagagaagacacggaatttcatcacaaactgaatatggttaagaaacaatgcttcaagaatgacatccacaagctcgtgctcgctgctctcaatcgcttcataggaaaccctggcatccaaaaatgtggtttgaaggtgataagtagcattgttcacttccccgacgctctggagatgctatcattggaaggcgcgatggatagcgtgcttcataccttacagatgtatcctgatgatcaagaaattcagtgcctcggcctatcccttattggttacctcattaccaagaagaatgtgtttattggcaccgggcatttactggccaaaatccttgtgtcttcgttatataggttcaaagacgtagcagaaattcaaaccaaaggattccagaccattcttgccatactgaagcttagcgcaagcttctctaagttgcttgtgcatcatagcttcgatctcgttatttttcaccagatgtcaagtaacatcatggaacagaaggaccagcaattcctcaatctatgttgcaagtgttttgcaaaggtcgcgatggatgattacctgaaaaacgttatgctggagagagcctgtgatcaaaacaatagtataatggttgagtgtttacttctgctgggggccgatgccaaccaggccaaggagggtagtagcctaatctgtcaagtctgcgagaaagagtccagtccaaaacttgtggagttgttacttaattctgggtctagagagcaggacgtccgaaaagcactaaccatatccataggcaagggcgattcccagatcatcagcctcctactccggaggctggccctggacgtcgccaacaactcgatctgcctaggtggtttctgcattggcaaggtggaaccttcctggctgggcccattgtttcccgacaagacgtccaatctcaggaaacaaaccaacatagcctctactcttgcacggatggtgatacggtaccagatgaagtctgccgtggaggaggggaccgctagcgggagcgatgggaatttctcagaagatgtgctctcaaaatttgatgaatggacatttataccagacagctcaatggacagtgtgttcgctcagtcagatgatctggatagcgagggctctgaaggctccttcctggtaaaaaaaaaatctaattccattagcgtgggcgaattttaccgggatgcggtccttcaaagatgcagtcccaatctgcaaagacactctaactctctgggcccaatctttgaccatgaggacctgcttaagagaaagaggaaaatcttgtccagcgatgatagtctgagaagctctaagctgcagtcgcatatgaggcactcggatagcatctcctcgctggccagcgagcgagagtatattacaagtctcgatctgagcgccaacgagctgcgggatatcgatgctctgtcacaaaagtgttgcattagcgtgcacctcgaacacctcgagaagttagagctgcatcagaatgctctcacaagttttccccagcaactgtgcgagacactgaaatctttaacccatctagacctgcactccaataagtttacttctttcccctcttatctccttaagatgagttgtattgccaatttagacgtgagccgcaacgatattggtcctagcgtcgtcctcgacccaaccgtcaagtgccccacactgaagcaattcaatctgagttataatcaactttcctttgtacctgagaacttgactgacgtggttgagaaactggagcagctcattctggaaggtaataagatctcaggtatttgttctcctcttcgccttaaggagttgaaaattctcaacctgagcaagaatcatatctcatcattatctgaaaatttccttgaagcctgtcctaaggtagaaagtttcagcgcccgaatgaattttctggctgcaatgcctttcctaccaccgagcatgaccattcttaagctgagtcagaataagttctcgtgcatccccgaagctatacttaaccttcctcacctcaggtcattggatatgtcgtccaacgatattcagtaccttcccgggccagcccactggaagtctcttaacttgcgggaactattattttcccataatcagattagcatactggatttatccgagaaggcctatctgtggagccgtgtggagaagctgcatctgtcacataataagttgaaagaaatccccccagaaatcggatgtcttgagaatctaacgagcctggacgtgagctacaatctggaactccgaagcttccctaacgagatgggaaagctgtctaagatatgggacttacccttggatgagctgcatttgaactttgatttcaagcatatcgggtgcaaagcgaaggacatcattcgttttctacagcaaaggcttaagaaggccgtgccttataaccgcatgaagctgatgatcgtgggcaataccgggtcaggtaagacaaccttgttgcagcagctgatgaagactaaaaagtctgacctcgggatgcaatctgcaaccgtcgggatcgacgttaaggattggcccattcaaattagagacaaacgcaagagagatctcgtgctgaacgtttgggacttcgctggccgggaagaattttattcaacgcatccacattttatgacacagcgagccctctacctcgctgtttacgacctaagtaaaggtcaagctgaagtggatgccatgaaaccctggttattcaatatcaaagcacgcgccagtagctctcctgtgatactcgtgggaactcacctcgatgtgtccgatgaaaaacagaggaaggcatgcatgagcaagataacgaaagagctccttaataaacgcggcttccccgctatccgcgactaccacttcgttaatgccacggaagaaagcgatgcattggctaagctgcgtaaaactattattaatgaaagcctcaatttcaagatacgcgaccagctggttgtcggacaactgattcccgattgctacgtagaacttgaaaagatcatactgtctgagcgcaaaaacgtgcccattgagttccccgttatagacaggaagcgcttgcttcaactagtcagagaaaatcaactgcagctggacgagaatgaattacctcacgcagtccacttcctgaacgagagtggcgtgcttctccacttccaggatccggcgcttcagctgtcagacctttattttgtggaaccaaaatggctgtgcaagattatggcccagatcttgacagtcaaggtcgaagggtgccctaagcaccctaaaggcattatatccagaagagatgtggagaagtttctgtcgaaaaaacggaaatttccaaaaaattacatgagccaatactttaaactgctggaaaagtttcagattgcactccctattggagaggaatatctgttggtaccaagctcactgtccgaccaccggccagtcatcgagcttccccactgcgagaatagcgaaataattatccgcctctacgaaatgccttactttccaatgggcttctggagccggttgatcaaccgtctcctggagatctctccctacatgctttcgggcagagagagagccttgcgcccaaaccggatgtactggaggcagggtatttacctgaactggtccccagaggcctactgtttagtcgggtctgaagtcctggacaatcaccccgagtccttccttaagatcacggtccctagctgcagaaagggctgcatccttctcgggcaggtggtggaccatatcgactcactcatggaagagtggtttcccgggctgctggaaattgacatatgcggagagggtgaaaccctcttgaagaagtgggcgctttacagctttaacgatggcgaagagcatcagaaaattctcctagacgatctgatgaaaaaggcagaggagggcgacttgctagtgaatccagaccagcctcgcttgactatacctattagccaaatagcccccgacttaatcctggccgatttgcccagaaatatcatgctgaacaatgacgaactagaatttgaacaggccccagaattcctcctaggagacggcagcttcggctctgtatacagagctgcctacgaaggagaggaggtggccgtgaaaattttcaataagcacacatcactccggttgctgaggcaagaattggtggtgttgtgtcaccttcatcatccttctttgatctctctcctggccgcaggcatcaggccccggatgctggttatggaattggcgtcaaaggggtctctcgataggctgcttcagcaagacaaggccagcctgaccaggacattacaacaccggatcgctctccatgtagcagatggcttacgctatctgcacagcgcgatgatcatctatcgggatctcaaaccacacaacgtgctcctgtttaccctgtacccaaacgcggcaatcatcgcaaagatcgccgattatggcattgctcagtactgctgtcggatgggcattaaaacctcggaagggaccccaggtttccgtgcccctgaggtagcacggggtaatgtgatctataatcaacaggctgatgtctactcttttggattactgttgtacgacattctgaccacaggcggcagaatcgtcgagggcctaaaattccctaatgaattcgatgagcttgagatccagggaaaattgccagatccggtcaaggagtatggatgcgccccttggccgatggtggaaaaacttattaagcagtgtctcaaagaaaatccgcaggagcggcctacatccgcccaggtgttcgacatcctaaattccgcggagttggtgtgtcttaccagacgtattttgctgcctaaaaacgttattgtggaatgcatggtcgccactcatcataacagccggaatgcctccatatggctggggtgtggacatactgaccggggtcagctctcatttcttgacctaaacactgagggctatacctctgaagaggtcgccgactcgaggatactgtgtctcgcattagtgcacctgccagtagagaaggaatcctggattgtgagtgggacgcagagtggaactctactcgtaatcaatactgaggacgggaagaagagacacaccctggagaagatgacagatagtgtgacttgcctctactgcaacagctttagcaagcagtccaaacagaagaattttctgctggtcgggacagccgacggtaagcttgccatatttgaagataagaccgtgaaattaaagggcgctgcacccctcaaaattcttaatattggcaacgtgtcaacccctctgatgtgtctttctgaatctacgaacagtactgaacgcaacgtgatgtggggcggttgcgggacaaaaatattttcattttcaaacgattttactattcagaaactgatcgagaccaggactagccagctgttttcttacgctgccttctcagattcaaacattatcacggtcgtggtggacactgcgctatatatcgcaaagcaaaatagccccgtagtggaagtatgggataagaagaccgagaaactgtgtggtctgatcgattgtgtgcatttcctgcgcgaagtgatggtcaaggagaataaagagtcgaagcacaagatgagctattccggaagagtcaaaaccctctgtctacagaaaaatactgccctgtggatcggcactggaggaggtcacatcctcctgctggatctttctaccaggcgcctgatccgggtaatttataacttttgcaacagcgttcgcgtcatgatgaccgctcagctggggagcctaaagaacgtcatgttggtgctaggctacaatcgaaaaaataccgagggaacccagaaacagaaggagatccaaagttgtttgactgtttgggatattaacttaccgcatgaggtgcagaaccttgagaaacatattgaagtacggaaggagctggccgagaaaatgcgaagaactagtgtggaatag

SEQ ID NO: 260255 - DNA, 7584 bp, Artificial Sequence
  derived and/or modified sequence
atggccagcggcagctgccagggctgtgaagaagatgaggagaccctgaagaagctgattgtgcggctgaacaacgtgcaggagggcaagcagatcgagaccctggtgcagatcctggaggacctgctggtgttcacctacagcgagcgggccagcaagctgttccagggcaagaacatccacgtgcccctgctgattgtgctggacagctacatgagggtggcctctgtgcagcaggtgggctggagcctgctgtgcaagctgattgaggtgtgccccggcaccatgcagagcctgatgggcccccaggatgtgggcaatgactgggaggtgctgggcgtgcaccagctgatcctgaagatgctgactgtgcacaatgcctctgtgaacctgagcgtcatcggcctgaagaccctggacctgctgctgaccagcggcaagatcaccctgctgatcctggatgaggagagtgacatcttcatgctgatctttgatgccatgcacagcttccctgccaatgatgaggtgcagaagctgggctgcaaggccctgcacgtgctgtttgagcgggtgtctgaggagcagctgacagaatttgtggagaacaaggactacatgatcctgctgagcgccctgaccaacttcaaggatgaggaggagatcgtgctgcacgtgctgcactgcctgcacagcctggccatcccctgcaacaacgtggaggtgctgatgtctggaaatgtgcgctgctacaacatcgtggtggaggccatgaaggccttccccatgtctgagcgcatccaggaggtgtcctgctgcctgctgcaccggctgaccctgggcaacttcttcaacatcctggtgctgaatgaggtgcatgaatttgtggtgaaggctgtgcagcagtacccagaaaatgctgccctgcagatcagcgccctgagctgcctggccctgctgacagagaccatcttcctgaaccaggacctggaggagaagaatgaaaaccaggagaatgatgatgaaggagaggaggacaagctgttctggctggaggcctgctacaaggccctgacctggcacaggaagaacaagcacgtgcaggaggccgcctgctgggccctgaacaacctgctgatgtaccagaacagcctgcacgagaagattggagatgaagatggccacttccctgcccaccgggaggtgatgctgtccatgctgatgcacagcagcagcaaggaggtgttccaggccagcgccaatgccctgagcaccctgctggagcagaatgtgaacttcaggaagatcctgctgagcaagggcatccacctgaatgtgctggagctgatgcagaagcacatccacagccctgaggtggccgagagcggctgcaagatgctgaaccacctgtttgagggcagcaacaccagcctggacatcatggctgctgtggtgcccaagatcctgactgtgatgaagagacatgagaccagcctgcctgtgcagctggaggccctgcgggccatcctgcacttcatcgtgcccggcatgcctgaggagagccgggaggacacagagttccaccacaagctgaacatggtgaagaagcagtgcttcaagaatgacatccacaagctggtgctggccgccctgaaccgcttcatcggcaaccctggcatccagaagtgtggcctgaaggtgatcagcagcatcgtgcacttcccagatgccctggagatgctgagcctggagggcgccatggacagcgtgctgcacaccctgcagatgtacccagatgaccaggagatccagtgcctgggcctgagcctcatcggctacctgatcaccaagaagaatgtgttcatcggcaccggccacctgctggccaagatcctggtgagcagcctgtaccgcttcaaggatgtggccgagatccagaccaagggcttccagaccatcctggccatcctgaagctgagcgccagcttcagcaagctgctggtgcaccacagctttgacctggtgatcttccaccagatgagcagcaacatcatggagcagaaggaccagcagttcctgaacctgtgctgcaagtgctttgccaaggtggccatggatgactacctgaagaatgtgatgctggagcgggcctgtgaccagaacaacagcatcatggtggagtgcctgctgctgctgggcgcagatgccaaccaggccaaggagggcagcagcctcatctgccaggtgtgtgagaaggagagcagccccaagctggtggagctgctgctgaacagcggcagccgggagcaggatgtgaggaaggccctgaccatcagcattggaaaaggagacagccagatcatcagcctgctgctgcggcggctggccctggatgtggccaacaacagcatctgcctgggcggcttctgcatcggcaaggtggagcccagctggctgggccccctcttcccagacaagaccagcaacctgaggaagcagaccaacatcgccagcaccctggccaggatggtgatccgctaccagatgaagtctgctgtggaggagggcacagccagcggcagtgatggcaacttctctgaagatgtgctgagcaagtttgatgagtggaccttcatcccagacagctccatggattctgtgtttgcccagagtgatgacctggacagcgagggcagcgagggcagcttcctggtgaagaagaagagcaacagcatctctgtgggggagttctacagagatgctgtgctgcagcgctgcagccccaacctgcagaggcacagcaacagcctgggccccatctttgaccacgaggacctgctgaagaggaagaggaagatcctgagcagtgatgacagcctgcggagcagcaagctgcagagccacatgaggcacagcgacagcatcagcagcctggccagcgagcgggagtacatcaccagcctggacctgagcgccaatgagctgcgggacattgatgccctgagccagaagtgctgcatctctgtgcacctggagcacctggagaagctggagctgcaccagaatgccctgaccagcttcccccagcagctgtgtgagaccctgaagagcctgacccacctggacctgcacagcaacaagttcaccagcttccccagctacctgctgaagatgagctgcatcgccaacctggatgtgtccagaaatgacatcggccccagcgtggtgctggaccccaccgtgaagtgccccaccctgaagcagttcaacctgagctacaaccagctgagctttgtgcctgagaacctgacagatgtggtggagaagctggagcagctgatcctggagggcaacaagatcagcggcatctgcagccccctgcggctgaaggagctgaagatcctgaacctgagcaagaaccacatcagcagcctgtctgagaacttcctggaggcctgccccaaggtggagagcttcagcgccaggatgaacttcctggccgccatgcccttcctgccccccagcatgaccatcctgaagctgagccagaacaagttcagctgcatccctgaggccatcctgaacctgccccacctgcggagcctggacatgagcagcaatgacatccagtacctgcccggccctgcccactggaagagcctgaacctgcgggagctgctcttcagccacaaccagatcagcatcctggacctgtctgagaaggcctacctgtggagccgggtggagaagctgcacctgagccacaacaagctgaaggagatccccccagagatcggctgcctggagaacctgaccagcctggatgtgtcctacaacctggagctgcgctccttccccaatgagatgggcaagctgagcaagatctgggacctgcccctggatgagctgcacctgaactttgacttcaagcacatcggctgcaaggccaaggacatcatccgcttcctgcagcagaggctgaagaaggctgtgccctacaacaggatgaagctgatgattgtgggcaacacaggcagcggcaagaccaccctgctgcagcagctgatgaagaccaagaagagtgacctgggcatgcagagcgccaccgtgggcattgatgtgaaggactggcccatccagatccgggacaagaggaagagggacctggtgctgaatgtgtgggactttgctggccgggaggagttctacagcacccacccccacttcatgacccagagggccctgtacctggccgtgtatgacctgagcaagggccaggccgaggtggatgccatgaagccctggctgttcaacatcaaggcccgggccagcagcagccctgtgatcctggtgggcacccacctggatgtgtctgatgagaagcagaggaaggcctgcatgagcaagatcaccaaggagctgctgaacaagaggggcttccctgccatccgggactaccactttgtgaatgccacagaggagagtgatgccctggccaagctgaggaagaccatcatcaatgaaagcctgaacttcaagatccgggaccagctggtggtgggccagctgatcccagactgctacgtggagctggagaagatcatcctgtctgagaggaagaatgtgcccatcgagttccctgtgattgacaggaagaggctgctgcagctggtgcgggagaaccagctgcagctggatgaaaatgagctgccccatgctgtgcacttcctgaatgaaagtggagtgctgctgcacttccaggaccctgccctgcagctgagtgacctgtactttgtggagcccaagtggctgtgcaagatcatggcccagatcctgactgtgaaggtggagggctgccccaagcaccccaagggcatcatcagcagaagagatgtggagaagttcctgagcaagaagaggaagttccccaagaactacatgagccagtacttcaagctgctggagaagttccagatcgccctgcccatcggggaggagtacctgctggtgcccagcagcctgagtgaccacaggcctgtgattgagctgccccactgtgagaacagcgagatcatcatccggctgtatgagatgccctacttccccatgggcttctggagccgcctcatcaaccggctgctggagatcagcccctacatgctgagcggccgggagcgggccctgcggcccaacaggatgtactggaggcagggcatctacctgaactggagccctgaggcctactgcctggtgggcagcgaggtgctggacaaccaccctgagagcttcctgaagatcaccgtgcccagctgcaggaagggctgcatcctgctgggccaggtggtggaccacatcgacagcctgatggaggagtggttccctggcctgctggagattgacatctgtggggagggggagaccctgctgaagaagtgggccctgtacagcttcaatgatggagaggagcaccagaagatcctgctggatgacctgatgaagaaggccgaggagggggacctgctggtgaacccagaccagccccggctgaccatccccatcagccagatcgccccagacctgatcctggccgacctgcccaggaacatcatgctgaacaatgatgagctggagtttgagcaggcccctgagttcctgctgggagatggcagctttggatctgtgtaccgggccgcctatgaaggagaggaggtggccgtgaagatcttcaacaagcacaccagcctgcggctgctgcggcaggagctggtggtgctgtgccacctgcaccaccccagcctcatcagcctgctggccgccggcatccggcccaggatgctggtgatggagctggccagcaagggcagcctggaccggctgctgcagcaggacaaggccagcctgaccaggaccctgcagcaccgcatcgccctgcacgtggctgatggcctgcgctacctgcacagcgccatgatcatctacagagacctgaagccccacaacgtgctgctcttcaccctgtacccaaatgctgccatcatcgccaagattgctgactatggcatcgcccagtactgctgcaggatgggcatcaagaccagcgagggcaccccaggcttccgggcccctgaggtggcccggggaaatgtcatctacaaccagcaggctgatgtgtacagctttggcctgctgctgtatgacatcctgaccactggaggaagaattgtggagggcctgaagttccccaatgaatttgatgagctggagatccagggcaagctgcctgaccctgtgaaggagtatggctgtgccccctggcccatggtggagaagctgatcaagcagtgcctgaaggagaacccccaggagcggcccaccagcgcccaggtgtttgacatcctgaacagcgctgagctggtgtgcctgacccggcgcatcctgctgcccaagaatgtgattgtggagtgcatggtggccacccaccacaacagcagaaatgccagcatctggctgggctgcggccacacagaccggggccagctgtccttcctggacctgaacacagagggctacaccagcgaggaggtggccgacagccgcatcctgtgcctggccctggtgcacctgcctgtggagaaggagagctggatcgtgtctggcacccagagcggcaccctgctggtgatcaacacagaagatggcaagaagaggcacaccctggagaagatgacagacagcgtgacctgcctgtactgcaacagcttcagcaagcagagcaagcagaagaacttcctgctggtgggcacagcagatggcaagctggccatctttgaggacaagacagtgaagctgaagggagctgcccccctgaagatcctgaacattggaaatgtgtccacccccctgatgtgcctgtctgagagcaccaacagcacagaaagaaatgtgatgtggggcggctgcggcaccaagatcttctccttcagcaatgacttcaccatccagaagctgattgagaccaggaccagccagctgttctcctatgctgccttcagtgacagcaacatcatcaccgtggtggtggacacagccctgtacatcgccaagcagaacagccctgtggtggaggtgtgggacaagaagacagagaagctgtgtggcctgattgactgtgtgcacttcctgcgggaggtgatggtgaaggagaacaaggagagcaagcacaagatgagctacagcggccgggtgaagaccctgtgcctgcagaagaacacagccctgtggattggaactggaggcggccacatcctgctgctggacctgagcacccggcggctcatccgggtcatctacaacttctgcaacagcgtgcgggtgatgatgacagcccagctgggcagcctgaagaatgtgatgctggtgctgggctacaacaggaagaacacagagggcacccagaagcagaaggagatccagagctgcctgactgtgtgggacatcaacctgccccatgaggtgcagaacctggagaagcacatcgaggtgaggaaggagctggccgagaagatgaggaggacctctgtggagtag

SEQ ID NO: 260256 - DNA, 9158 bp, Artificial Sequence
  derived and/or modified sequence
ttccctgagcagcggacgttcatgctgggagggcggcgggttggaagcaggtgccaccatggctagtggcagctgtcaggggtgcgaagaggacgaggaaactctgaagaagttgatagtcaggctgaacaatgtccaggaaggaaaacagatagaaacgctggtccaaatcctggaggatctgctggtgttcacgtactccgagcgcgcctccaagttatttcaaggcaaaaatatccatgtgcctctgttgatcgtcttggactcctatatgagagtcgcgagtgtgcagcaggtgggttggtcacttctgtgcaaattaatagaagtctgtccaggtacaatgcaaagcttaatgggaccccaggatgttggaaatgattgggaagtccttggtgttcaccaattgattcttaaaatgctaacagttcataatgccagtgtaaacttgtcagtgattggactgaagaccttagatctcctcctaacttcaggtaaaatcaccttgctgatattggatgaagaaagtgatattttcatgttaatttttgatgccatgcactcatttccagccaatgatgaagtccagaaacttggatgcaaagctttacatgtgctgtttgagagagtctcagaggagcaactgactgaatttgttgagaacaaagattatatgatattgttaagtgcgttaacaaattttaaagatgaagaggaaattgtgcttcatgtgctgcattgtttacattccctagcgattccttgcaataatgtggaagtcctcatgagtggcaatgtcaggtgttataatattgtggtggaagctatgaaagcattccctatgagtgaaagaattcaagaagtgagttgctgtttgctccataggcttacattaggtaattttttcaatatcctggtattaaacgaagtccatgagtttgtggtgaaagctgtgcagcagtacccagagaatgcagcattgcagatctcagcgctcagctgtttggccctcctcactgagactattttcttaaatcaagatttagaggaaaagaatgagaatcaagagaatgatgatgagggggaagaagataaattgttttggctggaagcctgttacaaagcattaacgtggcatagaaagaacaagcacgtgcaggaggccgcatgctgggcactaaataatctccttatgtaccaaaacagtttacatgagaagattggagatgaagatggccatttcccagctcatagggaagtgatgctctccatgctgatgcattcttcatcaaaggaagttttccaggcatctgcgaatgcattgtcaactctcttagaacaaaatgttaatttcagaaaaatactgttatcaaaaggaatacacctgaatgttttggagttaatgcagaagcatatacattctcctgaagtggctgaaagtggctgtaaaatgctaaatcatctttttgaaggaagcaacacttccctggatataatggcagcagtggtccccaaaatactaacagttatgaaacgtcatgagacatcattaccagtgcagctggaggcgcttcgagctattttacattttatagtgcctggcatgccagaagaatccagggaggatacagaatttcatcataagctaaatatggttaaaaaacagtgtttcaagaatgatattcacaaactggtcctagcagctttgaacaggttcattggaaatcctgggattcagaaatgtggattaaaagtaatttcttctattgtacattttcctgatgcattagagatgttatccctggaaggtgctatggattcagtgcttcacacactgcagatgtatccagatgaccaagaaattcagtgtctgggtttaagtcttataggatacttgattacaaagaagaatgtgttcataggaactggacatctgctggcaaaaattctggtttccagcttataccgatttaaggatgttgctgaaatacagactaaaggatttcagacaatcttagcaatcctcaaattgtcagcatctttttctaagctgctggtgcatcattcatttgacttagtaatattccatcaaatgtcttccaatatcatggaacaaaaggatcaacagtttctaaacctctgttgcaagtgttttgcaaaagtagctatggatgattacttaaaaaatgtgatgctagagagagcgtgtgatcagaataacagcatcatggttgaatgcttgcttctattgggagcagatgccaatcaagcaaaggagggatcttctttaatttgtcaggtatgtgagaaagagagcagtcccaaattggtggaactcttactgaatagtggatctcgtgaacaagatgtacgaaaagcgttgacgataagcattgggaaaggtgacagccagatcatcagcttgctcttaaggaggctggccctggatgtggccaacaatagcatttgccttggaggattttgtataggaaaagttgaaccttcttggcttggtcctttatttccagataagacttctaatttaaggaaacaaacaaatatagcatctacactagcaagaatggtgatcagatatcagatgaaaagtgctgtggaagaaggaacagcctcaggcagcgatggaaatttttctgaagatgtgctgtctaaatttgatgaatggacctttattcctgactcttctatggacagtgtgtttgctcaaagtgatgacctggatagtgaaggaagtgaaggctcatttcttgtgaaaaagaaatctaattcaattagtgtaggagaattttaccgagatgccgtattacagcgttgctcaccaaatttgcaaagacattccaattccttggggcccatttttgatcatgaagatttactgaagcgaaaaagaaaaatattatcttcagatgattcactcaggtcatcaaaacttcaatcccatatgaggcattcagacagcatttcttctctggcttctgagagagaatatattacatcactagacctttcagcaaatgaactaagagatattgatgccctaagccagaaatgctgtataagtgttcatttggagcatcttgaaaagctggagcttcaccagaatgcactcacgagctttccacaacagctatgtgaaactctgaagagtttgacacatttggacttgcacagtaataaatttacatcatttccttcttatttgttgaaaatgagttgtattgctaatcttgatgtctctcgaaatgacattggaccctcagtggttttagatcctacagtgaaatgtccaactctgaaacagtttaacctgtcatataaccagctgtcttttgtacctgagaacctcactgatgtggtagagaaactggagcagctcattttagaaggaaataaaatatcagggatatgctcccccttgagactgaaggaactgaagattttaaaccttagtaagaaccacatttcatccctatcagagaactttcttgaggcttgtcctaaagtggagagtttcagtgccagaatgaattttcttgctgctatgcctttcttgcctccttctatgacaatcctaaaattatctcagaacaaattttcctgtattccagaagcaattttaaatcttccacacttgcggtctttagatatgagcagcaatgatattcagtacctaccaggtcccgcacactggaaatctttgaacttaagggaactcttatttagccataatcagatcagcatcttggacttgagtgaaaaagcatatttatggtctagagtagagaaactgcatctttctcacaataaactgaaagagattcctcctgagattggctgtcttgaaaatctgacatctctggatgtcagttacaacttggaactaagatcctttcccaatgaaatggggaaattaagcaaaatatgggatcttcctttggatgaactgcatcttaactttgattttaaacatataggatgtaaagccaaagacatcataaggtttcttcaacagcgattaaaaaaggctgtgccttataaccgaatgaaacttatgattgtgggaaatactgggagtggtaaaaccaccttattgcagcaattaatgaaaaccaagaaatcagatcttggaatgcaaagtgccacagttggcatagatgtgaaagactggcctatccaaataagagacaaaagaaagagagatctcgtcctaaatgtgtgggattttgcaggtcgtgaggaattctatagtactcatccccattttatgacgcagcgagcattgtaccttgctgtctatgacctcagcaagggacaggctgaagttgatgccatgaagccttggctcttcaatataaaggctcgcgcttcttcttcccctgtgattctcgttggcacacatttggatgtttctgatgagaagcaacgcaaagcctgcatgagtaaaatcaccaaggaactcctgaataagcgagggttccctgccatacgagattaccactttgtgaatgccaccgaggaatctgatgctttggcaaaacttcggaaaaccatcataaacgagagccttaatttcaagatccgagatcagcttgttgttggacagctgattccagactgctatgtagaacttgaaaaaatcattttatcggagcgtaaaaatgtgccaattgaatttcccgtaattgaccggaaacgattattacaactagtgagagaaaatcagctgcagttagatgaaaatgagcttcctcacgcagttcactttctaaatgaatcaggagtccttcttcattttcaagacccagcactgcagttaagtgacttgtactttgtggaacccaagtggctttgtaaaatcatggcacagattttgacagtgaaagtggaaggttgtccaaaacaccctaagggcattatttcgcgtagagatgtggaaaaatttctttcaaaaaaaaggaaatttccaaagaactacatgtcacagtattttaagctcctagaaaaattccagattgctttgccaataggagaagaatatttgctggttccaagcagtttgtctgaccacaggcctgtgatagagcttccccattgtgagaactctgaaattatcatccgactatatgaaatgccttattttccaatgggattttggtcaagattaatcaatcgattacttgagatttcaccttacatgctttcagggagagaacgagcacttcgcccaaacagaatgtattggcgacaaggcatttacttaaattggtctcctgaagcttattgtctggtaggatctgaagtcttagacaatcatccagagagtttcttaaaaattacagttccttcttgtagaaaaggctgtattcttttgggccaagttgtggaccacattgattctctcatggaagaatggtttcctgggttgctggagattgatatttgtggtgaaggagaaactctgttgaagaaatgggcattatatagttttaatgatggtgaagaacatcaaaaaatcttacttgatgacttgatgaagaaagcagaggaaggagatctcttagtaaatccagatcaaccaaggctcaccattccaatatctcagattgcccctgacttgattttggctgacctgcctagaaatattatgttgaataatgatgagttggaatttgaacaagctccagagtttctcctaggtgatggcagttttggatcagtttaccgagcagcctatgaaggagaagaagtggctgtgaagatttttaataaacatacatcactcaggctgttaagacaagagcttgtggtgctttgccacctccaccaccccagtttgatatctttgctggcagctgggattcgtccccggatgttggtgatggagttagcctccaagggttccttggatcgcctgcttcagcaggacaaagccagcctcactagaaccctacagcacaggattgcactccacgtagctgatggtttgagatacctccactcagccatgattatataccgagacctgaaaccccacaatgtgctgcttttcacactgtatcccaatgctgccatcattgcaaagattgctgactacggcattgctcagtactgctgtagaatggggataaaaacatcagagggcacaccagggtttcgtgcacctgaagttgccagaggaaatgtcatttataaccaacaggctgatgtttattcatttggtttactactctatgacattttgacaactggaggtagaatagtagagggtttgaagtttccaaatgagtttgatgaattagaaatacaaggaaaattacctgatccagttaaagaatatggttgtgccccatggcctatggttgagaaattaattaaacagtgtttgaaagaaaatcctcaagaaaggcctacttctgcccaggtctttgacattttgaattcagctgaattagtctgtctgacgagacgcattttattacctaaaaacgtaattgttgaatgcatggttgctacacatcacaacagcaggaatgcaagcatttggctgggctgtgggcacaccgacagaggacagctctcatttcttgacttaaatactgaaggatacacttctgaggaagttgctgatagtagaatattgtgcttagccttggtgcatcttcctgttgaaaaggaaagctggattgtgtctgggacacagtctggtactctcctggtcatcaataccgaagatgggaaaaagagacataccctagaaaagatgactgattctgtcacttgtttgtattgcaattccttttccaagcaaagcaaacaaaaaaattttcttttggttggaaccgctgatggcaagttagcaatttttgaagataagactgttaagcttaaaggagctgctcctttgaagatactaaatataggaaatgtcagtactccattgatgtgtttgagtgaatccacaaattcaacggaaagaaatgtaatgtggggaggatgtggcacaaagattttctccttttctaatgatttcaccattcagaaactcattgagacaagaacaagccaactgttttcttatgcagctttcagtgattccaacatcataacagtggtggtagacactgctctctatattgctaagcaaaatagccctgttgtggaagtgtgggataagaaaactgaaaaactctgtggactaatagactgcgtgcactttttaagggaggtaatggtaaaagaaaacaaggaatcaaaacacaaaatgtcttattctgggagagtgaaaaccctctgccttcagaagaacactgctctttggataggaactggaggaggccatattttactcctggatctttcaactcgtcgacttatacgtgtaatttacaacttttgtaattcggtcagagtcatgatgacagcacagctaggaagccttaaaaatgtcatgctggtattgggctacaaccggaaaaatactgaaggtacacaaaagcagaaagagatacaatcttgcttgaccgtttgggacatcaatcttccacatgaagtgcaaaatttagaaaaacacattgaagtgagaaaagaattagctgaaaaaatgagacgaacatctgttgagtaagagagaaataggaattgtctttggataggaaaattattctctcctcttgtaaatatttattttaaaaatgttcacatggaaagggtactcacattttttgaaatagctcgtgtgtatgaaggaatgttattatttttaatttaaatatatgtaaaaatacttaccagtaaatgtgtattttaaagaactatttaaaacacaatgttatatttcttataaataccagttactttcgttcattaattaatgaaaataaatctgtgaagtacctaatttaagtactcatactaaaatttataaggccgataattttttgttttcttgtctgtaatggaggtaaactttattttaaattctgtgcttaagacaggactattgcttgtcgatttttctagaaatctgcacggtataatgaaaatattaagacagtttcccatgtaatgtattccttcttagattgcatcgaaatgcactatcatatatgcttgtaaatattcaaatgaatttgcactaataaagtcctttgttggtatgtgaattctctttgttgctgttgcaaacagtgcatcttacacaacttcactcaattcaaaagaaaactccattaaaagtactaatgaaaaaacatgacatactgtcaaagtcctcatatctaggaaagacacagaaactctctttgtcacagaaactctctgtgtctttcctagacataatagagttgtttttcaactctatgtttgaatgtggataccctgaattttgtataattagtgtaaatacagtgttcagtccttcaagtgatatttttatttttttattcataccactagctacttgttttctaatctgcttcattctaatgcttatattcatcttttccctaaatttgtgatgctgcagatcctacatcattcagatagaaacctttttttttttcagaattatagaattccacagctcctaccaagaccatgaggataaatatctaacacttttcagttgctgaaggagaaaggagctttagttatgatggataaaaatatctgccaccctaggcttccaaattatacttaaattgtttacatagcttaccacaataggagtatcagggccaaatacctatgtaataatttgaggtcatttctgctttaggaaaagtactttcggtaaattctttggccctgaccagtattcattatttcagataattccctgtgataggacaactagtacatttaatattctcagaacttatggcattttactatgtgaaaactttaaatttatttatattaagggtaatcaaattcttaaagatgaaagattttctgtattttaaaggaagctatgctttaacttgttatgtaattaacaaaaaaatcatatataatagagctctttgttccagtgttatctctttcattgttactttgtatttgcaattttttttaccaaagacaaattaaaaaaatgaataccatatttaaatggaataataaaggttttttaaaaactt

SEQ ID NO: 260257 - DNA, 7584 bp, Artificial Sequence
  derived and/or modified sequence
atggccagcggcagctgccagggctgcgaggaggacgaggagaccctgaagaaacttattgttagattaaataacgtacaagaggggaaacagatcgagaccctggtgcagatcctggaagatttgctcgtgttcacttattcagaaagggcctcaaaactcttccaaggcaaaaatatacatgtacctctccttattgtcctggactcgtatatgcgggtcgccagtgtacagcaggtagggtggagtttgctgtgcaagctgatcgaggtctgccccggcacaatgcaatcccttatgggaccccaggatgtcggcaacgactgggaagtcttaggagtgcaccagctgattctgaaaatgctcactgttcataacgcgagcgtgaatttgagcgtcatcggcttaaagacccttgacctgctcctcaccagtgggaaaattactctactgattcttgatgaggagtcagacattttcatgttaatcttcgatgcaatgcattcatttcccgctaacgacgaggttcagaaactcggatgcaaagccttgcatgtgcttttcgagcgcgtgagcgaagaacagctgacagagtttgttgagaataaggattacatgatcctactatcggcactcactaacttcaaggatgaagaagaaatcgtgctgcacgtgctgcactgtcttcattccctggctatcccatgcaataacgtggaggtcctaatgagcgggaacgtgcgatgctacaacatcgttgtggaggctatgaaagccttccccatgagcgagagaatccaggaagtttcatgttgcctgctgcatcggctcaccttagggaacttcttcaatatcctggtgctgaatgaagtgcacgagttcgtggtaaaggccgtgcaacagtaccccgagaacgcagctctccagatatctgccttgagttgcctcgctctcctcaccgaaaccatctttctgaaccaggatctggaggaaaaaaacgaaaatcaggaaaacgatgacgaaggcgaagaagataagcttttctggctggaggcttgttacaaagcactgacatggcaccgaaaaaacaagcacgtgcaggaagctgcctgttgggcactgaacaatctgctgatgtatcagaactccctccacgagaaaatcggcgatgaggacgggcacttcccagcgcacagagaggttatgctgtctatgctaatgcacagttcttctaaagaggttttccaggcttcagccaatgcgctgtcaacacttctcgagcagaatgtgaatttccggaaaattctgctctccaagggcattcatctcaatgtcttagagctcatgcagaagcacatccatagccctgaggtggctgagagtggatgcaagatgctgaaccacctgtttgagggttccaatacatcactcgatattatggctgccgtggtcccgaagatcctgactgtgatgaaaagacatgagaccagtttacccgtgcaacttgaggccctgagagccatcctgcatttcattgtcccagggatgcctgaagaatcacgggaggatacggaattccatcacaaactaaatatggtaaagaagcagtgtttcaagaacgacatccacaaactggtactggccgcgttaaatcgttttattggaaatcctggcattcagaagtgcggcctgaaagtcattagcagtatcgtgcacttcccagacgccctcgagatgctgtcccttgagggcgccatggactcagtcctccacaccctgcagatgtatcctgacgaccaagagatccagtgcctcggactgtctctgatcggctacctgatcacgaagaagaatgtgtttattgggactggccacctgctggcaaaaattttagtttcatccctatacaggtttaaggatgtcgctgaaatccagacaaagggttttcaaaccatcttggccatcctgaaattgtctgcctccttctcgaagctccttgtgcaccactccttcgatctcgttatttttcaccaaatgtcaagcaacattatggagcaaaaggaccagcagttcctgaacctctgctgcaaatgctttgctaaagttgcaatggacgattacctgaagaacgtcatgttggagcgggcctgcgatcagaacaactccatcatggtggaatgcctgttgctgctgggagccgatgcgaatcaggccaaggaggggtcctccctcatatgccaggtgtgtgaaaaggagtcgagccctaagctggttgaacttctacttaacagcggctcaagagagcaggatgtaagaaaagccctgaccatctccattggtaagggagatagccagattatttcccttttgctgcgtcgattggctctggacgtagcaaacaattcgatctgtctgggcggattttgtatcgggaaggtggaaccgtcttggcttgggcccctgttccctgataagacttcaaacctgcggaagcagacgaatattgcgtccactcttgcacgcatggttattaggtaccagatgaagtcagctgtcgaagaaggcactgccagtggttcagacgggaacttctccgaggacgtccttagtaaatttgatgaatggactttcattcccgactctagcatggacagtgttttcgcacaaagcgacgacttggactccgagggaagcgaaggaagtttccttgtgaaaaagaagtccaatagtatcagtgtaggtgaattctatcgggatgccgtacttcagagatgcagtcccaatcttcaacgacactccaactcccttggcccaattttcgaccacgaggacctgctgaaacgtaagaggaaaatcctatcttctgatgactctctgcgctcttctaagctgcaaagccatatgcgacactctgacagtatctcctcgttggcttctgagagagaatacataacgagcctggatttatcggccaacgagttgcgggacatagacgccctgagccagaaatgctgcatatccgtgcatcttgagcacttagagaagctggaactccaccagaacgccctcacttcctttccgcagcagctgtgcgaaactctaaaaagcctcacgcacctggatctgcattctaacaaattcacaagctttccctcctatctgctgaaaatgtcctgcatcgcgaatctggacgttagccggaatgatatcggaccatctgtagttctcgaccccacagttaaatgccccacactgaaacagttcaacctgtcttacaatcagttgtcttttgtgccagaaaatctgactgatgtggtggaaaaactggagcagctcatcttagaaggcaacaaaatcagcggcatctgttctcctctgcgcctgaaagagttgaaaattctcaatctgagtaagaatcacatttcatccctatcagaaaatttcctggaagcctgccccaaagtggagtccttctctgcacggatgaactttctcgcagcaatgcccttcctgcccccctccatgactatactgaagctgtctcaaaacaaattttcatgcatccccgaggcaatcttgaatctgcctcatcttcgatccctggatatgagctctaatgacatacaatacctgcctggcccagcccactggaagtctttaaatctgcgggaattactattttcacataaccagatcagcatcctagacctttctgaaaaggcctatttatggagtcgggtcgagaagctgcacctgtcacacaacaagctgaaggaaatccccccagagatcggatgcctcgaaaaccttacctctctagacgtctcctataacctcgagctgcggagcttcccgaacgaaatgggcaagttatccaaaatttgggacttgcctctggacgaattacatttgaattttgattttaaacatattggctgcaaagcaaaagatatcattagatttctgcagcagagactcaaaaaggccgtcccatataatcgcatgaaactgatgattgtcgggaacacgggatcagggaagaccacactgctgcagcaacttatgaagacaaagaaatctgacctgggcatgcaaagcgcaaccgtggggattgacgtgaaagattggcccatccagattcgggacaagagaaagcgagatctggtgctgaatgtttgggacttcgcgggtcgcgaggaattttactctactcacccacattttatgactcagagagccttgtacttggccgtctacgacctatctaagggtcaagctgaagtggacgccatgaaaccatggctcttcaacatcaaagcacgggccagttcctcccctgtcatcctggtgggcacacatttagatgtttccgacgaaaaacaaagaaaggcctgcatgtcgaaaatcactaaggaattattgaataagagaggctttcccgctatcagagactatcacttcgtaaacgccacagaggagtccgacgccctggccaagttaaggaagaccataataaacgaatcactgaatttcaaaatccgtgaccagctggtggtggggcaattgattcctgactgttacgtcgaactggagaaaattattctgtcagagaggaaaaatgtgcccatcgaatttcctgtaatcgataggaaaagattactgcaacttgtgcgcgaaaaccagcttcagctcgacgagaacgaattaccacacgctgtccatttcctgaacgagtctggtgtcttgctgcattttcaggatcccgccttgcagctctcagacctgtattttgtggagcccaagtggttgtgcaagatcatggctcagatcctgaccgtgaaagtggagggatgcccaaagcacccgaaaggcataatttctcgccgggatgtcgagaagttcctaagtaagaaacggaagttccccaaaaactatatgagccagtattttaagctgctcgagaaatttcagattgccctgcccatcggcgaggagtacttgctggtgccttcatccctgagcgaccaccgtcccgtgatagagcttcctcactgcgagaattccgagattattattcgtctctatgaaatgccatattttcccatgggcttctggtctaggctgatcaatcggctgctagaaatctccccctatatgctgtctggaagggagcgggcgctgagacctaatcggatgtactggcgccaaggaatatatctgaattggagccctgaggcttactgtctcgtgggcagcgaggtcctagataatcaccccgaatcttttctcaaaattaccgtgccgtcctgtcgcaagggctgtattctgctggggcaggtggtagatcacattgacagcctgatggaggaatggttccctgggctgctggagattgatatctgtggagaaggcgagaccctacttaagaagtgggctctctattcatttaatgacggagaggaacatcagaagattcttcttgatgacctaatgaagaaagcagaggagggcgatctgctcgtgaatcctgaccagcctagattgacaattccaattagccagattgctccagaccttattctggctgacttaccaaggaatattatgttgaacaatgatgagctcgaattcgagcaagcccctgagttccttttgggagatggttcattcggcagcgtatatagggccgcatacgaaggagaggaagtcgctgtcaaaatatttaacaagcacacctcattgaggttgcttcgacaagaattagtcgtgctttgtcacctgcatcacccaagcttaatttcgctgcttgccgcggggatacggccacgaatgctggtcatggagctggccagtaagggctcattggatagacttctgcaacaggataaagcaagccttaccagaactcttcaacaccggatcgccctgcacgttgccgacgggttaagatatcttcacagtgcaatgattatttacagagatcttaagccacataacgtcctgctttttaccctgtatcccaacgctgcgatcatcgctaaaattgcagactatggcatcgcccagtactgctgtcggatgggaattaagacctcggaggggacccctggttttcgggcccccgaggtcgcacgaggaaatgtgatctataaccagcaagctgatgtttactctttcggcttgctcttgtatgatatcttgacaactggcggccgaattgtggaaggactcaaatttccaaacgagtttgatgagctcgagattcaggggaaactgcctgaccctgttaaggagtacgggtgcgcgccctggcccatggtcgagaaactcattaagcagtgtcttaaggagaaccctcaagagcgtcctacctccgctcaggtcttcgatattctgaattcggcggaattggtctgtctgaccagacgaatccttctgcccaagaatgtgatagtagaatgtatggttgctacacaccacaattcccggaatgcctctatatggctggggtgtggtcacacagatcgcggccaactttccttccttgatcttaacaccgagggatatacttctgaagaagtcgcggattccagaatcctttgcctcgccctggtacacctcccggtagagaaggagtcttggatcgtcagcggaacccagtcgggcactctgctggtaattaacactgaagacggcaaaaaacgccataccctggagaaaatgacggactccgtgacctgcctctattgcaacagcttcagcaagcagtctaagcagaaaaacttcttgctggtgggaaccgccgacggaaaactcgcgatcttcgaggataagaccgtcaaattaaagggcgccgcccctttgaagattctgaacattggcaatgtttccactcccctgatgtgcctgtccgaaagcaccaacagcactgagaggaacgtaatgtgggggggttgcggtactaagatcttttccttttctaatgatttcaccatccagaaacttatagaaacgaggacgagccagcttttctcttacgcagcatttagcgatagtaacatcataacagttgtagtcgacacagctctgtatattgcaaagcagaattctcctgtggtagaggtttgggataagaaaacggagaaactgtgcggcttaatcgattgtgtgcattttctgcgagaggtgatggtcaaagaaaataaagagtctaaacataaaatgtcatattctggcagggtgaagacactttgtttgcagaagaacacggcgctatggattgggacaggcggaggacacatcctgctgctggacctgagcacccgccgcttgattcgggtgatatacaatttctgtaacagcgtcagggtcatgatgaccgcccaactggggtctctgaagaatgtgatgctggtgcttggctataatcggaaaaataccgagggcactcagaagcaaaaagagattcaatcttgtctgacggtctgggacattaatctacctcacgaggtgcagaacttggagaagcacatcgaagtacgcaaggagctagcggagaaaatgcggcgaacaagcgttgagtag

SEQ ID NO: 260258 - DNA, 7583 bp, Artificial Sequence
  derived and/or modified sequence
atggcaagcggaagctgccaagggtgcgaggaggacgaggaaacattaaaaaaacttatcgttcggcttaataacgtgcaagagggaaagcaaatcgagaccctggttcagatcctagaggacttgctcgttttcacatattctgaaagagccagcaagctgtttcaagggaagaacatccatgtccccctattgatagtgctggatagctacatgcgagtggcgagtgttcaacaagtcggttggtcactgttgtgtaaattgatagaagtctgccccggtacgatgcaaagtctcatgggcccacaggatgtaggaaacgattgggaagtgctgggcgtgcaccagctgatattaaaaatgcttactgtgcataacgcctccgttaacttatctgtaatcggactcaaaactctagatcttctactgacctctgggaagatcaccctgctgatcctagacgaggagagcgatatttttatgttgattttcgatgcgatgcactcttttcccgctaacgacgaggtgcagaagctcgggtgtaaggctctccacgtattgtttgagcgcgtgtccgaagagcaactgacggagttcgtggaaaacaaagactatatgattttgctgtccgctttgactaatttcaaggatgaggaggaaattgtcttgcacgttcttcactgcctgcactctctggccatcccctgtaacaatgtagaagtcctaatgagtggtaacgtacggtgttataacattgtagtcgaagccatgaaagcgtttccaatgtctgaacgaatccaggaagtgtcatgttgcctgctacaccgccttaccctgggtaatttcttcaacattctggtccttaatgaggtgcacgagttcgtggtgaaggctgtccagcagtaccctgaaaatgctgccctgcagatttccgccttgagctgcctagcactgctgaccgaaacaatcttcctcaatcaggacctggaagagaagaatgaaaatcaggagaacgacgatgaaggagaagaagataagctgttctggttggaagcatgttacaaagcacttacctggcataggaaaaacaagcacgtgcaggaggccgcttgttgggctttgaataatctccttatgtaccagaattcactccatgagaagattggcgacgaggatggacactttcctgctcatcgcgaagtaatgttgagtatgctgatgcatagcagttcaaaggaggtgttccaagccagcgccaacgccctttcaactctgttagagcaaaatgttaactttaggaagatcctcctgtccaaagggattcatctgaacgttctggagcttatgcagaaacacatccactcccccgaagtggccgagtccgggtgtaagatgctcaaccatctgtttgaaggttcaaatacatcactggacataatggctgccgtggtcccaaagatcctgaccgtgatgaaaagacacgagacatccttgcctgtacagctagaggcgctaagggcgatactccatttcatcgtgccaggtatgccagaggaatctcgtgaggacacagagtttcaccataaactgaacatggttaaaaagcaatgcttcaagaatgatattcacaagctcgtgttagccgctctcaacagattcattggtaatccaggcattcagaagtgcggcctgaaagttatcagcagcatagtgcactttccagatgctctcgagatgctctcattagaaggggctatggacagcgtgctgcacactctgcagatgtatccagacgaccaggaaatccagtgtctgggactgtccctcatcggatatctcataaccaaaaaaaacgtctttatcggaaccggccatctactggccaagatcctagtcagttctttgtacagattcaaagacgtggctgaaatccagactaaagggtttcagactatcctagccattcttaaattaagcgcatccttttccaaactgcttgtgcaccactctttcgatctggtgatttttcaccaaatgtctagcaacatcatggaacagaaagaccagcaattcttaaacctgtgctgtaagtgtttcgctaaggtggctatggatgactacctgaagaacgtcatgctggaaagggcttgtgaccagaacaactcaataatggtggagtgccttcttctgctcggggctgacgctaaccaggcaaaggagggtagttcactgatctgtcaggtgtgcgagaaggaaagctctccaaagctcgtagaactcctgttgaattcagggagcagagagcaggatgttagaaaggccctgactatctctatcggcaaaggggattcccaaattatcagcctattgttgagacgcttagccctggatgtcgccaataattctatctgtctgggtggattctgcattggaaaagtcgagcctagctggctgggcccactgtttccagataaaacgtcgaacctcaggaaacaaactaatattgcaagcaccctggcccgtatggtcattcggtaccagatgaagtctgcggtcgaggagggcactgcaagcggaagtgacggtaatttttctgaagacgtactctctaagtttgatgagtggacttttatacccgactcctccatggattccgtattcgcccaatctgatgaccttgacagcgaggggagtgaagggtccttcctcgtgaagaagaaaagcaacagtatcagcgtgggtgaattttatcgggacgctgttctccagaggtgctccccaaacctgcagcggcatagtaacagtttgggaccaatcttcgaccatgaggacctgctgaaacgaaagcgaaagatcctaagctcagatgactccctgcgcagctctaagttgcagtcacacatgcgccattcagattcaatttcctccctggcttctgaacgcgagtacattaccagtttagacctgtcagcaaatgaactgagagatattgacgccctgtcccagaaatgctgcatttcagtgcacctggaacatctcgagaagctggagttgcatcagaatgccctgaccagcttcccccaacagttatgtgaaaccttgaagtcactgacccatcttgatttgcactccaacaaattcacatctttcccatcttatcttctgaagatgtcatgtattgcaaatctagacgtctccagaaacgacatagggcctagtgtggtgctggatccaacggtcaagtgtcccaccttgaagcagttcaacctctcttacaatcagctatcatttgtgcccgaaaatctcaccgacgtggtggagaagttggagcaacttattctagagggtaacaagatctccggaatctgcagtccactgaggctgaaggagttgaagattttgaatctgagcaaaaaccacatttcatcgctaagtgaaaatttcttggaagcctgtccaaaggtagaaagtttctcagctagaatgaattttctggcagcgatgcctttcctcccaccttccatgactatcttaaagttgtctcaaaacaaattttcgtgcatccccgaagctatattaaacttgcctcacctccgatccttggatatgtcctctaacgacattcaatacctcccaggcccagcccactggaaaagtcttaatctgagggagctgctcttcagccacaaccagatttcaatattagacctgtcagaaaaagcctacctgtggtccagagttgaaaaactgcatttgtcccataataaactgaaagagatcccgccagagattgggtgtctggagaatctgacatccctcgacgttagttacaatctcgaattgaggagttttcccaatgagatgggaaagctgtctaaaatttgggatctgccgctcgatgagctgcatctcaatttcgactttaagcacatcggatgcaaagcaaaggatataatccgatttctgcagcagcgcctgaaaaaagcagttccttataaccggatgaagcttatgatagtgggcaatacaggctcaggtaagactacgcttctgcaacagttgatgaaaacaaaaaagtccgatttgggaatgcagtcagctaccgtaggtatcgacgtcaaagactggcccatccaaattcgagacaaaagaaaaagagacttggtcctgaacgtttgggactttgctggtagggaggagttttactctacccaccctcatttcatgacccagagagcgctctacctggccgtttatgacctgagtaaaggccaggccgaggtggacgctatgaaaccgtggctctttaacatcaaagcgcgagcaagttctagccctgtcatactcgtcggcacccacctggacgtgtcagatgagaagcagcgcaaagcctgcatgtccaaaataaccaaagagttgctgaacaagagaggcttccccgcaattcgggactatcattttgtaaatgcaaccgaggagtcagatgcactcgccaagctgaggaagacgattatcaacgaaagcctgaacttcaaaatccgagatcagttggtggtggggcaactcattccagactgttacgtggaactagagaaaattatcctgagcgagagaaaaaatgtacctatcgagttccctgtgatcgaccggaagaggctcctccagctggtcagagaaaaccagctgcaacttgacgagaatgagcttccacatgccgttcactttcttaacgagtctggggtgctgctgcatttccaggaccccgctctccagctctccgatctgtacttcgtggaacctaagtggctatgtaaaatcatggcccagattctgaccgtaaaggtggaaggctgtccaaagcatccaaagggcattattagcagaagagacgtagagaaatttctttctaagaaaagaaaattccccaaaaactacatgtcccaatactttaaacttctcgaaaagtttcaaatcgcccttcctattggggaggagtaccttcttgtcccttcatccttgtccgatcatcgcccagtgatcgagctgccacattgtgaaaactcagagatcattattcgcctgtacgagatgccatacttccctatgggcttctggagtcggctgattaatagactgttggagatcagtccctacatgttatcgggcagagagagagcgctgcggcctaataggatgtactggcgccagggtatttacctcaattggagtcccgaggcatactgcctggtgggcagtgaagtgttggataatcaccccgaaagcttcctgaaaattactgtcccctcttgtcgcaaagggtgtatcttactggggcaggttgtggatcatatcgactctctaatggaggaatggttcccaggattgctcgagattgacatctgtggcgagggtgagacgctgctgaaaaagtgggctctctactccttcaatgacggggaggagcatcagaagattctgctcgatgatctgatgaaaaaagccgaggaaggcgacttgctagtgaacccagatcagccaaggctgactattccgatttcccaaatagccccagacctgatcttggccgacctgcccagaaacatcatgctcaacaacgatgagctggagttcgaacaggctcccgagtttctgcttggcgatgggagttttggtagtgtttatcgggcagcttatgagggtgaagaggttgccgtcaagatctttaacaaacacacttcactacgcctccttaggcaggagctggtggtgctgtgtcatctccaccatccctccctcatttccttactggctgctggaatccgacccagaatgttagtaatggagctggcatcaaaaggctctctggacagacttctccagcaggacaaagcctccctgacgcgcactcttcaacacagaattgccctgcacgttgcggatggacttcgttatctgcactccgcgatgattatataccgggatctcaaaccacacaatgtgctcctgttcactctgtacccaaacgctgccattatagctaaaatagccgattacgggattgcccagtattgttgccggatgggtatcaagaccagtgagggcactcccggtttcagagctcccgaagtggcccgtggcaacgtgatttacaaccagcaggccgatgtttacagcttcggcctccttctgtatgatattctgacgactggcggtcgaattgtcgagggcctgaagttccctaatgaattcgatgaattagagatacaagggaaactacccgatcctgtgaaggagtacggatgtgcgccatggcccatggtggaaaagctcatcaaacaatgcctgaaggagaacccacaggagaggccgacctcagcacaagtgtttgatatactcaactccgcagaactggtctgcctgacacgacgaattcttctcccgaagaacgtcatcgtggagtgtatggtcgctacgcatcataacagtcggaatgcatctatctggctcggctgtgggcacaccgatagagggcagctctcattccttgatctgaatacggagggttatacttctgaagaggtcgcggacagccgaattttgtgcctggccctggtacatcttccggtagaaaaggagtcctggatcgtgtctggcacccaaagtggaaccctccttgtcattaatactgaggacggtaaaaagaggcacactttagagaagatgacagattcagtgacgtgtttgtactgcaatagctttagcaaacagagcaagcagaagaactttttactggtcgggacagccgacgggaaactggccatctttgaggacaagaccgtgaagctcaaaggggcagctccccttaagatccttaacataggcaatgtgtctactcccctcatgtgtctatctgaatcgaccaattctaccgagcgcaatgtgatgtggggcggatgcgggaccaagatcttttcgttctcaaatgacttcactattcagaagctaatcgaaactaggacctcccaactgttttcatacgctgcattttctgacagtaatattattacagtagttgtggatacagccctgtatatcgcaaaacagaactcgcccgtggtggaggtttgggataagaaaacagagaaactatgcggacttatcgattgtgtgcatttccttagggaagtcatggttaaagagaataaggaaagtaagcacaagatgagctatagtgggagggtcaagacactttgcctgcaaaagaacacagctctgtggattggcaccggtggtgggcatatcctgctcctagatctttcgacccggcgacttattcgagtgatttataatttctgcaatagcgtaagggtaatgatgaccgcacagctcggctccctgaagaatgttatgctggtgctcggctacaacagaaagaacaccgagggaactcagaagcaaaaggaaatccagagctgcctaaccgtgtgggacatcaacctgccccacgaagtacaaaatctggagaaacacattgaggttcgaaaagagttggccgagaagatgcggagaacctcggtggaata

SEQ ID NO: 260259 - DNA, 7584 bp, Artificial Sequence
  derived and/or modified sequence
atggccagcggcagctgccagggctgcgaggaggacgaggagaccctgaagaagctgatcgtgagactgaacaacgtgcaggagggcaagcagatcgagaccctggtgcagatcctggaggacctgctggtgttcacctacagcgagagagccagcaagctgttccagggcaagaacatccacgtgcccctgctgatcgtgctggacagctacatgagagtggccagcgtgcagcaggtgggctggagcctgctgtgcaagctgatcgaggtgtgccccggcaccatgcagagcctgatgggcccccaggacgtgggcaacgactgggaggtgctgggcgtgcaccagctgatcctgaagatgctgaccgtgcacaacgccagcgtgaacctgagcgtgatcggcctgaagaccctggacctgctgctgaccagcggcaagatcaccctgctgatcctggacgaggagagcgacatcttcatgctgatcttcgacgccatgcacagcttccccgccaacgacgaggtgcagaagctgggctgcaaggccctgcacgtgctgttcgagagagtgagcgaggagcagctgaccgagttcgtggagaacaaggactacatgatcctgctgagcgccctgaccaacttcaaggacgaggaggagatcgtgctgcacgtgctgcactgcctgcacagcctggccatcccctgcaacaacgtggaggtgctgatgagcggcaacgtgagatgctacaacatcgtggtggaggccatgaaggccttccccatgagcgagagaatccaggaggtgagctgctgcctgctgcacagactgaccctgggcaacttcttcaacatcctggtgctgaacgaggtgcacgagttcgtggtgaaggccgtgcagcagtaccccgagaacgccgccctgcagatcagcgccctgagctgcctggccctgctgaccgagaccatcttcctgaaccaggacctggaggagaagaacgagaaccaggagaacgacgacgagggcgaggaggacaagctgttctggctggaggcctgctacaaggccctgacctggcacagaaagaacaagcacgtgcaggaggccgcctgctgggccctgaacaacctgctgatgtaccagaacagcctgcacgagaagatcggcgacgaggacggccacttccccgcccacagagaggtgatgctgagcatgctgatgcacagcagcagcaaggaggtgttccaggccagcgccaacgccctgagcaccctgctggagcagaacgtgaacttcagaaagatcctgctgagcaagggcatccacctgaacgtgctggagctgatgcagaagcacatccacagccccgaggtggccgagagcggctgcaagatgctgaaccacctgttcgagggcagcaacaccagcctggacatcatggccgccgtggtgcccaagatcctgaccgtgatgaagagacacgagaccagcctgcccgtgcagctggaggccctgagagccatcctgcacttcatcgtgcccggcatgcccgaggagagcagagaggacaccgagttccaccacaagctgaacatggtgaagaagcagtgcttcaagaacgacatccacaagctggtgctggccgccctgaacagattcatcggcaaccccggcatccagaagtgcggcctgaaggtgatcagcagcatcgtgcacttccccgacgccctggagatgctgagcctggagggcgccatggacagcgtgctgcacaccctgcagatgtaccccgacgaccaggagatccagtgcctgggcctgagcctgatcggctacctgatcaccaagaagaacgtgttcatcggcaccggccacctgctggccaagatcctggtgagcagcctgtacagattcaaggacgtggccgagatccagaccaagggcttccagaccatcctggccatcctgaagctgagcgccagcttcagcaagctgctggtgcaccacagcttcgacctggtgatcttccaccagatgagcagcaacatcatggagcagaaggaccagcagttcctgaacctgtgctgcaagtgcttcgccaaggtggccatggacgactacctgaagaacgtgatgctggagagagcctgcgaccagaacaacagcatcatggtggagtgcctgctgctgctgggcgccgacgccaaccaggccaaggagggcagcagcctgatctgccaggtgtgcgagaaggagagcagccccaagctggtggagctgctgctgaacagcggcagcagagagcaggacgtgagaaaggccctgaccatcagcatcggcaagggcgacagccagatcatcagcctgctgctgagaagactggccctggacgtggccaacaacagcatctgcctgggcggcttctgcatcggcaaggtggagcccagctggctgggccccctgttccccgacaagaccagcaacctgagaaagcagaccaacatcgccagcaccctggccagaatggtgatcagataccagatgaagagcgccgtggaggagggcaccgccagcggcagcgacggcaacttcagcgaggacgtgctgagcaagttcgacgagtggaccttcatccccgacagcagcatggacagcgtgttcgcccagagcgacgacctggacagcgagggcagcgagggcagcttcctggtgaagaagaagagcaacagcatcagcgtgggcgagttctacagagacgccgtgctgcagagatgcagccccaacctgcagagacacagcaacagcctgggccccatcttcgaccacgaggacctgctgaagagaaagagaaagatcctgagcagcgacgacagcctgagaagcagcaagctgcagagccacatgagacacagcgacagcatcagcagcctggccagcgagagagagtacatcaccagcctggacctgagcgccaacgagctgagagacatcgacgccctgagccagaagtgctgcatcagcgtgcacctggagcacctggagaagctggagctgcaccagaacgccctgaccagcttcccccagcagctgtgcgagaccctgaagagcctgacccacctggacctgcacagcaacaagttcaccagcttccccagctacctgctgaagatgagctgcatcgccaacctggacgtgagcagaaacgacatcggccccagcgtggtgctggaccccaccgtgaagtgccccaccctgaagcagttcaacctgagctacaaccagctgagcttcgtgcccgagaacctgaccgacgtggtggagaagctggagcagctgatcctggagggcaacaagatcagcggcatctgcagccccctgagactgaaggagctgaagatcctgaacctgagcaagaaccacatcagcagcctgagcgagaacttcctggaggcctgccccaaggtggagagcttcagcgccagaatgaacttcctggccgccatgcccttcctgccccccagcatgaccatcctgaagctgagccagaacaagttcagctgcatccccgaggccatcctgaacctgccccacctgagaagcctggacatgagcagcaacgacatccagtacctgcccggccccgcccactggaagagcctgaacctgagagagctgctgttcagccacaaccagatcagcatcctggacctgagcgagaaggcctacctgtggagcagagtggagaagctgcacctgagccacaacaagctgaaggagatcccccccgagatcggctgcctggagaacctgaccagcctggacgtgagctacaacctggagctgagaagcttccccaacgagatgggcaagctgagcaagatctgggacctgcccctggacgagctgcacctgaacttcgacttcaagcacatcggctgcaaggccaaggacatcatcagattcctgcagcagagactgaagaaggccgtgccctacaacagaatgaagctgatgatcgtgggcaacaccggcagcggcaagaccaccctgctgcagcagctgatgaagaccaagaagagcgacctgggcatgcagagcgccaccgtgggcatcgacgtgaaggactggcccatccagatcagagacaagagaaagagagacctggtgctgaacgtgtgggacttcgccggcagagaggagttctacagcacccacccccacttcatgacccagagagccctgtacctggccgtgtacgacctgagcaagggccaggccgaggtggacgccatgaagccctggctgttcaacatcaaggccagagccagcagcagccccgtgatcctggtgggcacccacctggacgtgagcgacgagaagcagagaaaggcctgcatgagcaagatcaccaaggagctgctgaacaagagaggcttccccgccatcagagactaccacttcgtgaacgccaccgaggagagcgacgccctggccaagctgagaaagaccatcatcaacgagagcctgaacttcaagatcagagaccagctggtggtgggccagctgatccccgactgctacgtggagctggagaagatcatcctgagcgagagaaagaacgtgcccatcgagttccccgtgatcgacagaaagagactgctgcagctggtgagagagaaccagctgcagctggacgagaacgagctgccccacgccgtgcacttcctgaacgagagcggcgtgctgctgcacttccaggaccccgccctgcagctgagcgacctgtacttcgtggagcccaagtggctgtgcaagatcatggcccagatcctgaccgtgaaggtggagggctgccccaagcaccccaagggcatcatcagcagaagagacgtggagaagttcctgagcaagaagagaaagttccccaagaactacatgagccagtacttcaagctgctggagaagttccagatcgccctgcccatcggcgaggagtacctgctggtgcccagcagcctgagcgaccacagacccgtgatcgagctgccccactgcgagaacagcgagatcatcatcagactgtacgagatgccctacttccccatgggcttctggagcagactgatcaacagactgctggagatcagcccctacatgctgagcggcagagagagagccctgagacccaacagaatgtactggagacagggcatctacctgaactggagccccgaggcctactgcctggtgggcagcgaggtgctggacaaccaccccgagagcttcctgaagatcaccgtgcccagctgcagaaagggctgcatcctgctgggccaggtggtggaccacatcgacagcctgatggaggagtggttccccggcctgctggagatcgacatctgcggcgagggcgagaccctgctgaagaagtgggccctgtacagcttcaacgacggcgaggagcaccagaagatcctgctggacgacctgatgaagaaggccgaggagggcgacctgctggtgaaccccgaccagcccagactgaccatccccatcagccagatcgcccccgacctgatcctggccgacctgcccagaaacatcatgctgaacaacgacgagctggagttcgagcaggcccccgagttcctgctgggcgacggcagcttcggcagcgtgtacagagccgcctacgagggcgaggaggtggccgtgaagatcttcaacaagcacaccagcctgagactgctgagacaggagctggtggtgctgtgccacctgcaccaccccagcctgatcagcctgctggccgccggcatcagacccagaatgctggtgatggagctggccagcaagggcagcctggacagactgctgcagcaggacaaggccagcctgaccagaaccctgcagcacagaatcgccctgcacgtggccgacggcctgagatacctgcacagcgccatgatcatctacagagacctgaagccccacaacgtgctgctgttcaccctgtaccccaacgccgccatcatcgccaagatcgccgactacggcatcgcccagtactgctgcagaatgggcatcaagaccagcgagggcacccccggcttcagagcccccgaggtggccagaggcaacgtgatctacaaccagcaggccgacgtgtacagcttcggcctgctgctgtacgacatcctgaccaccggcggcagaatcgtggagggcctgaagttccccaacgagttcgacgagctggagatccagggcaagctgcccgaccccgtgaaggagtacggctgcgccccctggcccatggtggagaagctgatcaagcagtgcctgaaggagaacccccaggagagacccaccagcgcccaggtgttcgacatcctgaacagcgccgagctggtgtgcctgaccagaagaatcctgctgcccaagaacgtgatcgtggagtgcatggtggccacccaccacaacagcagaaacgccagcatctggctgggctgcggccacaccgacagaggccagctgagcttcctggacctgaacaccgagggctacaccagcgaggaggtggccgacagcagaatcctgtgcctggccctggtgcacctgcccgtggagaaggagagctggatcgtgagcggcacccagagcggcaccctgctggtgatcaacaccgaggacggcaagaagagacacaccctggagaagatgaccgacagcgtgacctgcctgtactgcaacagcttcagcaagcagagcaagcagaagaacttcctgctggtgggcaccgccgacggcaagctggccatcttcgaggacaagaccgtgaagctgaagggcgccgcccccctgaagatcctgaacatcggcaacgtgagcacccccctgatgtgcctgagcgagagcaccaacagcaccgagagaaacgtgatgtggggcggctgcggcaccaagatcttcagcttcagcaacgacttcaccatccagaagctgatcgagaccagaaccagccagctgttcagctacgccgccttcagcgacagcaacatcatcaccgtggtggtggacaccgccctgtacatcgccaagcagaacagccccgtggtggaggtgtgggacaagaagaccgagaagctgtgcggcctgatcgactgcgtgcacttcctgagagaggtgatggtgaaggagaacaaggagagcaagcacaagatgagctacagcggcagagtgaagaccctgtgcctgcagaagaacaccgccctgtggatcggcaccggcggcggccacatcctgctgctggacctgagcaccagaagactgatcagagtgatctacaacttctgcaacagcgtgagagtgatgatgaccgcccagctgggcagcctgaagaacgtgatgctggtgctgggctacaacagaaagaacaccgagggcacccagaagcagaaggagatccagagctgcctgaccgtgtgggacatcaacctgccccacgaggtgcagaacctggagaagcacatcgaggtgagaaaggagctggccgagaagatgagaagaaccagcgtggagtag

SEQ ID NO: 260260 - protein, 262 aa, Artificial Sequence
  derived and/or modified sequence
MSRLSWGYREHNGPIHWKEFFPIADGDQQSPIEIKTKEVKYDSSLRPLSIKYDPSSAKIISNSGHSFNVDFDDTENKSVLRGGPLTGSYRLRQVHLHWGSADDHGSEHIVDGVSYAAELHVVHWNSDKYPSFVEAAHEPDGLAVLGVFLQIGEPNSQLQKITDTLDSIKEKGKQTRFTNFDLLSLLPPSWDYWTYPGSLTVPPLLESVTWIVLKQPINISSQQLAKFRSLLCTAEGEAAAFLVSNHRPPQPLKGRKVRASFH

SEQ ID NO: 260261 - DNA, 789 bp, Artificial Sequence
  derived and/or modified sequence
atgagcagactgagctggggctacagagagcacaacggccccatccactggaaggagttcttccccatcgccgacggcgaccagcagagccccatcgagatcaagaccaaggaggtgaagtacgacagcagcctgagacccctgagcatcaagtacgaccccagcagcgccaagatcatcagcaacagcggccacagcttcaacgtggacttcgacgacaccgagaacaagagcgtgctgagaggcggccccctgaccggcagctacagactgagacaggtgcacctgcactggggcagcgccgacgaccacggcagcgagcacatcgtggacggcgtgagctacgccgccgagctgcacgtggtgcactggaacagcgacaagtaccccagcttcgtggaggccgcccacgagcccgacggcctggccgtgctgggcgtgttcctgcagatcggcgagcccaacagccagctgcagaagatcaccgacaccctggacagcatcaaggagaagggcaagcagaccagattcaccaacttcgacctgctgagcctgctgccccccagctgggactactggacctaccccggcagcctgaccgtgccccccctgctggagagcgtgacctggatcgtgctgaagcagcccatcaacatcagcagccagcagctggccaagttcagaagcctgctgtgcaccgccgagggcgaggccgccgccttcctggtgagcaaccacagacccccccagcccctgaagggcagaaaggtgagagccagcttccactag

SEQ ID NO: 260262 - DNA, 789 bp, Artificial Sequence
  derived and/or modified sequence
atgtcccggctctcttggggctaccgcgagcataacggtcccatccattggaaagagttcttcccgatcgctgacggtgatcaacaatctccaatcgaaatcaaaacgaaggaggtgaagtatgattccagtcttagacccctttccattaaatacgatcccagctccgctaagattatctctaatagcggacacagctttaatgtggatttcgacgataccgaaaataagtcagtgctaaggggaggcccattaacgggatcataccgtctgagacaggttcacctgcactgggggagcgctgatgaccacgggagtgagcatatcgtcgacggcgtcagttatgccgccgagctgcacgtggttcactggaacagcgataagtacccaagtttcgtggaggctgcccatgaacctgatgggctggccgttctcggcgtgtttcttcaaataggcgaaccaaattcacaactgcagaagatcaccgacacattggatagtattaaggagaaaggcaaacagacccgattcacaaatttcgatctcctgtcactcctgccaccctcttgggattattggacatatccaggatctttaacagtgcccccactgctcgagagcgtcacgtggatcgtcctgaagcagcctatcaatatctcgtcccagcagttagcaaaatttcgctccctgttgtgcaccgccgagggggaggccgctgcatttctggtctcaaaccataggcccccccagcctctaaaaggtagaaaggttcgcgcaagcttccactag

SEQ ID NO: 260263 - DNA, 789 bp, Artificial Sequence
  derived and/or modified sequence
atgagccggctgtcctggggctaccgggagcacaacggccccatccactggaaggagttcttccccatcgcagatggagaccagcagagccccatcgagatcaagaccaaggaggtgaagtatgacagcagcctgcggcccctgagcatcaagtatgaccccagcagcgccaagatcatcagcaacagcggccacagcttcaacgtggactttgatgacacagagaacaagtctgtgctgcggggcggccccctgaccggcagctaccgcctgcggcaggtgcacctgcactggggcagcgcagatgaccacggcagcgagcacatcgtggatggagtgtcctatgctgctgagctgcacgtggtgcactggaacagcgacaagtaccccagctttgtggaggccgcccacgagccagatggcctggccgtgctgggcgtcttcctgcagattggagagcccaacagccagctgcagaagatcacagacaccctggacagcatcaaggagaagggcaagcagacccgcttcaccaactttgacctgctgagcctgctgcccccatcctgggactactggacctacccaggcagcctgactgtgccccccctgctggagagcgtgacctggatcgtgctgaagcagcccatcaacatcagcagccagcagctggccaagttccgcagcctgctgtgcacagctgagggggaggccgccgccttcctggtgagcaaccaccggcccccccagcccctgaagggcaggaaggtgcgggccagcttccactag

SEQ ID NO: 260264 - DNA, 789 bp, Artificial Sequence
  derived and/or modified sequence
atgagccggctgagctggggctaccgggagcacaacggccccatccactggaaagagtttttccctattgccgacggcgatcaacagagtccaatcgagataaaaacaaaagaagtgaagtacgatagtagcctgagacctctaagcataaaatatgacccgagttctgcaaagatcatatctaatagcggtcatagtttcaacgtggacttcgatgacacagagaacaagtccgtgttgcggggcggccccctcacggggtcgtaccgactgcgtcaagtgcacctgcactggggatctgctgacgaccacggtagcgaacatattgtcgatggagtgtcttacgccgcagagttacatgttgtgcattggaatagcgacaaatacccatccttcgtcgaagccgcccatgaacccgatgggctcgcggtgctgggcgtgtttctgcagatcggagaacctaactcccaactacagaagatcaccgacacccttgattcaatcaaggaaaaaggcaaacagacgcgctttaccaacttcgatctcctgagcttgcttccacccagctgggattattggacctaccctggctccctcaccgtacctccactcctggagagtgttacatggattgttctcaagcagcccataaacattagcagccagcagctcgctaagtttcgctccctgctttgtacagcagagggtgaagctgctgcctttctggtgagcaaccatcgacccccccagcctctcaaagggagaaaagtgcgggcctcattccactag

SEQ ID NO: 260265 - DNA, 789 bp, Artificial Sequence
  derived and/or modified sequence
atgagtcgactcagctgggggtaccgggagcacaatgggccaatccattggaaagaattcttcccaattgccgacggggatcaacagtcaccgatcgaaatcaagactaaagaggttaagtacgactcatctttgcgtcccttatcgattaagtatgacccctcttctgctaagatcattagcaatagtggccacagcttcaacgtggattttgacgacactgagaacaagagcgtgttgcgcggagggccacttaccggatcctatcgcttacgccaagtgcacctgcattggggttccgcagacgatcatggctcagagcatattgtggacggtgtctcttacgctgccgagctgcacgttgtgcactggaattcagataaatacccaagttttgtggaggccgcacatgagcccgatggccttgccgttctgggagtgtttttgcaaatcggcgagcccaacagccagctgcagaagattaccgacaccctggactctattaaggaaaaaggcaaacagactcggttcacaaacttcgacctgctgtcactgttacctcctagctgggattactggacataccctggtagcctgacggtgccaccactgcttgaaagcgtgacatggatcgtgttgaagcagcccataaacatatcctctcaacagttggctaaatttcggagtttgctgtgcactgccgaaggagaggctgcagcgttcctggtgtccaatcaccgaccccctcagccccttaagggcagaaaagttcgggcaagtttccattag

SEQ ID NO: 260266 - DNA, 3815 bp, Artificial Sequence
  derived and/or modified sequence
atcccccccggaaacctttctctctccgtctctccctctaactcaaatctctcattcccgagtccaaactaagagagactcgcgccccaggagtcagccagcggcgcgggcgccttccccgcacgcctctgccgtctggaggacgcaggcgggagcgccccggaccgggttcacggtctcgcactcctgccgccggcgccccgcggtcccgccctagcaggctccttcccgggcccctccccgctccctcctctttctcgctgctcagtcacatctttctcttccttccaccccgagggaccatgtcgaggctcagctggggataccgcgagcacaacggtcctattcactggaaggaatttttccctattgctgatggtgatcagcaatctccaattgagattaaaaccaaagaagtgaaatatgactcttccctccgaccacttagtatcaagtatgacccaagctcagctaaaatcatcagcaacagcggccattccttcaatgttgactttgatgacacagagaacaaatcagttctgcgtggtggtcctctcactggaagctacaggttacggcaggttcaccttcactgggggtccgctgatgaccacggctccgagcacatagtagatggagtgagctatgctgcagagctccatgttgttcactggaattcagacaaataccccagctttgttgaggcagctcatgaaccagatggactggctgtcttgggagtgtttttacagattggtgaacctaattcccaactgcaaaagattactgacactttggattccattaaagaaaagggtaaacaaactcgattcacaaattttgacctattgtctctgcttccaccatcctgggactactggacatatcctggttctcttacagttccacctcttcttgagagtgtcacatggattgttttaaagcaacctataaacatcagctctcaacagctggccaaatttcgcagtctcctgtgcacagcggagggtgaagcagcagcttttctggtgagcaatcaccgcccaccacagcctctaaagggccgcaaagtgagagcctctttccattaaaaattgtcaccaatgaactcccccaaacatggctgtggagagacaacaaaacaaaacaaagcacaaaagtctctgccaacaactcttttgtggaattctaatttataggaaacattttagtatgagcttcagtgtcacaaagaaaaccagatctctctctcttttttttttattttttttagtgatagagtctcactctgtcacccaggctggagggcagtggtacagtcttggctaattgcagcctccaactcctggactcaagtgatcctcccacctcagcctccagagtaagtaggaccacaggcatgcacaagcatgcctggctaatttttaaattttttttttttaagaaatagggtcttgctatgttgcccaggctggtctcaagctcctgccctaaagtaggcctcctgcctttgcctctcaaagtgctgggatttcaggcatgggtcatcaagcccagctgacccagagctctttactaacttatctgtctcttatttgcactcatggatattcacagtaagcattgtttgacatatattaaaacccatgaaatatgtctacttcaacctgtgtgaaaatatagttaacattgcaaactttagaatgtattaaaaattttaccttgccatagagactgaattagtcacagctctcagtgatgttagatggaaacttatatctcaaatgataggattgtgatgctttttttgtaacaagtgattctgcttaatattttgttattccagttcataaaaagtagattacgttttcctataaggataatttttgcagtgattatattgctaactctcattgcatgatacctttaataaaatgaacaatataagagttaagggcaatgggataaagctacttaatgtgtctcctccactgatcaaaaatattccatatagtcttggtgaggaattccccaggatataaatggctatttacactgtaatgaattataccatatatgatattcactcagtaatgttaataatgaactggctaataattgacaagatgcagtgcctgccagtttatgacattaacttggtttgaaactaacatatgacatagtaccagtgcagtcagagctgcccttaggcatgatgaacatgtggcccgtttttgcctggtgttttggcagcaaagcaggaagcaattttgtgtgggtcattgttctgtcaatttgtggaaaaaattacttcagtctcatataaatatagaatgggtccataaacccttcaactcatttccatggcaaaactcacttttctttttatacatgtccttcagtctcttaattttgtcaggtggagcttgatcttaattttaacctattatcttttatttttgtttgtttttggtgaaggataagagtggtgtttcttttgccctttctggtacaaacagagggacactaagcattaacttaataatcacatttaagacttgaacacatgctacccttttgtcatcttctgacataagtttacctgagtttccttgatttggaagatttgtttcttttatctctcttcctctggatgtagtttttttttgttttttttttgtttttggacggagtcttagtctgtcactgaggctggagtacagtggcacgatcttggctcactgcaacctccatctcccgggttcaaatgattctcctgcctcagcctcttgagtggctgggattacaggcacatgccaccacacccggctaatttttgtatttttagtagagatgggttttgcaatgttggccaggctggtctcaaactcctgacctcaagtgatctgcctgcctcggcctctcaaattgctggaattacagttgtgagccaccacacctggcttgaatgtagattttaataattgaatttattctgccgtgttgatagaataactgaatatcagtaaattgtgtaacagtggtggatactgttgcataagatgagctcctgaagagtgaagctaattctttggtcaatgttcttttcccctcagtgtctagtttaaggcttttagaagattgatctgtagcaattatttaatgaattgaatatttaaaaaattttttatttgctgtctttggtaattatctctctgcttgaaattaaatgcactataagttaatataacaagtaaaatacattgtcttttgaaaatagtttctttttaaaggaatactaattaattgtaacttgtaaaaccaaaagttctaatggtttttaaaaaccagtgttgagtggaaaagtgtttctttagtttggaaagacctgtgaagtatcctagtcagggaaagaacctgttttctggaagaatgtaagttgctatatgtggaggggcatgtaggacaggggttctaattactgtctgtgagagttactactttgtaacttatggtttctgcttcagtattgtgttggttctgtattataaattgcaccttaatagaccaaaaatatctatacagcactgatttccttgaatattgtgtgttaattgatatatcttctagaggcaaaaggtttaaatgtgttaaaatggttatattgcctcctttttaaacaaattaaagagttgtaaatactagtgtagatctcttttgtttaccacagcaaatactgattttatgattgttaagcatttcatattttaatttaaattggattcaaccacaataaagaaaatgagaaaagcttt

SEQ ID NO: 260267 - protein, 395 aa, Artificial Sequence
  derived and/or modified sequence
MAAEASESGPALHELMREAEISLLECKVCFEKFGHRQQRRPRNLSCGHVVCLACVAALAHPRTLALECPFCRRACRGCDTSDCLPVLHLIELLGSALRQSPAAHRAAPSAPGALTCHHTFGGWGTLVNPTGLALCPKTGRVVVVHDGRRRVKIFDSGGGCAHQFGEKGDAAQDIRYPVDVTITNDCHVVVTDAGDRSIKVFDFFGQIKLVIGGQFSLPWGVETTPQNGIVVTDAEAGSLHLLDVDFAEGVLRRTERLQAHLCNPRGVAVSWLTGAIAVLEHPLALGTGVCSTRVKVFSSSMQLVGQVDTFGLSLYFPSKITASAVTFDHQGNVIVADTSGPAILCLGKPEEFPVPKPMVTHGLSHPVALTFTKENSLLVLDTASHSIKVYKVDWG

SEQ ID NO: 260268 - DNA, 1188 bp, Artificial Sequence
  derived and/or modified sequence
atggccgccgaagcctccgaaagcggccccgctctccacgagttgatgagagaagctgaaatctctctacttgagtgtaaagtgtgtttcgagaaattcggccaccggcagcagaggcgacccagaaacctgtcctgcggacacgtcgtttgcctggcctgcgtggcggccctagctcacccgagaaccctggcccttgagtgtcctttttgccgacgagcttgtagggggtgcgacacaagtgactgcctgcctgtactgcatctcatcgaactgctcgggagcgcactccgacagagccccgccgcccatcgcgctgcacccagcgctcctggcgcactgacttgtcaccacaccttcggtggctgggggactctggtgaaccctacaggtttagctctctgccccaagactggccgcgtagtggttgtgcatgacggccgacgccgtgtgaaaatcttcgatagcggcggtggttgtgcacaccaattcggagagaagggggatgcagcccaggatatacgttatcccgttgacgtgacgataaccaacgattgccacgtggtcgttactgacgccggcgatcgaagcatcaaggtgtttgatttctttggccaaatcaaattggtcattggcggccagttctcacttccctggggcgtggaaaccacccctcagaatggcatcgttgttaccgatgccgaggccggttcactacatttgctcgatgtggatttcgcagaaggagtccttcggaggaccgagcgactacaggctcacctttgtaatcctcggggggtagccgttagctggctcactggcgcgatagctgtgctggaacacccactcgcgctagggactggtgtctgctcaactcgcgtgaaggttttttcgtcttcaatgcagttggtgggacaggtggatacattcggtctgtctctgtacttcccctccaaaataacagcttccgccgtgacattcgatcatcagggcaacgttattgtagcagacacatccggtccagccattttatgccttgggaaacccgaggagtttcccgtgcccaagcctatggtcacacatggtctgagtcaccccgtggccctgacttttaccaaggaaaattcgctgctggtgcttgatacagcatcacacagcatcaaggtgtataaagtggattggggctag

SEQ ID NO: 260269 - DNA, 1188 bp, Artificial Sequence
  derived and/or modified sequence
atggctgctgaggccagcgagagcggccctgccctgcacgagctgatgagggaggccgagatcagcctgctggagtgcaaggtgtgctttgagaagtttggccaccggcagcagaggcggcccaggaacctgagctgtggccacgtggtgtgcctggcctgtgtggccgccctggcccaccccaggaccctggccctggagtgccccttctgccggcgggcctgccggggctgtgacaccagtgactgcctgcctgtgctgcacctgattgagctgctgggcagcgccctgcggcagagccctgctgcccaccgggccgcccccagcgcccctggggccctgacctgccaccacaccttcggcggctggggcaccctggtgaaccccaccggcctggccctgtgccccaagacaggccgggtggtggtggtgcatgatggaagaagaagagtgaagatctttgacagcggcggcggctgtgcccaccagtttggagagaagggagatgctgcccaggacatccgctaccctgtggatgtgaccatcaccaatgactgccacgtggtggtgacagatgctggggacaggagcatcaaggtgtttgacttcttcggccagatcaagctggtgattggaggccagttcagcctgccctggggcgtggagaccaccccccagaatggaattgtggtgacagatgctgaggccggcagcctgcacctgctggatgtggactttgctgagggcgtgctgcggaggacagagcggctgcaggcccacctgtgcaacccccggggcgtggccgtgtcctggctgactggagccatcgctgtgctggagcaccccctggccctgggcactggagtgtgcagcaccagggtgaaggtgttcagcagctccatgcagctggtgggccaggtggacaccttcggcctgagcctgtacttccccagcaagatcacagccagcgctgtgacctttgaccaccagggcaatgtcatcgtggccgacaccagcggccctgccatcctgtgcctgggcaagccagaggagttccctgtgcccaagcccatggtgacccacggcctgagccaccctgtggccctgaccttcaccaaggagaacagcctgctggtgctggacacagccagccacagcatcaaggtgtacaaggtggactggggctag

SEQ ID NO: 260270 - DNA, 1188 bp, Artificial Sequence
  derived and/or modified sequence
atggccgccgaggccagcgagagcggccccgccctgcacgagctgatgcgggaagccgagatcagcttgctggaatgtaaggtctgctttgaaaaatttggacatcgccagcagcgacggccacgcaaccttagctgtggccatgtcgtgtgtctagcatgtgtggctgcccttgcccatccccgcacactggctctcgagtgtccattctgtcggcgggcctgccggggctgcgacacaagcgactgccttccagtgttacatctcatcgagttactgggcagcgcccttcgacagtccccggccgcccaccgtgccgccccgtccgcaccaggtgcactgacatgccatcacaccttcggtggatggggtacgttagtgaacccaaccggactcgctctgtgtccaaaaacgggcagggtcgtcgtggtgcacgacggtcggcggcgagtcaagattttcgactcaggtggcgggtgtgcacatcaattcggtgagaagggtgacgcagcccaggatatcaggtaccccgtggacgtcaccatcactaacgattgccatgtggtggtgaccgatgccggggaccgaagcattaaagtatttgatttcttcggacaaataaagctggtcattggcggccagttctccctcccttggggcgtcgagactacacctcagaatgggatcgttgttactgatgccgaggctgggagcctccacctcctagacgtcgactttgcggaaggggtgctgaggcggaccgagcgtctacaggcacacctctgtaatccccgtggggtggccgtgtcctggctgactggtgccatcgccgtcctcgagcatccactggccttaggaacaggggtgtgcagtacacgtgtgaaggtgttctcctcctcaatgcagttagtcggccaggtagataccttcggactgagcctgtactttcccagtaagattaccgcctccgcagtgacctttgaccatcaggggaacgttattgtagctgacaccagcggccctgccatcctgtgtctagggaaaccagaagagttccctgtccctaagcctatggtgacacatggcctgagccaccccgtggcacttaccttcacaaaagaaaacagcctcctcgtgctcgataccgcatcacacagtatcaaagtgtataaagttgactggggctag

SEQ ID NO: 260271 - DNA, 2134 bp, Artificial Sequence
  derived and/or modified sequence
gcacaggacgcgccatggcggccgaagcctcggagagcgggccagcgctgcatgagctcatgcgcgaggcggagatcagcctgctcgagtgcaaggtgtgctttgagaagtttggccaccggcagcagcggcgcccgcgcaacctgtcctgcggccacgtggtctgcctggcctgcgtggccgccctggcgcacccgcgcactctggccctcgagtgcccattctgcaggcgagcttgccggggctgcgacaccagcgactgcctgccggtgctgcacctcatagagctcctgggctcagcgcttcgccagtccccggccgcccatcgcgccgcccccagcgcccccggagccctcacctgccaccacaccttcggcggctgggggaccctggtcaaccccaccggactggcgctttgtcccaagacggggcgtgtcgtggtggtgcacgacggcaggaggcgtgtcaagatttttgactcagggggaggatgcgcgcatcagtttggagagaagggggacgctgcccaagacattaggtaccctgtggatgtcaccatcaccaacgactgccatgtggttgtcactgacgccggcgatcgctccatcaaagtgtttgatttttttggccagatcaagcttgtcattggaggccaattctccttaccttggggtgtggagaccacccctcagaatgggattgtggtaactgatgcggaggcagggtccctgcacctcctggacgtcgacttcgcggaaggggtccttcggagaactgaaaggttgcaagctcatctgtgcaatccccgaggggtggcagtgtcttggctcaccggggccattgcggtcctggagcaccccctggccctggggactggggtttgcagcaccagggtgaaagtgtttagctcaagtatgcagcttgtcggccaagtggatacctttgggctgagcctctactttccctccaaaataactgcctccgctgtgacctttgatcaccagggaaatgtgattgttgcagatacatctggtccagctatcctttgcttaggaaaacctgaggagtttccagtaccgaagcccatggtcactcatggtctttcgcatcctgtggctcttaccttcaccaaggagaattctcttcttgtgctggacacagcatctcattctataaaagtctataaagttgactgggggtgatgggctggggtgggtccctggaatcagaagcactagtgctgccattaatgaattgtttaaccctggataagtcacttaaactcatctatccaggcagggataattaaaaccatctggcagacttacaaagcttgggacagttattggagattaatctaccatttattgaatgcatactctgtgcaaggaaatttgcaaatattagcttatttaatctgtactatccagtgaggtaatttcttcccccccaagatagagtcaagctctgtcacccaggctggagtgcagaagcatgatcacagctcactacagtttcaacgtcccccgctcaggtggtccttccacctcagcctcccaagtagctgggaccacaagtgtgcattaccacactcagctaatttttgtattttggcagagatggggtttcaccatgttgcccaggctggtctcaaactcctgagttcaagcaatccaccttcctcggcctcccaaagtactaggagtacaggcatagccacttgctcagccataatttttattattaatctcattgtacaagtgagaaaactgagacccagagagcttaagtgacttcctcgaggtcatagttacttactgccttagtcccaatttgaattcaattctgattccaaataagttgcgcttaaataagacaacagatgtgggaaaaatatgtgaatgtgtagtgttgctatgtgtactgtctttacaagtagctaattattttagcacaaagatgtgcaaagaaaggagactttatggagagttcaggagaaaaaggattttgtggtggccatcactttcattcaatttgcgactgctctgatggcacattagatgaagttactgttgatcctgagttacgtgaataagaaaaacaattgaactgcttattaaaaaagtaaacatgt

SEQ ID NO: 260272 - DNA, 1188 bp, Artificial Sequence
  derived and/or modified sequence
atggcagccgaggcttccgagagcggaccagcattgcatgaattgatgcgggaggccgagatcagcctgttagaatgcaaagtctgctttgagaaattcgggcaccgccaacaacgtcgtccccgaaacttgagctgtggacacgtcgtctgcctcgcctgtgtcgccgcactggcacatccccgaaccttggccctggagtgtcccttttgtagacgggcatgtagagggtgtgacacatccgattgcctccctgttcttcatcttattgaactgctggggtcagctctaagacagtcccctgccgctcatagggcagccccaagcgccccaggggctcttacctgccatcacacctttggaggctgggggacccttgttaatcctactggccttgccttatgccctaagaccggcagggtcgtggtagttcacgatgggcgtaggcgcgtgaaaatcttcgattcagggggaggctgcgcccaccagttcggtgagaaaggcgacgccgctcaagacatcaggtatcccgtggatgtcacaattacgaacgattgtcacgtcgtggtgactgacgctggggataggagtatcaaagtttttgactttttcggccagatcaaactggttatcggtggccagttctctttaccttggggagttgagaccacccctcagaatggaatcgtggtgaccgatgctgaagctgggagtctgcacctgctggatgtggacttcgccgagggggttctcaggcggactgaacggctgcaggcccatctgtgtaatcccaggggggtcgccgttagctggctgacaggagctattgcagttctcgaacatcctctggccctggggaccggagtctgcagtacccgtgtaaaggtatttagctccagcatgcagttagttgggcaagtggacactttcgggctcagcctgtattttccaagtaagattaccgccagtgccgtgacttttgatcatcagggcaacgtgattgttgctgatacgagcggcccagctatcctgtgcttggggaaaccggaggagtttcccgtgccgaaaccaatggtcacccatggattatctcatccagttgccctcactttcacaaaagaaaactccctcctggtccttgacaccgcttctcattcgatcaaggtgtacaaggtggactggggctag

SEQ ID NO: 260273 - DNA, 1188 bp, Artificial Sequence
  derived and/or modified sequence
atggccgccgaggccagcgagagcggccccgccctgcacgagctgatgagagaggccgagatcagcctgctggagtgcaaggtgtgcttcgagaagttcggccacagacagcagagaagacccagaaacctgagctgcggccacgtggtgtgcctggcctgcgtggccgccctggcccaccccagaaccctggccctggagtgccccttctgcagaagagcctgcagaggctgcgacaccagcgactgcctgcccgtgctgcacctgatcgagctgctgggcagcgccctgagacagagccccgccgcccacagagccgcccccagcgcccccggcgccctgacctgccaccacaccttcggcggctggggcaccctggtgaaccccaccggcctggccctgtgccccaagaccggcagagtggtggtggtgcacgacggcagaagaagagtgaagatcttcgacagcggcggcggctgcgcccaccagttcggcgagaagggcgacgccgcccaggacatcagataccccgtggacgtgaccatcaccaacgactgccacgtggtggtgaccgacgccggcgacagaagcatcaaggtgttcgacttcttcggccagatcaagctggtgatcggcggccagttcagcctgccctggggcgtggagaccaccccccagaacggcatcgtggtgaccgacgccgaggccggcagcctgcacctgctggacgtggacttcgccgagggcgtgctgagaagaaccgagagactgcaggcccacctgtgcaaccccagaggcgtggccgtgagctggctgaccggcgccatcgccgtgctggagcaccccctggccctgggcaccggcgtgtgcagcaccagagtgaaggtgttcagcagcagcatgcagctggtgggccaggtggacaccttcggcctgagcctgtacttccccagcaagatcaccgccagcgccgtgaccttcgaccaccagggcaacgtgatcgtggccgacaccagcggccccgccatcctgtgcctgggcaagcccgaggagttccccgtgcccaagcccatggtgacccacggcctgagccaccccgtggccctgaccttcaccaaggagaacagcctgctggtgctggacaccgccagccacagcatcaaggtgtacaaggtggactggggctag

SEQ ID NO: 260274 - DNA, 531 bp, Artificial Sequence
  derived and/or modified sequence
atgggaacagcaaatatccaattgcacgggccacccagggtgaaggccgtgaaatcaagcgaacacatcaacgaaggggagacagccatgctcgtctgcaagagtgaatcggtcccccccgtcaccgactgggcatggtataaaatcaccgatagcgaggataaggccctcatgaacggctccgagtctcggttctttgtgagcagctcgcaggggcggtctgagctgcacatagaaaatctcaacatggaagccgaccccgggcaatacagatgcaatggcacttctagtaaaggcagtgaccaagccataataactctgcgcgttcggtctcacttggccgctttatggcctttccttggaattgtggccgaagtgttagtgctcgtgacaattatcttcatttacgaaaagagacggaagccagaggatgtcctggacgatgacgacgccggaagtgcccctctcaagtcctctgggcagcaccagaacgacaaggggaagaatgtacgacaaaggaactcttcttag

SEQ ID NO: 260275 - DNA, 531 bp, Artificial Sequence
  derived and/or modified sequence
atgggcacagccaacatccagctgcacggccccccccgggtgaaggctgtgaagagcagcgagcacatcaatgaaggagaaacagccatgctggtgtgcaagtctgagagcgtgccccctgtgacagactgggcctggtacaagatcacagacagcgaggacaaggccctgatgaatggaagtgagagccgcttctttgtgagcagcagccagggccgctctgagctgcacatcgagaacctgaacatggaggccgaccccggccagtaccgctgcaatggcaccagcagcaagggcagtgaccaggccatcatcaccctgcgggtgcgcagccacctggccgccctgtggcccttcctgggcatcgtggccgaggtgctggtgctggtgaccatcatcttcatctatgagaagaggaggaagccagaagatgtgctggatgatgatgatgctggcagcgcccccctgaagagcagcggccagcaccagaatgacaagggcaagaatgtgcggcagaggaacagcagctag

SEQ ID NO: 260276 - DNA, 531 bp, Artificial Sequence
  derived and/or modified sequence
atgggcaccgccaacatccagctgcacggccccccccgggtgaaggcagttaagtcctcagagcacattaacgaaggcgagactgccatgcttgtctgtaaaagcgaatccgtgccaccagtgacagattgggcctggtacaagatcaccgatagcgaagataaagccttaatgaacggttcagagtcccggttctttgtcagttcctctcaggggagatccgaattgcacattgaaaacctcaacatggaggcagaccccgggcaataccgctgtaacgggacctcctcgaaaggtagcgatcaagctatcattacactgcgagtgagatcccacctggctgccttgtggccctttctcgggattgttgccgaggtgttggtcttggtgacgattatctttatttatgaaaagagacgtaagccagaagacgtgctggacgacgacgacgctggctctgctcccctaaaatcaagcggtcagcaccagaacgacaagggaaaaaatgtccgtcagcgcaatagctcgtag

SEQ ID NO: 260277 - DNA, 531 bp, Artificial Sequence
  derived and/or modified sequence
atgggaacagccaacatccagctccacgggccacctcgggtgaaagccgttaaaagctcagagcacatcaacgaaggtgagactgcaatgctcgtgtgcaagtctgaaagcgttcctcccgtgaccgattgggcttggtataaaattaccgactcagaggataaggccctgatgaatggatctgaaagccgattctttgtatcctcttcgcaaggaaggagcgaactccatattgagaacctgaatatggaggcagatcctggccaatatcggtgcaatggtaccagctccaaaggttcagatcaggcaatcatcaccctgagggtgcgatcacaccttgcagccttatggccattcctgggaattgttgccgaagtgcttgtactggtcaccattatcttcatttatgagaaacgtcggaaaccggaggatgtcctcgacgacgatgatgctggcagcgctcccctcaagtcctctggacaacatcagaacgataagggcaagaacgtgagacagcggaacagctcctag

SEQ ID NO: 260278 - DNA, 531 bp, Artificial Sequence
  derived and/or modified sequence
atgggcaccgccaacatccagctgcacggcccccccagagtgaaggccgtgaagagcagcgagcacatcaacgagggcgagaccgccatgctggtgtgcaagagcgagagcgtgccccccgtgaccgactgggcctggtacaagatcaccgacagcgaggacaaggccctgatgaacggcagcgagagcagattcttcgtgagcagcagccagggcagaagcgagctgcacatcgagaacctgaacatggaggccgaccccggccagtacagatgcaacggcaccagcagcaagggcagcgaccaggccatcatcaccctgagagtgagaagccacctggccgccctgtggcccttcctgggcatcgtggccgaggtgctggtgctggtgaccatcatcttcatctacgagaagagaagaaagcccgaggacgtgctggacgacgacgacgccggcagcgcccccctgaagagcagcggccagcaccagaacgacaagggcaagaacgtgagacagagaaacagcagctag

SEQ ID NO: 260279 - protein, 205 aa, Artificial Sequence
  derived and/or modified sequence
MKQSDASPQERVDSDDQWGEYSCVFLPEPMGTANIQLHGPPRVKAVKSSEHINEGETAMLVCKSESVPPVTDWAWYKITDSEDKALMNGSESRFFVSSSQGRSELHIENLNMEADPGQYRCNGTSSKGSDQAIITLRVRSHLAALWPFLGIVAEVLVLVTIIFIYEKRRKPEDVLDDDDAGSAPLKSSGQHQNDKGKNVRQRNSS

SEQ ID NO: 260280 - DNA, 618 bp, Artificial Sequence
  derived and/or modified sequence
atgaaacaatctgacgccagtcctcaagaacgcgtagattctgatgatcaatggggtgaatactcttgcgtattcttacctgagcccatgggaaccgctaacattcaactgcatggcccacctagagtgaaggcagtgaagtcttctgaacatataaatgagggcgaaacagcaatgctggtatgtaagagtgaaagcgtaccacctgtgactgattgggcttggtataagatcacggactcagaggacaaggctttaatgaacgggtccgaatcccggttcttcgttagtagtagccagggacgatcggagttgcatatcgaaaatctcaatatggaggctgaccccggccaatatagatgtaacggtacatccagtaagggcagcgatcaagcgatcatcaccctgcgtgtgagatctcacttggctgcactatggcccttcctaggtattgtggctgaggtcctggtcctggtgacaatcatttttatttatgaaaaaaggaggaaacccgaagacgtattggacgacgacgatgcaggctccgcacccctgaaatcctctggccagcaccagaatgataaaggaaaaaacgtgcgacagcggaattcatcctag

SEQ ID NO: 260281 - DNA, 618 bp, Artificial Sequence
  derived and/or modified sequence
atgaagcagagtgatgccagcccccaggagcgggtggacagtgatgaccagtggggcgagtacagctgtgtgttcctgcctgagcccatgggcacagccaacatccagctgcacggccccccccgggtgaaggctgtgaagagcagcgagcacatcaatgaaggagaaacagccatgctggtgtgcaagtctgagagcgtgccccctgtgacagactgggcctggtacaagatcacagattctgaggacaaggccctgatgaatggcagcgagagccgcttctttgtgagcagcagccagggccgctctgagctgcacatcgagaacctgaacatggaggccgaccccggccagtaccgctgcaatggcaccagcagcaaaggaagtgaccaggccatcatcaccctgcgggtgcgcagccacctggccgccctgtggcccttcctgggcatcgtggccgaggtgctggtgctggtgaccatcatcttcatctatgagaagaggaggaagccagaagatgtgctggatgatgatgatgctggcagcgcccccctgaagagcagcggccagcaccagaatgacaagggcaagaatgtgcggcagaggaacagcagctag

SEQ ID NO: 260282 - DNA, 618 bp, Artificial Sequence
  derived and/or modified sequence
atgaagcagagcgacgccagcccccaggagcgggtggacagcgacgatcagtggggagaatactcatgcgtgtttctgcccgaaccaatgggcactgcaaatatccagctgcacggcccacctcgggtcaaagccgtgaaaagcagcgaacatattaacgaaggcgaaactgcaatgcttgtgtgcaagtctgagtccgtgccccctgttactgattgggcctggtacaagatcacggacagcgaggataaggcgcttatgaatgggagcgaatcacggttttttgtgtcctcgtctcagggacgctccgagctgcacatcgagaacctcaatatggaagcagatccgggtcaataccggtgcaacgggaccagctccaaaggctctgatcaggcaatcatcactttgcgcgttaggagccacctggcagctctatggcctttcttaggtattgtggcagaggtactggtgctcgtaacgatcatatttatttatgagaagcgcagaaaacccgaggacgtcctcgacgacgatgacgcaggctcagcacccctcaaatcttctggccagcaccagaatgacaaaggcaaaaacgtgagacagcggaattcatcttag

SEQ ID NO: 260283 - DNA, 618 bp, Artificial Sequence
  derived and/or modified sequence
atgaagcagtccgatgcatcacctcaagagagagttgattccgatgatcaatggggggagtattcctgcgtgttcctgcctgagccgatgggcactgcaaatattcagttacacggcccacccagggtaaaagcagtgaaatcaagtgagcacatcaatgagggagaaaccgcaatgcttgtgtgtaagtcagagagcgttccgcctgtgacagactgggcttggtataagataactgacagtgaggataaagccctgatgaacggaagcgagtcgcgcttcttcgtgagctcctctcaaggtcgctccgagctgcatattgaaaatttaaatatggaagccgatcctggccagtataggtgcaacgggacttctagtaaaggatccgaccaggctatcatcaccctgcgggttcgttctcacctggctgcactctggccattcctcggcatcgtggccgaggtactggtgctggtcacgattatctttatctacgaaaagcgacgcaaacccgaggatgtccttgacgatgacgacgctggatctgctcccctgaagtcctcagggcagcatcagaacgataaaggcaaaaatgtaaggcagaggaacagctcatag

SEQ ID NO: 260284 - DNA, 1604 bp, Artificial Sequence
  derived and/or modified sequence
agttagcccttcgcgttcggcttagtctgcggtcctcttgcattgcgactccgagtttaacttccaacacacactttcaacctccaagagacgcccccacctgtgtcgccccaatagcgacttttctcaccgtggtcgccgcggaacttcaagggtccttcctacccgcgttgctgagagtctgggtttacgcgtcacctcgggcgggacccgatcctccgctcctgaggcccccacaatgaagcagtcggacgcgtctccccaagaaagggtggactccgacgaccagtggggagagtactcctgcgtcttcctccccgagcccatgggcacggccaacatccagctccacgggcctcccagagtgaaggctgtgaagtcgtcagaacacatcaacgagggggagacggccatgctggtctgcaagtcagagtccgtgccacctgtcactgactgggcctggtacaagatcactgactctgaggacaaggccctcatgaacggctccgagagcaggttcttcgtgagttcctcgcagggccggtcagagctacacattgagaacctgaacatggaggccgaccccggccagtaccggtgcaacggcaccagctccaagggctccgaccaggccatcatcacgctccgcgtgcgcagccacctggccgccctctggcccttcctgggcatcgtggctgaggtgctggtgctggtcaccatcatcttcatctacgagaagcgccggaagcccgaggacgtcctggatgatgacgacgccggctctgcacccctgaagagcagcgggcagcaccagaatgacaaaggcaagaacgtccgccagaggaactcttcctgaggcaggtggcccgaggacgctccctgctccacgtctgcgccgccgccggagtccactcccagtgcttgcaagattccaagttctcacctcttaaagaaaacccaccccgtagattcccatcatacacttccttcttttttaaaaaagttgggttttctccattcaggattctgttccttaggtttttttccttctgaagtgtttcacgagagcccgggagctgctgccctgcggccccgtctgtggctttcagcctctgggtctgagtcatggccgggtgggcggcacagccttctccactggccggagtcagtgccaggtccttgccctttgtggaaagtcacaggtcacacgaggggccccgtgtcctgcctgtctgaagccaatgctgtctggttgcgccatttttgtgcttttatgtttaattttatgagggccacgggtctgtgttcgactcagcctcagggacgactctgacctcttggccacagaggactcacttgcccacaccgagggcgaccccgtcacagcctcaagtcactcccaagccccctccttgtctgtgcatccgggggcagctctggagggggtttgctggggaactggcgccatcgccgggactccagaaccgcagaagcctccccagctcacccctggaggacggccggctctctatagcaccagggctcacgtgggaacccccctcccacccaccgccacaataaagatcgcccccacctccaccctc

SEQ ID NO: 260285 - DNA, 618 bp, Artificial Sequence
  derived and/or modified sequence
atgaagcagagcgacgccagcccccaggagagagtggacagcgacgaccagtggggcgagtacagctgcgtgttcctgcccgagcccatgggcaccgccaacatccagctgcacggcccccccagagtgaaggccgtgaagagcagcgagcacatcaacgagggcgagaccgccatgctggtgtgcaagagcgagagcgtgccccccgtgaccgactgggcctggtacaagatcaccgacagcgaggacaaggccctgatgaacggcagcgagagcagattcttcgtgagcagcagccagggcagaagcgagctgcacatcgagaacctgaacatggaggccgaccccggccagtacagatgcaacggcaccagcagcaagggcagcgaccaggccatcatcaccctgagagtgagaagccacctggccgccctgtggcccttcctgggcatcgtggccgaggtgctggtgctggtgaccatcatcttcatctacgagaagagaagaaagcccgaggacgtgctggacgacgacgacgccggcagcgcccccctgaagagcagcggccagcaccagaacgacaagggcaagaacgtgagacagagaaacagcagctag

SEQ ID NO: 260286 - DNA, 600 bp, Artificial Sequence
  derived and/or modified sequence
atgtatccagctacagccgtgccacagatcaacattaccatactcaagggagaaaagggtgaccgtggtgatcgcggtttacagggtaaatatggtaagactggatcagccggagcacgcggacacactggacctaagggtcagaagggttctatgggtgcaccaggcgagcgctgtaagagtcattacgccgctttttctgtagggcgtaagaagcctatgcattctaatcactactatcagactgtcatcttcgacacagaattcgtgaatttatacgaccactttaacatgttcacaggcaagttctactgttacgttccaggcttatacttcttttcactgaacgtgcacacctggaaccagaaggaaacatatctgcatataatgaagaatgaggaggaggtggtcattctgtttgctcaagtgggtgatagatccatcatgcagtctcagtccttgatgctagagctgagggaacaagatcaggtctgggtgcggctgtataagggggaaagagagaacgcaatcttttcagaggagctggatacatatattaccttctcgggttatctggtcaaacacgccacagagccctag

SEQ ID NO: 260287 - DNA, 600 bp, Artificial Sequence
  derived and/or modified sequence
atgtaccccgccaccgcagttccacaaatcaatatcaccatactgaagggagaaaaaggggacagaggcgaccgtggacttcaaggcaagtatggcaaaacaggcagcgcaggtgcccgcggtcacaccggccccaagggacagaagggaagcatgggcgccccaggagaacgatgcaagagtcactacgccgccttcagcgtgggccggaagaaaccaatgcacagcaatcactattaccagacagtcattttcgataccgaattcgttaatctttatgatcatttcaatatgtttacaggcaagttctactgttatgttcccggtctgtattttttttcgcttaacgttcatacatggaatcaaaaagagacctatttgcatattatgaagaacgaagaggaggtggtcatactgttcgcccaggtcggggacaggtcaattatgcagagccaaagtctgatgttagagttaagagagcaagaccaggtgtgggtgcgtctttacaagggagaacgcgaaaacgcaatttttagcgaggagctcgacacatatatcacattcagtgggtatctggtgaagcatgctacagaaccttag

SEQ ID NO: 260288 - DNA, 600 bp, Artificial Sequence
  derived and/or modified sequence
atgtaccccgccaccgcagttccacaaatcaatatcaccatactgaagggagaaaaaggggacagaggcgaccgtggacttcaaggcaagtatggcaaaacaggcagcgcaggtgcccgcggtcacaccggccccaagggacagaagggaagcatgggcgccccaggagaacgatgcaagagtcactacgccgccttcagcgtgggccggaagaaaccaatgcacagcaatcactattaccagacagtcattttcgataccgaattcgttaatctttatgatcatttcaatatgtttacagggaaattttactgttatgtccccggactgtactttttttcacttaatgtacacacatggaatcagaaagagacttacttgcatatcatgaaaaacgaggaagaggtagtgatcttgtttgcccaggtaggggatcgatcgatcatgcaaagccagagccttatgctagaattgagagagcaagaccaagtatgggtccggctgtacaagggggagagggagaatgcaatctttagcgaagagcttgacacctacattacattttcagggtacctggtaaagcacgctactgagccgtag

SEQ ID NO: 260289 - DNA, 600 bp, Artificial Sequence
  derived and/or modified sequence
atgtaccccgccaccgccgtgccccagatcaacatcaccatcctgaagggcgagaagggcgacagaggcgacagaggcctgcagggcaagtacggcaagaccggcagcgccggcgccagaggccacaccggccccaagggccagaagggcagcatgggcgcccccggcgagagatgcaagagccactacgccgccttcagcgtgggcagaaagaagcccatgcacagcaaccactactaccagaccgtgatcttcgacaccgagttcgtgaacctgtacgaccacttcaacatgttcaccggcaagttctactgctacgtgcccggcctgtacttcttcagcctgaacgtgcacacctggaaccagaaggagacctacctgcacatcatgaagaacgaggaggaggtggtgatcctgttcgcccaggtgggcgacagaagcatcatgcagagccagagcctgatgctggagctgagagagcaggaccaggtgtgggtgagactgtacaagggcgagagagagaacgccatcttcagcgaggagctggacacctacatcaccttcagcggctacctggtgaagcacgccaccgagccctag

SEQ ID NO: 260290 - DNA, 600 bp, Artificial Sequence
  derived and/or modified sequence
atgtaccctgcaacagccgtccctcaaataaatatcaccatcctgaaaggcgagaagggagataggggcgatcggggactccagggtaaatatggcaagacgggctcagcaggtgctcgcggccacaccggcccaaaaggacaaaagggaagcatgggggcacccggcgaacgctgcaagtctcattacgcagctttttcagtggggaggaaaaaacccatgcacagcaatcactattaccaaacagtaatctttgataccgaatttgttaatttatatgatcattttaatatgtttacgggcaagttctattgctacgtgccggggctgtacttctttagccttaacgtccatacatggaatcagaaagaaacatacttacacatcatgaaaaacgaagaagaagtggtgattctcttcgctcaagttggcgataggagcatcatgcagtctcagtccttgatgcttgagcttagagagcaggatcaggtgtgggttaggctgtacaagggtgagcgcgaaaatgctatcttctcagaagagctggatacatacatcaccttttctggatacctcgtgaagcatgccactgaaccatag

SEQ ID NO: 260291 - DNA, 600 bp, Artificial Sequence
  derived and/or modified sequence
atgtacccagccacagctgtgccccagatcaacatcaccatcctgaagggggagaagggggacagaggagaccggggcctgcagggcaagtatggcaagacaggcagcgctggggcccggggccacacaggccccaagggccagaagggctccatgggcgcccctggagagcgctgcaagagccactacgccgccttctctgtgggcaggaagaagcccatgcacagcaaccactactaccagaccgtcatctttgacacagaatttgtgaacctgtatgaccacttcaacatgttcaccgggaagttctactgctacgtgcccggcctgtacttcttcagcctgaatgtgcacacctggaaccagaaggagacctacctgcacatcatgaagaatgaggaggaggtggtgatcctgtttgcccaggtgggggacaggagcatcatgcagagccagagcctgatgctggagctgcgggagcaggaccaggtgtgggtgcggctgtacaagggggagcgggagaatgccatcttcagcgaggagctggacacctacatcaccttcagcggctacctggtgaagcacgccacagagccctag

SEQ ID NO: 260292 - DNA, 600 bp, Artificial Sequence
  derived and/or modified sequence
atgtaccccgccaccgccgtgccccagatcaacatcaccatcctgaagggcgagaaaggggaccgaggggatcgagggttacaaggcaagtacggcaagacaggctccgcgggcgcgcgtgggcacacgggcccaaaaggccagaagggcagcatgggcgcaccgggtgaacgctgtaaatcccactatgcagcattttctgttggtcgcaaaaaaccaatgcacagtaatcactactaccagaccgttattttcgataccgaattcgtcaatctatatgatcattttaacatgtttaccggcaagttctattgttacgtacccggactttacttcttttctctgaacgtgcatacttggaaccagaaggaaacctatttgcatatcatgaaaaacgaagaggaagtggtgattctgttcgctcaggtcggggaccggtctataatgcaatctcagtccttgatgttggagttgcgagaacaagatcaggtatgggtacgactctacaagggcgagagagaaaacgcgattttcagcgaagagctagatacctacattaccttctccgggtatctggtgaagcatgccacagagccttag

SEQ ID NO: 260293 - RNA, 600 nt, Artificial Sequence
  derived and/or modified sequence
auguaccccgccaccgcaguuccacaaaucaauaucaccauacugaagggagaaaaaggggacagaggcgaccguggacuucaaggcaaguauggcaaaacaggcagcgcaggugcccgcggucacaccggccccaagggacagaagggaagcaugggcgccccaggagaacgaugcaagagucacuacgccgccuucagcgugggccggaagaaaccaaugcacagcaaucacuauuaccagacagucauuuucgauaccgaauucguuaaucuuuaugaucauuucaauauguuuacaggcaaguucuacuguuauguucccggucuguauuuuuuuucgcuuaacguucauacauggaaucaaaaagagaccuauuugcauauuaugaagaacgaagaggagguggucauacuguucgcccaggucggggacaggucaauuaugcagagccaaagucugauguuagaguuaagagagcaagaccaggugugggugcgucuuuacaagggagaacgcgaaaacgcaauuuuuagcgaggagcucgacacauauaucacauucaguggguaucuggugaagcaugcuacagaaccuuag

SEQ ID NO: 260294 - RNA, 600 nt, Artificial Sequence
  derived and/or modified sequence
auguaccccgccaccgcaguuccacaaaucaauaucaccauacugaagggagaaaaaggggacagaggcgaccguggacuucaaggcaaguauggcaaaacaggcagcgcaggugcccgcggucacaccggccccaagggacagaagggaagcaugggcgccccaggagaacgaugcaagagucacuacgccgccuucagcgugggccggaagaaaccaaugcacagcaaucacuauuaccagacagucauuuucgauaccgaauucguuaaucuuuaugaucauuucaauauguuuacagggaaauuuuacuguuauguccccggacuguacuuuuuuucacuuaauguacacacauggaaucagaaagagacuuacuugcauaucaugaaaaacgaggaagagguagugaucuuguuugcccagguaggggaucgaucgaucaugcaaagccagagccuuaugcuagaauugagagagcaagaccaaguauggguccggcuguacaagggggagagggagaaugcaaucuuuagcgaagagcuugacaccuacauuacauuuucaggguaccugguaaagcacgcuacugagccguag

SEQ ID NO: 260295 - protein, 867 aa, Artificial Sequence
  derived and/or modified sequence
MGPPSLVLCLLSATVFSLLGGSSAFLSHHRLKGRFQRDRRNIRPNIILVLTDDQDVELGSMQVMNKTRRIMEQGGAHFINAFVTTPMCCPSRSSILTGKYVHNHNTYTNNENCSSPSWQAQHESRTFAVYLNSTGYRTAFFGKYLNEYNGSYVPPGWKEWVGLLKNSRFYNYTLCRNGVKEKHGSDYSKDYLTDLITNDSVSFFRTSKKMYPHRPVLMVISHAAPHGPEDSAPQYSRLFPNASQHITPSYNYAPNPDKHWIMRYTGPMKPIHMEFTNMLQRKRLQTLMSVDDSMETIYNMLVETGELDNTYIVYTADHGYHIGQFGLVKGKSMPYEFDIRVPFYVRGPNVEAGCLNPHIVLNIDLAPTILDIAGLDIPADMDGKSILKLLDTERPVNRFHLKKKMRVWRDSFLVERGKLLHKRDNDKVDAQEENFLPKYQRVKDLCQRAEYQTACEQLGQKWQCVEDATGKLKLHKCKGPMRLGGSRALSNLVPKYYGQGSEACTCDSGDYKLSLAGRRKKLFKKKYKASYVRSRSIRSVAIEVDGRVYHVGLGDAAQPRNLTKRHWPGAPEDQDDKDGGDFSGTGGLPDYSAANPIKVTHRCYILENDTVQCDLDLYKSLQAWKDHKLHIDHEIETLQNKIKNLREVRGHLKKKRPEECDCHKISYHTQHKGRLKHRGSSLHPFRKGLQEKDKVWLLREQKRKKKLRKLLKRLQNNDTCSMPGLTCFTHDNQHWQTAPFWTLGPFCACTSANNNTYWCMRTINETHNFLFCEFATGFLEYFDLNTDPYQLMNAVNTLDRDVLNQLHVQLMELRSCKGYKQCNPRTRNMDLDGGSYEQYRQFQRRKWPEMKRPSSKSLGQLWEGWEG

SEQ ID NO: 260296 - DNA, 2604 bp, Artificial Sequence
  derived and/or modified sequence
atgggcccccccagcctggtgctgtgcctgctgagcgccaccgtgttcagcctgctgggcggcagcagcgccttcctgagccaccacagactgaagggcagattccagagagacagaagaaacatcagacccaacatcatcctggtgctgaccgacgaccaggacgtggagctgggcagcatgcaggtgatgaacaagaccagaagaatcatggagcagggcggcgcccacttcatcaacgccttcgtgaccacccccatgtgctgccccagcagaagcagcatcctgaccggcaagtacgtgcacaaccacaacacctacaccaacaacgagaactgcagcagccccagctggcaggcccagcacgagagcagaaccttcgccgtgtacctgaacagcaccggctacagaaccgccttcttcggcaagtacctgaacgagtacaacggcagctacgtgccccccggctggaaggagtgggtgggcctgctgaagaacagcagattctacaactacaccctgtgcagaaacggcgtgaaggagaagcacggcagcgactacagcaaggactacctgaccgacctgatcaccaacgacagcgtgagcttcttcagaaccagcaagaagatgtacccccacagacccgtgctgatggtgatcagccacgccgccccccacggccccgaggacagcgccccccagtacagcagactgttccccaacgccagccagcacatcacccccagctacaactacgcccccaaccccgacaagcactggatcatgagatacaccggccccatgaagcccatccacatggagttcaccaacatgctgcagagaaagagactgcagaccctgatgagcgtggacgacagcatggagaccatctacaacatgctggtggagaccggcgagctggacaacacctacatcgtgtacaccgccgaccacggctaccacatcggccagttcggcctggtgaagggcaagagcatgccctacgagttcgacatcagagtgcccttctacgtgagaggccccaacgtggaggccggctgcctgaacccccacatcgtgctgaacatcgacctggcccccaccatcctggacatcgccggcctggacatccccgccgacatggacggcaagagcatcctgaagctgctggacaccgagagacccgtgaacagattccacctgaagaagaagatgagagtgtggagagacagcttcctggtggagagaggcaagctgctgcacaagagagacaacgacaaggtggacgcccaggaggagaacttcctgcccaagtaccagagagtgaaggacctgtgccagagagccgagtaccagaccgcctgcgagcagctgggccagaagtggcagtgcgtggaggacgccaccggcaagctgaagctgcacaagtgcaagggccccatgagactgggcggcagcagagccctgagcaacctggtgcccaagtactacggccagggcagcgaggcctgcacctgcgacagcggcgactacaagctgagcctggccggcagaagaaagaagctgttcaagaagaagtacaaggccagctacgtgagaagcagaagcatcagaagcgtggccatcgaggtggacggcagagtgtaccacgtgggcctgggcgacgccgcccagcccagaaacctgaccaagagacactggcccggcgcccccgaggaccaggacgacaaggacggcggcgacttcagcggcaccggcggcctgcccgactacagcgccgccaaccccatcaaggtgacccacagatgctacatcctggagaacgacaccgtgcagtgcgacctggacctgtacaagagcctgcaggcctggaaggaccacaagctgcacatcgaccacgagatcgagaccctgcagaacaagatcaagaacctgagagaggtgagaggccacctgaagaagaagagacccgaggagtgcgactgccacaagatcagctaccacacccagcacaagggcagactgaagcacagaggcagcagcctgcaccccttcagaaagggcctgcaggagaaggacaaggtgtggctgctgagagagcagaagagaaagaagaagctgagaaagctgctgaagagactgcagaacaacgacacctgcagcatgcccggcctgacctgcttcacccacgacaaccagcactggcagaccgcccccttctggaccctgggccccttctgcgcctgcaccagcgccaacaacaacacctactggtgcatgagaaccatcaacgagacccacaacttcctgttctgcgagttcgccaccggcttcctggagtacttcgacctgaacaccgacccctaccagctgatgaacgccgtgaacaccctggacagagacgtgctgaaccagctgcacgtgcagctgatggagctgagaagctgcaagggctacaagcagtgcaaccccagaaccagaaacatggacctggacggcggcagctacgagcagtacagacagttccagagaagaaagtggcccgagatgaagagacccagcagcaagagcctgggccagctgtgggagggctgggagggctag

SEQ ID NO: 260297 - DNA, 2604 bp, Artificial Sequence
  derived and/or modified sequence
atgggcccacccagcttagttctatgtctcctgtcggccactgtcttcagcctgttaggcgggagctctgcatttctgagtcatcatcgtctcaaagggcgttttcagcgtgacagacgcaacatcagaccgaacattatactggtactcactgatgatcaggacgttgaactaggctctatgcaggttatgaacaaaactcggcgcattatggagcaaggcggtgctcattttatcaatgccttcgtcactacccccatgtgctgtcccagcaggtcctccatcctcactggcaaatatgtccataaccacaacacatatacaaataatgaaaactgctccagcccgtcatggcaggcacagcacgaatctcgcacctttgctgtctaccttaacagcaccggctaccgcaccgcattcttcggcaagtacctcaacgagtacaacgggagctatgttcctcccggctggaaggagtgggttggtctccttaagaacagcaggttctataattacaccttatgtcggaatggggtgaaggagaaacacggcagcgattattcgaaggattacctgactgacctgatcacaaacgacagcgtcagcttctttagaacttctaagaagatgtacccacaccggccggtgctaatggttattagtcacgcagctccgcacggccccgaggacagtgctccccaatacagcaggctgtttccgaatgccagtcagcacatcaccccaagctataactacgctcctaatccggacaagcattggatcatgcggtacacgggccccatgaaacctatccacatggagttcactaacatgctgcaacggaagagactgcagactttgatgtcagtcgatgattcaatggaaactatttataacatgttggtggagactggcgagctggataatacttatatcgtctacactgccgaccatggatatcacattggccaatttgggctggtcaagggaaagagcatgccttatgaatttgacattagagttccattttacgtccgaggacctaatgtcgaagctggttgcctgaaccctcacattgtgcttaacatagacctagcccccacgattctggatatcgcagggctggacattccagcagacatggatggcaagtctatactcaaactgttagacaccgaaagaccggtaaacaggttccaccttaagaaaaaaatgcgggtgtggagagactcatttctggtagaacgagggaaacttttgcataaaagggacaatgacaaggtggatgcacaggaagagaacttcctaccaaagtatcaacgcgtgaaggatctctgccagcgtgctgagtatcagacggcatgcgagcagcttggtcagaaatggcaatgtgtcgaagatgctactggaaagctgaagttgcacaaatgcaaaggcccgatgcggctgggcggttctcgtgccctgtccaatttggtcccaaaatactacggacagggctccgaggcttgtacatgcgattcaggcgattataagctttctttggcgggtagacgcaagaagctgtttaagaagaaatacaaagcgtcatacgtgcggtccagatctattaggtctgttgccatcgaggttgatggccgggtttatcatgtcggcctgggagacgccgcacagccccggaacctgaccaagcggcactggccaggagctccagaggatcaggacgataaagacggaggtgacttttcaggcaccggtggcctccccgactatagcgccgctaaccccatcaaagtgacacatagatgttacatcttggaaaatgacacagtgcagtgtgatttggatctctataagagcctccaggcatggaaagaccacaagctgcacatagatcatgagatcgaaactctgcagaataagatcaaaaacctgagagaggtcaggggccacttaaaaaaaaagagacctgaggaatgcgactgtcacaagatcagctatcacacccaacacaaaggaaggttgaaacaccggggaagtagcttacatccgtttcgcaaagggttgcaggagaaggataaagtgtggctgttaagggagcagaagcgtaaaaagaagttacgtaaactcctgaagagactgcagaataatgacacatgcagcatgccgggtttgacgtgcttcactcacgacaatcagcactggcagaccgctccattttggacgttgggacctttctgcgcctgtacctctgccaacaataacacatactggtgtatgcggactattaatgaaactcacaatttcctcttttgtgagttcgccacaggtttcctggagtatttcgacttaaatacagatccctaccagttgatgaatgctgtcaacaccttggatcgggatgtcctgaaccagctgcatgttcagctgatggaactaagatcgtgcaaggggtataagcagtgcaatcctcgcacaaggaatatggacttggacggagggagctatgagcaatataggcagttccagcggcggaagtggccggaaatgaaacgtccgagttctaaatcactgggccagctgtgggaggggtgggagggctag

SEQ ID NO: 260298 - DNA, 2604 bp, Artificial Sequence
  derived and/or modified sequence
atgggcccccccagcctggtgctgtgcctgctgagcgccaccgtcttcagcctgctgggcggcagcagcgccttcctgagccaccaccggctgaagggccgcttccagagggacagaagaaacatccggcccaacatcatcctggtgctgacagatgaccaggatgtggagctgggctccatgcaggtgatgaacaagacccggcgcatcatggagcagggcggggcccacttcatcaatgcctttgtgaccacccccatgtgctgccccagccgcagcagcatcctgaccgggaagtatgtgcacaaccacaacacctacaccaacaatgaaaactgcagcagccccagctggcaggcccagcacgagagcaggacctttgctgtgtacctgaacagcacaggctacagaacagccttcttcggcaagtacctgaatgagtacaacggcagctatgtgcccccaggctggaaggagtgggtgggcctgctgaagaacagccgcttctacaactacaccctgtgcagaaatggagtgaaggagaagcacggcagtgactacagcaaggactacctgacagacctgatcaccaatgacagcgtgtccttcttccgcaccagcaagaagatgtacccccacaggcctgtgctgatggtgatcagccatgctgccccccacggcccagaagattctgccccccagtacagccgcctcttccccaatgccagccagcacatcacccccagctacaactatgcccccaacccagacaagcactggatcatgagatacacaggccccatgaagcccatccacatggagttcaccaacatgctgcagaggaagaggctgcagaccctgatgtctgtggatgacagcatggagaccatctacaacatgctggtggagaccggggagctggacaacacctacatcgtgtacacagctgaccacggctaccacatcggccagtttggcctggtgaagggcaagtccatgccctatgaatttgacatccgggtgcccttctacgtgcggggccccaacgtggaggccggctgcctgaacccccacatcgtgctgaacatcgacctggcccccaccatcctggacattgctggcctggacatcccagctgacatggatggcaagagcatcctgaagctgctggacacagagaggcctgtgaaccgcttccacctgaagaagaagatgagggtgtggagggacagcttcctggtggagcggggcaagctgctgcacaagagggacaatgacaaggtggatgcccaggaggagaacttcctgcccaagtaccagagggtgaaggacctgtgccagagagctgagtaccagacagcctgtgagcagctgggccagaagtggcagtgtgtggaggatgccaccgggaagctgaagctgcacaagtgcaagggccccatgaggctgggcggcagccgggccctgagcaacctggtgcccaagtactacggccagggcagcgaggcctgcacctgtgacagcggggactacaagctgagcctggccggccgcaggaagaagctgttcaagaagaagtacaaggccagctatgtgcgcagccgcagcatccgctctgtggccatcgaggtggatggccgggtgtaccacgtgggcctgggagatgctgcccagcccaggaacctgaccaagaggcactggccaggggcccctgaggaccaggatgacaaggatggaggagacttctctggaactggaggcctgcctgactacagcgctgccaaccccatcaaggtgacccaccgctgctacatcctggagaatgacacagtgcagtgtgacctggacctgtacaagagcctgcaggcctggaaggaccacaagctgcacatcgaccatgaaattgagaccctgcagaacaagatcaagaacctgcgggaggtgcggggccacctgaagaagaagaggccagaagaatgtgactgccacaagatctcctaccacacccagcacaagggccgcctgaagcaccggggcagcagcctgcaccccttcaggaagggcctgcaggagaaggacaaggtgtggctgctgcgggagcagaagaggaagaagaagctgaggaagctgctgaagaggctgcagaacaatgacacctgcagcatgcctggcctgacctgcttcacccatgacaaccagcactggcagacagcccccttctggaccctgggccccttctgtgcctgcaccagcgccaacaacaacacctactggtgcatgaggaccatcaatgagacccacaacttcctgttctgtgaatttgccaccggcttcctggagtactttgacctgaacacagacccctaccagctgatgaatgctgtgaacaccctggacagagatgtgctgaaccagctgcacgtgcagctgatggagctgcggagctgcaagggctacaagcagtgcaaccccaggaccaggaacatggacctggatggcggcagctatgagcagtaccggcagttccagaggaggaagtggccagagatgaagaggcccagcagcaagagcctgggccagctgtgggagggctgggagggctag

SEQ ID NO: 260299 - DNA, 2604 bp, Artificial Sequence
  derived and/or modified sequence
atgggcccccccagcctggtgctgtgcctgctgagcgccaccgtgttctctctgctgggaggctcttctgccttcctgtcccaccacagacttaaaggaagatttcagagagatcgacggaacattagaccaaacattatcctggttttgacagatgatcaggacgtcgagctggggtccatgcaggtcatgaacaagacccggcgcatcatggagcagggaggagctcattttataaatgcattcgtcactacccctatgtgctgcccttctcgaagctctatcctgacagggaagtatgtgcacaaccacaacacatatacaaataatgaaaattgctctagcccgagttggcaggctcagcacgagtcacggactttcgccgtgtacctgaattctacagggtatcgcactgcattttttggcaaatatctgaacgaatataatggtagctacgttcctccaggttggaaggaatgggtgggtctgttgaagaattctagattttacaattatactctgtgccgcaatggcgtcaaggaaaagcacgggagtgattacagcaaagactatctcaccgacttgatcaccaatgactcggtttcattctttagaacatccaagaagatgtacccacacaggcctgtgctcatggtaatctcccatgctgcgcctcacggcccagaagattccgccccccagtatagccgcttgttccctaatgctagccagcatataaccccatcctacaactatgcccccaaccccgataagcactggataatgaggtacaccggacccatgaaacccatacacatggaattcaccaacatgctacagcgcaagcggcttcagacactgatgtcagttgacgactcaatggaaaccatttacaatatgctagtggagacaggggagctggacaatacttatatcgtgtataccgcggatcatggctatcacataggacagtttggcctcgtgaagggcaaatccatgccatacgagtttgatatcagggtcccattctatgttcggggaccaaatgttgaagcaggctgcctgaaccctcacatcgttctgaatatcgacctggctcccaccatcttggatatagccggcctcgacatccccgccgacatggacggcaaaagcatcctcaagctgctggacacggagcggcctgtcaacagatttcacctcaaaaagaagatgagagtgtggcgcgatagtttcctggtggagcgcgggaaattgttgcataagcgtgacaatgacaaagtcgatgcccaggaggagaatttcctgccgaaatatcagagagtgaaagacttgtgccagcgggcagagtaccagacagcttgtgaacaactgggacagaagtggcagtgcgtggaagacgccactggcaagcttaagctgcataaatgcaaaggtcctatgcgccttggaggcagccgagctctatcgaacttggttcctaagtactacggccagggctctgaggcttgcacttgcgatagtggcgattataagctgagcctggccggtaggagaaagaagctatttaagaagaaatacaaagcctcttatgtgaggagcagatccatcagaagcgtggccatcgaagtcgatggccgcgtttaccatgtgggcctgggggacgccgcgcagccacgtaacctcacaaagcgccactggcccggcgcgcctgaagaccaggatgacaaggacggcggggacttttctgggaccggaggactgcctgattattcagctgccaaccccatcaaagtgacccatagatgctacatcctagaaaacgacacagtccagtgcgatttggatttatacaaatctctgcaggcatggaaggaccataaactgcatatcgaccacgagattgagacgctccaaaataagattaaaaatctgcgggaggttcggggccacctcaagaagaagcgccccgaagaatgcgattgtcataaaatcagttatcatactcagcacaagggccgactgaagcaccggggtagttccctccatccgtttaggaagggcctgcaggagaaagacaaggtgtggttgctgagagagcagaagaggaagaagaaactcaggaaactcctcaaacggctgcaaaataacgatacatgcagtatgccaggattgacctgcttcacccacgacaatcagcactggcagactgcccctttctggacgcttggcccgttttgcgcctgtacatccgctaacaacaacacttactggtgtatgcgcaccattaatgagactcataattttctgttttgcgagtttgcgactggattccttgaatacttcgacctgaacacggacccctatcagcttatgaacgcggtcaacaccctcgatcgcgatgtactgaatcaacttcacgtgcagctcatggagctccgatcttgtaagggttacaaacagtgcaaccccaggacccgaaacatggatctagacggggggagttatgaacagtaccggcagttccagaggcgcaagtggcccgagatgaagcgaccttcaagcaagagtctgggccagctgtgggagggatgggagggatag

SEQ ID NO: 260300 - DNA, 2604 bp, Artificial Sequence
  derived and/or modified sequence
atgggcccaccttctctcgtgctgtgcctgctctctgccaccgttttcagcctcctgggtgggtcaagcgccttcctgtcccatcataggctcaagggccgtttccagagggaccgtcgaaacattcggccaaatatcattctggtgttgaccgatgatcaggatgtcgaactggggtcgatgcaggtgatgaataagacacgcagaattatggaacaggggggtgcccatttcattaacgcctttgtcacaacaccaatgtgctgtccttcgagaagctcaatcctcacagggaaatatgtgcataaccacaacacctacactaataatgagaactgctcgtccccatcctggcaggctcaacatgagtcacgcacatttgcagtttatctgaacagcaccggctataggacagcgttcttcggaaaataccttaatgagtacaacggcagctacgtaccacccggatggaaggaatgggtcggactcctgaaaaacagccgcttttacaattacactctgtgtagaaatggcgtgaaagaaaagcacggttccgactactctaaggactacctgacagacctaattacgaatgactcagtgtccttctttagaacctccaagaagatgtatccacaccgtccagtgctaatggtgatctcacatgcagccccacacggcccagaggacagtgctccacaatactcgagactctttcctaatgcttcccaacacattaccccttcctataattacgccccaaaccccgataagcactggatcatgcgctataccgggcctatgaagccaatccatatggaattcactaacatgctccagcgaaaacgtcttcagaccctgatgtccgtggacgactccatggaaactatctataatatgttggtcgagaccggcgaactggacaacacgtacatcgtgtacacggccgaccatggctaccacatagggcagtttgggctggttaagggtaagtccatgccctatgagttcgatattagggtaccattttacgtacggggtcccaatgtcgaggcaggatgccttaatcctcacattgttctcaacatcgatctggcacccactatcttggacattgctggtctggacattcctgccgacatggacgggaaatcaatcctcaaactactcgacaccgagcggcctgtgaacagatttcacctaaaaaaaaagatgagggtgtggcgggattcatttctggtcgagcggggaaaactcctgcacaagagggacaacgataaagtggacgcgcaagaggagaatttcctgcctaagtaccagagggtcaaggatctgtgccagagagccgagtaccagactgcatgtgaacagctgggccagaaatggcagtgcgtggaggacgcaaccggcaagctgaagctccacaagtgcaaaggcccaatgcgattaggaggttcacgagcactttcgaacctcgtgccgaagtattacggacagggcagtgaggcctgtacatgcgattccggcgactataagctgtcactggcagggaggaggaagaagttgttcaaaaagaaatataaggcctcatacgtgaggagccgaagcattaggtctgtagcaatagaagtggatggcagggtgtaccacgtcggcttaggcgatgcagcccaacccaggaatcttacaaagcggcactggcccggtgcgcctgaagatcaggacgataaggatggaggggacttctcaggaactgggggattgcccgattacagcgcagccaaccctattaaagtgactcatcgttgttacattctagaaaatgataccgtgcagtgtgacctggacctctataagagtttgcaagcctggaaagaccataagctgcacattgatcacgagatcgagacactgcagaataagatcaagaacctccgggaagtccggggtcatctgaagaaaaagaggccagaggaatgtgactgccacaaaataagctaccatacgcagcataaaggtagactcaagcaccggggttctagtctgcaccccttccggaagggactgcaagagaaagataaagtttggctcctgcgcgagcagaagcggaagaaaaagctcaggaaattgctcaagcgactgcaaaacaatgatacatgttctatgccaggcctgacttgttttacacatgataatcagcactggcagacagcccctttttggacacttggacccttttgcgcttgtaccagcgccaacaacaacacctattggtgcatgcgcaccatcaacgaaacccacaatttcttattctgcgagtttgccacaggtttcctggaatactttgatctgaacaccgacccatatcaactgatgaacgcagtaaacacgctggatcgcgatgtgctaaaccagctgcacgtccaacttatggaattgcggtcctgcaagggctacaagcagtgcaatccacggacgagaaacatggatcttgacgggggatcctatgaacagtaccggcagttccagcggcgtaaatggcctgaaatgaagcggcctagcagtaaatccctcggacagttgtgggagggatgggaggggtag

SEQ ID NO: 260301 - DNA, 3905 bp, Artificial Sequence
  derived and/or modified sequence
ctcgggcgcgcacaggcagctcggtttgccctgcgattgagctgcgggtcgcggccggcgccggcctctccaatggcaaatgtgtgtggctggaggcgagcgcgaggctttcggcaaaggcagtcgagtgtttgcagaccggggcgagtcctgtgaaagcagataaaagaaaacatttattaacgtgtcattacgaggggagcgcccggccggggctgtcgcactccccgcggaacatttggctccctccagctccgagagaggagaagaagaaagcggaaaagaggcagattcacgtcgtttccagccaagtggacctgatcgatggccctcctgaatttatcacgatatttgatttattagcgatgccccctggtttgtgtgttacgcacacacacgtgcacacaaggctctggctcgcttccctccctcgtttccagctcctgggcgaatcccacatctgtttcaactctccgccgagggcgagcaggagcgagagtgtgtcgaatctgcgagtgaagagggacgagggaaaagaaacaaagccacagacgcaacttgagactcccgcatcccaaaagaagcaccagatcagcaaaaaaagaagatgggccccccgagcctcgtgctgtgcttgctgtccgcaactgtgttctccctgctgggtggaagctcggccttcctgtcgcaccaccgcctgaaaggcaggtttcagagggaccgcaggaacatccgccccaacatcatcctggtgctgacggacgaccaggatgtggagctgggttccatgcaggtgatgaacaagacccggcgcatcatggagcagggcggggcgcacttcatcaacgccttcgtgaccacacccatgtgctgcccctcacgctcctccatcctcactggcaagtacgtccacaaccacaacacctacaccaacaatgagaactgctcctcgccctcctggcaggcacagcacgagagccgcacctttgccgtgtacctcaatagcactggctaccggacagctttcttcgggaagtatcttaatgaatacaacggctcctacgtgccacccggctggaaggagtgggtcggactccttaaaaactcccgcttttataactacacgctgtgtcggaacggggtgaaagagaagcacggctccgactactccaaggattacctcacagacctcatcaccaatgacagcgtgagcttcttccgcacgtccaagaagatgtacccgcacaggccagtcctcatggtcatcagccatgcagccccccacggccctgaggattcagccccacaatattcacgcctcttcccaaacgcatctcagcacatcacgccgagctacaactacgcgcccaacccggacaaacactggatcatgcgctacacggggcccatgaagcccatccacatggaattcaccaacatgctccagcggaagcgcttgcagaccctcatgtcggtggacgactccatggagacgatttacaacatgctggttgagacgggcgagctggacaacacgtacatcgtatacaccgccgaccacggttaccacatcggccagtttggcctggtgaaagggaaatccatgccatatgagtttgacatcagggtcccgttctacgtgaggggccccaacgtggaagccggctgtctgaatccccacatcgtcctcaacattgacctggcccccaccatcctggacattgcaggcctggacatacctgcggatatggacgggaaatccatcctcaagctgctggacacggagcggccggtgaatcggtttcacttgaaaaagaagatgagggtctggcgggactccttcttggtggagagaggcaagctgctacacaagagagacaatgacaaggtggacgcccaggaggagaactttctgcccaagtaccagcgtgtgaaggacctgtgtcagcgtgctgagtaccagacggcgtgtgagcagctgggacagaagtggcagtgtgtggaggacgccacggggaagctgaagctgcataagtgcaagggccccatgcggctgggcggcagcagagccctctccaacctcgtgcccaagtactacgggcagggcagcgaggcctgcacctgtgacagcggggactacaagctcagcctggccggacgccggaaaaaactcttcaagaagaagtacaaggccagctatgtccgcagtcgctccatccgctcagtggccatcgaggtggacggcagggtgtaccacgtaggcctgggtgatgccgcccagccccgaaacctcaccaagcggcactggccaggggcccctgaggaccaagatgacaaggatggtggggacttcagtggcactggaggccttcccgactactcagccgccaaccccattaaagtgacacatcggtgctacatcctagagaacgacacagtccagtgtgacctggacctgtacaagtccctgcaggcctggaaagaccacaagctgcacatcgaccacgagattgaaaccctgcagaacaaaattaagaacctgagggaagtccgaggtcacctgaagaaaaagcggccagaagaatgtgactgtcacaaaatcagctaccacacccagcacaaaggccgcctcaagcacagaggctccagtctgcatcctttcaggaagggcctgcaagagaaggacaaggtgtggctgttgcgggagcagaagcgcaagaagaaactccgcaagctgctcaagcgcctgcagaacaacgacacgtgcagcatgccaggcctcacgtgcttcacccacgacaaccagcactggcagacggcgcctttctggacactggggcctttctgtgcctgcaccagcgccaacaataacacgtactggtgcatgaggaccatcaatgagactcacaatttcctcttctgtgaatttgcaactggcttcctagagtactttgatctcaacacagacccctaccagctgatgaatgcagtgaacacactggacagggatgtcctcaaccagctacacgtacagctcatggagctgaggagctgcaagggttacaagcagtgtaacccccggactcgaaacatggacctggatggaggaagctatgagcaatacaggcagtttcagcgtcgaaagtggccagaaatgaagagaccttcttccaaatcactgggacaactgtgggaaggctgggaaggttaagaaacaacagaggtggacctccaaaaacatagaggcatcacctgactgcacaggcaatgaaaaaccatgtgggtgatttccagcagacctgtggtattggccaggaggcctgagaaagcaagcacgcactctcagtcaacatgacagattctggaggataaccagcaggagcagagataacttcaggaagtccatttttgcccctgcttttgctttggattatacctcaccagctgcacaaaatgcattttttcgtatcaaaaagtcaccactaaccctcccccagaagctcacaaaggaaaacggagagagcgagcgagagagatttccttggaaatttctcccaagggcgaaagtcattggaatttttaaatcataggggaaaagcagtcctgttctaaatcctcttattcttttggtttgtcacaaagaaggaactaagaagcaggacagaggcaacgtggagaggctgaaaacagtgcagagacgtttgacaatgagtcagtagcacaaaagagatgacatttacctagcactataaaccctggttgcctctgaagaaactgccttcattgtatatatgtgactatttacatgtaatcaacatgggaacttttaggggaacctaataagaaatcccaattttcaggagtggtggtgtcaataaacgctctgtggccagtgtaaaagaaaa

SEQ ID NO: 260302 - protein, 1094 aa, Artificial Sequence
  derived and/or modified sequence
MNVNQSVPPVPPFGQPQPIYPGYHQSSYGGQSGSTAPAIPYGAYNGPVPGYQQTPPQGMSRAPPSSGAPPASTAQAPCGQAAYGQFGQGDVQNGPSSTVQMQRLPGSQPFGSPLAPVGNQPPVLQPYGPPPTSAQVATQLSGMQISGAVAPAPPSSGLGFGPPTSLASASGSFPNSGLYGSYPQGQAPPLSQAQGHPGIQTPQRSAPSQASSFTPPASGGPRLPSMTGPLLPGQSFGGPSVSQPNHVSSPPQALPPGTQMTGPLGPLPPMHSPQQPGYQPQQNGSFGPARGPQSNYGGPYPAAPTFGSQPGPPQPLPPKRLDPDAIPSPIQVIEDDRNNRGTEPFVTGVRGQVPPLVTTNFLVKDQGNASPRYIRCTSYNIPCTSDMAKQAQVPLAAVIKPLARLPPEEASPYVVDHGESGPLRCNRCKAYMCPFMQFIEGGRRFQCCFCSCINDVPPQYFQHLDHTGKRVDAYDRPELSLGSYEFLATVDYCKNNKFPSPPAFIFMIDVSYNAIRTGLVRLLCEELKSLLDFLPREGGAEESAIRVGFVTYNKVLHFYNVKSSLAQPQMMVVSDVADMFVPLLDGFLVNVNESRAVITSLLDQIPEMFADTRETETVFVPVIQAGMEALKAAECAGKLFLFHTSLPIAEAPGKLKNRDDRKLINTDKEKTLFQPQTGAYQTLAKECVAQGCCVDLFLFPNQYVDVATLSVVPQLTGGSVYKYASFQVENDQERFLSDLRRDVQKVVGFDAVMRVRTSTGIRAVDFFGAFYMSNTTDVELAGLDGDKTVTVEFKHDDRLNEESGALLQCALLYTSCAGQRRLRIHNLALNCCTQLADLYRNCETDTLINYMAKFAYRGVLNSPVKAVRDTLITQCAQILACYRKNCASPSSAGQLILPECMKLLPVYLNCVLKSDVLQPGAEVTTDDRAYVRQLVTSMDVTETNVFFYPRLLPLTKSPVESTTEPPAVRASEERLSNGDIYLLENGLNLFLWVGASVQQGVVQSLFSVSSFSQITSGLSVLPVLDNPLSKKVRGLIDSLRAQRSRYMKLTVVKQEDKMEMLFKHFLVEDKSLSGGASYVDFLCHMHKEIRQLLS

SEQ ID NO: 260303 - DNA, 3285 bp, Artificial Sequence
  derived and/or modified sequence
atgaacgtgaaccagagcgtgccccccgtgccccccttcggccagccccagcccatctaccccggctaccaccagagcagctacggcggccagagcggcagcaccgcccccgccatcccctacggcgcctacaacggccccgtgcccggctaccagcagacccccccccagggcatgagcagagccccccccagcagcggcgccccccccgccagcaccgcccaggccccctgcggccaggccgcctacggccagttcggccagggcgacgtgcagaacggccccagcagcaccgtgcagatgcagagactgcccggcagccagcccttcggcagccccctggcccccgtgggcaaccagccccccgtgctgcagccctacggccccccccccaccagcgcccaggtggccacccagctgagcggcatgcagatcagcggcgccgtggcccccgccccccccagcagcggcctgggcttcggcccccccaccagcctggccagcgccagcggcagcttccccaacagcggcctgtacggcagctacccccagggccaggccccccccctgagccaggcccagggccaccccggcatccagaccccccagagaagcgcccccagccaggccagcagcttcaccccccccgccagcggcggccccagactgcccagcatgaccggccccctgctgcccggccagagcttcggcggccccagcgtgagccagcccaaccacgtgagcagccccccccaggccctgccccccggcacccagatgaccggccccctgggccccctgccccccatgcacagcccccagcagcccggctaccagccccagcagaacggcagcttcggccccgccagaggcccccagagcaactacggcggcccctaccccgccgcccccaccttcggcagccagcccggccccccccagcccctgccccccaagagactggaccccgacgccatccccagccccatccaggtgatcgaggacgacagaaacaacagaggcaccgagcccttcgtgaccggcgtgagaggccaggtgccccccctggtgaccaccaacttcctggtgaaggaccagggcaacgccagccccagatacatcagatgcaccagctacaacatcccctgcaccagcgacatggccaagcaggcccaggtgcccctggccgccgtgatcaagcccctggccagactgccccccgaggaggccagcccctacgtggtggaccacggcgagagcggccccctgagatgcaacagatgcaaggcctacatgtgccccttcatgcagttcatcgagggcggcagaagattccagtgctgcttctgcagctgcatcaacgacgtgcccccccagtacttccagcacctggaccacaccggcaagagagtggacgcctacgacagacccgagctgagcctgggcagctacgagttcctggccaccgtggactactgcaagaacaacaagttccccagcccccccgccttcatcttcatgatcgacgtgagctacaacgccatcagaaccggcctggtgagactgctgtgcgaggagctgaagagcctgctggacttcctgcccagagagggcggcgccgaggagagcgccatcagagtgggcttcgtgacctacaacaaggtgctgcacttctacaacgtgaagagcagcctggcccagccccagatgatggtggtgagcgacgtggccgacatgttcgtgcccctgctggacggcttcctggtgaacgtgaacgagagcagagccgtgatcaccagcctgctggaccagatccccgagatgttcgccgacaccagagagaccgagaccgtgttcgtgcccgtgatccaggccggcatggaggccctgaaggccgccgagtgcgccggcaagctgttcctgttccacaccagcctgcccatcgccgaggcccccggcaagctgaagaacagagacgacagaaagctgatcaacaccgacaaggagaagaccctgttccagccccagaccggcgcctaccagaccctggccaaggagtgcgtggcccagggctgctgcgtggacctgttcctgttccccaaccagtacgtggacgtggccaccctgagcgtggtgccccagctgaccggcggcagcgtgtacaagtacgccagcttccaggtggagaacgaccaggagagattcctgagcgacctgagaagagacgtgcagaaggtggtgggcttcgacgccgtgatgagagtgagaaccagcaccggcatcagagccgtggacttcttcggcgccttctacatgagcaacaccaccgacgtggagctggccggcctggacggcgacaagaccgtgaccgtggagttcaagcacgacgacagactgaacgaggagagcggcgccctgctgcagtgcgccctgctgtacaccagctgcgccggccagagaagactgagaatccacaacctggccctgaactgctgcacccagctggccgacctgtacagaaactgcgagaccgacaccctgatcaactacatggccaagttcgcctacagaggcgtgctgaacagccccgtgaaggccgtgagagacaccctgatcacccagtgcgcccagatcctggcctgctacagaaagaactgcgccagccccagcagcgccggccagctgatcctgcccgagtgcatgaagctgctgcccgtgtacctgaactgcgtgctgaagagcgacgtgctgcagcccggcgccgaggtgaccaccgacgacagagcctacgtgagacagctggtgaccagcatggacgtgaccgagaccaacgtgttcttctaccccagactgctgcccctgaccaagagccccgtggagagcaccaccgagccccccgccgtgagagccagcgaggagagactgagcaacggcgacatctacctgctggagaacggcctgaacctgttcctgtgggtgggcgccagcgtgcagcagggcgtggtgcagagcctgttcagcgtgagcagcttcagccagatcaccagcggcctgagcgtgctgcccgtgctggacaaccccctgagcaagaaggtgagaggcctgatcgacagcctgagagcccagagaagcagatacatgaagctgaccgtggtgaagcaggaggacaagatggagatgctgttcaagcacttcctggtggaggacaagagcctgagcggcggcgccagctacgtggacttcctgtgccacatgcacaaggagatcagacagctgctgagctag

SEQ ID NO: 260304 - DNA, 3285 bp, Artificial Sequence
  derived and/or modified sequence
atgaatgtgaaccagagtgtacccccagtgcctcccttcggccagccccagcctatctaccccggctaccaccagtcatcttatggtgggcagtcaggctctaccgcccccgcgattccctatggggcatacaatggtcccgtgcccggctaccagcaaacccccccgcagggcatgtcaagggcacctccaagttctggcgccccacccgcgtccaccgcccaagccccatgcggccaggccgcctatggccagttcgggcaaggggatgtgcagaatggtccctcctctacagtccagatgcagcgcctgcccgggtcccaaccgtttggctctccccttgctcctgtcggaaaccagcctcctgttctacagccatacggccctccaccaacatccgcccaggtggccacacagctttctggaatgcagatctcaggcgctgtggccccggcccctccgagtagcggtctaggctttggacctcccacatcactggcaagtgcctccggtagcttcccaaacagcggcctttacgggagttatcctcaggggcaagccccaccactctcccaagcgcaaggacaccccgggattcagacgccccaaagaagcgctccctctcaggccagttcttttacacctccagcgtcaggtgggccgcgtctgcccagcatgacaggtccactcctccctggccagagctttggcggaccttccgtgtcccaacctaatcatgtatcgagcccaccacaagcattgcctccaggtacacagatgacggggcctctgggtccgcttccccccatgcactcaccgcaacagccaggctatcagccccagcagaacggatcctttggccccgctcgggggccccaatctaattacggaggaccatatcccgccgccccaacattcggaagccagccaggtccgccccagccgctcccgcccaaacgcttagacccagacgcaatcccctcccccattcaggtcatcgaggacgaccggaataatcgcggcacggagccctttgtaactggagtgaggggccaggtgcccccactcgtgactaccaacttcctagttaaggaccaagggaacgcatcccccaggtacatcaggtgtacctcttacaatattccgtgcacctcagatatggccaaacaggcacaggtacctttagctgctgtcataaaaccactggcgcgattgcctcccgaggaagcctccccgtacgtggtggaccacggcgagagcgggccactacgttgcaatcggtgtaaagcatacatgtgtccatttatgcagtttattgagggagggagaaggtttcaatgttgcttttgctcatgtattaacgacgtacctccccagtactttcagcatctggatcacacaggcaagcgcgtggacgcctacgataggcccgagttgtcgctgggctcctacgagttcctagctacagtggattattgtaagaataacaagtttccatcccccccggcgttcatctttatgattgatgtgtcctataacgcaattaggacagggctggtgaggcttctttgcgaggagttgaaatcgctgttagactttcttccacgggaagggggtgcagaagagagcgcaattcgtgtaggcttcgtgacatacaacaaggtactacatttttacaatgtaaagagtagccttgcacagccgcagatgatggtggtctcggacgtggccgacatgtttgtccctttattagacggtttcctggtcaatgtcaacgagagccgggcagttattacgtccctcctggaccagatcccggagatgtttgcagacacccgcgaaaccgaaactgtgttcgtaccagtcatccaggctggcatggaggccctcaaggcagctgagtgtgcaggcaaactgttcctgtttcatacttccctgccgattgccgaagcccctggtaagcttaagaatcgcgacgaccggaagctgattaataccgacaaggaaaagacactttttcagccacagacaggggcttaccagaccctggccaaggaatgcgtggcccagggctgctgcgtggacctgttcctgttccccaatcagtatgtggacgtcgccaccttgagtgtagtaccacaactcaccggtggatcagtgtataaatacgcaagcttccaggtagagaacgatcaggaaagattcctgagcgacctgagaagagatgtgcagaaagttgtggggttcgatgcggtgatgagagtgagaacttctacgggcattcgagccgtggacttctttggcgccttttacatgagcaacacgactgacgtggagctggccggactagacggagacaaaaccgtcacagtggagtttaaacacgatgaccgactcaatgaagaaagcggggccctgctccagtgcgccttactgtatacaagttgtgccggacagagaaggctgcgcatccataaccttgccttaaactgttgtacgcagctcgcagatctgtatcggaactgtgagactgataccctgattaactatatggcaaaattcgcttatcggggcgtgctgaattcccctgtgaaagcagtgagggacaccttaattacgcagtgcgcgcaaattctggcatgctaccggaagaattgcgcttccccatcctccgccgggcaacttattttgccagagtgcatgaagcttcttcccgtttatcttaactgcgtgttgaaaagcgatgtgttgcaaccgggcgccgaggttacgacagacgatagagcttatgtgagacagttagtcactagcatggatgtgaccgagacaaatgtcttcttttacccccgactgctacctctcacaaaatctcccgtggaatctacaacagaacccccagccgtgagggcaagcgaggaacggcttagcaatggggacatctatctgctggagaatggcctgaatctcttcctatgggttggagccagcgtacagcagggtgttgtacagtctttgttctctgtatctagcttcagccagataacatcgggcttaagcgtgctcccagttctggacaatcctctctccaaaaaggtgcgaggactgattgattctttgagggcacagcgctctagatacatgaagttaacagtggtgaaacaggaggacaaaatggaaatgctgtttaagcacttcctcgtggaggataagagcttgagcgggggcgccagctacgtggatttcctctgccacatgcataaagaaattaggcagctgctgagttag

SEQ ID NO: 260305 - DNA, 3285 bp, Artificial Sequence
  derived and/or modified sequence
atgaatgtcaaccagtctgttccccccgttccgccgttcggccagcctcagcctatctatcccggctaccaccagagcagctacggtggacagtccggatctaccgcccccgctatcccttatggcgcctacaatggtcccgtgcctggctatcagcaaacaccgccccaaggcatgagcagagctccaccctccagcggagccccccctgcttctacggctcaggctccgtgcggccaagcggcctacgggcaatttggccaaggtgatgtgcagaatggaccctcctccaccgtccagatgcagcggcttcccggttcgcagccattcggctctcccctggctccagtgggcaaccagccacctgtgctccaaccctatggcccgccaccaactagcgcccaagtggctactcagctgagcgggatgcagattagcggggctgtggctcctgccccaccctcttccggccttgggttcggcccgcccacatctcttgcctccgcctctggcagcttccctaattcaggactgtacgggagctacccgcaaggccaggcacccccattgagccaagctcagggtcacccagggatacagaccccacagagatcagcacccagccaggccagtagctttacaccccccgcttccggcggacctcgacttccctcaatgacaggaccgttgctaccggggcagtcatttggaggcccatcagtttcacaacctaatcatgtcagctcacctcctcaggccctccccccaggaacccaaatgacggggccattaggcccactccctccgatgcactctccccagcagccagggtaccagccgcagcagaatggttccttcggaccggctcgcgggccacagagcaattacggaggaccctaccctgcagcgccgacattcggctcacagcctggaccaccccaaccacttcccccaaagagattagaccccgacgcaataccttctccgattcaggtcatcgaggacgatcggaataataggggaaccgaacctttcgtaacaggggtgcgcgggcaagtgcctcccctcgtgaccacgaattttttagtaaaggaccagggtaacgcctctccaaggtacatcagatgtacatcgtacaacattccctgcacctccgatatggctaaacaggctcaggtacctcttgcggccgtgattaagcccttagcgcggcttccccccgaggaagcaagcccctacgtcgtcgaccatggcgagagcggacccctgcggtgtaacaggtgcaaggcttacatgtgtcctttcatgcagtttatagaaggcgggagaagattccagtgctgtttctgctcatgtattaacgacgtaccgccccagtacttccagcacttggaccacactggcaagcgggtcgatgcatatgacagacctgaattatcccttggcagctacgagttcctggcaaccgtggactactgtaagaacaataaatttccctccccgccagccttcatatttatgatcgatgtgagctataacgcaattcggacgggtctggttcggctgttgtgcgaggagctcaagagcctccttgatttcctgccaagggaaggcggcgcagaggagtcggcaattcgagtcggcttcgtgacctacaataaagtgctccacttctataacgtcaagtcatcccttgctcagccgcagatgatggtcgtctcggacgtggccgacatgttcgtgccactcctggacggattcttggtcaacgtgaacgagagcagagccgtgattacctcactgcttgaccagataccggaaatgtttgcagataccagagagaccgagactgtgttcgtacctgtgatacaggccggcatggaagcactgaaagccgcagaatgtgctggcaaactgttcctgtttcatacgtccctgcccatcgcggaggccccaggaaagcttaaaaatcgagatgaccgtaaactaataaacaccgataaagaaaagacactgtttcaaccgcagacaggcgcataccagacactcgctaaggagtgcgtggcccagggatgttgcgtcgatttgtttctcttcccgaatcagtatgtggatgtcgctacccttagcgtggtgcctcagctgacgggtggctcggtgtataaatacgcctcttttcaagtggaaaacgatcaagaacggtttttgtcagacttgcgacgagacgtccagaaggtggttggctttgacgccgtgatgagagtgaggacatccactgggatacgggccgttgacttttttggagctttttacatgtccaataccacagatgttgaacttgccggactggacggcgacaagacggtcaccgtggaattcaaacatgatgaccgtcttaatgaggagagcggcgctctgctccagtgcgctctgctgtacacatcttgcgccggacagaggagactgaggatccacaaccttgcactcaactgctgcacccagctggcggatttgtatagaaattgcgaaactgatacactgatcaattatatggccaagttcgcatatcgcggagtgctgaactccccggtcaaagctgtgcgggacactttgatcacccagtgtgcccagattctggcctgctatcgaaagaattgtgcgtcaccctcaagcgcgggccagcttatcctcccagagtgcatgaagctgctgcccgtgtacctgaattgtgtgttgaagagcgatgtgctgcagccgggcgctgaagtaacaacagatgatcgagcatatgtgcgacaactcgttacgagcatggacgtcaccgagacgaatgtttttttttatcccaggctactgcctttgaccaagtcaccagtggagtctaccaccgaacctcctgctgtgagagcttccgaggaacgtctgtcaaacggcgatatctacttgttggaaaacggcctgaaccttttcctgtgggttggggccagcgtccaacagggcgttgtgcaatccctgttttccgtaagtagcttctcacagataacttcggggcttagtgttctgcccgtactggacaaccctctcagtaaaaaggtgagaggattaatcgattccttgagagcccaaaggagcaggtacatgaaactgactgtggtcaaacaagaggataaaatggaaatgcttttcaagcattttcttgtagaagacaaaagcttgtcaggcggtgctagctacgttgattttctgtgccacatgcataaggagattcggcagctgctgtcctag

SEQ ID NO: 260306 - DNA, 3285 bp, Artificial Sequence
  derived and/or modified sequence
atgaatgtgaaccagagcgtgccccctgtgcccccatttggccagccccagcccatctacccaggctaccaccagagcagctatggaggccagagcggcagcacagccccagccatcccctatggagcctacaatggacctgtgcccggctaccagcagaccccaccccagggcatgagccgggccccacccagcagcggggcccccccagccagcacagcccaggccccctgtggccaggccgcctacggccagtttggccagggagatgtgcagaatggccccagcagcacagtgcagatgcagaggctgcccggcagccagcccttcggcagccccctggcccctgtgggcaaccagccccctgtgctgcagccctacggccccccacccaccagcgcccaggtggccacccagctgagcggcatgcagatcagcggggctgtggccccagccccacccagcagcggcctgggcttcggcccccccaccagcctggccagcgccagcggcagcttccccaacagcggcctgtatggcagctacccccagggccaggccccacccctgagccaggcccagggccaccctggcatccagaccccccagaggtctgcccccagccaggccagcagcttcaccccaccagccagcggcggcccccggctgcccagcatgacaggccccctgctgcccggccagagctttggaggccccagcgtgtcccagcccaaccacgtgagcagccccccccaggccctgcccccaggcacccagatgacaggccccctgggccccctgccccccatgcacagcccccagcagcccggctaccagccccagcagaatggcagctttggacctgcccggggcccccagagcaactacggcggcccctacccagctgcccccaccttcggcagccagcccggccccccccagcccctgccccccaagaggctggaccctgatgccatccccagccccatccaggtgattgaagatgacaggaacaacagaggaacagagccctttgtgactggagtgcggggccaggtgccccccctggtgaccaccaacttcctggtgaaggaccagggcaatgccagcccccgctacatccgctgcaccagctacaacatcccctgcaccagtgacatggccaagcaggcccaggtgcccctggccgctgtgatcaagcccctggcccggctgcccccagaggaggccagcccctacgtggtggaccatggagagagcggccccctgcgctgcaaccgctgcaaggcctacatgtgccccttcatgcagttcattgaaggaggaagacgcttccagtgctgcttctgcagctgcatcaatgatgtgcccccccagtacttccagcacctggaccacacaggcaagagggtggatgcctatgacaggcctgagctgagcctgggcagctatgagttcctggccaccgtggactactgcaagaacaacaagttccccagccccccagccttcatcttcatgattgatgtgtcctacaatgccatcagaacaggcctggtgcggctgctgtgtgaggagctgaagagcctgctggacttcctgccccgggagggcggcgctgaggagagcgccatccgggtgggctttgtgacctacaacaaggtgctgcacttctacaacgtgaagagcagcctggcccagccccagatgatggtggtgtctgatgtggccgacatgtttgtgcccctgctggatggcttcctggtgaatgtgaatgaaagccgggccgtcatcaccagcctgctggaccagatccctgagatgtttgctgacacccgggagacagaaacagtgtttgtgcctgtgatccaggccggcatggaggccctgaaggctgctgaatgtgccggcaagctgttcctgttccacaccagcctgcccatcgccgaggcccctgggaagctgaagaacagagatgacaggaagctgatcaacacagacaaggagaagaccctcttccagccccagacaggagcctaccagaccctggccaaggaatgtgtggcccagggctgctgcgtggacctcttcctgttccccaaccagtatgtggatgtggccaccctgtctgtggtgccccagctgaccggcggctctgtgtacaagtatgccagcttccaggtggagaatgaccaggagcgcttcctgagtgacctgcggagagatgtgcagaaggtggtgggctttgatgctgtgatgagggtgaggaccagcacaggcatccgggctgtggacttctttggagccttctacatgagcaacaccacagatgtggagctggccggcctggatggagacaagacagtgacagtggagttcaagcatgatgaccggctgaatgaggagagcggggccctgctgcagtgtgccctgctgtacaccagctgtgccggccagaggcggctgcgcatccacaacctggccctgaactgctgcacccagctggccgacctgtacagaaactgtgaaacagacaccctcatcaactacatggccaagtttgcctaccggggcgtgctgaacagccctgtgaaggctgtgcgggacaccctcatcacccagtgtgcccagatcctggcctgctacaggaagaactgtgccagccccagcagcgctggccagctgatcctgcctgagtgcatgaagctgctgcctgtgtacctgaactgtgtgctgaagagtgatgtgctgcagcctggagctgaggtgaccacagatgaccgggcctacgtgcggcagctggtgacctccatggatgtgacagagaccaacgtgttcttctacccccggctgctgcccctgaccaagagccctgtggagagcaccacagagcccccagctgtgcgggccagcgaggagcggctgagcaatggagacatctacctgctggagaatggcctgaacctcttcctgtgggtgggcgcctctgtgcagcagggcgtggtgcagagcctcttctctgtgagcagcttcagccagatcaccagcggcctgtctgtgctgcctgtgctggacaaccccctgagcaagaaggtgcggggcctgattgacagcctgcgggcccagaggagccgctacatgaagctgactgtggtgaagcaggaggacaagatggagatgctgttcaagcacttcctggtggaggacaagagcctgtctggaggagccagctatgtggacttcctgtgccacatgcacaaggagatccggcagctgctgtcctag

SEQ ID NO: 260307 - DNA, 3285 bp, Artificial Sequence
  derived and/or modified sequence
atgaacgtgaaccagagcgtgccccccgtgccccccttcggccagccccagcccatatatcccggctaccaccagtcgtcctacggtggacagtccggcagcacagcacctgccatcccttacggtgcctacaacgggcccgtgcccggctatcagcaaacaccacctcaggggatgtccagagcccctccatcgtccggggccccaccggcctccactgcccaggctccgtgtgggcaggcggcatatggacaattcggccaaggtgatgtccagaacgggccatcttccaccgtgcagatgcagagactgcccggtagccagccttttggatccccgctggcccctgtcggaaatcagccgcccgtgctccagccctatggccctccacccacatctgctcaggtcgccactcagttgtccggaatgcaaatttcaggcgctgtagcacccgcgccgccgagcagtggactcggcttcggaccccctaccagcctggcttctgcgtccggctctttccctaatagcggcctctacgggtcctacccccagggacaggccccccccttatcgcaagcgcaggggcaccctggcattcagaccccacagcggagtgcacctagccaggcctcctcattcacaccacccgcctcaggcggcccgagactgccaagcatgaccggccctcttctgccagggcagagctttggaggcccgtccgtttcccaaccgaaccatgtgagtagcccaccccaagctctgccacccgggacgcagatgacaggccccctgggccctctgcctccaatgcacagcccccagcagccggggtatcagcctcaacagaacgggtcctttggacccgcccgtgggccacagagtaactacggcgggccttaccctgccgctcccacttttggaagtcagcccgggccgccccagcccttgcccccaaagagattggatcccgatgctatcccatcccctatccaggtgattgaggatgaccgcaataataggggcacagagcccttcgttaccggggtgcgcgggcaggttcccccgctggtgacaactaacttcttggtgaaggatcagggaaatgctagtccacggtatatccgctgcacctcttataatattccatgtacctcggatatggccaagcaagcccaggtcccactggccgctgtgattaagccccttgcccggctgcctcctgaagaagcttcaccgtatgtggtcgaccatggggagagcggccccctcaggtgcaacagatgtaaggcctatatgtgtcctttcatgcagtttatagaggggggacgcaggttccagtgctgcttctgttcatgcatcaatgatgttcccccccagtacttccagcaccttgaccacacgggcaagagagtggacgcttatgaccgccctgaattgagtttaggctcatatgaatttctagcgacagtggactactgtaagaataacaagtttccttcgccccctgcattcattttcatgatagacgtgagttacaacgctattaggacagggctggtacgcctcctctgtgaagaacttaaaagcctgctggatttcctccctcgggaaggaggtgccgaggagagcgccattcgcgtgggcttcgtgacctacaacaaagttctgcatttctataatgtgaaatcatctctggctcagccgcagatgatggtcgtcagcgatgtggctgatatgttcgtgcctcttctagatggcttcttagttaacgttaacgagagtcgggcggtaattacctctttacttgatcagatccccgagatgtttgctgacacacgggagacagaaactgtttttgttcccgtcatccaagcgggtatggaagccctgaaagccgccgagtgcgctggcaaactgttcctgttccacacctccctgccaatcgctgaagcccctgggaaactgaagaatagggacgataggaagctcataaacacagataaggaaaagacactgtttcagccccagaccggtgcgtaccagacactcgcgaaagaatgcgtagctcaggggtgttgtgtggatctgtttctctttcccaaccaatatgtagacgttgctacactgagtgtcgtaccacagttaaccgggggcagcgtgtataaatatgccagcttccaagtggaaaatgaccaggaaaggtttttgtcagacctcaggagagatgtacaaaaagtggtagggtttgatgccgttatgcgcgtacgcaccagtacaggtattcgagccgtggattttttcggcgctttctacatgtccaatacaacagatgtagaattagcgggcctggacggtgacaagacagtgacagttgagttcaaacacgacgaccgactcaacgaggagagtggagccctgctgcaatgtgctcttctctatacaagctgcgcgggacagcgaaggctgaggatccacaatttggctctgaattgctgcacccagctcgccgatctgtacagaaactgtgagaccgacacactgattaactacatggccaagttcgcttatcgaggtgtcttgaactcacccgtaaaagccgtgagagatacattgatcacacaatgtgcccaaatactcgcctgctacaggaaaaactgtgcctctccaagttccgctggtcagctgatccttcctgagtgtatgaagttgctgcccgtttacctgaattgcgtgctgaagtctgacgtactccagcctggggcagaggtaacaactgatgacagagcgtatgtgcgccagcttgtgacttccatggatgtcacagaaactaacgtgttcttctatcctcgcctgcttcctctgaccaagtcacctgtggaatccaccaccgagccacccgcggtgcgcgcaagcgaggagcgactgagcaacggggatatttacctgcttgagaatggacttaaccttttcctgtgggtgggagccagcgtacaacaaggcgtagtccagagtttgttctccgtctcatccttctcacagatcacatctggcctaagtgttttgccagtcctggataacccgctgagcaagaaggtgcgggggttaatcgactctcttcgcgcccagagatccagatacatgaagctgaccgttgtcaaacaagaagataagatggagatgctattcaagcatttcctcgtggaggataagagcctttccgggggcgcgtcctatgtggacttcctttgccatatgcataaagagatacggcagcttctgagttag

SEQ ID NO: 260308 - DNA, 3285 bp, Artificial Sequence
  derived and/or modified sequence
atgaacgtgaaccagagcgtgccccccgtgccccccttcggccagccacagcccatttatcctggttatcaccagtcctcttatggcggacagagtggaagcaccgcccccgccatcccgtacggggcttacaacggacctgttccaggttaccaacagactcccccgcaaggaatgtcaagggcccctccgagttctggcgctccacctgcaagtaccgcacaagcaccatgtggccaagccgcctatggccagtttggacagggcgacgtgcagaatgggccatcaagcaccgtgcagatgcaacgcctgcccggatcccagccttttggatctcctttagctcctgtgggtaaccagccacctgtgttgcagccttatgggccgccccctaccagtgcacaggtcgcaacacaactcagcggcatgcagataagcggagccgtggcccccgccccaccttcaagcggtttgggcttcggtccccctacaagcctggcctcagcctcaggtagctttccaaactctggactgtatgggagttacccacagggacaagctcctcctttgtctcaggcacagggacaccccgggattcagacccctcagcgatcagcgcctagccaggccagctcctttactcccccggcgagtggcggcccgagactgccctcgatgaccggcccactccttccaggacagagtttcggcgggccttccgtttcccagcccaatcatgtgtcctcccctccccaagccctgcctcctgggactcaaatgacaggtccactcggtcctttaccccccatgcactccccccagcagcctggataccaacctcagcagaacgggagttttggaccagcgcgtggccctcagtccaactacggaggcccgtatccagctgctccaaccttcgggagccagcccggacctccacagcccctgcccccaaaaagacttgatccagacgccatcccttcccctatacaagtaattgaggacgataggaacaaccgaggcaccgaaccttttgtgactggtgtccgaggccaggtaccccccctcgtaacgacgaatttcctggtgaaggatcagggcaatgccagtcccagatacatccggtgcacatcatataacatcccctgcacctctgatatggctaagcaggcccaagttcctttagctgctgtcataaagcccctagccagactcccccccgaggaagcatccccttacgtggtggatcacggggagagtgggcctttgcggtgtaacaggtgcaaggcttacatgtgcccatttatgcagttcatagaaggaggacgaaggttccaatgctgcttttgtagctgtatcaatgacgtgccaccccagtactttcagcatctcgaccacactggcaagcgggtggacgcttacgatagaccagaactctccctcgggtcctacgagtttctagcgacagtggattattgtaagaataacaagttcccctcgccaccggccttcatattcatgattgacgtttcttacaacgccatcaggactgggctcgtgcggctgctgtgcgaggagctgaaaagtctccttgacttcctgccacgggagggaggcgcggaagaatcggccatacgtgtcggctttgtgacctacaataaggttttacacttctataacgtgaaatcatcattagcgcagccccaaatgatggtcgtgtctgacgtagcagacatgttcgtgcctctcttagacggttttcttgtcaatgtgaatgagtcgcgcgccgtcattacctccttgctcgatcaaataccagagatgttcgccgatacgagggagacagagacagtgttcgtaccagttattcaggctggcatggaggcgttgaaggctgcggaatgtgctgggaaactttttctctttcatacatcacttccgatcgctgaagctcccgggaaactcaagaatagagatgatcggaaactaattaataccgataaggagaaaacgctctttcagccacagactggtgcctatcagaccctcgctaaagaatgcgtggcacagggttgttgtgttgacctcttcttgttccccaaccagtacgttgacgtggctaccctgtccgtcgtgccacagcttacaggtggatccgtgtataagtatgcaagcttccaggtggagaatgatcaagaacggttcttgagtgatctgcgtcgagacgtccagaaagtcgtcggcttcgatgccgtgatgcgcgtccgcacaagcactggcataagggccgtcgacttcttcggagcgttttatatgagcaatactaccgacgtggaattggctgggttggacggtgacaagaccgtgaccgtggagttcaaacacgatgacagacttaatgaagagtctggagcgctgttacaatgtgccctgttgtacacctcttgcgctggccagaggcgactgcgtattcacaacctggctcttaattgctgcacccagctcgctgatctctacagaaattgtgagacagataccctgattaactacatggccaaatttgcctaccgaggggtgctgaactcccctgtgaaagccgtgcgcgatacactgataacgcagtgtgctcaaatactggcctgttataggaaaaactgcgcttctccttcatctgccggacaactgatattgccagaatgtatgaagctgctgccagtgtatcttaactgtgtgctaaaaagcgatgtgctccagccaggggctgaggtgactaccgacgacagagcgtacgtaagacagctggtgacatcaatggacgtgactgagacaaatgtgtttttctaccctcggttacttccactgaccaaaagccctgtggagagtaccaccgagccacctgctgtgcgagcatccgaggagagacttagcaacggcgacatatacctgcttgaaaacggcctgaacctgtttctgtgggtgggagcgtccgttcagcagggagtggtgcaaagcctgttctctgtgtcatctttctcacagattacctccggccttagtgtgttacccgtcctagacaacccattgtcaaaaaaagttagaggcctcatagattccttgagagctcagcggagccggtacatgaaattgaccgtcgtgaagcaagaggacaaaatggagatgctctttaagcacttcctggtagaggataagtctcttagtggcggggcttcctacgtggactttctctgtcatatgcacaaagaaatcaggcaactgctttcttag

SEQ ID NO: 260309 - DNA, 3285 bp, Artificial Sequence
  derived and/or modified sequence
atgaatgttaatcagtctgtgcccccagtacctcccttcggccagcctcagccaatctacccgggatatcaccagtcctcttacgggggtcagtccggcagcaccgctcctgctatcccttatggcgcatacaatggacccgtgcctggctaccagcagaccccaccccaaggcatgtcaagggccccacctagctccggtgctcccccagcttctaccgcccaagcgccttgcggccaggcagcttatggtcagttcgggcagggggacgttcagaatggacccagctcaacagtacagatgcaacgcctgccgggttcgcaaccctttggaagcccccttgcacccgtggggaaccaaccccctgttctgcagccatatggtcccccacccacgtcagcacaagttgctacgcagctgagcggcatgcagataagtggcgctgtggcccctgcacccccttctagcggactgggcttcggacccccaacctctctggccagtgccagcgggtcctttcccaatagcggcctctatggttcatatccccagggccaagctcctcctctgtctcaagcacagggccaccccggaatccagaccccccaacgctctgcaccatcccaggcaagctcgtttacccctccagcgtcaggcggacctagacttccttcaatgactgggcctttgctgcctggccaatcctttgggggaccaagcgtatcgcaaccaaatcatgtctcatcccctccccaagcgcttcctcccggaacccagatgactggtcccttaggtcccctgccacccatgcactcaccgcagcagcccggatatcaaccgcagcagaacgggtcatttgggcctgctcgagggccacagtctaattacgggggaccataccctgccgcacccactttcgggtcccagcccggaccgccacagcctcttcccccaaagcgcctggaccccgatgccatacccagtccaatccaggtgatcgaggacgacagaaataacagagggacggagccgttcgtcactggcgtgaggggtcaagtgccccctttggtgaccacaaacttcttggttaaggatcagggaaatgcatctcctcgctatatcaggtgcaccagctacaacatcccatgtacttcagacatggctaaacaggcccaggtccctctggctgcagttatcaagccactggcccgattaccccctgaggaggcttccccctacgtcgtggaccacggtgaatccggtcccctccgttgcaataggtgtaaagcgtacatgtgccctttcatgcagtttatagaggggggtcgaaggtttcaatgctgcttttgtagctgcattaatgacgtccccccacagtatttccagcacctcgatcacactggtaagcgtgtcgacgcttacgacagacccgagttgtctcttgggagttacgaattccttgctacagtggactattgcaagaacaacaaattcccctcacccccagcattcatttttatgattgatgtctcttacaatgctatccggacaggactcgtccggctgctgtgtgaagaactgaagagcctcctcgatttccttccgagagagggaggtgctgaagagtccgccatcagggtgggcttcgtgacttataacaaagtactccatttctacaacgtgaaatccagcctagcccagccacagatgatggttgtctcagatgtagccgacatgttcgtgccactgctcgacgggttcctggtgaatgtgaacgaatcacgtgccgtgatcacttctttgctggaccaaattcccgaaatgttcgcagacaccagagagaccgaaacagtctttgtcccagtaatccaggccggtatggaggccctgaaagccgctgaatgtgctggcaagctctttctcttccacaccagcctccctatcgcggaagcacccggtaaactcaagaatcgcgacgacaggaagctaataaatactgataaggaaaaaaccctgttccaaccgcagaccggagcatatcagactctggctaaagaatgcgtggcccaaggctgttgtgtcgatctttttctgtttcctaatcagtatgtggatgttgcaacgctgtccgttgttcctcagctgacgggtgggtccgtttacaaatacgccagcttccaggttgagaatgatcaggaacggttccttagcgacctcaggagagatgttcagaaagtcgtcggtttcgacgccgtgatgagagtgcggacctcaactggcattcgtgccgttgacttttttggcgctttctacatgtctaacaccaccgatgtggagcttgccggactcgacggggataaaacagtcactgtagagttcaagcacgacgatcgtctgaatgaggagtctggcgcactgctgcaatgtgcactgctgtacacgtcatgcgctggccagcggcgtttgcggattcataatctggcactgaattgttgcacacaactggctgacctctaccgaaactgtgaaacagatactcttatcaattacatggcaaaatttgcctatcgcggagttcttaacagtccagtaaaggccgtacgcgacactctgattacccagtgcgctcagattctggcctgttacagaaagaactgtgcatctccttcaagcgctgggcagctgatcctccccgagtgtatgaagctcctgccagtttacctgaattgcgtgctcaagtccgacgttctgcaacccggtgctgaagtgaccacagatgaccgcgcatatgtgcgccagttagtaacatccatggatgtgaccgaaacaaacgtatttttctaccctaggctgctgccccttacaaaatcccctgtggaatcaaccactgagccccctgccgttagggccagcgaggagaggctgtcaaacggcgacatctatctgctggaaaacggactgaatctattcctgtgggtcggagcatctgtccagcagggcgtggtgcagtctcttttctcagtgtcttccttttcacagattacctccggcctttcagtcttgccagtgctggacaatcccttaagcaagaaagttcgagggctcatcgacagtttgagggcgcagaggtcacgatacatgaagctcaccgtcgtcaagcaggaggacaagatggaaatgctgtttaagcattttctggtggaggataaatcactgagtgggggagcctcatacgtggatttcctgtgccatatgcacaaggagatccgtcagctcttatcctag

SEQ ID NO: 260310 - DNA, 3285 bp, Artificial Sequence
  derived and/or modified sequence
atgaatgtgaatcagtccgtccccccagtccctccatttggtcagccccagccaatctatccaggctaccaccaaagtagttatggaggccagagcggcagtacagctcccgctataccctacggggcatacaacgggccagtgcccggttatcagcaaactcctccccaaggcatgagccgggctcctcctagctctggagcccctccagcatcaacagcgcaggctccctgcggccaggctgcctatggacagtttggacaaggcgatgtccagaacgggccttcttctaccgttcagatgcaacgcctgccgggatctcagccatttggctcacccctcgctccagtaggcaatcagcctcccgtcctgcaaccttacggcccacctcctacgagcgcacaggtggccacccagctgagtggcatgcaaatatccggcgctgtggccccagcccctccctcaagcggattaggctttggccctccaacttctctcgctagtgccagtgggagctttccgaattccggcctgtacggctcgtaccctcaaggacaagccccaccattgagccaggcacaaggacaccccggtatccaaaccccgcagaggagtgcgccttcccaggccagttcttttacacccccagcatccgggggacctcgcctgccgtccatgaccggtccactgcttcccggacagagcttcggtggccctagtgtgtcccagcccaatcatgtgtcttcacctccccaagccctgccacccggaacccagatgactggccctttgggtccactgccccctatgcatagtccacagcagcccggttatcagccccagcaaaacggctccttcgggccagccagaggcccacagagcaactatggcggaccatatccagccgcacccaccttcggctcccaacctgggcctcctcaacccctcccgcctaagcggttggatcccgacgctataccatcacctatccaagttattgaagatgatcgtaataaccgcggtaccgaaccttttgtgactggcgtgcgtggccaagtgccccctctagtgactactaattttttggtgaaggatcagggtaacgctagcccacggtacattagatgtactagttataatattccctgtacttccgatatggcaaagcaagcccaagtcccactggctgccgtgattaaacctctggctagactccctcccgaggaggcatcaccttacgtagttgatcacggcgagtctgggccactacggtgtaatcgttgcaaagcttatatgtgcccttttatgcagttcattgaaggtgggaggcggttccaatgctgcttttgtagttgtatcaatgacgtcccaccacagtatttccagcacctggatcacaccggcaagcgggttgatgcctacgatcgccctgaactgtccctcggaagttacgagtttctggccacggtggactattgtaaaaacaacaaattcccatctccccctgccttcatctttatgatcgatgtgagctacaatgccatccgaaccggcttggtacggctcttgtgtgaagaacttaagagcctgctggactttctgcccagggaaggcggtgccgaggagtcagccatccgggtgggcttcgtcacgtataataaggtgctccatttttacaatgtcaaatccagcttagcacagccacaaatgatggtggtgtcagacgtggcggatatgttcgtgcctcttctcgacggcttcttggtgaatgttaacgagtctagagccgtgattacaagcctcctcgaccagatccccgagatgtttgccgatactcgagaaaccgagactgttttcgtgcccgtgatccaggcgggaatggaggccctcaaggcagcagagtgcgctgggaaacttttcctgttccatacgtccctcccaattgccgaggctccgggtaaactgaaaaaccgggacgatagaaagctcatcaacaccgacaaagagaagaccctgtttcaaccacaaacgggggcttaccagacactggccaaagaatgtgtcgcccaagggtgctgcgtggacttgttcttattcccaaaccagtatgtggatgtggctacactttcagtagtgcctcagctcacagggggatcagtatacaaatatgcttcattccaggttgagaatgaccaagaacggtttttaagtgacctccggagagacgtgcagaaggtggttgggtttgacgcggtcatgcgcgttcgcaccagtaccggaatcagggccgtggatttcttcggcgctttttatatgtctaatacaacagacgttgaacttgcagggttagacggcgacaagaccgtaacagtggaatttaagcacgatgataggctgaacgaggaatccggggcactacttcagtgcgcgctgctctacacctcttgcgcagggcaacggcgactccgcattcacaacctggcacttaactgttgcacccaactggctgacctttatcgcaactgtgagacagacaccctaatcaactacatggcgaaattcgcgtatagaggtgtcctcaatagcccagttaaggccgtgagggatacccttatcacccaatgcgcccagatcctggcctgttatagaaaaaattgcgcctcacctagctccgccggacagctgatcctgccagaatgtatgaaattgttacctgtgtacctgaattgtgtgctcaagagcgacgtactgcagcccggtgccgaggttaccacagacgacagggcctatgttaggcagctcgttaccagcatggatgttaccgagaccaatgtgttcttttatcccagactccttcctctgacgaaatcacctgtggagtcaactacagagcctccagctgtacgagcttctgaggaacggctcagcaatggggacatctacctgctggaaaatggactgaacctgttcttgtgggtcggggcttcagtccagcagggggtggtgcaatctctgttctctgtctcatcgttcagccagatcacttccggcctcagtgtcctgcccgtgcttgacaacccactttcaaagaaggtcagggggctgatagactccctccgggcacagcgctcacgctatatgaaactaactgtcgtgaagcaggaggacaaaatggagatgctgttcaagcattttttggtcgaagacaagtcactatctggaggagcctcatatgtggacttcctgtgtcacatgcataaagaaataaggcaactactgtcatag

SEQ ID NO: 260311 - DNA, 4513 bp, Artificial Sequence
  derived and/or modified sequence
gggagccttgacgttaggaacgaagtctaacctggatctggagccgggagataatctgaatgctggctggggcagaaaattactaagatcctgtggaagtgtgaggattattaaactgatcactgtctgataaggtgagatcaaattgggaatgctttcataatgaacgtcaaccagtcagttccacctgtgccaccatttgggcagccccagcccatctacccagggtatcatcagtccagctatggtgggcaatcagggtccacagcccccgccattccctatggagcctacaatggcccagtaccaggctatcagcaaacacctccccaaggtatgtcaagagccccaccttcctcgggggcacctccagcctcaacagcacaggctccttgtggccaggctgcatatggccagtttggccaaggagatgtacagaatgggccaagctccactgttcagatgcaaaggctgcctgggtctcagccatttgggtccccattggcccctgtgggcaaccagccacctgtgcttcagccctatggccctcccccgacaagtgcacaggtggctacgcagctgtctggaatgcagatcagcggtgctgtggccccagcccctccttcttcagggctgggctttggcccaccaacatcgctggcttcagcctcaggaagtttccctaactctggtctgtatggctcctatcctcagggccaggctcctccccttagccaggcccaaggtcatcctgggatccagactccccagcgatctgccccatcacaggcctccagcttcacacccccagcttcagggggtcctcggctgccttcgatgactggtccactcctgcctggacagagttttggagggccctcagtgagccagcccaaccatgtgtcttcacctcctcaagctctgccccctggcacccagatgactgggcccctgggaccactgccacctatgcactccccgcagcagccaggctatcagccccaacaaaatggttccttcggaccagcccggggccctcagtctaattatggaggcccctacccagcagcacccacctttggcagtcagcctgggcctcctcagccactgcctcctaagcgcctggaccctgatgccatcccaagccctattcaggtcattgaagatgacaggaacaaccggggtacagagccatttgttactggagtacggggccaggtgccacccttagtcactaccaacttcctggtgaaagaccaagggaatgcaagtccccgatacatccgatgtacatcctataatatcccttgcacatctgacatggctaagcaggctcaggtgcccctggcagcagtcatcaaaccgctggcaaggctgcccccagaggaggcttcaccgtatgttgtggaccatggggaatctggccctttgcgctgcaaccgctgcaaagcatacatgtgtcccttcatgcagttcattgaaggagggaggcgtttccagtgctgtttttgcagctgtatcaatgatgttcccccccagtattttcagcacctggatcataccggcaaacgtgtggatgcttatgaccgccctgagctatccctgggctcttatgaattcttggccactgtagattactgcaagaacaataagttccccagccctcctgcctttatcttcatgattgacgtctcctacaatgccatcaggactggtcttgttaggctcctctgtgaggagctcaagtcactgttagactttctacctagggagggtggggcagaagagtcagcaatccgcgttggctttgtcacctacaataaggtgctccacttctataatgtgaagagctcattggcccagccacagatgatggttgtgtctgatgtggctgacatgtttgtgccactgctggatggcttcctggtcaacgtcaatgagtctcgggcagttatcaccagcttattggatcagattccagaaatgtttgcagacacaagggaaacagagacagtatttgtaccagttatccaggctggaatggaggctctgaaggctgctgagtgtgcagggaagctctttctattccatacatccctgcccattgcagaggccccagggaaactgaagaacagagatgacaggaagctgatcaatacagacaaggagaagactctgttccagcctcagacaggtgcctatcagaccctggccaaagagtgtgtggcccaaggctgctgtgtagatctctttctcttccctaaccagtatgtggatgtggccacactctctgttgtgccccagctcactggtggctctgtctacaaatatgcttcctttcaggtggagaacgaccaggagcggttcctgagtgacctgcgtcgtgatgtccagaaggttgttggctttgatgctgtgatgcgggtccggacaagcactggtatccgtgctgtagatttctttggagctttctacatgagcaacacgacagatgtggagctggctgggctagatggggacaaaacagtgactgtggagttcaagcatgacgatcggctcaatgaagagagcggagctctcctgcagtgtgccctgctttacaccagctgtgcagggcagcgtcggctccgcatccataatctggccctgaactgctgcacccagctggctgatctatatcgaaactgtgagactgacacgctcatcaactacatggccaagtttgcatatcggggagtcctgaatagccctgtgaaggctgttcgtgacacgctcatcacccagtgtgcccagatcctggcctgttacagaaagaactgtgctagcccctcctctgcaggacagttgatccttcctgagtgcatgaagctactcccagtttacctgaactgtgtgttgaagagtgatgtcctgcagcctggagctgaagtcactactgatgaccgtgcctatgtccgacagctagttacctccatggatgtgactgagaccaatgtcttcttctaccctcggctcttacctttgacaaagtctcccgttgagagtactaccgaaccaccagcagttcgagcctctgaagagcgtctaagcaatggggatatatatttactggagaatgggctcaacctcttcctctgggtgggagcaagcgtccaacagggtgttgtccagagccttttcagcgtctcctccttcagtcagatcaccagtggtttgagtgttctgccagttctggataatccactgtccaagaaggttcgaggcctcattgatagcttacgggcacagagatcccggtacatgaagcttaccgtggtgaaacaggaagacaagatggagatgctgttcaagcacttcctggtggaagacaagagtctgagtgggggagcatcttatgtggactttctctgtcatatgcacaaggagattcggcagctactgagctaaagcaagtgggtaaatggcatagggcccaggctagcttccagaaagcaccccaggatgtcagagaaattgggacagtaacatatcttatgtaagctgacctcagtctctctggggggagggggagatataaggagacaccttctttctgggctcaagtatcctgccactctgtcatgtcctgctgatggaaggtgcccctgttccctcattctaccctctttttcctgctaatcctgtcataatgaatgtagcttctcagttcactgtatatgattcggtattgggggtttggaggcacccagaccctggcaatattatgtgtccctttggaccagtctcccaagaggagaggggcaggcaggaaagagtggggatcctaaggttactacagggggctcagtgtcatccacaacttcctatattagggataaaacatataggtgcacaagagctggggtatagcccataggtggtggagagaaaagtggtcagtccttcttgggcctggaggttagcagtcaagtttctctgctttcactgctcgctcgctctctcctgcaatgattgatgatcactccgtggatagagaggcacactgtcagaggtgaccggagaactgagttgcaaaatatattaagatctggtagaggtaccagcttcctttccagctggagaggccccaacactggatggttctgtagggagcctagggagcctggtcatcaacttgcaatacctcacagagccagttcacatcccactctgagctcccacgagaaacactgcttctccaggcccggggttgttggggagagaggcagaggcagctggagcgccgttctctcctgctgggacaccgcttgggctttggtattgactgagtggctgacagttatcttccaaccccaactggcttgggggcaggacaagggctaggcttgatggtggccaggcttgcctgctccccacctgggatgcccctgctctggacctctcatttctcttcattggtttatttttcaatgcatctttaatttgtaaagaaataaaataaattaagatgtaa

SEQ ID NO: 260312 - DNA, 4433 bp, Artificial Sequence
  derived and/or modified sequence
ggagcctgggagccttgacgttaggaacgaagtctaacctggatctggagccgggtgagatcaaattgggaatgctttcataatgaacgtcaaccagtcagttccacctgtgccaccatttgggcagccccagcccatctacccagggtatcatcagtccagctatggtgggcaatcagggtccacagcccccgccattccctatggagcctacaatggcccagtaccaggctatcagcaaacacctccccaaggtatgtcaagagccccaccttcctcgggggcacctccagcctcaacagcacaggctccttgtggccaggctgcatatggccagtttggccaaggagatgtacagaatgggccaagctccactgttcagatgcaaaggctgcctgggtctcagccatttgggtccccattggcccctgtgggcaaccagccacctgtgcttcagccctatggccctcccccgacaagtgcacaggtggctacgcagctgtctggaatgcagatcagcggtgctgtggccccagcccctccttcttcagggctgggctttggcccaccaacatcgctggcttcagcctcaggaagtttccctaactctggtctgtatggctcctatcctcagggccaggctcctccccttagccaggcccaaggtcatcctgggatccagactccccagcgatctgccccatcacaggcctccagcttcacacccccagcttcagggggtcctcggctgccttcgatgactggtccactcctgcctggacagagttttggagggccctcagtgagccagcccaaccatgtgtcttcacctcctcaagctctgccccctggcacccagatgactgggcccctgggaccactgccacctatgcactccccgcagcagccaggctatcagccccaacaaaatggttccttcggaccagcccggggccctcagtctaattatggaggcccctacccagcagcacccacctttggcagtcagcctgggcctcctcagccactgcctcctaagcgcctggaccctgatgccatcccaagccctattcaggtcattgaagatgacaggaacaaccggggtacagagccatttgttactggagtacggggccaggtgccacccttagtcactaccaacttcctggtgaaagaccaagggaatgcaagtccccgatacatccgatgtacatcctataatatcccttgcacatctgacatggctaagcaggctcaggtgcccctggcagcagtcatcaaaccgctggcaaggctgcccccagaggaggcttcaccgtatgttgtggaccatggggaatctggccctttgcgctgcaaccgctgcaaagcatacatgtgtcccttcatgcagttcattgaaggagggaggcgtttccagtgctgtttttgcagctgtatcaatgatgttcccccccagtattttcagcacctggatcataccggcaaacgtgtggatgcttatgaccgccctgagctatccctgggctcttatgaattcttggccactgtagattactgcaagaacaataagttccccagccctcctgcctttatcttcatgattgacgtctcctacaatgccatcaggactggtcttgttaggctcctctgtgaggagctcaagtcactgttagactttctacctagggagggtggggcagaagagtcagcaatccgcgttggctttgtcacctacaataaggtgctccacttctataatgtgaagagctcattggcccagccacagatgatggttgtgtctgatgtggctgacatgtttgtgccactgctggatggcttcctggtcaacgtcaatgagtctcgggcagttatcaccagcttattggatcagattccagaaatgtttgcagacacaagggaaacagagacagtatttgtaccagttatccaggctggaatggaggctctgaaggctgctgagtgtgcagggaagctctttctattccatacatccctgcccattgcagaggccccagggaaactgaagaacagagatgacaggaagctgatcaatacagacaaggagaagactctgttccagcctcagacaggtgcctatcagaccctggccaaagagtgtgtggcccaaggctgctgtgtagatctctttctcttccctaaccagtatgtggatgtggccacactctctgttgtgccccagctcactggtggctctgtctacaaatatgcttcctttcaggtggagaacgaccaggagcggttcctgagtgacctgcgtcgtgatgtccagaaggttgttggctttgatgctgtgatgcgggtccggacaagcactggtatccgtgctgtagatttctttggagctttctacatgagcaacacgacagatgtggagctggctgggctagatggggacaaaacagtgactgtggagttcaagcatgacgatcggctcaatgaagagagcggagctctcctgcagtgtgccctgctttacaccagctgtgcagggcagcgtcggctccgcatccataatctggccctgaactgctgcacccagctggctgatctatatcgaaactgtgagactgacacgctcatcaactacatggccaagtttgcatatcggggagtcctgaatagccctgtgaaggctgttcgtgacacgctcatcacccagtgtgcccagatcctggcctgttacagaaagaactgtgctagcccctcctctgcaggacagttgatccttcctgagtgcatgaagctactcccagtttacctgaactgtgtgttgaagagtgatgtcctgcagcctggagctgaagtcactactgatgaccgtgcctatgtccgacagctagttacctccatggatgtgactgagaccaatgtcttcttctaccctcggctcttacctttgacaaagtctcccgttgagagtactaccgaaccaccagcagttcgagcctctgaagagcgtctaagcaatggggatatatatttactggagaatgggctcaacctcttcctctgggtgggagcaagcgtccaacagggtgttgtccagagccttttcagcgtctcctccttcagtcagatcaccagtggtttgagtgttctgccagttctggataatccactgtccaagaaggttcgaggcctcattgatagcttacgggcacagagatcccggtacatgaagcttaccgtggtgaaacaggaagacaagatggagatgctgttcaagcacttcctggtggaagacaagagtctgagtgggggagcatcttatgtggactttctctgtcatatgcacaaggagattcggcagctactgagctaaagcaagtgggtaaatggcatagggcccaggctagcttccagaaagcaccccaggatgtcagagaaattgggacagtaacatatcttatgtaagctgacctcagtctctctggggggagggggagatataaggagacaccttctttctgggctcaagtatcctgccactctgtcatgtcctgctgatggaaggtgcccctgttccctcattctaccctctttttcctgctaatcctgtcataatgaatgtagcttctcagttcactgtatatgattcggtattgggggtttggaggcacccagaccctggcaatattatgtgtccctttggaccagtctcccaagaggagaggggcaggcaggaaagagtggggatcctaaggttactacagggggctcagtgtcatccacaacttcctatattagggataaaacatataggtgcacaagagctggggtatagcccataggtggtggagagaaaagtggtcagtccttcttgggcctggaggttagcagtcaagtttctctgctttcactgctcgctcgctctctcctgcaatgattgatgatcactccgtggatagagaggcacactgtcagaggtgaccggagaactgagttgcaaaatatattaagatctggtagaggtaccagcttcctttccagctggagaggccccaacactggatggttctgtagggagcctagggagcctggtcatcaacttgcaatacctcacagagccagttcacatcccactctgagctcccacgagaaacactgcttctccaggcccggggttgttggggagagaggcagaggcagctggagcgccgttctctcctgctgggacaccgcttgggctttggtattgactgagtggctgacagttatcttccaaccccaactggcttgggggcaggacaagggctaggcttgatggtggccaggcttgcctgctccccacctgggatgcccctgctctggacctctcatttctcttcattggtttatttttcaatgcatctttaatttgtaaagaaataaaataaattaagatgtaa

SEQ ID NO: 260313 - protein, 1095 aa, Artificial Sequence
  derived and/or modified sequence
MGNAIEKQKPLKRSHLYPWKQDSQRSHLSSFTMKLMDKFHSPKIKRTPSKKGKPAEVSVKIPEKPVNKEATDRFLPEGYPLPLDLEQQAVEFMSTSAVASRSQRQKNLSWLEEKEKEVVSALRYFKTIVDKMAIDKKVLEMLPGSASKVLEAILPLVQNDPRIQHSSALSSCYSRVYQSLANLIRWSDQVMLEGVNSEDKEMVTTVKGVIKAVLDGVKELVRLTIEKQGRPSPTSPVKPSSPASKPDGPAELPLTDREVEILNKTTGMSQSTELLPDATDEEVAPPKPPLPGIRVVDNSPPPALPPKKRQSAPSPTRVAVVAPMSRATSGSSLPVGINRQDFDVDCYAQRRLSGGSHSYGGESPRLSPCSSIGKLSKSDEQLSSLDRDSGQCSRNTSCETLDHYDPDYEFLQQDLSNADQIPQQTAWNLSPLPESLGESGSPFLGPPFQLPLGGHPQPDGPLAPGQQTDTPPALPEKKRRSAASQTADGSGCRVSYERHPSQYDNISGEDLQSTAPIPSVPYAPFAAILPFQHGGSSAPVEFVGDFTAPESTGDPEKPPPLPEKKNKHMLAYMQLLEDYSEPQPSMFYQTPQNEHIYQQKNKLLMEVYGFSDSFSGVDSVQELAPPPALPPKQRQLEPPAGKDGHPRDPSAVSGVPGKDSRDGSERAPKSPDALESAQSEEEVDELSLIDHNEIMSRLTLKQEGDDGPDVRGGSGDILLVHATETDRKDLVLYCEAFLTTYRTFISPEELIKKLQYRYEKFSPFADTFKKRVSKNTFFVLVRVVDELCLVELTEEILKLLMELVFRLVCNGELSLARVLRKNILDKVDQKKLLRCATSSQPLAARGVAARPGTLHDFHSHEIAEQLTLLDAELFYKIEIPEVLLWAKEQNEEKSPNLTQFTEHFNNMSYWVRSIIMLQEKAQDRERLLLKFIKIMKHLRKLNNFNSYLAILSALDSAPIRRLEWQKQTSEGLAEYCTLIDSSSSFRAYRAALSEVEPPCIPYLGLILQDLTFVHLGNPDYIDGKVNFSKRWQQFNILDSMRCFQQAHYDMRRNDDIINFFNDFSDHLAEEALWELSLKIKPRNITRRKTDREEKT

SEQ ID NO: 260314 - protein, 1057 aa, Artificial Sequence
  derived and/or modified sequence
MGNAIEKQKPLKRSHLYPWKQDSQRSHLSSFTMKLMDKFHSPKIKRTPSKKGKPAEVSVKIPEKPVNKNLSWLEEKEKEVVSALRYFKTIVDKMAIDKKVLEMLPGSASKVLEAILPLVQNDPRIQHSSALSSCYSRVYQSLANLIRWSDQVMLEGVNSEDKEMVTTVKGVIKAVLDGVKELVRLTIEKQGRPSPTSPVKPSSPASKPDGPAELPLTDREVEILNKTTGMSQSTELLPDATDEEVAPPKPPLPGIRVVDNSPPPALPPKKRQSAPSPTRVAVVAPMSRATSGSSLPVGINRQDFDVDCYAQRRLSGGSHSYGGESPRLSPCSSIGKLSKSDEQLSSLDRDSGQCSRNTSCETLDHYDPDYEFLQQDLSNADQIPQQTAWNLSPLPESLGESGSPFLGPPFQLPLGGHPQPDGPLAPGQQTDTPPALPEKKRRSAASQTADGSGCRVSYERHPSQYDNISGEDLQSTAPIPSVPYAPFAAILPFQHGGSSAPVEFVGDFTAPESTGDPEKPPPLPEKKNKHMLAYMQLLEDYSEPQPSMFYQTPQNEHIYQQKNKLLMEVYGFSDSFSGVDSVQELAPPPALPPKQRQLEPPAGKDGHPRDPSAVSGVPGKDSRDGSERAPKSPDALESAQSEEEVDELSLIDHNEIMSRLTLKQEGDDGPDVRGGSGDILLVHATETDRKDLVLYCEAFLTTYRTFISPEELIKKLQYRYEKFSPFADTFKKRVSKNTFFVLVRVVDELCLVELTEEILKLLMELVFRLVCNGELSLARVLRKNILDKVDQKKLLRCATSSQPLAARGVAARPGTLHDFHSHEIAEQLTLLDAELFYKIEIPEVLLWAKEQNEEKSPNLTQFTEHFNNMSYWVRSIIMLQEKAQDRERLLLKFIKIMKHLRKLNNFNSYLAILSALDSAPIRRLEWQKQTSEGLAEYCTLIDSSSSFRAYRAALSEVEPPCIPYLGLILQDLTFVHLGNPDYIDGKVNFSKRWQQFNILDSMRCFQQAHYDMRRNDDIINFFNDFSDHLAEEALWELSLKIKPRNITRRKTDREEKT

SEQ ID NO: 260315 - protein, 193 aa, Artificial Sequence
  derived and/or modified sequence
MGNAIEKQKPLKRSHLYPWKQDSQRSHLSSFTMKLMDKFHSPKIKRTPSKKGKPAEVSVKIPEKPVNKEATDRFLPEGYPLPLDLEQQAVEFMSTSAVASRSQRQKNLSWLEEKEKEVVSALRYFKTIVDKMAIDKKVLEMLPGSASKVLEAILPLVQNDPRIQHSSALSSCYSRVYQSLANLIRWSDQVMLE

SEQ ID NO: 260316 - DNA, 3288 bp, Artificial Sequence
  derived and/or modified sequence
atgggcaacgccatcgagaagcagaagcccctgaagagaagccacctgtacccctggaagcaggacagccagagaagccacctgagcagcttcaccatgaagctgatggacaagttccacagccccaagatcaagagaacccccagcaagaagggcaagcccgccgaggtgagcgtgaagatccccgagaagcccgtgaacaaggaggccaccgacagattcctgcccgagggctaccccctgcccctggacctggagcagcaggccgtggagttcatgagcaccagcgccgtggccagcagaagccagagacagaagaacctgagctggctggaggagaaggagaaggaggtggtgagcgccctgagatacttcaagaccatcgtggacaagatggccatcgacaagaaggtgctggagatgctgcccggcagcgccagcaaggtgctggaggccatcctgcccctggtgcagaacgaccccagaatccagcacagcagcgccctgagcagctgctacagcagagtgtaccagagcctggccaacctgatcagatggagcgaccaggtgatgctggagggcgtgaacagcgaggacaaggagatggtgaccaccgtgaagggcgtgatcaaggccgtgctggacggcgtgaaggagctggtgagactgaccatcgagaagcagggcagacccagccccaccagccccgtgaagcccagcagccccgccagcaagcccgacggccccgccgagctgcccctgaccgacagagaggtggagatcctgaacaagaccaccggcatgagccagagcaccgagctgctgcccgacgccaccgacgaggaggtggccccccccaagccccccctgcccggcatcagagtggtggacaacagccccccccccgccctgccccccaagaagagacagagcgcccccagccccaccagagtggccgtggtggcccccatgagcagagccaccagcggcagcagcctgcccgtgggcatcaacagacaggacttcgacgtggactgctacgcccagagaagactgagcggcggcagccacagctacggcggcgagagccccagactgagcccctgcagcagcatcggcaagctgagcaagagcgacgagcagctgagcagcctggacagagacagcggccagtgcagcagaaacaccagctgcgagaccctggaccactacgaccccgactacgagttcctgcagcaggacctgagcaacgccgaccagatcccccagcagaccgcctggaacctgagccccctgcccgagagcctgggcgagagcggcagccccttcctgggcccccccttccagctgcccctgggcggccacccccagcccgacggccccctggcccccggccagcagaccgacaccccccccgccctgcccgagaagaagagaagaagcgccgccagccagaccgccgacggcagcggctgcagagtgagctacgagagacaccccagccagtacgacaacatcagcggcgaggacctgcagagcaccgcccccatccccagcgtgccctacgcccccttcgccgccatcctgcccttccagcacggcggcagcagcgcccccgtggagttcgtgggcgacttcaccgcccccgagagcaccggcgaccccgagaagcccccccccctgcccgagaagaagaacaagcacatgctggcctacatgcagctgctggaggactacagcgagccccagcccagcatgttctaccagaccccccagaacgagcacatctaccagcagaagaacaagctgctgatggaggtgtacggcttcagcgacagcttcagcggcgtggacagcgtgcaggagctggcccccccccccgccctgccccccaagcagagacagctggagccccccgccggcaaggacggccaccccagagaccccagcgccgtgagcggcgtgcccggcaaggacagcagagacggcagcgagagagcccccaagagccccgacgccctggagagcgcccagagcgaggaggaggtggacgagctgagcctgatcgaccacaacgagatcatgagcagactgaccctgaagcaggagggcgacgacggccccgacgtgagaggcggcagcggcgacatcctgctggtgcacgccaccgagaccgacagaaaggacctggtgctgtactgcgaggccttcctgaccacctacagaaccttcatcagccccgaggagctgatcaagaagctgcagtacagatacgagaagttcagccccttcgccgacaccttcaagaagagagtgagcaagaacaccttcttcgtgctggtgagagtggtggacgagctgtgcctggtggagctgaccgaggagatcctgaagctgctgatggagctggtgttcagactggtgtgcaacggcgagctgagcctggccagagtgctgagaaagaacatcctggacaaggtggaccagaagaagctgctgagatgcgccaccagcagccagcccctggccgccagaggcgtggccgccagacccggcaccctgcacgacttccacagccacgagatcgccgagcagctgaccctgctggacgccgagctgttctacaagatcgagatccccgaggtgctgctgtgggccaaggagcagaacgaggagaagagccccaacctgacccagttcaccgagcacttcaacaacatgagctactgggtgagaagcatcatcatgctgcaggagaaggcccaggacagagagagactgctgctgaagttcatcaagatcatgaagcacctgagaaagctgaacaacttcaacagctacctggccatcctgagcgccctggacagcgcccccatcagaagactggagtggcagaagcagaccagcgagggcctggccgagtactgcaccctgatcgacagcagcagcagcttcagagcctacagagccgccctgagcgaggtggagcccccctgcatcccctacctgggcctgatcctgcaggacctgaccttcgtgcacctgggcaaccccgactacatcgacggcaaggtgaacttcagcaagagatggcagcagttcaacatcctggacagcatgagatgcttccagcaggcccactacgacatgagaagaaacgacgacatcatcaacttcttcaacgacttcagcgaccacctggccgaggaggccctgtgggagctgagcctgaagatcaagcccagaaacatcaccagaagaaagaccgacagagaggagaagacctag

SEQ ID NO: 260317 - DNA, 3174 bp, Artificial Sequence
  derived and/or modified sequence
atgggcaacgccatcgagaagcagaagcccctgaagagaagccacctgtacccctggaagcaggacagccagagaagccacctgagcagcttcaccatgaagctgatggacaagttccacagccccaagatcaagagaacccccagcaagaagggcaagcccgccgaggtgagcgtgaagatccccgagaagcccgtgaacaagaacctgagctggctggaggagaaggagaaggaggtggtgagcgccctgagatacttcaagaccatcgtggacaagatggccatcgacaagaaggtgctggagatgctgcccggcagcgccagcaaggtgctggaggccatcctgcccctggtgcagaacgaccccagaatccagcacagcagcgccctgagcagctgctacagcagagtgtaccagagcctggccaacctgatcagatggagcgaccaggtgatgctggagggcgtgaacagcgaggacaaggagatggtgaccaccgtgaagggcgtgatcaaggccgtgctggacggcgtgaaggagctggtgagactgaccatcgagaagcagggcagacccagccccaccagccccgtgaagcccagcagccccgccagcaagcccgacggccccgccgagctgcccctgaccgacagagaggtggagatcctgaacaagaccaccggcatgagccagagcaccgagctgctgcccgacgccaccgacgaggaggtggccccccccaagccccccctgcccggcatcagagtggtggacaacagccccccccccgccctgccccccaagaagagacagagcgcccccagccccaccagagtggccgtggtggcccccatgagcagagccaccagcggcagcagcctgcccgtgggcatcaacagacaggacttcgacgtggactgctacgcccagagaagactgagcggcggcagccacagctacggcggcgagagccccagactgagcccctgcagcagcatcggcaagctgagcaagagcgacgagcagctgagcagcctggacagagacagcggccagtgcagcagaaacaccagctgcgagaccctggaccactacgaccccgactacgagttcctgcagcaggacctgagcaacgccgaccagatcccccagcagaccgcctggaacctgagccccctgcccgagagcctgggcgagagcggcagccccttcctgggcccccccttccagctgcccctgggcggccacccccagcccgacggccccctggcccccggccagcagaccgacaccccccccgccctgcccgagaagaagagaagaagcgccgccagccagaccgccgacggcagcggctgcagagtgagctacgagagacaccccagccagtacgacaacatcagcggcgaggacctgcagagcaccgcccccatccccagcgtgccctacgcccccttcgccgccatcctgcccttccagcacggcggcagcagcgcccccgtggagttcgtgggcgacttcaccgcccccgagagcaccggcgaccccgagaagcccccccccctgcccgagaagaagaacaagcacatgctggcctacatgcagctgctggaggactacagcgagccccagcccagcatgttctaccagaccccccagaacgagcacatctaccagcagaagaacaagctgctgatggaggtgtacggcttcagcgacagcttcagcggcgtggacagcgtgcaggagctggcccccccccccgccctgccccccaagcagagacagctggagccccccgccggcaaggacggccaccccagagaccccagcgccgtgagcggcgtgcccggcaaggacagcagagacggcagcgagagagcccccaagagccccgacgccctggagagcgcccagagcgaggaggaggtggacgagctgagcctgatcgaccacaacgagatcatgagcagactgaccctgaagcaggagggcgacgacggccccgacgtgagaggcggcagcggcgacatcctgctggtgcacgccaccgagaccgacagaaaggacctggtgctgtactgcgaggccttcctgaccacctacagaaccttcatcagccccgaggagctgatcaagaagctgcagtacagatacgagaagttcagccccttcgccgacaccttcaagaagagagtgagcaagaacaccttcttcgtgctggtgagagtggtggacgagctgtgcctggtggagctgaccgaggagatcctgaagctgctgatggagctggtgttcagactggtgtgcaacggcgagctgagcctggccagagtgctgagaaagaacatcctggacaaggtggaccagaagaagctgctgagatgcgccaccagcagccagcccctggccgccagaggcgtggccgccagacccggcaccctgcacgacttccacagccacgagatcgccgagcagctgaccctgctggacgccgagctgttctacaagatcgagatccccgaggtgctgctgtgggccaaggagcagaacgaggagaagagccccaacctgacccagttcaccgagcacttcaacaacatgagctactgggtgagaagcatcatcatgctgcaggagaaggcccaggacagagagagactgctgctgaagttcatcaagatcatgaagcacctgagaaagctgaacaacttcaacagctacctggccatcctgagcgccctggacagcgcccccatcagaagactggagtggcagaagcagaccagcgagggcctggccgagtactgcaccctgatcgacagcagcagcagcttcagagcctacagagccgccctgagcgaggtggagcccccctgcatcccctacctgggcctgatcctgcaggacctgaccttcgtgcacctgggcaaccccgactacatcgacggcaaggtgaacttcagcaagagatggcagcagttcaacatcctggacagcatgagatgcttccagcaggcccactacgacatgagaagaaacgacgacatcatcaacttcttcaacgacttcagcgaccacctggccgaggaggccctgtgggagctgagcctgaagatcaagcccagaaacatcaccagaagaaagaccgacagagaggagaagacctag

SEQ ID NO: 260318 - DNA, 582 bp, Artificial Sequence
  derived and/or modified sequence
atgggcaacgccatcgagaagcagaagcccctgaagagaagccacctgtacccctggaagcaggacagccagagaagccacctgagcagcttcaccatgaagctgatggacaagttccacagccccaagatcaagagaacccccagcaagaagggcaagcccgccgaggtgagcgtgaagatccccgagaagcccgtgaacaaggaggccaccgacagattcctgcccgagggctaccccctgcccctggacctggagcagcaggccgtggagttcatgagcaccagcgccgtggccagcagaagccagagacagaagaacctgagctggctggaggagaaggagaaggaggtggtgagcgccctgagatacttcaagaccatcgtggacaagatggccatcgacaagaaggtgctggagatgctgcccggcagcgccagcaaggtgctggaggccatcctgcccctggtgcagaacgaccccagaatccagcacagcagcgccctgagcagctgctacagcagagtgtaccagagcctggccaacctgatcagatggagcgaccaggtgatgctggagtag

SEQ ID NO: 260319 - DNA, 3288 bp, Artificial Sequence
  derived and/or modified sequence
atgggaaatgccatcgaaaagcagaagcccctcaagcgaagtcatctgtacccctggaagcaggactcccagcgaagtcatctgagttcttttactatgaaattaatggacaagtttcacagccccaagatcaaacggaccccctcaaaaaaggggaaaccggccgaagtctcagtaaagatcccagaaaagcccgtcaacaaggaggctacagatcgattcctcccagagggctatccgctgccactggacctggagcagcaggcagtggagtttatgtctacttccgccgttgcttccagaagtcagcggcagaagaatctgagctggctggaggagaaagagaaggaggtggtcagcgcactcaggtatttcaagactattgtcgacaaaatggccatagacaagaaggtccttgagatgctgcctggctccgctagtaaggtgctggaggctattctgccacttgtacaaaacgaccctcgaatccagcacagttccgccctctcttcatgctattccagagtttatcaatctctcgctaacctgattcgttggtccgaccaggtgatgctggagggtgtcaacagcgaggacaaggaaatggtaacgaccgttaagggagtcatcaaagctgtattggatggagttaaagagctcgttaggctgacaattgaaaagcaagggagaccctcacctacaagcccggtcaaacctagtagcccggcctctaaacctgatggacctgccgagcttccgttgaccgatcgggaggtggagatattgaataaaaccacaggcatgtctcagtccactgaattattgcctgatgccacggatgaggaggtggccccacccaaaccccccctgcctgggatcagggtggtcgacaactcgcccccacccgccttgccacctaagaaaagacagtctgctccgtctcccactagagttgctgtcgtggctccaatgagccgcgcaacttccgggagtagcttgcccgttggaatcaatcgacaggacttcgacgtggattgctatgctcaacgaagactttcaggtggaagccattcgtacggcggcgagtccccgcggcttagcccatgcagctccattgggaagctgagcaagtccgatgagcaactcagcagtctagaccgggacagtggccagtgttcacggaataccagctgtgagaccttagatcactacgaccccgattacgaattcctgcagcaggatttatccaacgcagaccagatcccccagcagaccgcgtggaacctttctccccttcctgaaagtttaggtgaaagcggaagtccattcctaggcccaccgtttcagctgccactgggcggtcacccccaaccagatgggcccttggcccctggacagcagaccgatacacctccagccctccctgagaagaagagacgttcagccgccagccagaccgcagacggatctgggtgtagagtctcatacgagagacacccatctcagtatgataacatctccggcgaggatctgcagagcaccgctcccatcccgtccgttccatacgcccccttcgccgccattctgcccttccagcacggaggaagctctgcacccgtcgagttcgtgggcgacttcaccgcccccgagtctaccggtgatcctgagaaacccccaccgctcccagagaaaaaaaataaacacatgctagcctatatgcagctcttggaggattatagtgagcctcagccaagcatgttctatcagacccctcagaatgagcacatttatcagcagaagaataaactgctgatggaggtatacggcttctccgattcgttttccggagtggactccgtgcaggagttggcgccccctccagcactcccacctaagcaacgacaactggaacctccagccggtaaggacgggcaccctagagatccttccgccgtgtccggggtccctgggaaagatagtcgggacgggtctgagcgagcacctaagagtccggacgctctcgagtctgcccagagtgaggaggaagtcgacgaactgagcctgattgatcataacgagataatgtcccgtcttacactcaaacaggagggtgatgacggccccgatgtccgaggggggtccggggacattctgctcgtccatgctacggagaccgacaggaaggacctggtcctatattgcgaggcatttctgacaacatataggacattcatttcacctgaggaattgattaagaaacttcaataccgctacgagaaattttccccattcgccgacacatttaaaaagcgagtctcaaagaacaccttcttcgtgttggtgcgagtggtcgatgagttgtgtttagtagagctaacagaggaaatcctgaaacttctaatggagctggtattccggctggtgtgcaatggcgaactgtctctggcacgtgtcctcagaaagaacatcctggataaggtggaccagaagaaacttctgcgatgtgctacgtcctctcagcctctggctgcacgcggcgttgctgcccgaccggggacactgcatgatttccactctcacgagattgccgaacagcttaccctgttggatgcggagctgttctacaagattgaaatccccgaagtgctgctgtgggccaaggaacagaatgaagagaaaagccccaatcttacgcagtttactgagcacttcaacaatatgagctattgggtccggtctattatcatgctccaggaaaaagcccaggaccgagaaaggctgctactcaaattcattaagatcatgaaacatctccggaagctgaacaattttaattcctacctggcgatcctgagcgctctcgattcagcgcccattcggaggttggagtggcagaaacagacctccgagggtctggccgagtattgcacattgatcgactcttcctcctctttcagggcctacagggcagctctctctgaggtggaacccccttgtattccctacttaggactgattctgcaggatctgacttttgttcacctgggtaaccccgactacatagatggaaaggtcaacttcagcaagagatggcagcagttcaatatcctcgattccatgaggtgctttcagcaggcccactacgacatgcgaagaaacgatgatatcattaacttcttcaatgacttctctgatcacttagcggaggaggctttgtgggagctgagtctgaagatcaaacccaggaatattaccagacgaaaaaccgatcgcgaagagaagacttag

SEQ ID NO: 260320 - DNA, 3174 bp, Artificial Sequence
  derived and/or modified sequence
atgggcaacgcaatcgaaaaacagaagcccctcaaacgcagtcacctctacccttggaaacaggacagtcagcggtcccatctgtcttccttcactatgaaactgatggacaagttccatagtccaaagatcaagcgaaccccatccaaaaagggcaaaccggcggaggtttctgtcaagattcctgagaagcccgtgaataaaaacctgtcgtggctggaggagaaggaaaaagaagtagtgtccgcactgcgctactttaagaccattgttgacaagatggctattgataagaaggtgcttgagatgttacctggaagcgcaagtaaagtgcttgaagccatcctccccctggtccagaatgacccccggatacagcactcctccgcactctcttcatgttactcccgggtgtaccaatctctggccaacttaattagatggagcgaccaggtgatgctggaaggggtgaatagcgaggataaggagatggtgacaacagtaaagggcgttatcaaagccgtcctggatggtgtcaaagagctggtcaggctgacaattgagaagcaggggcgcccctctccaacatcaccagtgaagcccagttctcctgcttccaaacccgacggtcctgcagaactccctttgacagaccgcgaggtggagatactgaataagaccaccggtatgtctcaaagtacagaactcctgccagatgccacagacgaggaggtagcacctccaaaaccccccctacctggaatccgcgtcgtggacaactctccccctcccgcccttccgcctaaaaagaggcagtctgctccctctcccacacgtgtggcagtcgtagcaccaatgtcccgcgcgacatcaggcagctcacttcctgtcggtattaaccgtcaggacttcgacgtagattgctacgcccaaaggagattgagtggaggaagccactcatacggaggcgagtcacccaggctaagtccatgctccagcattggcaagctgagcaagagcgatgaacagctgtcaagtcttgacagagacagcggacagtgcagcagaaatacatcctgtgagacccttgaccactatgatcctgactacgaatttctgcagcaggatctgagcaacgcagaccagataccgcagcaaacagcttggaacctgtcaccacttccagaaagcctgggtgaaagcgggtctccatttttaggtccaccatttcagctccccctaggcgggcacccccagccggacggccctttggcccctggccagcaaaccgatactcctcctgccttgcccgaaaagaagcggcgaagcgccgcttcccagacagccgacggatccggctgccgggtgtcttacgagcggcatcctagtcagtatgacaacatttccggcgaggatttacaaagtacagctccaataccatcagtgccctatgcgccgtttgctgccattctgcctttccagcatggcgggtcatccgcccccgttgagtttgtgggcgattttaccgcacctgaaagtactggggaccctgagaagccaccccctctgcccgagaaaaaaaacaaacacatgcttgcgtacatgcaactcctcgaagactatagcgagccgcagccgtcgatgttctatcagaccccccagaatgagcacatctaccagcagaagaataaactgctcatggaggtgtatgggtttagcgatagcttctctggagtcgatagcgtgcaggagctcgccccgccgcccgctttgcctcccaaacaaaggcagctggagcctccggccggcaaagatggacatccgcgcgatccgtcggccgtttcaggtgtgcctggaaaggatagccgggatgggtctgaaagagccccaaaatctcctgacgcactcgagagcgcacagtccgaagaagaggttgacgagttaagtctcatcgaccacaatgagattatgtctcgtctgactctgaagcaggaaggtgatgacggcccagatgtgcgcggggggtccggagacatcctgttggtgcatgccaccgagaccgatcgtaaggacctggtgttatactgtgaggcgtttttgacaacctataggacttttatttctccagaggaacttattaagaagctccagtacagatatgagaaattctctccgttcgccgacaccttcaaaaagcgggtctctaaaaatacattttttgtgctggtgagggtggtggatgagctgtgcttggttgaattaaccgaagagatcttgaagctgctaatggagctggtcttcaggctcgtctgtaacggtgagctgtccctggctcgggtgctgcggaaaaacattcttgacaaggtggaccagaagaagctccttagatgtgcaacttcctcccagccactcgctgcccgcggtgtagccgccagaccgggtacattgcacgattttcattcccacgagattgcggagcagctgacactgctcgacgctgagctgttttacaaaattgaaattccagaggtccttctttgggctaaagaacaaaatgaagaaaagtcccccaaccttacacagtttacagagcactttaataatatgtcatactgggtgcgctcaattatcatgctgcaggagaaggctcaggaccgagagcggctgctgcttaagtttatcaaaataatgaagcacctgagaaagctgaataattttaacagttacctggctatcttgtctgctcttgactcggctcctatacgccggctggagtggcagaaacaaacaagtgaggggcttgccgagtactgtaccttaattgattcgagttcatcatttagggcctatcgcgccgccttgagcgaggtcgagcccccctgcattccatatctggggctgattctgcaggacttgactttcgtacacttgggtaatccagactacatcgacggaaaagtgaacttcagcaagcgctggcagcagttcaacatccttgattccatgcgatgtttccagcaggctcactatgacatgcgtcgcaacgacgatataatcaatttcttcaatgacttcagtgaccacttagcagaggaagcgctgtgggaactgtcgttaaaaatcaaacctagaaatattactcggcggaagaccgatcgagaggaaaaaacctag

SEQ ID NO: 260321 - DNA, 582 bp, Artificial Sequence
  derived and/or modified sequence
atgggcaatgcaattgaaaaacaaaagcctctaaaaagatcccacctctacccttggaaacaggacagtcagagatcccatctcagcagctttactatgaagttgatggacaagtttcatagtcccaagattaagcggaccccttctaagaagggcaagcctgccgaggtgtccgtgaagatcccagagaagccggtgaacaaggaggctactgaccgtttcctcccggaaggctaccctcttcctctggatctcgagcagcaggctgtcgagttcatgtcgacctcagccgtggcatctagaagccagaggcagaaaaatttgagctggctcgaggagaaggagaaagaagtcgtgtctgcactcaggtattttaagaccatagtggataagatggccattgacaaaaaggtgctggaaatgcttcctggctccgcgtctaaggtgctggaggcaatcctgccactagtccagaacgatcctcgcattcagcattcatctgctctgagttcttgctactcacgcgtgtaccaaagcctagcgaacctgattaggtggtctgatcaggtgatgctggagtag

SEQ ID NO: 260322 - DNA, 3288 bp, Artificial Sequence
  derived and/or modified sequence
atgggaaatgccatcgagaagcagaagcccctgaagaggagccacctgtacccctggaagcaggacagccagaggagccacctgagcagcttcaccatgaagctgatggacaagttccacagccccaagatcaagaggacccccagcaagaagggcaagccagctgaggtgtctgtgaagatccctgagaagcctgtgaacaaggaggccacagaccgcttcctgcctgagggctaccccctgcccctggacctggagcagcaggccgtggagttcatgagcaccagcgctgtggccagccgcagccagaggcagaagaacctgtcctggctggaggagaaggagaaggaggtggtgtctgccctgcgctacttcaagaccatcgtggacaagatggccatcgacaagaaggtgctggagatgctgcccggcagcgccagcaaggtgctggaggccatcctgcccctggtgcagaatgacccccgcatccagcacagcagcgccctgagcagctgctacagccgggtgtaccagagcctggccaacctgatccgctggagcgaccaggtgatgctggagggcgtgaacagcgaggacaaggagatggtgaccaccgtgaagggcgtcatcaaggctgtgctggatggagtgaaggagctggtgcggctgaccatcgagaagcagggccggcccagccccaccagccctgtgaagcccagcagccctgccagcaagccagatggccctgctgagctgcccctgacagaccgggaggtggagatcctgaacaagaccaccggcatgagccagagcacagagctgctgcctgatgccacagatgaggaggtggccccacccaagccacccctgcccggcatccgggtggtggacaacagccccccaccagccctgccccccaagaagaggcagagcgcccccagccccaccagggtggccgtggtggcccccatgagccgggccaccagcggcagcagcctgcctgtgggcatcaaccggcaggactttgatgtggactgctacgcccagaggcggctgagcggcggcagccacagctatggaggagagagcccccggctgagcccctgcagcagcatcggcaagctgagcaagagtgatgagcagctgagcagcctggaccgggacagcggccagtgcagcaggaacaccagctgtgagaccctggaccactatgaccctgactatgagttcctgcagcaggacctgagcaatgctgaccagatcccccagcagacagcctggaacctgagccccctgcctgagagcctgggggagagcggcagccccttcctgggcccccccttccagctgcccctgggcggccacccccagccagatggccccctggcccctggccagcagacagacaccccaccagccctgcctgagaagaagagaagatctgctgccagccagacagcagatggcagcggctgccgggtgtcctatgaaagacaccccagccagtatgacaacatctctggagaggacctgcagagcacagcccccatccccagcgtgccctatgccccctttgctgccatcctgcccttccagcacggcggcagcagcgcccctgtggagtttgtgggggacttcaccgcccctgagagcactggagaccctgagaagcccccacccctgcctgagaagaagaacaagcacatgctggcctacatgcagctgctggaggactacagcgagccccagcccagcatgttctaccagaccccccagaatgagcacatctaccagcagaagaacaagctgctgatggaggtgtatggcttcagtgacagcttctctggagtggacagcgtgcaggagctggcccctcctccagccctgccccccaagcagaggcagctggagcccccagctgggaaggatggccacccccgggaccccagcgctgtgtctggagtgcctgggaaggacagcagagatggcagcgagcgggcccccaagagcccagatgccctggagagcgcccagagcgaggaggaggtggatgagctgagcctgattgaccacaatgagatcatgagccggctgaccctgaagcaggagggagatgatggcccagatgtgcggggcggcagcggggacatcctgctggtgcacgccacagaaacagacaggaaggacctggtgctgtactgtgaggccttcctgaccacctaccgcaccttcatcagccctgaggagctgatcaagaagctgcagtaccgctatgagaagttcagcccctttgctgacaccttcaagaagagggtgtccaagaacaccttctttgtgctggtgcgggtggtggatgagctgtgcctggtggagctgacagaggagatcctgaagctgctgatggagctggtgttccggctggtgtgcaatggagagctgagcctggcccgggtgctgaggaagaacatcctggacaaggtggaccagaagaagctgctgcgctgtgccaccagcagccagcccctggccgcccggggcgtggccgcccggcccggcaccctgcatgacttccacagccatgaaattgctgagcagctgaccctgctggatgctgagctgttctacaagattgagatccctgaggtgctgctgtgggccaaggagcagaatgaggagaagagccccaacctgacccagttcacagagcacttcaacaacatgagctactgggtgcgcagcatcatcatgctgcaggagaaggcccaggaccgggagcggctgctgctgaagttcatcaagatcatgaagcacctgaggaagctgaacaacttcaacagctacctggccatcctgagcgccctggacagcgcccccatccggcggctggagtggcagaagcagaccagcgagggcctggccgagtactgcaccctgattgacagcagcagcagcttccgggcctaccgggccgccctgtctgaggtggagcccccctgcatcccctacctgggcctcatcctgcaggacctgacctttgtgcacctgggcaacccagactacattgatggcaaggtgaacttcagcaagcgctggcagcagttcaacatcctggacagcatgcgctgcttccagcaggcccactatgacatgagaagaaatgatgacatcatcaacttcttcaatgacttcagtgaccacctggccgaggaggccctgtgggagctgagcctgaagatcaagcccaggaacatcaccaggaggaagacagaccgggaggagaagacctag

SEQ ID NO: 260323 - DNA, 3174 bp, Artificial Sequence
  derived and/or modified sequence
atgggaaatgccatcgagaagcagaagcccctgaagaggagccacctgtacccctggaagcaggacagccagaggagccacctgagcagcttcaccatgaagctgatggacaagttccacagccccaagatcaagaggacccccagcaagaagggcaagccagctgaggtgtctgtgaagatccctgagaagcctgtgaacaagaacctgtcctggctggaggagaaggagaaggaggtggtgtctgccctgcgctacttcaagaccatcgtggacaagatggccatcgacaagaaggtgctggagatgctgcccggcagcgccagcaaggtgctggaggccatcctgcccctggtgcagaatgacccccgcatccagcacagcagcgccctgagcagctgctacagccgggtgtaccagagcctggccaacctgatccgctggagcgaccaggtgatgctggagggcgtgaacagcgaggacaaggagatggtgaccaccgtgaagggcgtcatcaaggctgtgctggatggagtgaaggagctggtgcggctgaccatcgagaagcagggccggcccagccccaccagccctgtgaagcccagcagccctgccagcaagccagatggccctgctgagctgcccctgacagaccgggaggtggagatcctgaacaagaccaccggcatgagccagagcacagagctgctgcctgatgccacagatgaggaggtggccccacccaagccacccctgcccggcatccgggtggtggacaacagccccccaccagccctgccccccaagaagaggcagagcgcccccagccccaccagggtggccgtggtggcccccatgagccgggccaccagcggcagcagcctgcctgtgggcatcaaccggcaggactttgatgtggactgctacgcccagaggcggctgagcggcggcagccacagctatggaggagagagcccccggctgagcccctgcagcagcatcggcaagctgagcaagagtgatgagcagctgagcagcctggaccgggacagcggccagtgcagcaggaacaccagctgtgagaccctggaccactatgaccctgactatgagttcctgcagcaggacctgagcaatgctgaccagatcccccagcagacagcctggaacctgagccccctgcctgagagcctgggggagagcggcagccccttcctgggcccccccttccagctgcccctgggcggccacccccagccagatggccccctggcccctggccagcagacagacaccccaccagccctgcctgagaagaagagaagatctgctgccagccagacagcagatggcagcggctgccgggtgtcctatgaaagacaccccagccagtatgacaacatctctggagaggacctgcagagcacagcccccatccccagcgtgccctatgccccctttgctgccatcctgcccttccagcacggcggcagcagcgcccctgtggagtttgtgggggacttcaccgcccctgagagcactggagaccctgagaagcccccacccctgcctgagaagaagaacaagcacatgctggcctacatgcagctgctggaggactacagcgagccccagcccagcatgttctaccagaccccccagaatgagcacatctaccagcagaagaacaagctgctgatggaggtgtatggcttcagtgacagcttctctggagtggacagcgtgcaggagctggcccctcctccagccctgccccccaagcagaggcagctggagcccccagctgggaaggatggccacccccgggaccccagcgctgtgtctggagtgcctgggaaggacagcagagatggcagcgagcgggcccccaagagcccagatgccctggagagcgcccagagcgaggaggaggtggatgagctgagcctgattgaccacaatgagatcatgagccggctgaccctgaagcaggagggagatgatggcccagatgtgcggggcggcagcggggacatcctgctggtgcacgccacagaaacagacaggaaggacctggtgctgtactgtgaggccttcctgaccacctaccgcaccttcatcagccctgaggagctgatcaagaagctgcagtaccgctatgagaagttcagcccctttgctgacaccttcaagaagagggtgtccaagaacaccttctttgtgctggtgcgggtggtggatgagctgtgcctggtggagctgacagaggagatcctgaagctgctgatggagctggtgttccggctggtgtgcaatggagagctgagcctggcccgggtgctgaggaagaacatcctggacaaggtggaccagaagaagctgctgcgctgtgccaccagcagccagcccctggccgcccggggcgtggccgcccggcccggcaccctgcatgacttccacagccatgaaattgctgagcagctgaccctgctggatgctgagctgttctacaagattgagatccctgaggtgctgctgtgggccaaggagcagaatgaggagaagagccccaacctgacccagttcacagagcacttcaacaacatgagctactgggtgcgcagcatcatcatgctgcaggagaaggcccaggaccgggagcggctgctgctgaagttcatcaagatcatgaagcacctgaggaagctgaacaacttcaacagctacctggccatcctgagcgccctggacagcgcccccatccggcggctggagtggcagaagcagaccagcgagggcctggccgagtactgcaccctgattgacagcagcagcagcttccgggcctaccgggccgccctgtctgaggtggagcccccctgcatcccctacctgggcctcatcctgcaggacctgacctttgtgcacctgggcaacccagactacattgatggcaaggtgaacttcagcaagcgctggcagcagttcaacatcctggacagcatgcgctgcttccagcaggcccactatgacatgagaagaaatgatgacatcatcaacttcttcaatgacttcagtgaccacctggccgaggaggccctgtgggagctgagcctgaagatcaagcccaggaacatcaccaggaggaagacagaccgggaggagaagacctag

SEQ ID NO: 260324 - DNA, 582 bp, Artificial Sequence
  derived and/or modified sequence
atgggaaatgccatcgagaagcagaagcccctgaagaggagccacctgtacccctggaagcaggacagccagaggagccacctgagcagcttcaccatgaagctgatggacaagttccacagccccaagatcaagaggacccccagcaagaagggcaagccagctgaggtgtctgtgaagatccctgagaagcctgtgaacaaggaggccacagaccgcttcctgcctgagggctaccccctgcccctggacctggagcagcaggccgtggagttcatgagcaccagcgctgtggccagccgcagccagaggcagaagaacctgtcctggctggaggagaaggagaaggaggtggtgtctgccctgcgctacttcaagaccatcgtggacaagatggccatcgacaagaaggtgctggagatgctgcccggcagcgccagcaaggtgctggaggccatcctgcccctggtgcagaatgacccccgcatccagcacagcagcgccctgagcagctgctacagccgggtgtaccagagcctggccaacctgatccgctggagcgaccaggtgatgctggagtag

SEQ ID NO: 260325 - DNA, 3288 bp, Artificial Sequence
  derived and/or modified sequence
atgggcaacgccatcgagaagcagaagcccctgaagcggagccacctgtatccatggaagcaagattctcagcgcagccatctgtcatcatttacgatgaagctaatggataagttccactcccctaagatcaagagaactccaagcaagaagggcaaacccgcagaggtttcagttaagattcctgagaaaccggttaataaggaagccaccgatcggttcctgccagagggctatcccttgcccctagacttggaacagcaggcagtcgagtttatgagcacttccgccgtggcctcgaggtctcagcggcagaaaaacctcagctggctcgaggagaaagagaaggaggtagtctccgctctccgatacttcaagaccatcgttgataagatggccatcgacaagaaggtgctggagatgctacccggctccgccagtaaggtcttggaagccatcctccccctagtccagaatgaccctaggatacagcactcctcagctttaagttcttgctatagtcgggtctaccaatccctggccaacctgatcagatggtcagatcaggttatgctggagggggtgaattcagaagataaggagatggtcactacagtgaagggggttatcaaggcggttttggacggcgtgaaggagcttgtcaggcttaccattgagaagcagggaagacccagccccacatcccctgtgaagcccagcagtcctgctagtaagcccgatggtccagcagagctgcctctgacagatcgagaggtcgagattctcaataagaccacaggaatgagccagagcaccgagctgctgcctgacgccaccgacgaagaggtggcacccccgaagccccctctacctgggatccgggtggtggacaactctccaccccccgccttgcctccaaaaaaaagacaaagtgccccatctcctacccgggtggccgtggtggcaccgatgagccgtgcgacgagcggctctagtttgcccgtagggatcaatcgacaggatttcgacgtggactgttatgctcagcgcagactctcaggcggctctcactcctacggcggcgaaagtcccagactgagcccatgcagcagcattggcaagctgtctaaaagcgacgagcagttgagctccctggaccgtgacagtggacagtgcagcagaaatacctcatgcgaaacactcgaccattacgatcctgattatgaatttcttcagcaggacctgtcaaacgcggatcagattccacagcagacagcatggaacttatcacccctgcccgagtcgctgggggagtccggaagcccatttctgggcccgccttttcagctccccctgggcggtcatcctcagcccgacggcccactggctcctggacagcagacagacacccccccagcactgcccgaaaagaaaagacggtctgctgcaagtcagaccgctgatggaagcggctgcagagtgagctacgagagacacccctcccaatacgacaatattagcggtgaggatctgcagagcaccgcccctatccccagtgtgccctatgcgcccttcgcagcaatactccctttccagcatggtggaagctcagctccagtggaattcgttggcgacttcacagcaccggagtctaccggcgatccagaaaagccccctcctttgcccgagaaaaaaaataaacacatgctcgcatatatgcagcttttggaggattacagcgagcctcagccctctatgttctatcagactccacagaacgagcatatctaccagcaaaagaacaagctattaatggaggtttatgggttcagcgattccttttcgggcgtggacagcgttcaggagttggcccccccaccagcgttgccaccaaaacagagacagctggagccacccgcaggcaaagacgggcaccccagagatccttctgccgtatcaggggtgcctgggaaggatagcagagacggttctgagcgcgcccctaaatcaccagacgctctggaaagcgcacagtccgaagaagaggtcgatgagctttcccttatcgaccataatgagattatgtccaggctgactctgaaacaggagggtgacgatggcccagatgtccgcggagggagtggtgacattttgctggtgcacgcaacagagacggatcggaaagatttggtgctttactgcgaggcattcctaaccacatatcgcacattcatctctccggaggagctcattaaaaagctgcaatacagatacgaaaaattcagcccttttgccgacacattcaagaaaagagtgtccaagaacacctttttcgttctggtcagggtggtggatgagctgtgtctggtggagctcacagaggagatcctgaaacttctaatggaactggtatttagactagtgtgcaacggcgaactctcattagctcgagttttacgcaaaaatatcctagacaaggtggatcaaaagaagttgctgcgctgtgccactagctcccagccactggctgctagaggtgtcgcagccaggcccggcacactccatgacttccatagtcacgagatagctgagcagttgacactgctggatgctgagcttttttacaagattgaaatccccgaagtgctcctttgggcaaaggagcagaacgaagagaagagccccaaccttactcaattcacggagcactttaataatatgtcctattgggtgagatcaattatcatgctgcaggaaaaggcccaggacagagaaagactgctgctgaagttcatcaaaataatgaagcatttgaggaagttgaataactttaactcatacctggccatcctttccgctctggatagcgcgcccattcgcagactggagtggcaaaaacagacctccgagggcctcgctgagtattgcacgttaatcgatagctcatcctcgtttcgtgcttacagagcggccttatctgaggtggagcctccctgcataccttatttgggactcatactgcaggatctaacctttgttcacttggggaacccggattacatcgacggaaaagtgaacttctctaagcgctggcagcagtttaatatattagacagcatgcgatgtttccaacaggcccactacgacatgcgtaggaatgacgatattataaacttttttaacgatttcagcgaccacctggctgaggaggctttgtgggagctgagcctgaagatcaagcctcgcaatatcactagaaggaaaaccgatcgggaggaaaaaacgtag

SEQ ID NO: 260326 - DNA, 3174 bp, Artificial Sequence
  derived and/or modified sequence
atgggcaacgccatcgagaagcagaagcccctgaagcggagccacctgtacccatggaaacaagactcccagaggagtcacctgtcttccttcactatgaagctgatggacaaattccacagccctaaaattaaaaggacgccaagtaagaaaggaaagccagcagaggtgagtgtgaaaattcccgagaaacccgtcaataaaaatctgtcatggctggaagagaaagaaaaagaggtggtgtccgcattacgatattttaagactattgtggacaaaatggctattgataagaaggtgcttgaaatgctcccagggagcgcatcaaaagtgctggaggccatcctgccattggtccagaacgacccaaggatacagcactcttctgctctatctagttgttactctcgcgtctatcagtccctcgctaacctgatacgttggtctgatcaggtcatgttggagggcgttaattccgaagacaaagagatggtgaccaccgtgaaaggggtcatcaaagctgtgctggatggcgtgaaggagctcgtgcgcctgactatcgagaaacagggtagaccctctccaacatcgcccgtgaaaccttcttcccctgcaagcaagcctgacggccccgccgaactgcctttaacggatagggaggtcgagatactcaataaaactacgggaatgagtcaatcaactgagctcctgccagatgccaccgatgaggaggtggctccacccaagccccctctccctgggattcgcgtcgttgacaactcaccccctcctgcactgcctccgaagaagaggcaatcggcgcctagcccgacacgtgtggctgttgtcgcgccaatgtcgagggctacaagcggtagcagtctcccagtggggataaatcggcaggattttgacgtggattgttacgcgcagcgccgactgagcgggggaagccattcctacggcggagagagtcccaggctgagtccctgttcaagcattggaaaactctcgaaatccgacgagcaacttagtagtctggaccgggacagcggacaatgtagtcgaaataccagttgtgaaacacttgaccactatgaccctgattatgagttccttcagcaggacttgtccaacgccgatcagatcccacagcaaactgcctggaacctgtccccccttcctgagtcccttggcgagagtggctcccctttcctcggaccacccttccaactgcctctggggggtcaccctcagcctgatggaccgctggcacctggacagcaaactgatacgcccccagccctccctgagaagaaacggcgcagtgccgcctcgcaaaccgcggatggatctggctgtagggtcagctatgagaggcacccttcccaatacgacaacattagcggggaggacctccagagcacagcccccataccttccgtaccctatgcccccttcgccgcgatcctacccttccagcacgggggaagcagtgcgcccgtggagttcgtgggggattttacagcgcccgaaagcactggcgatcccgagaagccaccacctcttcccgagaagaagaacaaacacatgctggcttacatgcaacttctggaggactattctgaacctcaacccagcatgttttaccagactccacagaatgagcacatttatcaacagaaaaacaaactactcatggaggtgtatggattctctgatagttttagcggagtggatagtgtccaggagcttgcaccgccccccgcactgcctcctaagcagcgtcaactggagccgcccgctggcaaggacggacatccacgcgaccctagcgccgtttcaggggtgcccggaaaagactcgcgggatggaagcgagagagcccccaaatccccagatgccctcgagagtgcccagtccgaggaggaagtcgatgagcttagtctgatcgatcataatgagatcatgagcaggcttacactgaaacaggaaggcgatgacggtcctgacgtcagaggcgggagtggcgatatcctcttagtccatgcaaccgaaacagacaggaaggatcttgtcctatactgcgaggcctttctcacaacatatcgtacattcatctctccggaggagctgatcaaaaagcttcagtaccgctacgaaaagttttccccatttgccgatacttttaagaagcgggtgtccaaaaatacgttctttgtcctcgtgcgggtcgtagacgaattatgtctcgtggagctgaccgaagagatactaaagctcctgatggagctcgtgtttcggctggtttgtaacggggagctaagcctggcaagagttcttcgcaagaacatcttggataaggttgaccagaagaagctgctcaggtgcgctaccagcagccaacccttggcggctagaggcgtagctgccaggcctggcaccctccacgacttccacagccacgaaatagcggagcaactaactctgttggatgcagaacttttctacaagatagagattccagaggtgctactatgggctaaggagcagaacgaggagaaaagccccaaccttacgcaattcaccgaacactttaataatatgtcctactgggtgcgcagtattatcatgctgcaggagaaggctcaggatcgcgagcgactgttgctgaaattcattaagattatgaaacacctgaggaagctgaataatttcaattcatatctcgccatcctgtcagcactggactccgctcccattcgacgactggagtggcagaagcagacctcggagggactggccgagtattgcactctcatcgacagcagttccagcttccgagcttacagggccgccttgagcgaagtcgagcctccctgtatcccttacttgggacttatcctccaggatctcacattcgtgcatctcggcaacccagattacattgacgggaaagtgaacttcagcaaaagatggcagcaattcaatattctagacagtatgcggtgtttccagcaggctcattacgacatgcgacgcaatgatgatattatcaacttctttaacgatttttctgaccacctggccgaagaagcactttgggagttgagcctgaagatcaagcctagaaacatcactcgaaggaagaccgaccgagaagagaaaacctag

SEQ ID NO: 260327 - DNA, 582 bp, Artificial Sequence
  derived and/or modified sequence
atgggcaacgccatcgagaagcagaagcccctgaagcggagccacctctacccttggaaacaggattctcagagaagccatctgagcagctttacgatgaaactgatggataagtttcacagcccaaagatcaagcgtaccccatctaagaagggcaagcccgccgaagtgtcagtcaagatccccgaaaagccagtcaacaaggaggccactgaccgttttctgccagagggatatccgctgccactcgacctggagcagcaggcggtcgagtttatgtcaaccagtgccgtcgcgtcacgcagtcaacgccagaaaaatctgagctggctcgaggaaaaggagaaggaggtggtgtctgctcttaggtatttcaaaaccattgtggacaagatggccatcgacaaaaaagtcctcgagatgcttccagggtccgcatccaaggtgcttgaggctatactgcccctagtgcagaacgatcctcgcattcagcactcctctgcactgtcttcctgctactctcgggtgtaccaatctctggccaatctgatcagatggtcggatcaggtcatgttagagtag

SEQ ID NO: 260328 - DNA, 3288 bp, Artificial Sequence
  derived and/or modified sequence
atgggcaacgccatagagaaacagaagcctctaaaacgctcacacttatatccctggaaacaggactcccagcggtcacacctgtctagtttcacaatgaagcttatggacaagttccacagccccaagatcaaaagaactccctccaaaaaaggaaaaccagcagaggtgtcagttaagataccagagaaacctgtaaacaaggaagccacggacagattcctgcccgagggataccccctgcccttggatctggagcagcaggcagtggaattcatgagtacatccgcagtggcctcaagaagccagcggcagaagaatctgtcatggctggaggagaaagagaaggaggtcgtgagtgccctcaggtactttaagaccatagtggacaagatggcaattgacaagaaagttctcgagatgctacctggaagcgccagtaaggttctggaggccattttgcctctggtgcagaatgatcccagaatacagcactcctccgccctctcaagctgctatagcagagtctaccagtccctggcaaacctcatccgatggagcgatcaggtgatgctcgaaggcgtgaactctgaggacaaagagatggtgacaacagtgaagggcgtaataaaggccgttctggacggagtgaaagagctggtccggctgaccattgagaagcagggtcggccatcccccacaagcccagtgaaaccatcgtcgcccgcatccaaacccgacggcccagccgagttgccacttacagatcgcgaagtggaaattctgaataagacaaccgggatgtcacagtccaccgagctgctgcccgatgccactgatgaagaagtggcacctccaaagcccccattacctggcatcagagtcgtggataactcccctccacccgcactgcccccaaaaaagagacagagcgcgccttcgcctacccgggtggcggttgtggccccaatgtcccgcgctaccagcggaagctccctgccagtcggcattaatcgtcaggactttgacgtcgactgttacgcccagcggcgattgagcggcggatcacattcttatgggggagagagcccccgactttccccttgtagcagcatcggtaagttatcgaaaagcgatgaacagctatccagtctggatcgagattccggacagtgctccagaaatacttcatgtgaaactctggatcactacgatcctgattatgagttccttcagcaagatcttagcaatgctgaccaaatacctcagcagaccgcctggaatctcagccccctcccagagagtctgggtgagagcggatcgcctttcctgggcccaccatttcaactgcctttaggtgggcatcctcagccagatggcccactggccccaggacagcagaccgacacacctcccgctctacccgagaagaagcggaggtcagcggcttctcagacggcagatggatccggttgtagagtgagttacgagagacatccgtcacagtatgacaatatctcgggggaagacctccaatctactgcccctattccctcggtgccctacgcacccttcgccgctatcctgccttttcagcatggcggatccagcgcacctgtggagtttgtcggagatttcaccgccccagaaagcactggcgaccccgagaagccccctcctctcccagagaagaagaacaagcacatgcttgcctacatgcagctcttagaggactactcagaacctcagccatctatgttttatcagacacctcaaaacgagcatatatatcaacagaagaacaaattgctgatggaagtgtacggtttcagcgatagtttttccggggtggactctgtacaggaattagcaccgcctccagccctgccgcctaagcagcgccagctggagcccccagccggaaaagacggacacccacgcgatcccagtgcggtctccggagtgcccggaaaggatagcagagatgggagtgagagagcacccaagtcacctgacgccctcgaaagtgcacagagcgaggaggaggtggatgaactgagtctcatagaccataacgagattatgtcacgcctgactcttaagcaggaaggggacgatggccctgatgtcagaggtggatcaggagatatcttgctggtccacgccaccgagaccgaccgtaaggatctcgtactctactgtgaggccttcctcaccacatacagaacatttatctccccggaagagttgataaaaaagctccaatacaggtacgagaaattttctcctttcgccgataccttcaaaaagcgggtcagcaagaacaccttcttcgtgttagttcgcgtcgtagatgaactgtgtttggtcgagttaactgaggagatattaaagttactgatggagctcgtgttccggttagtttgcaacggagagctgagtctcgctcgagtattacgcaagaatattctagataaagtggatcaaaaaaagctgttgagatgcgctaccagtagtcagccccttgccgcaagaggggtagcggctagaccagggacattacacgattttcatagccacgaaattgctgagcagttgaccttgctggacgccgaactgttttataaaattgaaatacccgaggtacttttatgggctaaagaacaaaatgaggaaaaaagccccaacttaacgcagttcacagaacatttcaataacatgagctactgggttagatctataattatgttacaagagaaggctcaggatagggaacggctgctgctcaaattcatcaagatcatgaagcatctgagaaaattgaacaacttcaactcgtaccttgcaattctgagcgcactggacagcgcccctattaggcgcttagagtggcagaagcagacctccgaaggattagctgagtactgcaccttgattgattcctcgagctcttttcgagcttatagagcagctctatccgaagttgagcccccttgcatcccatatctggggttgatcctgcaagatctcacatttgttcacttgggcaaccccgactatattgatggcaaagttaatttctccaaaaggtggcagcagtttaatatccttgactccatgcggtgttttcaacaagctcactatgacatgcggaggaacgatgatattatcaacttctttaacgatttttcagaccatctcgcagaggaggccctgtgggaactctccctgaagatcaaacctagaaacatcactcgtcggaagaccgatagggaagagaagacctag

SEQ ID NO: 260329 - DNA, 3174 bp, Artificial Sequence
  derived and/or modified sequence
atgggaaacgccatcgaaaagcaaaaaccgctcaaaagatcccatctctacccttggaaacaggattctcagcggtcccatctctcctcattcacaatgaagctcatggataaatttcacagcccaaaaataaagcggaccccatcaaaaaagggtaaacctgcagaggtgtctgtgaaaatcccagagaaaccagttaataaaaatctgtcctggttggaagagaaggaaaaagaggtcgtctccgccttacggtactttaaaaccatcgtcgataaaatggctatcgacaaaaaggtacttgaaatgctgccagggtcggcctctaaggtgcttgaggctatcctgccactagtccagaatgacccgaggattcagcactcttcagctctcagctcctgctactccagagtctaccagtctctggctaatctgattagatggtcagatcaggttatgctcgaaggagtgaacagtgaggacaaagaaatggttacaacggttaagggagtcattaaagcagtcctcgatggagtgaaggagttggttaggttgaccatcgaaaagcagggtcgaccctccccaactagtcccgtgaagcccagttcgccagcgagtaagcctgacggaccagcagaactgcctctgaccgacagagaggtcgaaatcctcaacaagacaaccgggatgagtcagtccaccgagctgctgccagacgctacggacgaggaagtcgcaccaccgaagcctcctcttcctggtatccgagttgttgataattcgcctccaccagctctgccaccaaaaaagcgacagtccgccccttcacctaccagggtggccgtggtggccccaatgtcacgggcaacttcggggtcatccctgcctgtcgggattaataggcaagatttcgacgtggactgctatgcccagcggcgactttccggcggtagtcatagttacgggggagagtcaccgagactcagcccgtgctcctctattggaaagctgtccaagtctgacgaacagctctcaagtctagatcgtgactccggacagtgctcaagaaatacctcctgcgaaactctcgatcattacgatccagattacgaattcctgcagcaggaccttagcaacgctgatcaaattccccagcaaacagcctggaacctatctcccctgcctgagagcctgggtgaatccggatcacccttcttggggccacctttccaacttcccctcgggggacatccacagcccgatggacccctcgcacccggacagcagaccgacaccccacctgccctgcccgagaaaaaaaggcgttcagcagccagtcagacagcagacggatctggctgtagagtatcctatgagcgccatccttctcagtacgacaacatctcaggggaagatcttcagtctacagctccaattccatccgtcccttatgctccatttgccgcaattctgccttttcagcatggaggctcaagcgctccagtagagtttgtcggagactttacggcccctgagagcacgggcgatccagaaaaaccgcctccactgcctgagaagaagaacaaacacatgcttgcttatatgcagctgctggaggactactccgagccccagcccagtatgttctaccagacgccacagaacgagcacatttaccagcagaaaaataagttactcatggaagtctacggattctccgatagcttttctggtgtggatagtgtgcaggaactcgccccacctccggcactgccccctaaacagcgacagctggagcctcccgcaggtaaggacggtcacccgagggatccttccgcagtatcaggggtacccggtaaagattcgcgagacggcagtgaaagagctcccaaatcccccgacgccctcgaaagcgcccagtctgaggaggaagtagatgaactgtcactgatcgaccacaacgagattatgtcacgtctcacactgaaacaggaaggagacgatggccctgacgtgagggggggaagcggcgatatattgctggttcacgctactgagaccgacagaaaagatctggttctgtactgtgaggcatttctgaccacataccgcactttcattagtcctgaagagctcataaaaaagctgcagtaccgatacgagaagttttcccccttcgcagacacgttcaaaaagcgcgtgtctaagaacaccttcttcgtgttagttcgagtggtcgacgaactgtgcttggtagaactgacggaagagatcctaaagctgctgatggagctggtctttagactggtgtgcaacggggagctgtccctggccagggtgttacgcaaaaacattttggacaaggtggaccagaaaaagctgctgagatgcgctacatcttctcagcctttagccgctaggggggtggccgctcgccctggaaccctgcatgactttcactctcatgaaatcgccgaacagctgaccttgctcgacgcagagctattctacaaaatcgagatccctgaagtactactgtgggcgaaagaacagaacgaggaaaaaagccctaatctcactcaatttactgaacatttcaataatatgagttattgggtgaggagcatcattatgctccaagaaaaagcccaagaccgcgagcgtttgctcttaaagttcatcaagatcatgaaacaccttaggaaactgaacaatttcaactcttacctggccatcctgtccgcattggattcagccccaatccggaggctggaatggcagaagcagacgagcgagggcttagcagaatactgtacacttatcgactcctcaagcagcttccgcgcttatagagctgctctctcggaagtggaacctccttgcattccctatctgggtttgattcttcaggatctgacctttgtgcacctggggaaccctgactacattgatggcaaggtcaacttcagcaagaggtggcagcaatttaatatccttgattcaatgcggtgctttcagcaggcgcattatgatatgaggaggaacgatgacattattaacttcttcaacgatttttcagatcatctggctgaggaagccctctgggagctctcattgaaaataaaaccacgtaacataacacgcagaaagactgacagggaggagaagacctag

SEQ ID NO: 260330 - DNA, 582 bp, Artificial Sequence
  derived and/or modified sequence
atgggcaatgccatagagaagcagaaaccccttaagcgctcccacctgtatccgtggaagcaggactcacagaggtctcacttgtcctcattcaccatgaagctcatggacaagtttcactctcccaagattaagaggacacctagtaagaaagggaagccggctgaagtcagcgtgaagatccccgaaaagccagtaaataaagaggccacggataggttcctgccggagggctatcctctccctctggatctcgagcagcaggctgtggaatttatgagcaccagtgccgtcgccagtagatctcagagacaaaagaatctgagttggctggaggaaaaggagaaagaagtagtctccgcgctacggtactttaagacaattgtggacaaaatggccattgataagaaggtattggagatgctcccaggctccgcaagcaaggtgctggaggcaattctgcccctggtacagaacgatcctcgcattcaacacagtagtgctttgtcctcatgctattctcgcgtctaccagagcctggccaacctaatacgctggagcgaccaagtaatgctggaatag

SEQ ID NO: 260331 - DNA, 6173 bp, Artificial Sequence
  derived and/or modified sequence
gagattcctcaggcttcccttgtgaggctgcctgggttctgccgctgggtggtttgggatgtccaagagatatcccctttcagccagtgactcggtcctcagttgctgctccggaaagacgctggggctgggaagggccctgtgtcctctggctttaaaatgggcaatgctattgaaaaacagaagcccttgaaacgaagtcatctgtacccctggaaacaagactctcagcgttctcatctctcttccttcaccatgaagctgatggacaaattccactcacccaaaatcaagagaacgccatcaaagaagggaaaaccagctgaggtgtccgtaaagattccagagaagcctgtgaacaaagaggcaacagacagatttctaccagagggctaccctctccccttggatctggagcagcaggcagtagaatttatgtccaccagtgctgtggcttccaggtctcaaaggcagaagaacctgagctggctggaggagaaagagaaggaagttgtcagtgccctgcgctactttaagaccattgtggacaaaatggcaattgataagaaggtactggagatgcttccagggtcagccagcaaggtgctggaggccatcttacccctggtgcagaacgatcctcgaattcagcacagctcagccctctcttcctgctatagccgagtgtaccaaagcctcgccaacctcattcgctggtctgaccaagtgatgctggaaggcgtgaactcagaagacaaggagatggtgacgactgtgaagggggtcatcaaggctgtgctggatggagtgaaggagctggtcaggctcaccatcgagaagcagggacgtccgtctccgacgagccccgtgaagcccagttcccctgccagcaagcctgatggcccagcagagctccccctgacagaccgcgaggtagagatcctaaacaagacgactgggatgtcacagtcaactgagctcctcccagatgccacggatgaagaggtcgcgccccccaagcctcctctgcctggcattcgggtggttgataatagtcctccaccagcattgccacccaagaaaagacagtcggcgccgtcccctacccgagtggctgtggtggcccccatgagccgagccaccagtggctccagtttgcctgttggaatcaataggcaggattttgatgttgactgttacgcacagaggcgactgtcaggaggcagccactcatatggtggagagtcgccccgcctctccccctgcagcagcataggcaagctcagcaagtcagacgagcagctgtcctctctggacagggacagtgggcagtgctcccggaacacaagctgtgaaacactagaccactatgatcccgactatgaattcctccagcaagacctctctaacgcagaccagatacctcagcagacggcctggaaccttagcccgttgccagagtctttgggggagtctgggtctccatttcttggccctcctttccagctgcctcttggcggccatccccagccagacggacctctggccccagggcagcagacagatacgccacctgctctccccgagaagaagcgcaggagcgcagcctcccagacggcggacggctctggctgcagggtgtcctacgagcggcatccctcgcagtatgacaacatctctggggaggacctgcagagcacagccccgatcccatccgtcccctacgcgccctttgctgctattctgccctttcagcatggaggttcctcagcccctgtcgaatttgtgggtgattttactgctcctgagtcaaccggtgacccagaaaaaccacctcctctaccagagaagaaaaacaaacacatgctggcctacatgcagttgctggaggactactcggagccgcagccctctatgttctaccagacgccacagaacgagcacatctaccagcagaagaacaagctcctcatggaggtatacggcttcagcgactccttcagtggggtggactccgtgcaggagctggccccgccgcccgccctaccccccaagcagcggcagctggagccaccggctgggaaagacggacatcccagagatccctcagcggtcagcggcgtccctgggaaggacagcagagacggcagtgagagggccccaaagtcaccagatgctctggagtcggctcagtcggaggaggaagtggacgagctgtccctcattgaccacaacgaaattatgtccaggctgacgctcaagcaggagggtgatgacgggccggacgtccgcggaggatctggggacatcttactggtccatgctactgagactgacaggaaagatttggtgttgtactgcgaggcattcctgaccacctacaggaccttcatctccccagaggagctcatcaagaagctgcagtacagatatgagaaattctctccctttgccgacacattcaagaagcgcgtcagcaagaacacgttcttcgtgctggtacgggtggtggatgagctctgcctggtggagttgacagaagagatcctgaagctgctgatggaactggtcttccgcctggtgtgcaatggggagctgagcctggcccgtgtgctccggaagaacatcctggacaaggtggaccagaagaagctactcaggtgtgccacctccagccagcccctggcagcccggggggtagcagccaggccggggaccttgcacgactttcacagccatgagatagcggagcagctaacgctgctggatgctgagctcttctataaaatagagattcctgaggttttgctttgggcaaaagagcagaatgaggagaagagccccaacttgacccagttcacggagcacttcaacaacatgtcctactgggtccggtccataatcatgttacaggaaaaggcccaggacagggaacggctgctcttgaagttcatcaagatcatgaagcacttgcggaagctgaataacttcaactcctacttggccatcctctctgccctggactcggcgcccatccgcaggctggagtggcagaagcagacttcagagggcctggccgagtactgcacactgatcgacagctcgtcctccttccgagcctaccgggccgccctctcggaggtggaaccgccgtgcatcccgtacctggggctgatcctgcaggacctgaccttcgttcacctgggaaacccagactacatcgacgggaaagtgaacttctccaagcggtggcagcagttcaacatcctcgacagcatgcgctgcttccagcaggcgcactatgacatgcggaggaacgacgacattataaacttcttcaatgacttcagtgaccacctggctgaggaggccctatgggaactgtctctgaaaattaaacccaggaacataacaaggagaaaaacagaccgggaagagaagacctaggagcagacgccgggatccaggagaatgctcgaggggcgcagagggcagctcccagaccggagaggaccttggacctgttaggcgcatggcaggagtcccggcctcggagccatgaggctggccagccctcagcggggccgggcgggagctggagcctgccagccgcttcctgcctccttcctctgtgggagcagacccgtgggcctcagggcagccagcaggcaggtcttgttgccaatttacaaaccggtggttttctggtttggttttgttttctgcttttacttccatctctcccctcttgaccttccacccactcccctccagggagagagcagcagagacctcatcagcagaccaaggaagtggtgggtgctccccctccctaagctccagggtccctgaatcttctgaaatctcaaatgagtggaggcctcctggggtggcctgtcctgcaggggccctggaatgggggcaagcagctgggtgggcagaatgcagagtagactcgggggaggatcctttcactttccgcttccccttctgatgcatggaggatggtgtgagcttttcagcaggcccggaaaggtacgcaggtgacgccttagcagccccgcagctggtgctctgccccgcggtactggcgccatcagggcctcccttgcccgcctgagagcagcagcagtctctgtcatcccgtcgccccttaccccccaccccaggccactgggcccctcccacaccacctggggagctgagaagaggaggctggagtaagggaggacttgatcatccaagaaatactttttattgctgggagtcttctgaacctcaccaaactgaggccagagctgagctcctgggggagttaattcagaggggagaggccagcacctccctcctccatcgctcgctgtgtgccttaaactccatctcatgtccctccccatcccctggctttccctccctccttgccccatcctgggccagccagcagggctcctcctctggctcttcagacctttcagccagtgctgtcagtgcccctgggagggaagggcatccctgaggcacccgaatggtccctcagggtgcagggaggcagaagcctggccacagaggagcctcctaaggcagcagctgcagcaagcgcaccctctccccactctccccacgccagagcggcttccagagcagatgctgtttccatcctcctcgtcaaaaccattctcgctgctgagcttgacaatctgggcaaggcttgtggggcgcttgacaaacagaatctgccctgtgccgcctggttccgtggcctccagcatgagcctgcaggcagggcgctgcgggaacccagttgtgctgccccagcccatgcctccgggtctgctgtgcatgaatgagtgctcacttgtcccgggtttaggacgtggtcaagtgaacagcagggtctaactgtgcttacttagcccagttcaaacagaacaaaggaaaaatatagaaagcaacatctgttgatcatttaggtttttttttaaaccaccatgtcactttgagtccttcatgggtttttgaacagcatttatcaagaagaaaatgtgggctttttcccctctcccgtgttttgtttgtcctgtagatagagggaggaaagccgtgcagtggcaggcgggaccccctctggtggcgggaccccctcttgcggtggtcttgcggggccagccgggacctgtcactttattatttaaggagtgtgtgtgtagagtcgctggcttattaacagtattgtgtgtgggttgggtttttagtttgttccttctttttgaagtcccttcatttcaatccttgactctctctccccttcccttgcccagctctgttgaatgctgctgtgcgcgtgtgagggccgctctgcacacagggcccttgggttgtgtgaactgaaattctccctgtatttgtgagactcgcaggagtccccatctgtagcacaggcaatgccagtgccatgctgcagcctcagaaaccaggcctctcactccagcagcaggcagaaccgtgtctgtggtcgggtgctgtccacagctctgtctgccttgttcttgggcttgagctggatagaggtggggtctcttcaccttccctgaattcagaacagaccctgtgcctggccccagtgtgcccaggcaattccccaggccctcactgggagcccttggtgttctgagcagcagggcccaggcagcacatgagcagtgcccaggggctccctgcgtgaggacggcaaggtgcgatgtatgtctaacttattgatggcaggcagccccctgtgccccctaagcctggccctggttattgctgagctctgtgctcagtgctgcggcctggccgtggctcgtctgttcctttggggggcccgggcgggttgtgggaatcagtcttcacagacagacgtgagccaggcggaggactcgttccttgcagaggtcagtcctcacctgcaggtgtcggggtgtgggggggcaaggaggggcaggcacacaccatgtctgacctgaacccgattctggggagcatcttcccgctccggccccacgacctccacagggttacattgtaatatatatgccccagctaacctgtctgatggtggcatcttcctgcagacatttcaaacatgtaacttttatatgaaaaaaaataaacacagatgaaagctgcccaatgcc

SEQ ID NO: 260332 - DNA, 6266 bp, Artificial Sequence
  derived and/or modified sequence
gagattcctcaggcttcccttgtgaggctgcctgggttctgccgctgggtggtttgggatgtccaagagatatcccctttcagccagtgactcggtcctcagttgctgctccggaaagacgctggggctgggaagggccctgtgtcctctggctttaaaatgggcaatgctattgaaaaacagaagcccttgaaacgaagtcatctgtacccctggaaacaagactctcagcgttctcatctctcttccttcaccatgaagctgatggacaaattccactcacccaaaatcaagagaacgccatcaaagaagggaaaaccagctgaggtgtccgtaaagattccagagaagcctgtgaacaaagaggcaacagacagatttctaccagagggctaccctctccccttggatctggagcagcaggcagtagaatttatgtccaccagtgctgtggcttccaggtctcaaaggcagaagaacctgagctggctggaggagaaagagaaggaagttgtcagtgccctgcgctactttaagaccattgtggacaaaatggcaattgataagaaggtactggagatgcttccagggtcagccagcaaggtgctggaggccatcttacccctggtgcagaacgatcctcgaattcagcacagctcagccctctcttcctgctatagccgagtgtaccaaagcctcgccaacctcattcgctggtctgaccaagtgatgctggaaggcgtgaactcagaagacaaggagatggtgacgactgtgaagggggtcatcaaggctgtgctggatggagtgaaggagctggtcaggctcaccatcgagaagcagggacgtccgtctccgacgagccccgtgaagcccagttcccctgccagcaagcctgatggcccagcagagctccccctgacagaccgcgaggtagagatcctaaacaagacgactgggatgtcacagtcaactgagctcctcccagatgccacggatgaagaggtcgcgccccccaagcctcctctgcctggcattcgggtggttgataatagtcctccaccagcattgccacccaagaaaagacagtcggcgccgtcccctacccgagtggctgtggtggcccccatgagccgagccaccagtggctccagtttgcctgttggaatcaataggcaggattttgatgttgactgttacgcacagaggcgactgtcaggaggcagccactcatatggtggagagtcgccccgcctctccccctgcagcagcataggcaagctcagcaagtcagacgagcagctgtcctctctggacagggacagtgggcagtgctcccggaacacaagctgtgaaacactagaccactatgatcccgactatgaattcctccagcaagacctctctaacgcagaccagatacctcagcagacggcctggaaccttagcccgttgccagagtctttgggggagtctgggtctccatttcttggccctcctttccagctgcctcttggcggccatccccagccagacggacctctggccccagggcagcagacagatacgccacctgctctccccgagaagaagcgcaggagcgcagcctcccagacggcggacggctctggctgcagggtgtcctacgagcggcatccctcgcagtatgacaacatctctggggaggacctgcagagcacagccccgatcccatccgtcccctacgcgccctttgctgctattctgccctttcagcatggaggttcctcagcccctgtcgaatttgtgggtgattttactgctcctgagtcaaccggtgacccagaaaaaccacctcctctaccagagaagaaaaacaaacacatgctggcctacatgcagttgctggaggactactcggagccgcagccctctatgttctaccagacgccacagaacgagcacatctaccagcagaagaacaagctcctcatggaggtatacggcttcagcgactccttcagtggggtggactccgtgcaggagctggccccgccgcccgccctaccccccaagcagcggcagctgagtgaaaacgccagtgaggaagctggtgagggtgaatatgtcaatctgtattcctctggccagagcagcgaggagctggctccctctcgaggagagccaccggctgggaaagacggacatcccagagatccctcagcggtcagcggcgtccctgggaaggacagcagagacggcagtgagagggccccaaagtcaccagatgctctggagtcggctcagtcggaggaggaagtggacgagctgtccctcattgaccacaacgaaattatgtccaggctgacgctcaagcaggagggtgatgacgggccggacgtccgcggaggatctggggacatcttactggtccatgctactgagactgacaggaaagatttggtgttgtactgcgaggcattcctgaccacctacaggaccttcatctccccagaggagctcatcaagaagctgcagtacagatatgagaaattctctccctttgccgacacattcaagaagcgcgtcagcaagaacacgttcttcgtgctggtacgggtggtggatgagctctgcctggtggagttgacagaagagatcctgaagctgctgatggaactggtcttccgcctggtgtgcaatggggagctgagcctggcccgtgtgctccggaagaacatcctggacaaggtggaccagaagaagctactcaggtgtgccacctccagccagcccctggcagcccggggggtagcagccaggccggggaccttgcacgactttcacagccatgagatagcggagcagctaacgctgctggatgctgagctcttctataaaatagagattcctgaggttttgctttgggcaaaagagcagaatgaggagaagagccccaacttgacccagttcacggagcacttcaacaacatgtcctactgggtccggtccataatcatgttacaggaaaaggcccaggacagggaacggctgctcttgaagttcatcaagatcatgaagcacttgcggaagctgaataacttcaactcctacttggccatcctctctgccctggactcggcgcccatccgcaggctggagtggcagaagcagacttcagagggcctggccgagtactgcacactgatcgacagctcgtcctccttccgagcctaccgggccgccctctcggaggtggaaccgccgtgcatcccgtacctggggctgatcctgcaggacctgaccttcgttcacctgggaaacccagactacatcgacgggaaagtgaacttctccaagcggtggcagcagttcaacatcctcgacagcatgcgctgcttccagcaggcgcactatgacatgcggaggaacgacgacattataaacttcttcaatgacttcagtgaccacctggctgaggaggccctatgggaactgtctctgaaaattaaacccaggaacataacaaggagaaaaacagaccgggaagagaagacctaggagcagacgccgggatccaggagaatgctcgaggggcgcagagggcagctcccagaccggagaggaccttggacctgttaggcgcatggcaggagtcccggcctcggagccatgaggctggccagccctcagcggggccgggcgggagctggagcctgccagccgcttcctgcctccttcctctgtgggagcagacccgtgggcctcagggcagccagcaggcaggtcttgttgccaatttacaaaccggtggttttctggtttggttttgttttctgcttttacttccatctctcccctcttgaccttccacccactcccctccagggagagagcagcagagacctcatcagcagaccaaggaagtggtgggtgctccccctccctaagctccagggtccctgaatcttctgaaatctcaaatgagtggaggcctcctggggtggcctgtcctgcaggggccctggaatgggggcaagcagctgggtgggcagaatgcagagtagactcgggggaggatcctttcactttccgcttccccttctgatgcatggaggatggtgtgagcttttcagcaggcccggaaaggtacgcaggtgacgccttagcagccccgcagctggtgctctgccccgcggtactggcgccatcagggcctcccttgcccgcctgagagcagcagcagtctctgtcatcccgtcgccccttaccccccaccccaggccactgggcccctcccacaccacctggggagctgagaagaggaggctggagtaagggaggacttgatcatccaagaaatactttttattgctgggagtcttctgaacctcaccaaactgaggccagagctgagctcctgggggagttaattcagaggggagaggccagcacctccctcctccatcgctcgctgtgtgccttaaactccatctcatgtccctccccatcccctggctttccctccctccttgccccatcctgggccagccagcagggctcctcctctggctcttcagacctttcagccagtgctgtcagtgcccctgggagggaagggcatccctgaggcacccgaatggtccctcagggtgcagggaggcagaagcctggccacagaggagcctcctaaggcagcagctgcagcaagcgcaccctctccccactctccccacgccagagcggcttccagagcagatgctgtttccatcctcctcgtcaaaaccattctcgctgctgagcttgacaatctgggcaaggcttgtggggcgcttgacaaacagaatctgccctgtgccgcctggttccgtggcctccagcatgagcctgcaggcagggcgctgcgggaacccagttgtgctgccccagcccatgcctccgggtctgctgtgcatgaatgagtgctcacttgtcccgggtttaggacgtggtcaagtgaacagcagggtctaactgtgcttacttagcccagttcaaacagaacaaaggaaaaatatagaaagcaacatctgttgatcatttaggtttttttttaaaccaccatgtcactttgagtccttcatgggtttttgaacagcatttatcaagaagaaaatgtgggctttttcccctctcccgtgttttgtttgtcctgtagatagagggaggaaagccgtgcagtggcaggcgggaccccctctggtggcgggaccccctcttgcggtggtcttgcggggccagccgggacctgtcactttattatttaaggagtgtgtgtgtagagtcgctggcttattaacagtattgtgtgtgggttgggtttttagtttgttccttctttttgaagtcccttcatttcaatccttgactctctctccccttcccttgcccagctctgttgaatgctgctgtgcgcgtgtgagggccgctctgcacacagggcccttgggttgtgtgaactgaaattctccctgtatttgtgagactcgcaggagtccccatctgtagcacaggcaatgccagtgccatgctgcagcctcagaaaccaggcctctcactccagcagcaggcagaaccgtgtctgtggtcgggtgctgtccacagctctgtctgccttgttcttgggcttgagctggatagaggtggggtctcttcaccttccctgaattcagaacagaccctgtgcctggccccagtgtgcccaggcaattccccaggccctcactgggagcccttggtgttctgagcagcagggcccaggcagcacatgagcagtgcccaggggctccctgcgtgaggacggcaaggtgcgatgtatgtctaacttattgatggcaggcagccccctgtgccccctaagcctggccctggttattgctgagctctgtgctcagtgctgcggcctggccgtggctcgtctgttcctttggggggcccgggcgggttgtgggaatcagtcttcacagacagacgtgagccaggcggaggactcgttccttgcagaggtcagtcctcacctgcaggtgtcggggtgtgggggggcaaggaggggcaggcacacaccatgtctgacctgaacccgattctggggagcatcttcccgctccggccccacgacctccacagggttacattgtaatatatatgccccagctaacctgtctgatggtggcatcttcctgcagacatttcaaacatgtaacttttatatgaaaaaaaataaacacagatgaaagctgcccaatgcc

SEQ ID NO: 260333 - DNA, 6059 bp, Artificial Sequence
  derived and/or modified sequence
gagattcctcaggcttcccttgtgaggctgcctgggttctgccgctgggtggtttgggatgtccaagagatatcccctttcagccagtgactcggtcctcagttgctgctccggaaagacgctggggctgggaagggccctgtgtcctctggctttaaaatgggcaatgctattgaaaaacagaagcccttgaaacgaagtcatctgtacccctggaaacaagactctcagcgttctcatctctcttccttcaccatgaagctgatggacaaattccactcacccaaaatcaagagaacgccatcaaagaagggaaaaccagctgaggtgtccgtaaagattccagagaagcctgtgaacaaaaacctgagctggctggaggagaaagagaaggaagttgtcagtgccctgcgctactttaagaccattgtggacaaaatggcaattgataagaaggtactggagatgcttccagggtcagccagcaaggtgctggaggccatcttacccctggtgcagaacgatcctcgaattcagcacagctcagccctctcttcctgctatagccgagtgtaccaaagcctcgccaacctcattcgctggtctgaccaagtgatgctggaaggcgtgaactcagaagacaaggagatggtgacgactgtgaagggggtcatcaaggctgtgctggatggagtgaaggagctggtcaggctcaccatcgagaagcagggacgtccgtctccgacgagccccgtgaagcccagttcccctgccagcaagcctgatggcccagcagagctccccctgacagaccgcgaggtagagatcctaaacaagacgactgggatgtcacagtcaactgagctcctcccagatgccacggatgaagaggtcgcgccccccaagcctcctctgcctggcattcgggtggttgataatagtcctccaccagcattgccacccaagaaaagacagtcggcgccgtcccctacccgagtggctgtggtggcccccatgagccgagccaccagtggctccagtttgcctgttggaatcaataggcaggattttgatgttgactgttacgcacagaggcgactgtcaggaggcagccactcatatggtggagagtcgccccgcctctccccctgcagcagcataggcaagctcagcaagtcagacgagcagctgtcctctctggacagggacagtgggcagtgctcccggaacacaagctgtgaaacactagaccactatgatcccgactatgaattcctccagcaagacctctctaacgcagaccagatacctcagcagacggcctggaaccttagcccgttgccagagtctttgggggagtctgggtctccatttcttggccctcctttccagctgcctcttggcggccatccccagccagacggacctctggccccagggcagcagacagatacgccacctgctctccccgagaagaagcgcaggagcgcagcctcccagacggcggacggctctggctgcagggtgtcctacgagcggcatccctcgcagtatgacaacatctctggggaggacctgcagagcacagccccgatcccatccgtcccctacgcgccctttgctgctattctgccctttcagcatggaggttcctcagcccctgtcgaatttgtgggtgattttactgctcctgagtcaaccggtgacccagaaaaaccacctcctctaccagagaagaaaaacaaacacatgctggcctacatgcagttgctggaggactactcggagccgcagccctctatgttctaccagacgccacagaacgagcacatctaccagcagaagaacaagctcctcatggaggtatacggcttcagcgactccttcagtggggtggactccgtgcaggagctggccccgccgcccgccctaccccccaagcagcggcagctggagccaccggctgggaaagacggacatcccagagatccctcagcggtcagcggcgtccctgggaaggacagcagagacggcagtgagagggccccaaagtcaccagatgctctggagtcggctcagtcggaggaggaagtggacgagctgtccctcattgaccacaacgaaattatgtccaggctgacgctcaagcaggagggtgatgacgggccggacgtccgcggaggatctggggacatcttactggtccatgctactgagactgacaggaaagatttggtgttgtactgcgaggcattcctgaccacctacaggaccttcatctccccagaggagctcatcaagaagctgcagtacagatatgagaaattctctccctttgccgacacattcaagaagcgcgtcagcaagaacacgttcttcgtgctggtacgggtggtggatgagctctgcctggtggagttgacagaagagatcctgaagctgctgatggaactggtcttccgcctggtgtgcaatggggagctgagcctggcccgtgtgctccggaagaacatcctggacaaggtggaccagaagaagctactcaggtgtgccacctccagccagcccctggcagcccggggggtagcagccaggccggggaccttgcacgactttcacagccatgagatagcggagcagctaacgctgctggatgctgagctcttctataaaatagagattcctgaggttttgctttgggcaaaagagcagaatgaggagaagagccccaacttgacccagttcacggagcacttcaacaacatgtcctactgggtccggtccataatcatgttacaggaaaaggcccaggacagggaacggctgctcttgaagttcatcaagatcatgaagcacttgcggaagctgaataacttcaactcctacttggccatcctctctgccctggactcggcgcccatccgcaggctggagtggcagaagcagacttcagagggcctggccgagtactgcacactgatcgacagctcgtcctccttccgagcctaccgggccgccctctcggaggtggaaccgccgtgcatcccgtacctggggctgatcctgcaggacctgaccttcgttcacctgggaaacccagactacatcgacgggaaagtgaacttctccaagcggtggcagcagttcaacatcctcgacagcatgcgctgcttccagcaggcgcactatgacatgcggaggaacgacgacattataaacttcttcaatgacttcagtgaccacctggctgaggaggccctatgggaactgtctctgaaaattaaacccaggaacataacaaggagaaaaacagaccgggaagagaagacctaggagcagacgccgggatccaggagaatgctcgaggggcgcagagggcagctcccagaccggagaggaccttggacctgttaggcgcatggcaggagtcccggcctcggagccatgaggctggccagccctcagcggggccgggcgggagctggagcctgccagccgcttcctgcctccttcctctgtgggagcagacccgtgggcctcagggcagccagcaggcaggtcttgttgccaatttacaaaccggtggttttctggtttggttttgttttctgcttttacttccatctctcccctcttgaccttccacccactcccctccagggagagagcagcagagacctcatcagcagaccaaggaagtggtgggtgctccccctccctaagctccagggtccctgaatcttctgaaatctcaaatgagtggaggcctcctggggtggcctgtcctgcaggggccctggaatgggggcaagcagctgggtgggcagaatgcagagtagactcgggggaggatcctttcactttccgcttccccttctgatgcatggaggatggtgtgagcttttcagcaggcccggaaaggtacgcaggtgacgccttagcagccccgcagctggtgctctgccccgcggtactggcgccatcagggcctcccttgcccgcctgagagcagcagcagtctctgtcatcccgtcgccccttaccccccaccccaggccactgggcccctcccacaccacctggggagctgagaagaggaggctggagtaagggaggacttgatcatccaagaaatactttttattgctgggagtcttctgaacctcaccaaactgaggccagagctgagctcctgggggagttaattcagaggggagaggccagcacctccctcctccatcgctcgctgtgtgccttaaactccatctcatgtccctccccatcccctggctttccctccctccttgccccatcctgggccagccagcagggctcctcctctggctcttcagacctttcagccagtgctgtcagtgcccctgggagggaagggcatccctgaggcacccgaatggtccctcagggtgcagggaggcagaagcctggccacagaggagcctcctaaggcagcagctgcagcaagcgcaccctctccccactctccccacgccagagcggcttccagagcagatgctgtttccatcctcctcgtcaaaaccattctcgctgctgagcttgacaatctgggcaaggcttgtggggcgcttgacaaacagaatctgccctgtgccgcctggttccgtggcctccagcatgagcctgcaggcagggcgctgcgggaacccagttgtgctgccccagcccatgcctccgggtctgctgtgcatgaatgagtgctcacttgtcccgggtttaggacgtggtcaagtgaacagcagggtctaactgtgcttacttagcccagttcaaacagaacaaaggaaaaatatagaaagcaacatctgttgatcatttaggtttttttttaaaccaccatgtcactttgagtccttcatgggtttttgaacagcatttatcaagaagaaaatgtgggctttttcccctctcccgtgttttgtttgtcctgtagatagagggaggaaagccgtgcagtggcaggcgggaccccctctggtggcgggaccccctcttgcggtggtcttgcggggccagccgggacctgtcactttattatttaaggagtgtgtgtgtagagtcgctggcttattaacagtattgtgtgtgggttgggtttttagtttgttccttctttttgaagtcccttcatttcaatccttgactctctctccccttcccttgcccagctctgttgaatgctgctgtgcgcgtgtgagggccgctctgcacacagggcccttgggttgtgtgaactgaaattctccctgtatttgtgagactcgcaggagtccccatctgtagcacaggcaatgccagtgccatgctgcagcctcagaaaccaggcctctcactccagcagcaggcagaaccgtgtctgtggtcgggtgctgtccacagctctgtctgccttgttcttgggcttgagctggatagaggtggggtctcttcaccttccctgaattcagaacagaccctgtgcctggccccagtgtgcccaggcaattccccaggccctcactgggagcccttggtgttctgagcagcagggcccaggcagcacatgagcagtgcccaggggctccctgcgtgaggacggcaaggtgcgatgtatgtctaacttattgatggcaggcagccccctgtgccccctaagcctggccctggttattgctgagctctgtgctcagtgctgcggcctggccgtggctcgtctgttcctttggggggcccgggcgggttgtgggaatcagtcttcacagacagacgtgagccaggcggaggactcgttccttgcagaggtcagtcctcacctgcaggtgtcggggtgtgggggggcaaggaggggcaggcacacaccatgtctgacctgaacccgattctggggagcatcttcccgctccggccccacgacctccacagggttacattgtaatatatatgccccagctaacctgtctgatggtggcatcttcctgcagacatttcaaacatgtaacttttatatgaaaaaaaataaacacagatgaaagctgcccaatgcc

SEQ ID NO: 260334 - DNA, 739 bp, Artificial Sequence
  derived and/or modified sequence
gagattcctcaggcttcccttgtgaggctgcctgggttctgccgctgggtggtttgggatgtccaagagatatcccctttcagccagtgactcggtcctcagttgctgctccggaaagacgctggggctgggaagggccctgtgtcctctggctttaaaatgggcaatgctattgaaaaacagaagcccttgaaacgaagtcatctgtacccctggaaacaagactctcagcgttctcatctctcttccttcaccatgaagctgatggacaaattccactcacccaaaatcaagagaacgccatcaaagaagggaaaaccagctgaggtgtccgtaaagattccagagaagcctgtgaacaaagaggcaacagacagatttctaccagagggctaccctctccccttggatctggagcagcaggcagtagaatttatgtccaccagtgctgtggcttccaggtctcaaaggcagaagaacctgagctggctggaggagaaagagaaggaagttgtcagtgccctgcgctactttaagaccattgtggacaaaatggcaattgataagaaggtactggagatgcttccagggtcagccagcaaggtgctggaggccatcttacccctggtgcagaacgatcctcgaattcagcacagctcagccctctcttcctgctatagccgagtgtaccaaagcctcgccaacctcattcgctggtctgaccaagtgatgctggaag

SEQ ID NO: 260335 - protein, 208 aa, Artificial Sequence
  derived and/or modified sequence
MAKQYDVLFRLLLIGDSGVGKTCLLCRFTDNEFHSSHISTIGVDFKMKTIEVDGIKVRIQIWDTAGQERYQTITKQYYRRAQGIFLVYDISSERSYQHIMKWVSDVDEVGDATSLPGCGEGASPGKARRGPDGKANASRKLCLPQPWMKTSGTHQKASRRSLLGIRLMRSRNGRWEESKGSSWRRSMAWTSMKQVPAPTSTLKSHSRV

SEQ ID NO: 260336 - DNA, 627 bp, Artificial Sequence
  derived and/or modified sequence
atggccaagcagtacgacgtgctgttcagactgctgctgatcggcgacagcggcgtgggcaagacctgcctgctgtgcagattcaccgacaacgagttccacagcagccacatcagcaccatcggcgtggacttcaagatgaagaccatcgaggtggacggcatcaaggtgagaatccagatctgggacaccgccggccaggagagataccagaccatcaccaagcagtactacagaagagcccagggcatcttcctggtgtacgacatcagcagcgagagaagctaccagcacatcatgaagtgggtgagcgacgtggacgaggtgggcgacgccaccagcctgcccggctgcggcgagggcgccagccccggcaaggccagaagaggccccgacggcaaggccaacgccagcagaaagctgtgcctgccccagccctggatgaagaccagcggcacccaccagaaggccagcagaagaagcctgctgggcatcagactgatgagaagcagaaacggcagatgggaggagagcaagggcagcagctggagaagaagcatggcctggaccagcatgaagcaggtgcccgcccccaccagcaccctgaagagccacagcagagtgtag

SEQ ID NO: 260337 - DNA, 627 bp, Artificial Sequence
  derived and/or modified sequence
atggccaagcaatacgacgtcctgtttcgacttcttcttatcggagattctggagttggcaagacttgtcttctgtgtcggtttacagataatgagttccactccagccacatctcgacaatcggtgtggacttcaaaatgaaaactattgaggttgacggcattaaggtgcggatacaaatttgggataccgctggccaggagcgttaccagacaattacgaaacagtattaccgccgcgctcaaggaatctttctggtgtacgacatttcttctgaacgtagctaccagcatattatgaagtgggtctcagatgtagatgaagtcggggatgctacctctcttcccggatgtggggaaggtgcttctcctggtaaagctcggaggggacccgatgggaaggcgaatgcatctaggaagctgtgcttacctcagccttggatgaagacatcaggcacccaccagaaagcgtctcggagaagtctgctggggattaggctcatgcgaagtaggaacggtcgatgggaagagagtaagggctcttcatggcgcagaagcatggcgtggacaagcatgaaacaggttcccgcccctacctccaccctgaagtcccactccagagtttag

SEQ ID NO: 260338 - DNA, 627 bp, Artificial Sequence
  derived and/or modified sequence
atggccaagcagtatgatgtgctcttccggctgctgctgattggagacagcggcgtgggcaagacctgcctgctgtgccgcttcacagacaatgagttccacagcagccacatcagcaccatcggcgtggacttcaagatgaagaccatcgaggtggatggcatcaaggtgcgcatccagatctgggacacagctggccaggagcgctaccagaccatcaccaagcagtactacagaagagcccagggcatcttcctggtgtatgacatcagcagcgagaggagctaccagcacatcatgaagtgggtgtctgatgtggatgaggtgggagatgccaccagcctgcccggctgtggggagggcgccagccctgggaaggcccggcggggcccagatggcaaggccaatgccagcaggaagctgtgcctgccccagccctggatgaagaccagcggcacccaccagaaggccagcagaagaagcctgctgggcatccggctgatgaggagcagaaatggccgctgggaggagagcaagggcagctcctggaggaggtccatggcctggacctccatgaagcaggtgcctgcccccaccagcaccctgaagagccacagccgggtgtag

SEQ ID NO: 260339 - DNA, 627 bp, Artificial Sequence
  derived and/or modified sequence
atggccaagcagtacgacgtgctgttccggctgctgctgatcggcgacagtggtgtggggaagacatgccttctgtgtcgctttaccgataatgagttccactccagccacattagcactatcggggtagatttcaaaatgaaaaccatcgaagtggacggcatcaaagttcgcattcagatttgggatactgccgggcaggagcggtaccagaccattaccaaacagtactatcgacgtgcgcagggcatattcttagtctacgacatcagcagcgagcgcagttaccagcacatcatgaagtgggtgtcggacgtggatgaagtgggcgatgcgacttctctgcccgggtgcggagagggggcttcgccaggaaaagcaagacgaggccccgatgggaaagccaatgcctcaagaaaattgtgtttgccccagccatggatgaaaacaagtggcacgcaccagaaagccagccgccgttcactcctcgggatccgtcttatgcggtccaggaatgggcggtgggaggaaagcaaggggtcatcgtggaggcgcagcatggcatggacatctatgaagcaggtgccagcccctaccagtactcttaagagtcatagcagggtttag

SEQ ID NO: 260340 - DNA, 627 bp, Artificial Sequence
  derived and/or modified sequence
atggctaagcagtatgacgtgctgttccgactgctgctgatcggcgatagcggtgtgggtaagacgtgtcttctttgcaggttcacagacaacgaattccactctagccacattagtacgattggagtggatttcaaaatgaaaactatcgaggtcgacggcataaaagtacgcatacagatatgggacacagcgggacaggaaaggtatcagacaatcacaaagcagtactatcgccgtgcccagggtatttttctagtttatgatatctcaagcgagagatcctatcaacatattatgaaatgggtgagtgacgttgacgaagtaggggatgccacctccctgcccggatgcggtgagggggctagccctggaaaggcccgtcgaggcccagatggaaaagccaatgcatcccggaagttatgcctgcctcagccctggatgaagaccagcggaacccaccagaaggcatcaaggaggagtctgcttggtattcgactcatgagaagccgcaacggcaggtgggaggagagcaagggctctagttggagaaggagcatggcctggactagcatgaagcaggtacccgctcctacaagcacactcaaatcccattcccgggtttag

SEQ ID NO: 260341 - DNA, 3391 bp, Artificial Sequence
  derived and/or modified sequence
gggcgcgggccgcgatggcagcggcggagcagggctgagcccgctgcccgcccgcagttcccggccccgctggccccagtcatggcgaagcagtacgatgtgctgttccggctgctgctgatcggggactccggggtgggcaagacctgcctgctgtgccgcttcaccgacaacgagttccactcctcgcacatctccaccatcggtgttgactttaagatgaagaccatagaggtagacggcatcaaagtgcggatacagatctgggacactgcagggcaggagagataccagaccatcacaaagcagtactatcggcgggcccaggggatatttttggtctatgacattagcagcgagcgctcttaccagcacatcatgaagtgggtcagtgacgtggatgaggtaggagatgccacctcactgccggggtgtggagagggtgcctcaccggggaaggcaaggcgagggccagatgggaaggcaaatgcttccaggaagctttgccttccacagccctggatgaagacctctggtacgcaccagaaggcgtccagaagatccttattgggaataaggctgatgaggagcagaaacggcaggtgggaagagagcaagggcagcagctggcgaaggagtatggcatggacttctatgaaacaagtgcctgcaccaacctcaacattaaagagtcattcacgcgtctgacagagctggtgctgcaggcccataggaaggagctggaaggcctccggatgcgtgccagcaatgagttggcactggcagagctggaggaggaggagggcaaacccgagggcccagcgaactcttcgaaaacctgctggtgctgagtcctgtgtggggcaccccacacgacacccctcttccctcaggaggcccgtgggcagacaggggagccggggctttgccctgctgctgtcctctcgtgtgatgaccctattgagtatcagtagccactactccccctgcctggccctgagagcggctctgctgtcatctcaagcagcccctgtccccagcccgtccaccctggagtggtcttcttcagcctgtttccccagccacaggcctgctacgacccccacgatgtgccgcaagcactgtctcaccatcccgcacccaccagacaacagccagggctggagtccaggccactttcagctgctcctttctccgtgcatcgtgtctcttctctgctttttctctcttcccccacttctctttctctgacccctcccctccggtgcgtttcgtatcaaagctcctcaaaccccgtcccccgtgtgtcctgctgtgtgcagctcgctctttccttccttcctaagctatccaaggggatggacccaggctcgtggggaggttccacccttggatccaggaagaaccctccaccctgcctcgtgggtgggccaaaggctacagggtgcttcttcctcttcccccacccccactgtccctcatgtgccatgggcctgcctccccagtgacctgcgaaagtggagcatcgaggtaggagggaaacggcaaccagggagtcctcgagcctggggctgccctacctctacccattccccgaccagagctttgcccttgcttggctgcccgcctgcctctttggggaactgagctcagaggcaggtgcttcagagaaggaaacaaaatgaggggtggcagggataaaaagtcacctccattctctacctcccatgcagcatgaacacaatttctctccacctggctcccaaatttaaagatgtggaccaaggcctgtgggtactccaggggcaaggagagccctggggtcagtgacactgtcaggccaaccatgcactccacaaaggggagcatttggaaatgaaggactagctcctatgtatcaggttaagagcaagggagagctggccagggacagcagtttgcacagcagaggggaatgtagcaacagcagggcctcctaggccccatcttccatttcttaggtaagaagagcatttcctcagactcccaggcggaggactgagcctagccttcagcaaccaaggttctcctgggacccaaagtttatgggagaagggcaaagacttcatgggaagagagaaggaaggccctgggtagaaacgcttggtgctgttctctttggcctttaagacaaagcgctcatcttgccctctacctcctgataggcttgagggtttgccaaccacactgtggctacaggtggagggaagaggactccttcctccagagtgctatgttcaggaagtttctttaaccccatatggcccaagagtagctcgtaggaggccctttaaagacggaacaagtaatttaccagttctactggggttcctgcccaccgtcccaaggtgggcgaggcctaggaagagggtcattcttaagccacacattagctgcactgcgtggctgcagccaaaacaaagaactgggtgttgagtattcatcaactaagaaccaaaatccagggcactcatatgtgaaggataagaacctcacttccttactcctccaaaaagaagtggggaaagaaccatcaaacctttcctcctgacttaccaaaccaggaaaacagcaggagagggtggctcaggacttagggacagggtatagcttagatggtggaaagcaaaggagagcaggaagttgtaaatcactggctaatgagaaaaggagacagctaactctaggatgaagctgtgactaggctggagttgcttccttgaagatgggactccttgggtatcaagacctatgccacatcacactggggctagggaagtaggtgatgccagccctcaagtctgtcttcagccagggacttgagaagttatattgggcagtggctccaatctgtggaccagtatttcagctttccctgaagatcaggcagggtgccattcattgtctttctctcctagccccctcaggaaagaaggactatatttgtactgtaccctaggggttctggaagggaaaacatggaatcaggattctatagactgataggccctatccacaagggccatgactgggaaaaggtatgggagcagaaggagaattgggattttagggtgcagctacgctcaccctaaacttttggtggcctggggcatgtcttgaggcccagactgttaaccaggctctgctggcctgtttactcgtcaccacctctgcacctgctgtcttgagactccatccagccccaggcacgccacctgctcctgagcctccactatctccctgtgacgggtgaacttcgtgtactgtgtctcgggtccatatatgaattgtgagcagggttcatctattttaaacacagatgtttacaaaataaagattatttcaaaccacc

SEQ ID NO: 260342 - DNA, 546 bp, Artificial Sequence
  derived and/or modified sequence
atgcaagtgaacttcgttagctacgtgcagctaacgtctagagcgctcccaagcctcaccgatagtaagggatccctggtggtggtaagctccctcctgggtagagtgcccacttccttcagcacgccttatagcgcggcaaaatttgcactggatgggttttttgggtccctgcggagagaattggacgtccaggatgtgaatgtggcgataacaatgtgcgtgcttggtctgcgggaccgggcaagtgcggcagaggcggttcggtcttcgacttcccgcccacgacaaccagaacacagaggcgtgccccttcagtctcagacagcgatgtttctccccccaacagtgcccggagccaggacacttactgagacacccctccgcggatggccccagccaaaaatgaaatccagccgacagaagagtaagacagagaagaatgatgggcatttagagcccgtgactgcctgggaagttcaggtcccaagggtcaggcgtctctgcagaggcctggcccgtcctcatctgtttggccacgattag

SEQ ID NO: 260343 - DNA, 546 bp, Artificial Sequence
  derived and/or modified sequence
atgcaggtcaacttcgttagctatgtgcagctcacttcacgtgcactcccctccttgacagatagcaaaggcagcttggtggtagtttcaagcctcttagggagggtccccacatcattttctactccttattctgccgctaagtttgcacttgacggcttctttgggtccctgcgtcgcgaactcgatgttcaggatgtcaacgtggcaatcacaatgtgcgtactcgggctacgagacagagcctccgcagccgaagctgtaaggtcctctacgtcgcgtcccagacagccagaacaccggggtgtgccacttcagagccagactgctatgtttctcccccccaccgtgcctggagcacggaccctgactgaaactccacttcggggctggccacagccaaagatgaagtcttctagacagaaatccaaaaccgagaagaatgatgggcacctggaacccgtcaccgcttgggaggtgcaagtcccacgcgttcgtagactgtgccgcggcctggcccgaccacatctcttcggacacgactag

SEQ ID NO: 260344 - DNA, 546 bp, Artificial Sequence
  derived and/or modified sequence
atgcaagtgaacttcgtctcctacgttcagctaaccagtagagctcttccatcactcacagactctaaggggtctctcgtcgtcgtgtccagcctcctgggccgcgttcccacttcttttagcaccccatacagcgccgcaaaatttgccctggatggcttttttggatcacttcgccgcgagctcgacgttcaggatgtcaacgtcgcgataaccatgtgcgtgctgggcctgagggatcgtgcctccgccgcagaagcagttcgctcgtctactagcaggccacgccagcctgagcaccgcggagttccattacaatctcagacagccatgtttctaccaccaaccgttccaggcgccaggacgcttacagagacccccctccgtggctggcctcagcccaagatgaagtcttcccgtcagaaatcgaagacagagaagaacgatggccacctcgagcctgtgacagcatgggaggtccaggtgccacgcgtccgacgactgtgtaggggcctcgcccgcccacaccttttcggccatgactag

SEQ ID NO: 260345 - DNA, 546 bp, Artificial Sequence
  derived and/or modified sequence
atgcaggtgaacttcgtgagctacgtgcagctgaccagcagagccctgcccagcctgaccgacagcaagggcagcctggtggtggtgagcagcctgctgggcagagtgcccaccagcttcagcaccccctacagcgccgccaagttcgccctggacggcttcttcggcagcctgagaagagagctggacgtgcaggacgtgaacgtggccatcaccatgtgcgtgctgggcctgagagacagagccagcgccgccgaggccgtgagaagcagcaccagcagacccagacagcccgagcacagaggcgtgcccctgcagagccagaccgccatgttcctgccccccaccgtgcccggcgccagaaccctgaccgagacccccctgagaggctggccccagcccaagatgaagagcagcagacagaagagcaagaccgagaagaacgacggccacctggagcccgtgaccgcctgggaggtgcaggtgcccagagtgagaagactgtgcagaggcctggccagaccccacctgttcggccacgactag

SEQ ID NO: 260346 - DNA, 546 bp, Artificial Sequence
  derived and/or modified sequence
atgcaggtgaacttcgtttcatatgtgcagttgacaagccgtgcgttgcctagtctgacggatagtaagggcagcttagttgtggtaagtagcttgctaggccgagtgccgacctctttctccaccccctatagcgccgccaaattcgcactggacgggttttttggttcattgaggcgcgaactagatgtgcaggatgtgaatgtggctattactatgtgcgtcttgggactgagggatagggcaagcgcggcggaagccgtgaggtcctccacatcacggccacggcagcccgaacatagaggtgtgccattacagagtcaaacagctatgtttctgcccccaacagtgcccggcgctaggacactgactgaaactccattacggggctggccccagccaaagatgaagtcttcccgccaaaagagtaagacagaaaagaatgatgggcacctggagcccgtgaccgcctgggaggtacaggtaccgagagtaaggcggctttgccgcggcctggcccgaccacatctgttcggtcacgattag

SEQ ID NO: 260347 - DNA, 546 bp, Artificial Sequence
  derived and/or modified sequence
atgcaggtgaactttgtgtcctatgtgcagctgaccagccgggccctgcccagcctgacagacagcaagggcagcctggtggtggtgagcagcctgctgggccgggtgcccaccagcttcagcaccccctacagcgctgccaagtttgccctggatggcttcttcggcagcctgcggcgggagctggatgtgcaggatgtgaatgtggccatcaccatgtgtgtgctgggcctgcgggaccgggccagcgctgctgaggccgtgcgcagcagcaccagccggccccggcagcctgagcaccggggcgtgcccctgcagagccagacagccatgttcctgccccccaccgtgcctggggcccggaccctgacagagacccccctgcggggctggccccagcccaagatgaagagcagccggcagaagagcaagacagagaagaatgatggccacctggagcctgtgacagcctgggaggtgcaggtgccccgggtgcggcggctgtgccggggcctggcccggccccacctgtttggacatgactag

SEQ ID NO: 260348 - DNA, 546 bp, Artificial Sequence
  derived and/or modified sequence
atgcaggtgaacttcgtgagctacgtgcagctgaccagccgggccctccccagccttaccgactcaaaggggagtctggttgtggtgtcatcccttctgggcagagttcctacaagcttctcgactccctattccgctgcgaagttcgcacttgacggattctttgggagtctccgtcgggagttagacgtccaggatgttaatgtcgcgatcactatgtgtgtgctgggcctcagagaccgggccagtgccgcggaggccgtgcgatcaagtacttccagaccacggcaaccagagcacagaggggtgccccttcaatcccagacagccatgtttcttcctccaaccgtgccgggtgcccggacattgaccgagacacctctgagaggatggcctcagccaaagatgaaatcttccagacagaagtctaagacagagaagaatgacggccatttggaacccgtgacagcttgggaggtgcaagtccctagagtaaggagactgtgcaggggtctcgctcgtccacacttgttcggccacgactag

SEQ ID NO: 260349 - RNA, 546 nt, Artificial Sequence
  derived and/or modified sequence
augcaggucaacuucguuagcuaugugcagcucacuucacgugcacuccccuccuugacagauagcaaaggcagcuuggugguaguuucaagccucuuagggaggguccccacaucauuuucuacuccuuauucugccgcuaaguuugcacuugacggcuucuuugggucccugcgucgcgaacucgauguucaggaugucaacguggcaaucacaaugugcguacucgggcuacgagacagagccuccgcagccgaagcuguaagguccucuacgucgcgucccagacagccagaacaccggggugugccacuucagagccagacugcuauguuucucccccccaccgugccuggagcacggacccugacugaaacuccacuucggggcuggccacagccaaagaugaagucuucuagacagaaauccaaaaccgagaagaaugaugggcaccuggaacccgucaccgcuugggaggugcaagucccacgcguucguagacugugccgcggccuggcccgaccacaucucuucggacacgacuag

SEQ ID NO: 260350 - RNA, 546 nt, Artificial Sequence
  derived and/or modified sequence
augcaagugaacuucgucuccuacguucagcuaaccaguagagcucuuccaucacucacagacucuaaggggucucucgucgucguguccagccuccugggccgcguucccacuucuuuuagcaccccauacagcgccgcaaaauuugcccuggauggcuuuuuuggaucacuucgccgcgagcucgacguucaggaugucaacgucgcgauaaccaugugcgugcugggccugagggaucgugccuccgccgcagaagcaguucgcucgucuacuagcaggccacgccagccugagcaccgcggaguuccauuacaaucucagacagccauguuucuaccaccaaccguuccaggcgccaggacgcuuacagagaccccccuccguggcuggccucagcccaagaugaagucuucccgucagaaaucgaagacagagaagaacgauggccaccucgagccugugacagcaugggagguccaggugccacgcguccgacgacuguguaggggccucgcccgcccacaccuuuucggccaugacuag

SEQ ID NO: 260351 - protein, 205 aa, Artificial Sequence
  derived and/or modified sequence
MKVLLLTGLGALFFAYYWDDNFDPGGLDYLVLNHIGGAPAGTRARSPQATRWLMQVNFVSYVQLTSRALPSLTDSKGSLVVVSSLLGRVPTSFSTPYSAAKFALDGFFGSLRRELDVQDVNVAITMCVLGLRDRASAAEAVRGVTRVKAAPGPKAALAVIRGGATRAAGVFYPWRFRLLCLLRRWLPRPRAWFIRQELNVTAAAA

SEQ ID NO: 260352 - DNA, 618 bp, Artificial Sequence
  derived and/or modified sequence
atgaaagtcttattactcacaggcctcggcgcattgtttttcgcctactactgggacgacaactttgatccaggtgggctcgattacctggtgttgaaccacattgggggtgccccagccggtacacgtgcacgctcccctcaggcgacaagatggcttatgcaggtcaatttcgtgtcctatgtccagctgacttcccgcgcactgccgtccctgacagactcaaaggggagtctcgttgtggtgagctcactgttgggtagggtgcccaccagtttctctactccttatagcgccgctaagttcgcactggatggctttttcggatcgctgcgacgcgagctggacgtccaggacgtgaacgtggcgatcacaatgtgcgtgcttggactgcgagacagggctagtgcagcagaggcagtgcgcggagttacaagagtgaaggctgccccaggcccaaaggctgcactggccgtcatacggggaggtgccacacgcgctgcaggcgttttctacccgtggcgctttcggttactgtgtctgctccggagatggctccccaggccgcgagcttggttcattcgccaagagctgaacgtgaccgccgctgccgcatag

SEQ ID NO: 260353 - DNA, 618 bp, Artificial Sequence
  derived and/or modified sequence
atgaaggttctgctgctcacagggctcggtgcacttttctttgcatactactgggacgataattttgatccaggcggactggattacctcgtgctgaaccatattggcggtgctcccgccggcacccgtgctcgcagtccccaggccacccgatggctgatgcaagtgaacttcgtctcctacgtccaattgacatcacgtgcactccctagcttaaccgattctaagggctcactagttgtcgtgtcttccctgttaggccgggtccctacctccttctcaacaccatattctgctgctaaatttgccctggatggcttctttggaagcctccgccgggagttggacgttcaagacgtaaacgtcgcaattactatgtgtgtgctagggcttagggatcgggcttcagccgccgaagccgttcgtggcgtcacccgcgttaaagccgctcctggccccaaggccgcactggccgttattagaggaggcgctacccgtgcagccggagttttttacccttggaggtttcgtcttctatgcctgttacgacgatggctacctaggcctcgggcttggtttattagacaggaactgaacgtgactgccgccgcagcgtag

SEQ ID NO: 260354 - DNA, 618 bp, Artificial Sequence
  derived and/or modified sequence
atgaaggtgctgctgctaacaggtctcggagctcttttttttgcctattactgggacgacaattttgatcccggaggactagactatcttgtgctgaatcacatcggcggggcccctgcaggcacccgagcaaggtcaccacaagcaactcgatggcttatgcaggtgaacttcgtgtcttacgtgcagttgacttcaagggcactgcctagtttgactgactcaaagggctcgctcgtcgtcgtatcttcccttctaggtcgagtccccacctcatttagcaccccatactctgccgccaaattcgctctcgatggcttcttcggctccctaaggagagagcttgatgtacaggacgtgaacgtcgcgataaccatgtgcgtgctcgggttacgggatagggccagcgcagctgaagccgttcgaggagtgacaagggtaaaggcggcgccaggacctaaggccgcactggccgtcattagaggaggtgcgaccagggcagcaggcgtgttctacccgtggagatttcggctcctgtgtttacttagaaggtggctcccccggccgagagcatggttcatcagacaggaattgaatgtgactgccgccgccgcttag

SEQ ID NO: 260355 - DNA, 618 bp, Artificial Sequence
  derived and/or modified sequence
atgaaggtgctgctgctgaccggcctgggcgccctgttcttcgcctactactgggacgacaacttcgaccccggcggcctggactacctggtgctgaaccacatcggcggcgcccccgccggcaccagagccagaagcccccaggccaccagatggctgatgcaggtgaacttcgtgagctacgtgcagctgaccagcagagccctgcccagcctgaccgacagcaagggcagcctggtggtggtgagcagcctgctgggcagagtgcccaccagcttcagcaccccctacagcgccgccaagttcgccctggacggcttcttcggcagcctgagaagagagctggacgtgcaggacgtgaacgtggccatcaccatgtgcgtgctgggcctgagagacagagccagcgccgccgaggccgtgagaggcgtgaccagagtgaaggccgcccccggccccaaggccgccctggccgtgatcagaggcggcgccaccagagccgccggcgtgttctacccctggagattcagactgctgtgcctgctgagaagatggctgcccagacccagagcctggttcatcagacaggagctgaacgtgaccgccgccgccgcctag

SEQ ID NO: 260356 - DNA, 1456 bp, Artificial Sequence
  derived and/or modified sequence
cctgctgggaggcgaagaccaggcgggcactgttgcccggcgacgctccggcgctgggtccccgaggcccggcccctccccgggaggaggtgggcttcgagtcacgtgacccgtgccctacgggagggggtgcggtcggggacccggcaggaggcggccgagaagagaggaccgtgggggcgttcgcgtggctcccagcccgggaccccacccccgctggacagtgggggaaactgaggcctgagcgggcccacacaggaccatgaaggtgcttctcctcacagggctgggggccctgttcttcgcctattattgggatgacaacttcgacccaggcgggctggactacctcgtgctgaaccacatcggcggcgccccggccggcacgcgagcccgcagcccccaggcaactcgctggctcatgcaggtaaactttgtgagctacgtgcaactgacgtcgcgggcgctgcccagcctgacggacagcaagggctccctggtggtggtgtcctcgctgctcggccgcgtgcccacgtcgttctccactccctactcggcggccaagtttgcgctggacggcttcttcggctccctgcggcgggagctggacgtgcaggacgtgaacgtggccatcaccatgtgcgtcctgggcctccgagatcgcgcctccgccgccgaggcagtcaggggagtcacgagggtcaaggcggccccggggcccaaggcagccctggccgtgatccgcggcggcgccacgcgcgcggccggcgtcttctacccgtggcgtttccgcctgctgtgcttgctccggcgctggctaccgcgcccgcgggcctggtttatccgccaggagctcaacgtcacggccgcggcagcctgagcaccggggggtgcccctccagtcccagacggcaatgttcctccctccaactgtccctggagccagaacactcacagagacacccctgagagggtggccacagcccaagatgaagtcatcaagacagaaaagcaaaaccgagaaaaacgacgggcacctggaaccagtcacggcttgggaggtgcaggtgccccgtgttaggcgcctttgtcggggacttgcaaggcctcacctgtttggccatgattgatgacgtgactgcttccattttgcagatgaggaaactaaggctcagagaggccacgccacccttgagccacccatggacccctctccatctcctgcctgcgcctttaagtccctgatttattctttccattcattccatctgggaggaacccccccaactcctgccagcttcccctagctggggtctctggtactcttcacacctgcaggggcgtctacactgttcgtctacctggtggcagggtctgagcgggaggaggagggaaagagtgtgttctgagctggacccagcctcttgttcgagaataaaaactcttcttctcttgc

SEQ ID NO: 260357 - DNA, 618 bp, Artificial Sequence
  derived and/or modified sequence
atgaaggtccttttactgaccggactaggagcactgtttttcgcctattattgggacgacaacttcgacccgggagggctggactatctcgtgttaaatcatatcgggggggcccccgccggtacgagggcaaggagtccccaggcaacaaggtggcttatgcaggtgaattttgtgagctacgtgcagctcacctccagggccctcccaagcctgacggactccaaagggtcattagttgtggtgtcttccctgctggggcgagttccaaccagttttagcaccccctacagcgcggccaagtttgcactcgatgggttctttggatctttacggagagagctagacgttcaggatgtgaacgtggcaatcacaatgtgcgtgctggggcttcgcgatcgcgccagtgcagccgaagcagtgagaggggtgactagagtgaaagccgctccaggtcccaaagccgccctcgccgtcattcgggggggggccacccgggccgccggcgttttttatccctggcgatttcgcctcctctgtttactccgaaggtggctgcctcgcccccgtgcgtggttcatacggcaggaattgaacgtcactgctgccgcggcctag

SEQ ID NO: 260358 - DNA, 618 bp, Artificial Sequence
  derived and/or modified sequence
atgaaggtgctgctgctgaccggcctgggcgccctcttctttgcctactactgggatgacaactttgaccccggcggcctggactacctggtgctgaaccacatcggcggggccccagctggcacccgggcccggagcccccaggccacccgctggctgatgcaggtgaactttgtgtcctatgtgcagctgaccagccgggccctgcccagcctgacagacagcaagggcagcctggtggtggtgagcagcctgctgggccgggtgcccaccagcttcagcaccccctacagcgctgccaagtttgccctggatggcttcttcggcagcctgcggcgggagctggatgtgcaggatgtgaatgtggccatcaccatgtgtgtgctgggcctgcgggaccgggccagcgctgctgaggccgtgcggggcgtgaccagggtgaaggccgcccctggccccaaggccgccctggccgtcatccggggcggggccaccagggctgctggggtcttctacccctggaggttccggctgctgtgcctgctgcggcgctggctgccccggccccgggcctggttcatccggcaggagctgaatgtgacagctgctgctgcctag

SEQ ID NO: 260359 - DNA, 618 bp, Artificial Sequence
  derived and/or modified sequence
atgaaggtgctgctgctgaccggcctgggcgccctgttcttcgcctattactgggatgacaacttcgatcccggtgggctagactatctggtgctgaaccacatcggcggggcaccagcaggcacacgcgctcgctccccccaggccacccgatggctcatgcaggtgaatttcgttagttatgttcaactgaccagcagggccctaccctctctgacagatagtaagggctcgcttgttgtggtgtcgtcacttctgggcagggtgccgactagtttttccactccctattccgctgccaaattcgctttggatgggttcttcgggtccctgagaagggagctcgatgtccaggacgtaaacgtggcgataactatgtgtgttcttggtctccgggaccgcgctagtgctgccgaggccgtgcggggggtgacacgggtgaaggccgctcctggccccaaggctgctctggccgtcatcaggggtggagcaacccgggcagcaggtgtgttttacccatggcggtttcgcctgctgtgcctcttacggagatggctgccacgcccacgcgcatggtttattcggcaggagctcaatgttaccgccgcagctgcgtag

SEQ ID NO: 260360 - RNA, 618 nt, Artificial Sequence
  derived and/or modified sequence
augaagguucugcugcucacagggcucggugcacuuuucuuugcauacuacugggacgauaauuuugauccaggcggacuggauuaccucgugcugaaccauauuggcggugcucccgccggcacccgugcucgcaguccccaggccacccgauggcugaugcaagugaacuucgucuccuacguccaauugacaucacgugcacucccuagcuuaaccgauucuaagggcucacuaguugucgugucuucccuguuaggccgggucccuaccuccuucucaacaccauauucugcugcuaaauuugcccuggauggcuucuuuggaagccuccgccgggaguuggacguucaagacguaaacgucgcaauuacuaugugugugcuagggcuuagggaucgggcuucagccgccgaagccguucguggcgucacccgcguuaaagccgcuccuggccccaaggccgcacuggccguuauuagaggaggcgcuacccgugcagccggaguuuuuuacccuuggagguuucgucuucuaugccuguuacgacgauggcuaccuaggccucgggcuugguuuauuagacaggaacugaacgugacugccgccgcagcguag

SEQ ID NO: 260361 - RNA, 618 nt, Artificial Sequence
  derived and/or modified sequence
augaaggugcugcugcuaacaggucucggagcucuuuuuuuugccuauuacugggacgacaauuuugaucccggaggacuagacuaucuugugcugaaucacaucggcggggccccugcaggcacccgagcaaggucaccacaagcaacucgauggcuuaugcaggugaacuucgugucuuacgugcaguugacuucaagggcacugccuaguuugacugacucaaagggcucgcucgucgucguaucuucccuucuaggucgaguccccaccucauuuagcaccccauacucugccgccaaauucgcucucgauggcuucuucggcucccuaaggagagagcuugauguacaggacgugaacgucgcgauaaccaugugcgugcucggguuacgggauagggccagcgcagcugaagccguucgaggagugacaaggguaaaggcggcgccaggaccuaaggccgcacuggccgucauuagaggaggugcgaccagggcagcaggcguguucuacccguggagauuucggcuccuguguuuacuuagaagguggcucccccggccgagagcaugguucaucagacaggaauugaaugugacugccgccgccgcuuag

SEQ ID NO: 260362 - protein, 286 aa, Artificial Sequence
  derived and/or modified sequence
MKVLLLTGLGALFFAYYWDDNFDPASLQGARVLLTGANAGVGEELAYHYARLGSHLVLTAHTEALLQKVVGNCRKLGAPKVFYIAADMASPEAPESVVQFALDKLGGLDYLVLNHIGGAPAGTRARSPQATRWLMQVNFVSYVQLTSRALPSLTDSKGSLVVVSSLLGRVPTSFSTPYSAAKFALDGFFGSLRRELDVQDVNVAITMCVLGLRDRASAAEAVRGVTRVKAAPGPKAALAVIRGGATRAAGVFYPWRFRLLCLLRRWLPRPRAWFIRQELNVTAAAA

SEQ ID NO: 260363 - protein, 199 aa, Artificial Sequence
  derived and/or modified sequence
MASPEAPESVVQFALDKLGGLDYLVLNHIGGAPAGTRARSPQATRWLMQVNFVSYVQLTSRALPSLTDSKGSLVVVSSLLGRVPTSFSTPYSAAKFALDGFFGSLRRELDVQDVNVAITMCVLGLRDRASAAEAVRGVTRVKAAPGPKAALAVIRGGATRAAGVFYPWRFRLLCLLRRWLPRPRAWFIRQELNVTAAAA

SEQ ID NO: 260364 - protein, 152 aa, Artificial Sequence
  derived and/or modified sequence
MQVNFVSYVQLTSRALPSLTDSKGSLVVVSSLLGRVPTSFSTPYSAAKFALDGFFGSLRRELDVQDVNVAITMCVLGLRDRASAAEAVRGVTRVKAAPGPKAALAVIRGGATRAAGVFYPWRFRLLCLLRRWLPRPRAWFIRQELNVTAAAA

SEQ ID NO: 260365 - DNA, 228 bp, Artificial Sequence
  derived and/or modified sequence
atgaaggtgctgctgctgaccggcctgggcgccctgttcttcgcctactattgggatgataactttgaccctgcatctcttcagggagctcgggtgctcctgaccggagctaacgcaggagtcggggaggagctggcttaccattatgctagactgggcagtcatttagttttaaccgctcacactgaggcactcctccaaaaggccggctggaccacgtcttgttag

SEQ ID NO: 260366 - DNA, 861 bp, Artificial Sequence
  derived and/or modified sequence
atgaaggtgctgctgctgaccggcctgggcgccctgttcttcgcctattactgggatgacaactttgatccagctagtctgcagggggctcgcgtgctgctcacaggggcaaacgccggagtgggcgaggagttggcataccactatgccagactgggatcccatttagtgctgaccgcgcatacagaggcacttttacagaaggttgtggggaattgccgaaagcttggcgcgcctaaggttttctacatcgctgccgatatggccagccctgaagccccggagtccgtcgtccagtttgccctggacaagctgggcggcctggattatctggtccttaaccatatcggcggtgccccagcaggtacgagggcacgatctcctcaagctactcggtggctgatgcaggtgaatttcgtttcctatgtccagctcacttctagggctctgccctctcttactgattccaagggtagtctggttgtcgtgagtagtctcctgggccgcgtcccaactagcttttccacaccctattcagcggcaaaatttgcgctggacgggttttttgggagccttcgcagggagctggatgtacaagatgtcaatgtggccatcaccatgtgtgtgctgggtctgcgggacagagctagtgcagccgaggctgtgcgcggtgtgacacgcgtcaaagccgcgcccggtcccaaagctgccctcgcagtgatacggggcggggcaacccgggcggcaggagtgttctatccatggcgatttcgcctgctgtgcctgttgagacggtggctgccccgccctcgggcgtggttcatccgccaagagttaaacgtcaccgccgccgcagcctag

SEQ ID NO: 260367 - DNA, 861 bp, Artificial Sequence
  derived and/or modified sequence
atgaaggtgctcctgctaaccggtctgggagctctgttctttgcctactattgggacgataatttcgatcctgcatcactccagggcgcaagagtcctgctgacaggcgcaaacgctggcgttggagaggagcttgcgtatcactatgcacggcttgggtctcatttggtgttgacagctcatactgaggcacttctgcagaaagtggtcggcaactgccgtaagttgggagcaccgaaagtcttctatatcgctgcggatatggcaagcccggaggcccctgagtccgttgtccaatttgctctggacaaattggggggattggactatctcgtccttaaccacatagggggagcgcctgccggtactagggccagaagcccccaagccacgagatggctcatgcaggtaaacttcgtctcctacgtgcagctcacttctcgcgctcttccgtccctcacggatagtaaagggagccttgtcgtcgtgtcctctctgttgggcagagtgccgacttcattctcaaccccatacagcgctgctaaatttgcgctcgacgggttttttggctcactcagacgcgagcttgacgttcaggatgtcaacgtagcaatcactatgtgcgtcttgggcctcagggatcgggcttccgccgcagaggccgtccgcggagtcacaagggtgaaagctgcccctggtccaaaggcagctcttgctgtaatccgaggtggagctacaagggcagccggagttttctacccatggcgctttaggctgctgtgcctgctgagacgatggctgcctcgccctagagcctggttcatcaggcaggagctaaatgttactgctgccgctgcttag

SEQ ID NO: 260368 - DNA, 264 bp, Artificial Sequence
  derived and/or modified sequence
atgaaagtgctgctgctgaccggcctgggcgcactgtttttcgcttattattgggatgacaattttgaccctgcctctctacagggggcacgggtgctgctcactggcgctaatgccggagtaggggaagaacttgcttaccactatgcgcgactcggcagccatctggtactcacagctcatactgaggccctgctccaaaaagcacgctggctgaccctcgtcgtttctacacttggcggaaggggaaagtggatcacatag

SEQ ID NO: 260369 - DNA, 228 bp, Artificial Sequence
  derived and/or modified sequence
atgaaggtcttgctcctcacaggcctgggcgctctgtttttcgcttactactgggatgacaacttcgatccagcttctctgcagggagctagagttttgctgacgggggcaaatgctggggtgggggaagagctggcatatcactacgcacgcctgggtagccacctggtgctgacggctcacactgaagctctcctccagaaagccggttggacgacctcctgctag

SEQ ID NO: 260370 - DNA, 861 bp, Artificial Sequence
  derived and/or modified sequence
atgaaggtcctgctcctgacaggtctgggggcacttttcttcgcctactactgggatgataacttcgaccctgcatccttgcagggtgctagagtgctactcaccggtgccaatgccggagtgggtgaggagctggcctaccactatgcacggcttggctcccacctggtactcaccgcccacacagaggccctgctccagaaagtggtgggcaattgtcgcaagctgggagcacccaaagtcttctatatcgcggctgacatggccagcccagaggcacccgagagcgtggtgcaattcgctcttgacaagctgggaggcctcgattatcttgtgctgaatcacattggcggagctccagcgggaactcgagcccgtagcccgcaggcaacaaggtggcttatgcaagtaaacttcgtctcctatgtccaactgaccagcagagcactgcccagtctcacggatagtaaaggctcactggttgtggtaagtagtctgctcggccgtgtgccgacctctttcagcaccccttacagtgcggctaaattcgctcttgatggcttttttggtagcttaagaagggagctagatgtgcaggacgtgaacgtcgcaatcactatgtgcgtgcttggcctgagggacagagcatcggctgcagaggctgtgcggggtgtcactagggtaaaagccgcaccgggtcctaaagctgccctggcagtgattagagggggagccacgcgggctgccggtgtgttctacccatggcgctttcggttgctgtgccttttaaggaggtggctgcctcgccctagagcttggttcattagacaggaattaaatgtgaccgccgcagcagcctag

SEQ ID NO: 260371 - DNA, 861 bp, Artificial Sequence
  derived and/or modified sequence
atgaaagtattactacttaccgggctcggtgcattgtttttcgcttactactgggacgataattttgatccagcctcattgcagggagctagggtgctgttgacaggagctaatgcaggggtaggcgaagagttagcttatcactacgccaggcttggcagccacttagtactgaccgcccacacagaggctctgttacagaaagtagtgggtaactgccgaaaactgggcgcccctaaagttttttatattgcagcagatatggcttcacctgaggcaccagaaagcgttgtgcagtttgcattagacaaactcggcgggctggactaccttgtgttaaatcatataggtggcgcccctgcaggaacacgcgcccgtagcccccaggctacccgttggctcatgcaggtcaacttcgtatcatacgttcagttgactagccgtgcccttcccagccttaccgacagcaaaggatctctagtagtggtgtcctcactgctgggcagggtgcccacatcttttagtacaccatactccgcagcgaagtttgccttggacggttttttcggttctctgcgcagggagctggatgtgcaggacgtcaacgttgcaattactatgtgcgtcctgggtcttcgtgacagagctagtgcagctgaagcagttcgtggtgttacccgagtgaaggccgctcctggccctaaggccgccttagcagtcatacgcggcggcgccaccagagctgctggcgttttttatccttggcggttccgacttctttgtctcctgcgtagatggctgcctagaccgcgcgcttggttcattaggcaagaacttaacgtgactgcggctgccgcatag

SEQ ID NO: 260372 - DNA, 264 bp, Artificial Sequence
  derived and/or modified sequence
atgaaagtgctactgttgacaggcctcggcgctctgttctttgcctactattgggacgataacttcgaccctgcctctttacagggagcacgcgtgttgctgaccggagctaatgccggagttggagaagagcttgcttatcactatgctagattaggctcgcacctggttttgactgcacacactgaggctctgctccagaaggctcgatggttgactttagtagtatctacgctggggggccgcggaaaatggattacatag

SEQ ID NO: 260373 - DNA, 228 bp, Artificial Sequence
  derived and/or modified sequence
atgaaagttcttttactgacagggctcggggccctattttttgcttactattgggacgacaattttgatccagcatctctccaaggagcaagggtgctattgaccggggctaacgcaggtgttggcgaggaacttgcttaccattatgctagactgggaagtcatttagttctgactgcacacacagaagccctcttgcagaaggccggctggacaacatcgtgctag

SEQ ID NO: 260374 - DNA, 861 bp, Artificial Sequence
  derived and/or modified sequence
atgaaagtgctgttactgaccggactgggagcgctgttttttgcctattactgggatgacaattttgaccccgcatctctgcaaggagcgcgggttctgcttacgggtgctaatgccggcgtcggagaagagctggcctaccactacgcccgactgggcagccacctcgtgttaaccgcccacaccgaagcacttcttcaaaaagtcgtgggtaactgccggaaacttggcgcccctaaggttttttacatcgctgcagacatggcctcaccggaagccccagagtccgttgtgcaatttgctcttgataaacttggcggtctggattacttagtactaaaccacatcggcggcgctcccgcaggaacgagagctcgatctccacaagctacccgctggctgatgcaggttaatttcgtaagctatgtgcaattaactagccgcgctctgccatcacttactgactcaaaagggagcttggtcgtggtgtctagtctgcttggacgagtgcccacttcattctctactccatactccgccgctaagttcgctctagacggtttctttggatctttgaggcgggagctcgacgtgcaggacgtcaacgtcgcgattaccatgtgcgtgctcggcctgcgagatagggcctcggccgctgaagcggtgaggggagtgacgcgcgtgaaggcggcccccggtcctaaggccgccttagctgtaatcaggggcggggcaacacgcgccgcaggcgtgttttacccttggaggttccgcttgttgtgcctgctgcgccgatggctgccaagaccacgagcatggtttattcggcaggagcttaatgtgaccgcagccgccgcttag

SEQ ID NO: 260375 - DNA, 861 bp, Artificial Sequence
  derived and/or modified sequence
atgaaagtattactacttaccgggctcggtgcattgtttttcgcttactactgggacgataattttgatccagcctcattgcagggagctagggtgctgttgacaggagctaatgcaggggtaggcgaagagttagcttatcactacgccaggcttggcagccacttagtactgaccgcccacacagaggctctgttacagaaagtagtgggtaactgccgaaaactgggcgcccctaaagttttttatattgcagcagatatggcttcacctgaggcaccagaaagcgttgtgcagtttgcacttgacaagttaggcgggctcgactacctcgttctcaaccatattggcggggcccctgcaggtacaagggctcgatccccacaggccaccagatggttgatgcaagtgaatttcgttagttatgtccagcttacttcgcgggctctcccatccttaactgactccaaaggttcactcgttgttgtatcgtccctgcttggccgagtccctacttccttttccacaccttatagtgccgccaagtttgcattggatggctttttcggaagcctgaggagagaattggatgtacaagacgtgaatgtggctataacaatgtgtgtgttgggtttgcgggatagagcaagtgctgctgaggctgtgagaggagtgacgagagtgaaagccgcaccaggacccaaagctgccctggcagttattcgcggcggtgctacccgtgctgcaggagtgttttacccatggagattccggcttttgtgcctgttgcgtcgttggttgccacgtccccgggcctggttcattagacaggaactcaacgttactgccgctgcggcatag

SEQ ID NO: 260376 - DNA, 861 bp, Artificial Sequence
  derived and/or modified sequence
atgaaagtgttgctgttaactggcctcggcgctttattttttgcgtactattgggacgacaacttcgatccggcttcattacaaggcgcgcgggttctactgactggtgcgaacgccggtgtgggagaggagttagcctaccattacgcaagactcggctcccatctggttcttactgcacacacagaagctctgttgcagaaggtcgttgggaactgcagaaaactgggagccccgaaggtgttttacatcgcagcagacatggctagtcccgaagcccctgagagtgtggtacagttcgcccttgacaaattaggaggtctcgattacctggtgctgaatcacataggaggggcgcccgccggaactagagctcgatcaccacaagctacccggtggctcatgcaggtgaatttcgtgtcgtatgtgcagttgactagtagggctcttccaagcctcacagactccaaggggtccttagtagttgtatctagccttctaggaagagtgcctacgtctttctccactccatactcagcggccaagtttgccctagatgggtttttcgggtcactcaggagggaacttgacgttcaggatgtgaatgttgcaattacaatgtgcgtcttagggctgagagaccgcgcgtctgcagccgaggctgttcgtggagtcacaagagtgaaagccgcccccggacccaaagcagccttagccgtaatcagagggggtgctacacgggccgcgggagtgttttacccgtggaggttccgactgctgtgtctgctgagaagatggctccctaggccgagagcatggtttattcgccaagaactgaacgtcaccgcagccgctgcttag

SEQ ID NO: 260377 - DNA, 861 bp, Artificial Sequence
  derived and/or modified sequence
atgaaggtgctgctgctgaccggcctgggcgccctgttcttcgcctactactgggacgacaacttcgaccccgccagcctgcagggcgccagagtgctgctgaccggcgccaacgccggcgtgggcgaggagctggcctaccactacgccagactgggcagccacctggtgctgaccgcccacaccgaggccctgctgcagaaggtggtgggcaactgcagaaagctgggcgcccccaaggtgttctacatcgccgccgacatggccagccccgaggcccccgagagcgtggtgcagttcgccctggacaagctgggcggcctggactacctggtgctgaaccacatcggcggcgcccccgccggcaccagagccagaagcccccaggccaccagatggctgatgcaggtgaacttcgtgagctacgtgcagctgaccagcagagccctgcccagcctgaccgacagcaagggcagcctggtggtggtgagcagcctgctgggcagagtgcccaccagcttcagcaccccctacagcgccgccaagttcgccctggacggcttcttcggcagcctgagaagagagctggacgtgcaggacgtgaacgtggccatcaccatgtgcgtgctgggcctgagagacagagccagcgccgccgaggccgtgagaggcgtgaccagagtgaaggccgcccccggccccaaggccgccctggccgtgatcagaggcggcgccaccagagccgccggcgtgttctacccctggagattcagactgctgtgcctgctgagaagatggctgcccagacccagagcctggttcatcagacaggagctgaacgtgaccgccgccgccgcctag

SEQ ID NO: 260378 - DNA, 264 bp, Artificial Sequence
  derived and/or modified sequence
atgaaggtgctgctgctgaccggcctgggcgccctgttcttcgcctactactgggacgacaacttcgaccccgccagcctgcagggcgccagagtgctgctgaccggcgccaacgccggcgtgggcgaggagctggcctaccactacgccagactgggcagccacctggtgctgaccgcccacaccgaggccctgctgcagaaggccagatggctgaccctggtggtgagcaccctgggcggcagaggcaagtggatcacctag

SEQ ID NO: 260379 - DNA, 228 bp, Artificial Sequence
  derived and/or modified sequence
atgaaggtgctgctgctgaccggcctgggcgccctgttcttcgcctactactgggacgacaacttcgaccccgccagcctgcagggcgccagagtgctgctgaccggcgccaacgccggcgtgggcgaggagctggcctaccactacgccagactgggcagccacctggtgctgaccgcccacaccgaggccctgctgcagaaggccggctggaccaccagctgctag

SEQ ID NO: 260380 - DNA, 861 bp, Artificial Sequence
  derived and/or modified sequence
atgaaagtgctcctgctgacaggactgggtgccctgtttttcgcctattattgggatgacaatttcgaccccgcttcattacaaggagccagagtgcttctcactggagcgaacgccggcgtcggggaagagcttgcttaccactacgccagactgggttcccatctcgtcctgacagctcatacggaggcacttctacaaaaggtcgtgggcaattgtagaaagctgggagcccccaaggtgttttatattgcggccgacatggcaagcccagaggctcctgaatccgtagtccaatttgccctcgacaagcttggagggttggactatctggtattgaaccacattggcggggcaccagccggcactcgagcacggtctccacaagcgacccggtggctgatgcaagtgaatttcgtaagctatgttcaactgacaagccgggctcttcctagcttaactgactctaagggctcactcgtggtggtctcgagtcttctggggagagtgccgacctcttttagtacaccctattccgccgctaagtttgctctggacggcttctttgggtctctgcgtcgtgaactcgatgtccaggatgttaacgtagccattaccatgtgcgtgctgggcctgcgtgatcgtgcttccgctgcagaggctgtccgaggcgtgacccgtgtgaaggctgctcctggccccaaggccgctttggcagtgattcggggcggggctaccagagctgcaggagtgttttatccctggcggtttcgactcctgtgtttgctgcgccggtggttgccgaggcccagggcgtggttcatcagacaggagttgaacgttaccgctgctgctgcctag

SEQ ID NO: 260381 - DNA, 1619 bp, Artificial Sequence
  derived and/or modified sequence
accaggcgggcactgttgcccggcgacgctccggcgctgggtccccgaggcccggcccctccccgggaggaggtgggcttcgagtcacgtgacccgtgccctacgggagggggtgcggtcggggacccggcaggaggcggccgagaagagaggaccgtgggggcgttcgcgtggctcccagcccgggaccccacccccgctggacagtgggggaaactgaggcctgagcggagtgaccaccccggctatggccagccagcctccagggagcgcgagtgctgctgacaggggccaacgctggtgttggtgaggagctggcctatcactacgcgcgtctgggctcccacctggtgctcactgcccacactgaggctctcctgcagaaggtggtagggaactgccggaagctgggcgcccccaaggtcttctacatcgcggcggacatggcctcccctgaggcgcccgagagcgtggtgcagtttgcgctggacaagctgggcgggctggactacctcgtgctgaaccacatcggcggcgccccggccggcacgcgagcccgcagcccccaggcaactcgctggctcatgcaggtaaactttgtgagctacgtgcaactgacgtcgcgggcgctgcccagcctgacggacagcaagggctccctggtggtggtgtcctcgctgctcggccgcgtgcccacgtcgttctccactccctactcggcggccaagtttgcgctggacggcttcttcggctccctgcggcgggagctggacgtgcaggacgtgaacgtggccatcaccatgtgcgtcctgggcctccgagatcgcgcctccgccgccgaggcagtcaggggagtcacgagggtcaaggcggccccggggcccaaggcagccctggccgtgatccgcggcggcgccacgcgcgcggccggcgtcttctacccgtggcgtttccgcctgctgtgcttgctccggcgctggctaccgcgcccgcgggcctggtttatccgccaggagctcaacgtcacggccgcggcagcctgagcaccggggggtgcccctccagtcccagacggcaatgttcctccctccaactgtccctggagccagaacactcacagagacacccctgagagggtggccacagcccaagatgaagtcatcaagacagaaaagcaaaaccgagaaaaacgacgggcacctggaaccagtcacggcttgggaggtgcaggtgccccgtgttaggcgcctttgtcggggacttgcaaggcctcacctgtttggccatgattgatgacgtgactgcttccattttgcagatgaggaaactaaggctcagagaggccacgccacccttgagccacccatggacccctctccatctcctgcctgcgcctttaagtccctgatttattctttccattcattccatctgggaggaacccccccaactcctgccagcttcccctagctggggtctctggtactcttcacacctgcaggggcgtctacactgttcgtctacctggtggcagggtctgagcgggaggaggagggaaagagtgtgttctgagctggacccagcctcttgttcgagaataaaaactcttcttctcttgc

SEQ ID NO: 260382 - DNA, 264 bp, Artificial Sequence
  derived and/or modified sequence
atgaaagtcctcctgctgaccggcttaggcgctctattttttgcctattattgggacgacaacttcgacccagcgtcactgcaaggagctcgagtcctgttgaccggggctaatgctggtgtcggggaggaactggcgtaccactatgctcgcctgggatctcacctggtgttaaccgcccacactgaagctcttttgcagaaggcgcgctggctgacactggttgtctccactctgggcggcagaggcaaatggatcacttag

SEQ ID NO: 260383 - DNA, 228 bp, Artificial Sequence
  derived and/or modified sequence
atgaaagtcctgctactcactggactaggggccttattcttcgcatattattgggacgataattttgatcccgcttccctgcagggagcccgagttttattgacaggtgccaacgctggtgtgggcgaggagcttgcctaccactatgccagactcggatcacaccttgtactgaccgcacacacagaagcattactgcagaaagctgggtggactactagttgctag

SEQ ID NO: 260384 - DNA, 861 bp, Artificial Sequence
  derived and/or modified sequence
atgaaggtcctgctgctcaccgggctgggggccctgtttttcgcttactactgggacgataactttgacccagcttccctgcagggagctagagtactcctgacgggagcaaatgctggagtcggggaagagctggcttaccattacgctcggttaggctcgcaccttgttttgaccgctcataccgaagctctcctgcagaaagtggtgggcaattgtagaaagctgggcgcccctaaggtcttttatatcgctgccgatatggcttctcctgaagcgcctgagtccgtggtgcagtttgccttggataaattgggaggccttgactacctggtcctgaatcacataggcggtgctcctgcaggcacccgagcccgctcccctcaggctacgcgatggttaatgcaggtgaatttcgtctcatatgtacagttaacatcaagggccctgccttcattgactgatagtaagggatcattagttgtggtctccagtctgttaggccgggttcccacgagcttctcaacgccgtattctgctgctaagtttgctctggacggcttttttggatctctgaggagagagctggatgtacaggacgtgaacgttgctatcaccatgtgcgtgctgggactcagggacagagcctccgccgctgaggcagttcggggcgtgacgcgtgtgaaagccgcaccgggacccaaggctgctttagctgtcatacgcggaggtgcaactcgggccgctggagtcttctacccatggcgctttcgtctgctttgcctgcttcggaggtggctgccccgacccagagcttggtttattaggcaggagctcaacgtgacggccgctgcggcgtag

SEQ ID NO: 260385 - DNA, 861 bp, Artificial Sequence
  derived and/or modified sequence
atgaaggtgctgctgctgaccggcctgggcgccctcttctttgcctactactgggatgacaactttgatcctgccagcctgcagggcgcccgggtgctgctgactggagccaatgccggcgtgggggaggagctggcctaccactacgcccggctgggcagccacctggtgctgacagcccacacagaggccctgctgcagaaggtggtgggcaactgcaggaagctgggcgcccccaaggtgttctacatcgctgctgacatggccagccctgaggcccctgagagcgtggtgcagtttgccctggacaagctgggcggcctggactacctggtgctgaaccacatcggcggggccccagctggcacccgggcccggagcccccaggccacccgctggctgatgcaggtgaactttgtgtcctatgtgcagctgaccagccgggccctgcccagcctgacagacagcaagggcagcctggtggtggtgagcagcctgctgggccgggtgcccaccagcttcagcaccccctacagcgctgccaagtttgccctggatggcttcttcggcagcctgcggcgggagctggatgtgcaggatgtgaatgtggccatcaccatgtgtgtgctgggcctgcgggaccgggccagcgctgctgaggccgtgcggggcgtgaccagggtgaaggccgcccctggccccaaggccgccctggccgtcatccggggcggggccaccagggctgctggggtcttctacccctggaggttccggctgctgtgcctgctgcggcgctggctgccccggccccgggcctggttcatccggcaggagctgaatgtgacagctgctgctgcctag

SEQ ID NO: 260386 - DNA, 264 bp, Artificial Sequence
  derived and/or modified sequence
atgaaggtgctgctgctgaccggcctgggcgccctcttctttgcctactactgggatgacaactttgatcctgccagcctgcagggcgcccgggtgctgctgactggagccaatgccggcgtgggggaggagctggcctaccactacgcccggctgggcagccacctggtgctgacagcccacacagaggccctgctgcagaaggcccgctggctgaccctggtggtgtccaccctgggcggccggggcaagtggatcacctag

SEQ ID NO: 260387 - DNA, 228 bp, Artificial Sequence
  derived and/or modified sequence
atgaaggtgctgctgctgaccggcctgggcgccctcttctttgcctactactgggatgacaactttgatcctgccagcctgcagggcgcccgggtgctgctgactggagccaatgccggcgtgggggaggagctggcctaccactacgcccggctgggcagccacctggtgctgacagcccacacagaggccctgctgcagaaggccggctggaccaccagctgctag

SEQ ID NO: 260388 - DNA, 861 bp, Artificial Sequence
  derived and/or modified sequence
atgaaggtgctgctgctgaccggcctgggcgccctgttcttcgcctactattgggatgacaatttcgaccctgcgtctttgcaaggcgccagggttcttctgactggggccaacgccggcgtcggtgaagagttagcgtaccattatgccaggctggggagccacctggtcctgacagctcatacagaggccctcttgcaaaaggtggttggcaattgccggaagctgggagcgcctaaagtattttacatcgcagcggatatggccagccccgaggctccggagagcgtcgtgcagttcgcgctggataagctgggtggactggactacctggtactcaaccatattggcggggcccccgcaggaaccagggctaggtctccccaggctacgagatggttaatgcaagtgaattttgtgagctatgtgcagttgacatcacgggctctgccctccttgactgactcgaagggctccctcgtcgtggtgtctagtctgctgggcagagtcccaacatcattctccactccctatagcgctgctaagttcgccctggatggcttttttggctccctgaggagggagctggacgtacaggacgtgaacgtggcaattaccatgtgtgtattgggacttcgtgaccgtgcatctgcagctgaggccgtccggggggtcactagagtgaaagctgcacccggtccgaaggctgctctggcggtgatccgaggcggggcaactcgagctgctggggttttctatccctggcgattccgcctgctttgcttgttgagacgctggttgcccaggccgagagcctggttcatccgccaggagctgaacgtgacggcagccgccgcttag

SEQ ID NO: 260389 - DNA, 264 bp, Artificial Sequence
  derived and/or modified sequence
atgaaggtgctgctgctgaccggcctgggcgccctgttcttcgcctattattgggacgataattttgatccagctagcctccagggggcccgcgttctcctgaccggcgcaaacgcaggggtgggggaggagcttgcgtaccattatgcacggctgggctcacatctggtgctgacggcccataccgaggcgctgttacagaaggcacggtggttgaccctggttgtaagcaccctcggaggccgtggcaagtggataacctag

SEQ ID NO: 260390 - RNA, 861 nt, Artificial Sequence
  derived and/or modified sequence
augaaaguauuacuacuuaccgggcucggugcauuguuuuucgcuuacuacugggacgauaauuuugauccagccucauugcagggagcuagggugcuguugacaggagcuaaugcagggguaggcgaagaguuagcuuaucacuacgccaggcuuggcagccacuuaguacugaccgcccacacagaggcucuguuacagaaaguaguggguaacugccgaaaacugggcgccccuaaaguuuuuuauauugcagcagauauggcuucaccugaggcaccagaaagcguugugcaguuugcauuagacaaacucggcgggcuggacuaccuuguguuaaaucauauagguggcgccccugcaggaacacgcgcccguagcccccaggcuacccguuggcucaugcaggucaacuucguaucauacguucaguugacuagccgugcccuucccagccuuaccgacagcaaaggaucucuaguagugguguccucacugcugggcagggugcccacaucuuuuaguacaccauacuccgcagcgaaguuugccuuggacgguuuuuucgguucucugcgcagggagcuggaugugcaggacgucaacguugcaauuacuaugugcguccugggucuucgugacagagcuagugcagcugaagcaguucgugguguuacccgagugaaggccgcuccuggcccuaaggccgccuuagcagucauacgcggcggcgccaccagagcugcuggcguuuuuuauccuuggcgguuccgacuucuuugucuccugcguagauggcugccuagaccgcgcgcuugguucauuaggcaagaacuuaacgugacugcggcugccgcauag

SEQ ID NO: 260391 - RNA, 264 nt, Artificial Sequence
  derived and/or modified sequence
augaaagugcuacuguugacaggccucggcgcucuguucuuugccuacuauugggacgauaacuucgacccugccucuuuacagggagcacgcguguugcugaccggagcuaaugccggaguuggagaagagcuugcuuaucacuaugcuagauuaggcucgcaccugguuuugacugcacacacugaggcucugcuccagaaggcucgaugguugacuuuaguaguaucuacgcuggggggccgcggaaaauggauuacauag

SEQ ID NO: 260392 - RNA, 228 nt, Artificial Sequence
  derived and/or modified sequence
augaaaguucuuuuacugacagggcucggggcccuauuuuuugcuuacuauugggacgacaauuuugauccagcaucucuccaaggagcaagggugcuauugaccggggcuaacgcagguguuggcgaggaacuugcuuaccauuaugcuagacugggaagucauuuaguucugacugcacacacagaagcccucuugcagaaggccggcuggacaacaucgugcuag

SEQ ID NO: 260393 - RNA, 861 nt, Artificial Sequence
  derived and/or modified sequence
augaaagugcuguuacugaccggacugggagcgcuguuuuuugccuauuacugggaugacaauuuugaccccgcaucucugcaaggagcgcggguucugcuuacgggugcuaaugccggcgucggagaagagcuggccuaccacuacgcccgacugggcagccaccucguguuaaccgcccacaccgaagcacuucuucaaaaagucguggguaacugccggaaacuuggcgccccuaagguuuuuuacaucgcugcagacauggccucaccggaagccccagaguccguugugcaauuugcucuugauaaacuuggcggucuggauuacuuaguacuaaaccacaucggcggcgcucccgcaggaacgagagcucgaucuccacaagcuacccgcuggcugaugcagguuaauuucguaagcuaugugcaauuaacuagccgcgcucugccaucacuuacugacucaaaagggagcuuggucguggugucuagucugcuuggacgagugcccacuucauucucuacuccauacuccgccgcuaaguucgcucuagacgguuucuuuggaucuuugaggcgggagcucgacgugcaggacgucaacgucgcgauuaccaugugcgugcucggccugcgagauagggccucggccgcugaagcggugaggggagugacgcgcgugaaggcggcccccgguccuaaggccgccuuagcuguaaucaggggcggggcaacacgcgccgcaggcguguuuuacccuuggagguuccgcuuguugugccugcugcgccgauggcugccaagaccacgagcaugguuuauucggcaggagcuuaaugugaccgcagccgccgcuuag

SEQ ID NO: 260394 - RNA, 861 nt, Artificial Sequence
  derived and/or modified sequence
augaaaguauuacuacuuaccgggcucggugcauuguuuuucgcuuacuacugggacgauaauuuugauccagccucauugcagggagcuagggugcuguugacaggagcuaaugcagggguaggcgaagaguuagcuuaucacuacgccaggcuuggcagccacuuaguacugaccgcccacacagaggcucuguuacagaaaguaguggguaacugccgaaaacugggcgccccuaaaguuuuuuauauugcagcagauauggcuucaccugaggcaccagaaagcguugugcaguuugcacuugacaaguuaggcgggcucgacuaccucguucucaaccauauuggcggggccccugcagguacaagggcucgauccccacaggccaccagaugguugaugcaagugaauuucguuaguuauguccagcuuacuucgcgggcucucccauccuuaacugacuccaaagguucacucguuguuguaucgucccugcuuggccgagucccuacuuccuuuuccacaccuuauagugccgccaaguuugcauuggauggcuuuuucggaagccugaggagagaauuggauguacaagacgugaauguggcuauaacaauguguguguuggguuugcgggauagagcaagugcugcugaggcugugagaggagugacgagagugaaagccgcaccaggacccaaagcugcccuggcaguuauucgcggcggugcuacccgugcugcaggaguguuuuacccauggagauuccggcuuuugugccuguugcgucguugguugccacguccccgggccugguucauuagacaggaacucaacguuacugccgcugcggcauag

SEQ ID NO: 260395 - RNA, 861 nt, Artificial Sequence
  derived and/or modified sequence
augaaaguguugcuguuaacuggccucggcgcuuuauuuuuugcguacuauugggacgacaacuucgauccggcuucauuacaaggcgcgcggguucuacugacuggugcgaacgccggugugggagaggaguuagccuaccauuacgcaagacucggcucccaucugguucuuacugcacacacagaagcucuguugcagaaggucguugggaacugcagaaaacugggagccccgaagguguuuuacaucgcagcagacauggcuagucccgaagccccugagagugugguacaguucgcccuugacaaauuaggaggucucgauuaccuggugcugaaucacauaggaggggcgcccgccggaacuagagcucgaucaccacaagcuacccgguggcucaugcaggugaauuucgugucguaugugcaguugacuaguagggcucuuccaagccucacagacuccaagggguccuuaguaguuguaucuagccuucuaggaagagugccuacgucuuucuccacuccauacucagcggccaaguuugcccuagauggguuuuucgggucacucaggagggaacuugacguucaggaugugaauguugcaauuacaaugugcgucuuagggcugagagaccgcgcgucugcagccgaggcuguucguggagucacaagagugaaagccgcccccggacccaaagcagccuuagccguaaucagagggggugcuacacgggccgcgggaguguuuuacccguggagguuccgacugcugugucugcugagaagauggcucccuaggccgagagcaugguuuauucgccaagaacugaacgucaccgcagccgcugcuuag

SEQ ID NO: 260396 - DNA, 600 bp, Artificial Sequence
  derived and/or modified sequence
atggcttctcccgaagcccctgaatcagtcgttcagtttgcccttgacaaactcggcggactggattatttggtcctgaaccatataggtggagcaccagccggaacacgcgcacgctccccacaggctacaaggtggctgatgcaagtcaacttcgtgtcttacgtgcagctaaccagtcgcgcattgccttctctgacagacagtaaaggctctttagtagtggtgtcaagtctcctgggaagggtacctactagttttagtactccatactccgcagccaaatttgctcttgatggcttttttggctccttgcgaagagaactggacgtacaggacgtcaacgtggccatcacaatgtgcgtgctcgggctgcgcgatagagcctctgcagcggaggctgttcgcggagtgaccagagtgaaggctgccccagggcctaaggcggcactggcagtgatccgcggaggcgctacaagggcggctggcgtgttttacccatggcgttttcgcctcctctgcctgcttcggagatggctgcctagaccccgagcttggttcatcaggcaggagcttaacgtgactgccgctgccgcatag

SEQ ID NO: 260397 - DNA, 600 bp, Artificial Sequence
  derived and/or modified sequence
atggcctctcccgaggcccccgaaagtgttgtgcaattcgcactggataagctgggtggactcgattacttagtactgaaccatatcgggggtgccccggccggaacacgcgcgaggtcccctcaggcaacaagatggctaatgcaagtcaacttcgtgtcatacgttcagctgacttctagggcgcttccctccttgaccgattcaaagggatctttggtcgttgtgtcttccctgctgggcagggtgcccacgagtttctctaccccatattcagcagccaaatttgccctcgacggatttttcggatctctcaggcgagaactggacgtgcaggatgtcaacgtggccatcacaatgtgcgtactgggccttcgtgacagggcatcagccgccgaggcagtgcgcggggttactcgagtgaaggccgccccgggcccaaaggcagccctggcggtgattcgtggaggggcaacaagagccgccggcgttttttacccttggagatttaggctgctgtgcctgttaaggaggtggttgccaagacccagagcatggtttatccggcaggagttgaatgttaccgctgctgcagcgtag

SEQ ID NO: 260398 - DNA, 600 bp, Artificial Sequence
  derived and/or modified sequence
atggcatctcctgaagctcctgagtccgtggtccagtttgctctcgacaagttaggggggctagattacttagttcttaaccacattggtggggcccccgccggcacccgcgccagaagtccgcaagctacccgctggctaatgcaagttaatttcgtgtcttacgtgcaactgacgtcccgggcactgccttccctgaccgactccaaaggctccctagtcgttgtcagtagcctgctcgggagagttcccacgtcattctcaactccatactctgctgcaaagttcgccttagacggcttctttggcagcttacggagagaattggatgtgcaggacgtcaatgtagccattaccatgtgtgtcctgggcctgcgcgaccgggcatcggctgctgaggctgttaggggagttaccagagtgaaagctgccccaggaccgaaagccgctctagcagtaattcgtgggggtgccacccgcgcagcgggagtgttttatccctggaggtttcgactgttgtgtcttcttagaaggtggctaccccgcccccgtgcatggttcatacgtcaggaattaaatgtcacagcagccgcagcgtag

SEQ ID NO: 260399 - DNA, 600 bp, Artificial Sequence
  derived and/or modified sequence
atggccagccccgaggcccccgagagcgtggtgcagttcgccctggacaagctgggcggcctggactacctggtgctgaaccacatcggcggcgcccccgccggcaccagagccagaagcccccaggccaccagatggctgatgcaggtgaacttcgtgagctacgtgcagctgaccagcagagccctgcccagcctgaccgacagcaagggcagcctggtggtggtgagcagcctgctgggcagagtgcccaccagcttcagcaccccctacagcgccgccaagttcgccctggacggcttcttcggcagcctgagaagagagctggacgtgcaggacgtgaacgtggccatcaccatgtgcgtgctgggcctgagagacagagccagcgccgccgaggccgtgagaggcgtgaccagagtgaaggccgcccccggccccaaggccgccctggccgtgatcagaggcggcgccaccagagccgccggcgtgttctacccctggagattcagactgctgtgcctgctgagaagatggctgcccagacccagagcctggttcatcagacaggagctgaacgtgaccgccgccgccgcctag

SEQ ID NO: 260400 - DNA, 600 bp, Artificial Sequence
  derived and/or modified sequence
atggcctcccctgaggcaccagagagcgtggtccaatttgccttagacaagctgggagggctggactatctcgtcctgaatcacatcggcggcgctccagccggcactcgggctcgctcaccgcaggcaacaagatggctgatgcaagtaaactttgtgagctacgtgcagctgacttccagagcgctgccgagcttgaccgacagtaaagggagcctggtcgtggtgtcttcgctactgggcagggtgcctacttcttttagtaccccctatagtgcagctaaatttgcgttggatggcttctttggcagtctgagacgggaactagatgtgcaggacgtcaacgtggctattaccatgtgtgtactggggctgagggatcgggcttctgccgctgaagcggttaggggtgtcacccgcgtcaaggccgcccctgggcccaaggcagccttagcggtgatcaggggcggcgctacccgtgcagcaggagtgttctacccttggcggtttcgcctcctgtgtctcctcagaaggtggttacctcggccacgcgcatggtttatacgccaggaactgaatgttacagctgctgccgcgtag

SEQ ID NO: 260401 - DNA, 600 bp, Artificial Sequence
  derived and/or modified sequence
atggccagccctgaggcccctgagagcgtggtgcagtttgccctggacaagctgggcggcctggactacctggtgctgaaccacatcggcggggccccagctggcacccgggcccggagcccccaggccacccgctggctgatgcaggtgaactttgtgtcctatgtgcagctgaccagccgggccctgcccagcctgacagacagcaagggcagcctggtggtggtgagcagcctgctgggccgggtgcccaccagcttcagcaccccctacagcgctgccaagtttgccctggatggcttcttcggcagcctgcggcgggagctggatgtgcaggatgtgaatgtggccatcaccatgtgtgtgctgggcctgcgggaccgggccagcgctgctgaggccgtgcggggcgtgaccagggtgaaggccgcccctggccccaaggccgccctggccgtcatccggggcggggccaccagggctgctggggtcttctacccctggaggttccggctgctgtgcctgctgcggcgctggctgccccggccccgggcctggttcatccggcaggagctgaatgtgacagctgctgctgcctag

SEQ ID NO: 260402 - DNA, 600 bp, Artificial Sequence
  derived and/or modified sequence
atggccagccccgaggcccccgagagcgtggtgcagttcgccctggacaaattggggggcctcgactacctggtcctgaaccatatagggggcgcacctgcgggcacacgcgccaggtctccccaggctaccaggtggttgatgcaggtcaattttgtttcatacgtgcaattgacttctcgcgctctgcccagtctgacggactcgaaagggtccctggtggtggtgagcagcctgctgggccgcgttcctacgagttttagtaccccttactcagccgcaaaattcgcactcgacggattcttcggttccttgaggagagaacttgatgtgcaggatgtaaacgtggccataactatgtgcgtactgggactaagggatcgtgctagcgctgccgaggccgtgcgcggcgtcacccgagtgaaagcggcaccggggcctaaagccgcgctggcagtcatccggggaggggcgacaagagctgccggcgtcttctacccctggcgattccgactactgtgtctcctcagaaggtggctacccagaccgagagcctggttcatacgccaggagctgaatgtcaccgccgccgctgcttag

SEQ ID NO: 260403 - RNA, 600 nt, Artificial Sequence
  derived and/or modified sequence
auggccucucccgaggcccccgaaaguguugugcaauucgcacuggauaagcuggguggacucgauuacuuaguacugaaccauaucgggggugccccggccggaacacgcgcgagguccccucaggcaacaagauggcuaaugcaagucaacuucgugucauacguucagcugacuucuagggcgcuucccuccuugaccgauucaaagggaucuuuggucguugugucuucccugcugggcagggugcccacgaguuucucuaccccauauucagcagccaaauuugcccucgacggauuuuucggaucucucaggcgagaacuggacgugcaggaugucaacguggccaucacaaugugcguacugggccuucgugacagggcaucagccgccgaggcagugcgcgggguuacucgagugaaggccgccccgggcccaaaggcagcccuggcggugauucguggaggggcaacaagagccgccggcguuuuuuacccuuggagauuuaggcugcugugccuguuaaggaggugguugccaagacccagagcaugguuuauccggcaggaguugaauguuaccgcugcugcagcguag

SEQ ID NO: 260404 - RNA, 600 nt, Artificial Sequence
  derived and/or modified sequence
auggcaucuccugaagcuccugaguccgugguccaguuugcucucgacaaguuaggggggcuagauuacuuaguucuuaaccacauugguggggcccccgccggcacccgcgccagaaguccgcaagcuacccgcuggcuaaugcaaguuaauuucgugucuuacgugcaacugacgucccgggcacugccuucccugaccgacuccaaaggcucccuagucguugucaguagccugcucgggagaguucccacgucauucucaacuccauacucugcugcaaaguucgccuuagacggcuucuuuggcagcuuacggagagaauuggaugugcaggacgucaauguagccauuaccauguguguccugggccugcgcgaccgggcaucggcugcugaggcuguuaggggaguuaccagagugaaagcugccccaggaccgaaagccgcucuagcaguaauucgugggggugccacccgcgcagcgggaguguuuuaucccuggagguuucgacuguugugucuucuuagaagguggcuaccccgcccccgugcaugguucauacgucaggaauuaaaugucacagcagccgcagcguag

SEQ ID NO: 260405 - protein, 413 aa, Artificial Sequence
  derived and/or modified sequence
MGPRGAASLPRGPGPRRLLLPVVLPLLLLLLLAPPGSGAGASRPPHLVFLLADDLGWNDVGFHGSRIRTPHLDALAAGGVLLDNYYTQPLCTPSRSQLLTGRYQIRTGLQHQIIWPCQPSCVPLDEKLLPQLLKEAGYTTHMVGKWHLGMYRKECLPTRRGFDTYFGYLLGSEDYYSHERCTLIDALNVTRCALDFRDGEEVATGYKNMYSTNIFTKRAIALITNHPPEKPLFLYLALQSVHEPLQVPEEYLKPYDFIQDKNRHHYAGMVSLMDEAVGNVTAALKSSGLWNNTVFIFSTDNGGQTLAGGNNWPLRGRKWSLWEGGVRGVGFVASPLLKQKGVKNRELIHISDWLPTLVKLARGHTNGTKPLDGFDVWKTISEGSPSPRIELLHNIDPNFVDSSPYWPECSLLL

SEQ ID NO: 260406 - DNA, 1242 bp, Artificial Sequence
  derived and/or modified sequence
atgggccccagaggcgccgccagcctgcccagaggccccggccccagaagactgctgctgcccgtggtgctgcccctgctgctgctgctgctgctggccccccccggcagcggcgccggcgccagcagacccccccacctggtgttcctgctggccgacgacctgggctggaacgacgtgggcttccacggcagcagaatcagaaccccccacctggacgccctggccgccggcggcgtgctgctggacaactactacacccagcccctgtgcacccccagcagaagccagctgctgaccggcagataccagatcagaaccggcctgcagcaccagatcatctggccctgccagcccagctgcgtgcccctggacgagaagctgctgccccagctgctgaaggaggccggctacaccacccacatggtgggcaagtggcacctgggcatgtacagaaaggagtgcctgcccaccagaagaggcttcgacacctacttcggctacctgctgggcagcgaggactactacagccacgagagatgcaccctgatcgacgccctgaacgtgaccagatgcgccctggacttcagagacggcgaggaggtggccaccggctacaagaacatgtacagcaccaacatcttcaccaagagagccatcgccctgatcaccaaccacccccccgagaagcccctgttcctgtacctggccctgcagagcgtgcacgagcccctgcaggtgcccgaggagtacctgaagccctacgacttcatccaggacaagaacagacaccactacgccggcatggtgagcctgatggacgaggccgtgggcaacgtgaccgccgccctgaagagcagcggcctgtggaacaacaccgtgttcatcttcagcaccgacaacggcggccagaccctggccggcggcaacaactggcccctgagaggcagaaagtggagcctgtgggagggcggcgtgagaggcgtgggcttcgtggccagccccctgctgaagcagaagggcgtgaagaacagagagctgatccacatcagcgactggctgcccaccctggtgaagctggccagaggccacaccaacggcaccaagcccctggacggcttcgacgtgtggaagaccatcagcgagggcagccccagccccagaatcgagctgctgcacaacatcgaccccaacttcgtggacagcagcccctactggcccgagtgcagcctgctgctgtag

SEQ ID NO: 260407 - DNA, 2316 bp, Artificial Sequence
  derived and/or modified sequence
agatatttcaggctaactagatactgtgtgcttcttagtgtcactgcttagtgggggagccagctctgagtggggtcatatccggacaagcgaatgagctatttattcaatgaccacgcaacactccaaatcctcccagggcaacttgaaagtaaccgcaccttccaaagggcaccgtgcaatcagactgaaaccacagtgcaaatttaattgccggggaagataacgggccttggtgccctccaagcgtcagctgagtttccaagaagccgggcagcgggcgcccgcgggttcgtctctggctcctcctccgccacagcagccgggggcccgggtcggaggcggcgggggccgagcgcccggcctcgcaagcccacggcccgctgggggtgccgtcccgcgccggggcggagcaggccccggcagcccagttcctcattctatcagcggtacaaggggctggtggcgccacaggcgctgggaccgcgggcggacaaggatgggtccgcgcggcgcggcgagcttgccccgaggccccggacctcggcggctgctcctccccgtcgtcctcccgctgctgctgctgctgttgttggcgccgccgggctcgggcgccggggccagccggccgccccacctggtcttcttgctggcagacgacctaggctggaacgacgtcggcttccacggctcccgcatccgcacgccgcacctggacgcgctggcggccggcggggtgctcctggacaactactacacgcagccgctgtgcacgccgtcgcggagccagctgctcactggccgctaccagatccgtacaggtttacagcaccaaataatctggccctgtcagcccagctgtgttcctctggatgaaaaactcctgccccagctcctaaaagaagcaggttatactacccatatggtcggaaaatggcacctgggaatgtaccggaaagaatgccttccaacccgccgaggatttgatacctactttggatatctcctgggtagtgaagattattattcccatgaacgctgtacattaattgacgctctgaatgtcacacgatgtgctcttgattttcgagatggcgaagaagttgcaacaggatataaaaatatgtattcaacaaacatattcaccaaaagggctatagccctcataactaaccatccaccagagaagcctctgtttctctaccttgctctccagtctgtgcatgagccccttcaggtccctgaggaatacttgaagccatatgactttatccaagacaagaacaggcatcactatgcaggaatggtgtcccttatggatgaagcagtaggaaatgtcactgcagctttaaaaagcagtgggctctggaacaacacggtgttcatcttttctacagataacggagggcagactttggcagggggtaataactggccccttcgaggaagaaaatggagcctgtgggaaggaggcgtccgaggggtgggctttgtggcaagccccttgctgaagcagaagggcgtgaagaaccgggagctcatccacatctctgactggctgccaacactcgtgaagctggccaggggacacaccaatggcacaaagcctctggatggcttcgacgtgtggaaaaccatcagtgaaggaagcccatcccccagaattgagctgctgcataatattgacccgaacttcgtggactcttcaccgtactggcctgagtgctcgctgctgttgtagctaccaccaactttctactgaagatgataacccagggcataagaaatgacttcagacccaaggttctgaaagggcccctcaaggcctcgggtggctcctgcagaagtggcagaagaggcgggaactaggaacctggcatcataggaaaagtgccttctccaagaaagaaggggccccaggaggctgtcttacttagatcaaccataaactaccacagatgggtcatttcttatattatttcaaaatatctttgaagatgagaattcatttgtgtccttcatagaccaaagttctttgtgttaccttttcccaaaagtaaattcctttccctttattcattccttgtggaaataaaatgcaagccctttatacttgtcttacagtaatatggcacatgtagcttacttttgagcatcccagtgaataatgtttggaacttttcttattacctaatagcatatagagaagagtgaagtcagctaaaaacagaaattttgaaaagccatcttcaggaaaatgtaggcccagatgctttcctccaccttttttgacaggctgccacatacagtttcaca

SEQ ID NO: 260408 - DNA, 1242 bp, Artificial Sequence
  derived and/or modified sequence
atgggtccacggggtgctgctagcctgccaagagggcccggcccccggcgactattgctccctgtggtcctccctttactgctgcttctgctgcttgccccccccggaagcggggccggcgcttcacggccaccacatctggtgtttttgctcgccgatgacctggggtggaacgacgttggcttccacggttctagaataagaactcctcacctggatgcattagctgccgggggggtcctgctggataactactatactcagcccctgtgcaccccgtcacgcagccagctgctcacgggaaggtatcagattcggactggacttcaacatcagattatttggccttgccagccttcatgtgtccctctggatgagaagctcctgcctcaacttctgaaggaagctggatacaccacacatatggtaggaaagtggcatcttggaatgtaccggaaggagtgccttcccactcgccgcggctttgacacctattttggctacctgctgggatccgaggattattatagccacgagcggtgtaccctaatcgatgctttgaacgtgaccagatgcgccctggatttcagagatggtgaggaggtcgcaactgggtacaagaacatgtactccaccaatatttttacgaagagggctattgctctgataaccaaccatcccccggaaaagcccctttttctgtacctggcactgcagagcgtgcatgaaccccttcaggtgcccgaagagtatttgaagccatatgacttcatacaggataagaataggcaccactatgccggcatggtaagcctcatggacgaggccgtgggcaatgtgacagcagccctgaaaagctccggattgtggaataacacagtcttcatcttctccaccgataatggcggacagacgctggccggaggcaacaactggccactgcgcggacgcaaatggtctctttgggaaggtggagtaaggggcgtcggatttgttgcttcaccgctgctgaagcaaaagggcgtgaagaacagggaattgatacacatttcggattggctccccacccttgtgaaacttgcccggggccacaccaacgggacaaaacctctggacggttttgacgtttggaaaactatttctgagggcagtccatctcctagaatagagctgttacacaacattgaccctaacttcgtagattcatccccctactggcccgaatgctccttgctcctctag

SEQ ID NO: 260409 - DNA, 1242 bp, Artificial Sequence
  derived and/or modified sequence
atgggccccaggggggccgccagcctgccccggggccctggcccccggcggctgctgctgcctgtggtgctgcccctgctgctgctgctgctgctggcccctcctggcagcggggccggggccagccggcccccccacctggtgttcctgctggctgatgacctgggctggaatgatgtgggcttccacggcagccgcatccgcaccccccacctggatgccctggccgccggcggcgtgctgctggacaactactacacccagcccctgtgcacccccagccgcagccagctgctgaccggccgctaccagatcagaacaggcctgcagcaccagatcatctggccctgccagcccagctgtgtgcccctggatgagaagctgctgccccagctgctgaaggaggccggctacaccacccacatggtgggcaagtggcacctgggcatgtacaggaaggagtgcctgcccacccggcggggctttgacacctacttcggctacctgctgggcagcgaggactactacagccatgagcgctgcaccctgattgatgccctgaatgtgacccgctgtgccctggacttcagagatggagaggaggtggccaccggctacaagaacatgtacagcaccaacatcttcaccaagagggccatcgccctgatcaccaaccaccccccagagaagcccctcttcctgtacctggccctgcagagcgtgcatgagcccctgcaggtgcctgaggagtacctgaagccctatgacttcatccaggacaagaacagacaccactacgccggcatggtgtccctgatggatgaggccgtgggcaatgtgacagctgccctgaagagcagcggcctgtggaacaacacagtgttcatcttcagcacagacaatggaggccagaccctggccggcggcaacaactggcccctgcggggcaggaagtggagcctgtgggagggcggcgtgcggggcgtgggctttgtggccagccccctgctgaagcagaagggcgtgaagaaccgggagctgatccacatcagtgactggctgcccaccctggtgaagctggcccggggccacaccaacggcaccaagcccctggatggctttgatgtgtggaagaccatcagcgagggcagccccagccccagaattgagctgctgcacaacatcgaccccaactttgtggacagcagcccctactggccagagtgcagcctgctgctgtag

SEQ ID NO: 260410 - DNA, 1242 bp, Artificial Sequence
  derived and/or modified sequence
atgggcccccggggcgccgccagcctgccccggggccccggccccagaagactgctgctcccggtcgttctgcctctgttactgctcctgttgctggctccgccaggcagcggagccggggcttcacgaccacctcatctggtctttttgttggctgacgacctgggttggaacgacgtgggatttcatggcagccgcatcagaacccctcacctggacgcactggcagcggggggagtgcttctagataactactatactcaacccctgtgcacccctagccggagtcagctgcttacaggtcgctatcagatacgaactggcctgcagcaccagataatttggccctgccagccctcctgcgtgccactagacgagaagctgctcccccagcttcttaaggaagccggctatacaacccatatggtgggtaagtggcacctcggaatgtaccgaaaagaatgcctccccactaggcgggggttcgatacatacttcggttatctcctgggctcagaggattattacagccatgagcggtgtactttgattgatgccctcaatgtgacccggtgcgcactggatttccgggatggggaggaagtcgctacagggtataagaatatgtactctacaaatatattcaccaagcgagcgatagccctgatcaccaatcatccacccgaaaaacctctcttcttgtatctggctttgcagagtgtgcacgagccgctgcaggttcctgaagagtacctgaagccatatgacttcatccaggacaagaacagacaccactacgcggggatggtgagccttatggacgaagcggtgggcaacgtgaccgcggcacttaaaagctcaggtttgtggaacaacactgtctttatcttcagtactgataatggaggccagacactggctggtggtaacaactggccacttcgaggccgcaaatggagcctgtgggaaggcggcgtgagaggcgtggggtttgtggccagccctctgttaaagcagaaaggggtgaagaacagagaactgatccacatcagtgattggctacccactcttgtcaaactggcccggggtcatactaatggtacgaagcccctggacggatttgatgtgtggaaaacgattagtgagggctctcctagcccgcggatcgagttgctccataacatcgaccccaattttgtggattcaagcccatactggccggaatgctcactgctcctgtag

SEQ ID NO: 260411 - DNA, 1242 bp, Artificial Sequence
  derived and/or modified sequence
atgggacctaggggggctgcctccctgccgcgaggcccaggccctcggagactattacttcccgtggtgctccccttactgcttctgctgctgcttgcacctccgggaagtggagctggcgcatcccggccaccccacctcgtttttttgttagccgatgatctaggttggaacgatgtgggtttccacgggtcgcgtattaggaccccccacctcgacgccttagccgctggtggtgtgctgctggataattactatacccagcctctgtgcacaccaagccgcagccagctgttaaccggtagatatcaaattcgtaccgggcttcagcaccagataatctggccatgccagccctcttgtgtaccgctggacgaaaagctcctgccacaactgctcaaagaggccggatatactactcacatggttggcaaatggcatctcggcatgtaccggaaggagtgcctgccaacccgcagagggtttgacacttactttggctacctgctgggctccgaagattactacagtcacgaaaggtgcactctcatcgacgccttaaacgtaactcgctgcgccctcgacttcagagacggagaggaagtggcgacaggatataagaacatgtactctactaatatttttacgaagcgagccatcgcactaatcactaaccaccctcctgagaaacctctcttcttatacctcgcgcttcagtccgtgcatgaaccactacaagttcccgaagaatacctgaagccatacgacttcatccaggataaaaacagacaccattatgccggaatggttagtctaatggacgaagccgtaggcaacgttacagcagcattgaaatcgagcggcctttggaataacacagtgttcatcttttccaccgacaacggtggacagacgctggcgggaggaaataattggcctctgcggggacgaaaatggagcctgtgggaaggcggtgttcggggagtcggattcgtagcgtctcctctgctcaagcaaaaaggggtgaagaatcgcgagctgatccatatttcagattggctgccaaccctggtgaaactggctcgcggacacaccaacggcacaaaacctctggacggtttcgatgtgtggaagaccatttcagaggggtccccatctccgagaatcgaactgctgcacaatatcgatccaaattttgtagatagcagcccctactggccagagtgctcactgttgctctag

SEQ ID NO: 260412 - DNA, 1242 bp, Artificial Sequence
  derived and/or modified sequence
atgggcccccgtggagcagcttcactcccccgtggacccggaccgagacgccttctactcccagtcgtactgcctctgctccttctgctgctgctggccccaccaggttctggtgccggcgcctcccgcccccctcacctagttttcctgcttgccgacgacctgggttggaatgatgtgggattccatggctccaggattcggacgccccacctcgatgccctcgcagccggtggcgttctgcttgataactattatacacagcccctatgcacgccgtcacgtagccagctgttgaccggaagataccagattcgcaccggattacagcaccagattatatggccctgccaacctagttgcgtgcccctggacgagaagctgctcccacagctgctcaaagaagctggttatactacccatatggtgggcaaatggcacttagggatgtatagaaaggagtgtctccccactcgacgaggattcgatacatacttcgggtacctcctgggctcagaagactactattctcacgagcgctgtaccctgattgacgctctcaatgtaactaggtgcgccttggattttagggacggtgaagaagtggccacaggatataagaatatgtatagtactaacatttttacgaagagggcgatagcactgatcacgaatcatccgcctgaaaaacctctatttctatacttagccctgcagtccgtgcacgagccgttgcaggtgccagaggagtatctgaaaccttatgattttattcaggataagaataggcaccactacgctggcatggtgagtttaatggacgaagcagtaggcaatgtcacagctgcgctgaaatcctccgggctttggaacaatacggtcttcattttctcaacggataatggcggacagaccctagcaggggggaataattggccactgcgcggtcgcaagtggagcttatgggagggaggcgtgcggggtgtcgggttcgttgcctctccgctattgaagcagaagggggtcaagaatcgcgaattaattcacataagtgattggctgccaactctcgtcaaactggctcgaggacacactaatggcacaaagccactcgacggattcgacgtatggaaaacgatttccgagggatctccaagcccaagaatagaattgttgcataatattgaccccaactttgtagactccagtccatactggcccgaatgcagccttctgctgtag

SEQ ID NO: 260413 - DNA, 1242 bp, Artificial Sequence
  derived and/or modified sequence
atgggcccccgtggagcagcttcactcccccgtggacccggaccgagacgccttctactcccagtcgtactgcctctgctccttctgctgctgctggccccaccaggttctggtgccggcgcctcccgcccccctcacctagttttcctgcttgccgacgacctgggttggaatgatgtgggattccatggctccaggattcggacgccccacctcgatgccctcgcagccggtggcgttctgcttgataactattatacacagcccctatgcacgccgtcacgtagccagctgttgaccggtagataccagattcggacaggacttcaacatcagatcatctggccctgccagcctagttgtgtacctctggacgagaaactactgccacagcttctcaaggaagccggatatacaactcacatggtgggcaagtggcatttgggcatgtacagaaaggaatgtcttcctactagacgaggcttcgacacctactttggatacttactgggatctgaagattattacagtcacgagagatgcacgctcattgacgccttaaatgttacccgttgcgctctggattttcgggatggtgaggaggtagcaactggatacaagaacatgtatagtacaaatatattcaccaaaagggcgatagctctgatcaccaatcatccaccggaaaaacccctcttcctgtacttggctctacaatcagttcatgaacctctgcaggtccctgaagaatacttgaaaccatacgatttcatccaagataaaaatcggcaccactacgctggaatggttagtctcatggacgaggccgtgggcaacgtcactgcagctcttaaaagctcaggcctgtggaataacactgtctttatttttagcaccgataatggcggacaaacactcgccggtggcaataactggcctctgagaggcagaaaatggtcgctctgggagggcggtgtgagaggagtggggtttgtagcatcgcccctccttaaacaaaagggcgtgaaaaatcgtgaactgatacatatttccgattggctccctaccctggtaaagctggctcgcgggcacacaaacggaacaaagcctctggacggatttgacgtgtggaagacaatcagtgaaggtagccctagtccgcggattgaactacttcataatattgaccccaactttgtcgactcttctccttactggcccgaatgttccctgctgctttag

SEQ ID NO: 260414 - RNA, 1242 nt, Artificial Sequence
  derived and/or modified sequence
augggcccccguggagcagcuucacucccccguggacccggaccgagacgccuucuacucccagucguacugccucugcuccuucugcugcugcuggccccaccagguucuggugccggcgccucccgccccccucaccuaguuuuccugcuugccgacgaccuggguuggaaugaugugggauuccauggcuccaggauucggacgccccaccucgaugcccucgcagccgguggcguucugcuugauaacuauuauacacagccccuaugcacgccgucacguagccagcuguugaccggaagauaccagauucgcaccggauuacagcaccagauuauauggcccugccaaccuaguugcgugccccuggacgagaagcugcucccacagcugcucaaagaagcugguuauacuacccauauggugggcaaauggcacuuagggauguauagaaaggagugucuccccacucgacgaggauucgauacauacuucggguaccuccugggcucagaagacuacuauucucacgagcgcuguacccugauugacgcucucaauguaacuaggugcgccuuggauuuuagggacggugaagaaguggccacaggauauaagaauauguauaguacuaacauuuuuacgaagagggcgauagcacugaucacgaaucauccgccugaaaaaccucuauuucuauacuuagcccugcaguccgugcacgagccguugcaggugccagaggaguaucugaaaccuuaugauuuuauucaggauaagaauaggcaccacuacgcuggcauggugaguuuaauggacgaagcaguaggcaaugucacagcugcgcugaaauccuccgggcuuuggaacaauacggucuucauuuucucaacggauaauggcggacagacccuagcaggggggaauaauuggccacugcgcggucgcaaguggagcuuaugggagggaggcgugcggggugucggguucguugccucuccgcuauugaagcagaagggggucaagaaucgcgaauuaauucacauaagugauuggcugccaacucucgucaaacuggcucgaggacacacuaauggcacaaagccacucgacggauucgacguauggaaaacgauuuccgagggaucuccaagcccaagaauagaauuguugcauaauauugaccccaacuuuguagacuccaguccauacuggcccgaaugcagccuucugcuguag

SEQ ID NO: 260415 - RNA, 1242 nt, Artificial Sequence
  derived and/or modified sequence
augggcccccguggagcagcuucacucccccguggacccggaccgagacgccuucuacucccagucguacugccucugcuccuucugcugcugcuggccccaccagguucuggugccggcgccucccgccccccucaccuaguuuuccugcuugccgacgaccuggguuggaaugaugugggauuccauggcuccaggauucggacgccccaccucgaugcccucgcagccgguggcguucugcuugauaacuauuauacacagccccuaugcacgccgucacguagccagcuguugaccgguagauaccagauucggacaggacuucaacaucagaucaucuggcccugccagccuaguuguguaccucuggacgagaaacuacugccacagcuucucaaggaagccggauauacaacucacauggugggcaaguggcauuugggcauguacagaaaggaaugucuuccuacuagacgaggcuucgacaccuacuuuggauacuuacugggaucugaagauuauuacagucacgagagaugcacgcucauugacgccuuaaauguuacccguugcgcucuggauuuucgggauggugaggagguagcaacuggauacaagaacauguauaguacaaauauauucaccaaaagggcgauagcucugaucaccaaucauccaccggaaaaaccccucuuccuguacuuggcucuacaaucaguucaugaaccucugcaggucccugaagaauacuugaaaccauacgauuucauccaagauaaaaaucggcaccacuacgcuggaaugguuagucucauggacgaggccgugggcaacgucacugcagcucuuaaaagcucaggccuguggaauaacacugucuuuauuuuuagcaccgauaauggcggacaaacacucgccgguggcaauaacuggccucugagaggcagaaaauggucgcucugggagggcggugugagaggagugggguuuguagcaucgccccuccuuaaacaaaagggcgugaaaaaucgugaacugauacauauuuccgauuggcucccuacccugguaaagcuggcucgcgggcacacaaacggaacaaagccucuggacggauuugacguguggaagacaaucagugaagguagcccuaguccgcggauugaacuacuucauaauauugaccccaacuuugucgacucuucuccuuacuggcccgaauguucccugcugcuuuag

SEQ ID NO: 260416 - protein, 654 aa, Artificial Sequence
  derived and/or modified sequence
MLLKKHAGKGGGREPRSEDPTPAEQHCARTMPPCAVLAALLSVVAVVSCLYLGVKTNDLQARIAALESAKGAPSIHLLPDTLDHLKTMVQEKVERLLAQKSYEHMAKIRIAREAPSECNCPAGPPGKRGKRGRRGESGPPGQPGPQGPPGPKGDKGEQGDQGPRMVFPKINHGFLSADQQLIKRRLIKGDQGQAGPPGPPGPPGPRGPPGDTGKDGPRGMPGVPGEPGKPGEQGLMGPLGPPGQKGSIGAPGIPGMNGQKGEPGLPGAVGQNGIPGPKGEPGEQGEKGDAGENGPKGDTGEKGDPGSSAAGIKGEPGESGRPGQKGEPGLPGLPGLPGIKGEPGFIGPQGEPGLPGLPGTKGERGEAGPPGRGERGEPGAPGPKGKQGESGTRGPKGSKGDRGEKGDSGAQGPRGPPGQKGDQGATEIIDYNGNLHEALQRITTLTVTGPPGPPGPQGLQGPKGEQGSPGIPGMDGEQGLKGSKGDMGDPGMTGEKGGIGLPGLPGANGMKGEKGDSGMPGPQGPSIIGPPGPPGPHGPPGPMGPHGLPGPKGTDGPMGPHGPAGPKGERGEKGAMGEPGPRGPYGLPGKDGEPGLDGFPGPRGEKGDLGEKGEKGFRGVKGEKGEPGQPGLDGLDAPCQLGPDGLPMPGCWQK

SEQ ID NO: 260417 - DNA, 1971 bp, Artificial Sequence
  derived and/or modified sequence
atgctgctgaagaagcacgccggcaagggcggcggcagagagcccagaagcgaggaccccacccccgccgagcagcactgcgccagaaccatgcccccctgcgccgtgctggccgccctgctgagcgtggtggccgtggtgagctgcctgtacctgggcgtgaagaccaacgacctgcaggccagaatcgccgccctggagagcgccaagggcgcccccagcatccacctgctgcccgacaccctggaccacctgaagaccatggtgcaggagaaggtggagagactgctggcccagaagagctacgagcacatggccaagatcagaatcgccagagaggcccccagcgagtgcaactgccccgccggcccccccggcaagagaggcaagagaggcagaagaggcgagagcgccggcccccccggcgcccccgcccccagccagggcccccccggccccaagggcgacaagggcgagcagggcgaccagggccccagaatggtgttccccaagatcaaccacggcttcctgagcgccgaccagcagctgatcaagagaagactgatcaagggcgaccagggccaggccggcccccccggcccccccggcccccccggccccagaggcccccccggcgacaccggcaaggacggccccagaggcatgcccggcgtgcccggcgagcccggcaagcccggcgagcagggcctgatgggccccctgggcccccccggccagaagggcagcatcggcgcccccggcatccccggcatgaacggccagaagggcgagcccggcctgcccggcgccgtgggccagaacggcatccccggccccaagggcgagcccggcgagcagggcgagaagggcgacgccggcgagaacggccccaagggcgacaccggcgagaagggcgaccccggcagcagcgccgccggcatcaagggcgagcccggcgagagcggcagacccggccagaagggcgagcccggcctgcccggcctgcccggcctgcccggcatcaagggcgagcccggcttcatcggcccccagggcgagcccggcctgcccggcctgcccggcaccaagggcgagagaggcgaggccggcccccccggcagaggcgagagaggcgagcccggcgcccccggccccaagggcaagcagggcgagagcggcaccagaggccccaagggcagcaagggcgacagaggcgagaagggcgacagcggcgcccagggccccagaggcccccccggccagaagggcgaccagggcgccaccgagatcatcgactacaacggcaacctgcacgaggccctgcagagaatcaccaccctgaccgtgaccggcccccccggcccccccggcccccagggcctgcagggccccaagggcgagcagggcagccccggcatccccggcatggacggcgagcagggcctgaagggcagcaagggcgacatgggcgaccccggcatgaccggcgagaagggcggcatcggcctgcccggcctgcccggcgccaacggcatgaagggcgagaagggcgacagcggcatgcccggcccccagggccccagcatcatcggcccccccggcccccccggcccccacggcccccccggccccatgggcccccacggcctgcccggccccaagggcaccgacggccccatgggcccccacggccccgccggccccaagggcgagagaggcgagaagggcgccatgggcgagcccggccccagaggcccctacggcctgcccggcaaggacggcgagcccggcctggacggcttccccggccccagaggcgagaagggcgacctgggcgagaagggcgagaagggcttcagaggcgtgaagggcgagaagggcgagcccggccagcccggcctggacggcctggacgccccctgccagctgggccccgacggcctgcccatgcccggctgctggcagaagtag

SEQ ID NO: 260418 - DNA, 1965 bp, Artificial Sequence
  derived and/or modified sequence
atgctgctgaagaagcacgccggcaagggcggcggcagagagcccagaagcgaggaccccacccccgccgagcagcactgcgccagaaccatgcccccctgcgccgtgctggccgccctgctgagcgtggtggccgtggtgagctgcctgtacctgggcgtgaagaccaacgacctgcaggccagaatcgccgccctggagagcgccaagggcgcccccagcatccacctgctgcccgacaccctggaccacctgaagaccatggtgcaggagaaggtggagagactgctggcccagaagagctacgagcacatggccaagatcagaatcgccagagaggcccccagcgagtgcaactgccccgccggcccccccggcaagagaggcaagagaggcagaagaggcgagagcggcccccccggccagcccggcccccagggcccccccggccccaagggcgacaagggcgagcagggcgaccagggccccagaatggtgttccccaagatcaaccacggcttcctgagcgccgaccagcagctgatcaagagaagactgatcaagggcgaccagggccaggccggcccccccggcccccccggcccccccggccccagaggcccccccggcgacaccggcaaggacggccccagaggcatgcccggcgtgcccggcgagcccggcaagcccggcgagcagggcctgatgggccccctgggcccccccggccagaagggcagcatcggcgcccccggcatccccggcatgaacggccagaagggcgagcccggcctgcccggcgccgtgggccagaacggcatccccggccccaagggcgagcccggcgagcagggcgagaagggcgacgccggcgagaacggccccaagggcgacaccggcgagaagggcgaccccggcagcagcgccgccggcatcaagggcgagcccggcgagagcggcagacccggccagaagggcgagcccggcctgcccggcctgcccggcctgcccggcatcaagggcgagcccggcttcatcggcccccagggcgagcccggcctgcccggcctgcccggcaccaagggcgagagaggcgaggccggcccccccggcagaggcgagagaggcgagcccggcgcccccggccccaagggcaagcagggcgagagcggcaccagaggccccaagggcagcaagggcgacagaggcgagaagggcgacagcggcgcccagggccccagaggcccccccggccagaagggcgaccagggcgccaccgagatcatcgactacaacggcaacctgcacgaggccctgcagagaatcaccaccctgaccgtgaccggcccccccggcccccccggcccccagggcctgcagggccccaagggcgagcagggcagccccggcatccccggcatggacggcgagcagggcctgaagggcagcaagggcgacatgggcgaccccggcatgaccggcgagaagggcggcatcggcctgcccggcctgcccggcgccaacggcatgaagggcgagaagggcgacagcggcatgcccggcccccagggccccagcatcatcggcccccccggcccccccggcccccacggcccccccggccccatgggcccccacggcctgcccggccccaagggcaccgacggccccatgggcccccacggccccgccggccccaagggcgagagaggcgagaagggcgccatgggcgagcccggccccagaggcccctacggcctgcccggcaaggacggcgagcccggcctggacggcttccccggccccagaggcgagaagggcgacctgggcgagaagggcgagaagggcttcagaggcgtgaagggcgagaagggcgagcccggccagcccggcctggacggcctggacgccccctgccagctgggccccgacggcctgcccatgcccggctgctggcagaagtag

SEQ ID NO: 260419 - DNA, 1971 bp, Artificial Sequence
  derived and/or modified sequence
atgttattgaagaaacatgccggcaagggaggagggcgggagccccgatcggaggacccaacacccgctgagcaacactgcgctcgtacgatgccaccctgcgctgttctcgccgcactgctttccgtggtggccgtagtgagctgtctctacctgggagttaaaaccaacgatctgcaggcaaggatcgccgcactcgagagcgccaaaggcgctcccagtatccatttactgcctgacaccctcgatcacctaaagacaatggtacaggaaaaggtggagcggctcctcgcacagaagagttacgagcacatggcaaagattcggatagctcgcgaagcaccctcagagtgcaactgccctgccggacctcccgggaagcgaggaaagcggggaaggaggggtgagtccgccggaccgcctggggcgccagccccttcccaggggcctccagggcccaagggcgataaaggagaacagggggatcaagggccgcggatggtgttcccaaagattaaccatggttttctgtccgccgatcagcagcttataaaaaggagactgatcaaaggggatcagggccaggcgggccctcctggccctccagggccccctggacctagggggccccctggcgatactggcaaagatggtccacgtggcatgccaggcgtgccaggcgaaccaggcaagcccggggaacagggcctaatgggcccactcggcccaccgggacaaaaggggagcatcggcgctccgggcatccctggtatgaacgggcagaaaggtgaacctggcctgccaggagccgttggacaaaacggcatacctggtcctaagggggaaccgggggaacagggggagaaaggcgatgcaggtgagaacggccctaagggtgatacaggggagaaaggcgaccccggctccagcgccgcgggaatcaaaggagagccaggcgaatctggcaggccgggccagaagggggagcccgggctgccaggcctgccggggctgccaggcattaagggagagcccgggtttatcggcccacagggagagccagggctgcctggcttgcctggtacaaaaggggagaggggagaggctgggccgcctggcaggggcgaaagaggcgaacccggagctccgggaccgaaaggaaaacagggcgagagcggtactcggggccctaaaggcagcaagggagatcgaggggaaaaaggggactcaggtgctcagggtcctaggggcccaccaggacagaaaggagaccaaggagcaaccgagattatagactacaatggtaacctgcacgaagccctgcagagaattacaactctgaccgtgacagggccgcccgggcctcccggtccgcagggattacagggccccaaaggagagcagggttcacccggcattccaggaatggacggcgaacagggcctcaaaggcagtaagggcgacatgggcgaccccggcatgaccggcgagaagggaggcattggcctccctggactgcctggggctaacgggatgaaaggggaaaaaggagatagcgggatgcctgggcctcagggaccttctataatcgggcccccggggcctcctggcccccacgggcctcctggaccgatggggccccacggactccccggcccaaaggggaccgatggccctatggggccacatggccccgccggtcctaaaggcgagagaggggagaagggcgccatgggggagcccggtcctcgaggcccatatggcttgccaggcaaggacggggaacctggccttgatggcttcccaggtccgcggggcgagaagggcgatttgggcgagaagggggagaagggctttaggggggtgaagggcgaaaaaggggagcccgggcaaccaggactcgacggcctggatgccccttgtcagctgggtccagacggactacccatgccagggtgctggcaaaaatag

SEQ ID NO: 260420 - DNA, 1965 bp, Artificial Sequence
  derived and/or modified sequence
atgttgctgaagaaacatgccggaaagggaggcggacgcgaacctcggagcgaggatcccacccctgccgagcaacattgtgctagaacaatgcctccctgcgccgttttagccgctctgctgtcagtggtcgcagttgtgtcgtgtctgtacctgggtgtgaagaccaatgatctccaggctcgaattgctgctttggaaagcgccaagggggcccccagcatacacctcttaccagacaccttggatcatctgaagactatggttcaagagaaggtggaaaggcttctcgcccagaaaagctacgagcacatggcaaaaatcaggattgccagggaagcacctagcgagtgcaactgtcctgcagggccccccggcaagcgtggtaaaagaggcagacggggggagagcgggccaccaggtcagccgggccctcaagggccacccggacccaagggagacaagggagagcagggcgaccaagggccccgcatggtgtttcctaaaattaaccatggctttcttagcgccgaccagcagctcattaaacgccggcttatcaagggcgaccagggtcaggcaggcccccccgggccgccggggccgcctggtcctaggggaccacctggagacacggggaaagacggaccccgtggtatgcccggggtgccgggtgagcccggaaaacctggcgaacaggggctgatggggcctttgggcccaccaggccaaaaagggtccattggagccccaggcattcctgggatgaacggtcagaaaggagaacccggactgccgggtgccgtgggccagaatggcatacccggcccgaaaggtgaaccaggcgaacagggggaaaaaggggacgctggcgagaacggtccaaagggtgacaccggcgagaaaggagatccaggttcttctgccgctggaattaagggcgaacccggggaaagcgggcgtccgggtcagaaaggggagccaggcctgcccgggctccctggcttacccgggataaaaggcgagcctgggttcatcggtccacagggcgagccagggctccccggcttgccgggcaccaaaggcgaacgcggagaagcaggacctccgggacgtggtgagcggggtgagccaggagcgcctggacccaagggcaagcagggcgaatctggaacgaggggtcctaaaggttcaaaaggcgatcgtggcgaaaaaggtgatagcggggcgcagggcccccggggccctccggggcagaaaggcgatcagggcgccactgagatcattgactacaatggaaatcttcatgaagcactgcaaagaatcaccacactaactgtcaccggacctccaggtccaccaggacctcaggggctccagggtcctaagggcgagcaaggctctcccggtattccaggcatggacggtgaacaaggcctgaagggcagcaagggagatatgggcgaccccggcatgacaggtgagaagggaggaatcggactgcccggactgcctggcgctaacgggatgaagggtgagaaaggggactctggtatgcctgggcctcaagggccgtctatcatcggtccccccggaccaccaggaccccatggccccccgggtccgatgggccctcacggcctgcctggaccaaaaggaaccgacggccccatgggacctcacggccctgccggccccaaaggagaaaggggcgagaagggcgccatgggcgagcctggtcctaggggtccttatgggctccccgggaaggatggcgagccagggttagatggattccccggtccgagaggggaaaagggcgacctgggcgaaaagggggagaaaggcttccgtggtgtgaaaggggaaaaaggggagcccgggcagccgggcctggatggcctcgatgccccttgtcagctgggacccgatggcctgccaatgccaggctgctggcagaagtag

SEQ ID NO: 260421 - DNA, 1971 bp, Artificial Sequence
  derived and/or modified sequence
atgctgctgaagaagcatgctggaaaaggaggcggccgggagcccaggtctgaggaccccaccccagctgagcagcactgtgcccggaccatgccaccctgtgctgtgctggccgccctgctgtctgtggtggccgtggtgtcctgcctgtacctgggcgtgaagaccaatgacctgcaggccagaattgctgccctggagagcgccaagggggcccccagcatccacctgctgcctgacaccctggaccacctgaagaccatggtgcaggagaaggtggagcggctgctggcccagaagagctatgagcacatggccaagatccgcatcgcccgggaggcccccagcgagtgcaactgcccagctggccccccaggcaagaggggcaagagaggaagaagaggagagagcgctggccccccaggggccccagcccccagccagggccccccaggccccaagggggacaagggggagcagggcgaccagggccccaggatggtgttccccaagatcaaccacggcttcctgtctgctgaccagcagctgatcaagaggaggctcatcaagggggaccagggccaggccggccccccaggccccccaggccccccaggcccccggggccccccaggggacaccgggaaggatggcccccggggcatgcctggggtgcctggagagcccgggaagccaggagagcagggcctgatgggccccctgggccccccaggccagaagggcagcatcggggcccctggcatccctggcatgaatggccagaagggggagcccggcctgcccggggctgtgggccagaatggcatccctggccccaagggggagcctggagagcagggcgagaagggagatgctggggagaatggccccaagggggacacaggagagaagggggaccccggcagcagcgctgctggcatcaagggggagcccggggagagcggccggcccggccagaagggggagcccggcctgcccggcctgcccggcctgcccggcatcaagggggagcccggcttcatcggcccccagggcgagcccggcctgcccggcctgcccggcaccaagggggagcggggggaggccggccccccaggccgcggggagcggggggagcccggggcccctggccccaagggcaagcagggcgagagcggcacccggggccccaagggcagcaaaggagacagaggagagaagggggacagcggggcccagggcccccggggccccccaggccagaagggggaccagggcgccacagagatcatcgactacaacggcaacctgcacgaggccctgcagaggatcaccaccctgactgtgacaggccccccaggccccccaggcccccagggcctgcagggccccaagggggagcagggcagccctggcatccctggcatggatggagagcagggcctgaagggcagcaagggggacatgggagaccccggcatgactggagagaagggcggcatcggcctgcccggcctgcccggggccaacggcatgaagggggagaagggggacagcggcatgcctggcccccagggccccagcatcatcggccccccaggccccccaggcccccacggccccccaggccccatgggcccccacggcctgcccggccccaagggcacagatggccccatgggcccccacggccctgctggccccaagggggagcggggggagaagggggccatgggagagcccggcccccggggcccctacggcctgcccgggaaggatggagagcccggcctggatggcttccctggccccagaggagagaagggggacctgggggagaagggggagaagggcttccggggcgtgaagggggagaagggggagcccggccagcccggcctggatggcctggatgccccctgccagctgggcccagatggcctgcccatgcctggctgctggcagaagtag

SEQ ID NO: 260422 - DNA, 1965 bp, Artificial Sequence
  derived and/or modified sequence
atgctgctgaagaagcatgctggaaaaggaggcggccgggagcccaggtctgaggaccccaccccagctgagcagcactgtgcccggaccatgccaccctgtgctgtgctggccgccctgctgtctgtggtggccgtggtgtcctgcctgtacctgggcgtgaagaccaatgacctgcaggccagaattgctgccctggagagcgccaagggggcccccagcatccacctgctgcctgacaccctggaccacctgaagaccatggtgcaggagaaggtggagcggctgctggcccagaagagctatgagcacatggccaagatccgcatcgcccgggaggcccccagcgagtgcaactgcccagctggccccccaggcaagaggggcaagagaggaagaagaggagagagcggccccccaggccagcccggcccccagggccccccaggccccaagggggacaagggggagcagggcgaccagggccccaggatggtgttccccaagatcaaccacggcttcctgtctgctgaccagcagctgatcaagaggaggctcatcaagggggaccagggccaggccggccccccaggccccccaggccccccaggcccccggggccccccaggggacaccgggaaggatggcccccggggcatgcctggggtgcctggagagcccgggaagccaggagagcagggcctgatgggccccctgggccccccaggccagaagggcagcatcggggcccctggcatccctggcatgaatggccagaagggggagcccggcctgcccggggctgtgggccagaatggcatccctggccccaagggggagcctggagagcagggcgagaagggagatgctggggagaatggccccaagggggacacaggagagaagggggaccccggcagcagcgctgctggcatcaagggggagcccggggagagcggccggcccggccagaagggggagcccggcctgcccggcctgcccggcctgcccggcatcaagggggagcccggcttcatcggcccccagggcgagcccggcctgcccggcctgcccggcaccaagggggagcggggggaggccggccccccaggccgcggggagcggggggagcccggggcccctggccccaagggcaagcagggcgagagcggcacccggggccccaagggcagcaaaggagacagaggagagaagggggacagcggggcccagggcccccggggccccccaggccagaagggggaccagggcgccacagagatcatcgactacaacggcaacctgcacgaggccctgcagaggatcaccaccctgactgtgacaggccccccaggccccccaggcccccagggcctgcagggccccaagggggagcagggcagccctggcatccctggcatggatggagagcagggcctgaagggcagcaagggggacatgggagaccccggcatgactggagagaagggcggcatcggcctgcccggcctgcccggggccaacggcatgaagggggagaagggggacagcggcatgcctggcccccagggccccagcatcatcggccccccaggccccccaggcccccacggccccccaggccccatgggcccccacggcctgcccggccccaagggcacagatggccccatgggcccccacggccctgctggccccaagggggagcggggggagaagggggccatgggagagcccggcccccggggcccctacggcctgcccgggaaggatggagagcccggcctggatggcttccctggccccagaggagagaagggggacctgggggagaagggggagaagggcttccggggcgtgaagggggagaagggggagcccggccagcccggcctggatggcctggatgccccctgccagctgggcccagatggcctgcccatgcctggctgctggcagaagtag

SEQ ID NO: 260423 - DNA, 1971 bp, Artificial Sequence
  derived and/or modified sequence
atgctgctgaagaagcacgccggcaagggcggcggccgggagccccgcagcgaggacccaactcctgccgagcagcattgcgcaagaactatgccaccctgtgcggtactagctgctctgcttagcgtcgtggctgtggtttcctgtctgtacctgggagtcaagacaaatgacctgcaggctaggattgccgctctcgaatctgctaagggggcaccctccatacatttgctgccagatacactcgaccacctcaagaccatggtgcaggagaaagtcgagagactcctggcccaaaaatcctacgagcacatggccaaaatccgcatagctagggaggccccttcagaatgcaattgtccggccggcccacccgggaagaggggcaagcgagggcgacggggtgaatccgctggacctccgggcgcccctgcgccctcccaagggcctccaggtcccaagggcgacaagggcgaacagggagatcagggacctcgcatggtttttccgaagattaaccacgggttcctctccgccgatcagcagttaataaaacgccggttaatcaagggggatcagggccaggccggcccccctgggcctcctggcccgccaggccctagggggcccccgggcgacactggcaaggatggccctagaggcatgcctggcgtaccaggcgagccaggcaaaccgggggaacagggtctcatgggacccttgggaccacccggacagaaggggtccattggagctccggggatcccagggatgaacggtcagaaaggggaaccagggctccccggagccgttggacaaaatggtatcccaggacctaagggggagccgggtgagcaaggtgagaaaggcgacgctggggaaaacggtcccaagggggatacaggggagaagggcgaccccggaagttcggctgcgggaattaagggagagccaggcgaaagtgggcgacctgggcaaaagggggagcctggcttacctgggctacctggtctacccggcattaagggcgaacctggatttattgggcctcaaggagaacccggattaccggggttgcccgggaccaaaggtgagcggggggaggctgggccgcccgggcggggcgagaggggcgagcccggggcaccaggccctaagggtaagcagggagagagcggaacacggggaccaaagggtagcaaaggagacagaggcgaaaagggcgacagcggcgcccagggccctagaggaccgccaggccagaaaggagaccagggagccacagagataatcgattacaacggaaacctgcacgaagctcttcagcgcataaccaccctcaccgtgacaggcccacctggaccgcctggacctcagggcctgcaggggcccaagggtgagcaggggagccccgggatcccaggaatggatggtgagcaggggctaaaagggtccaagggggacatgggagatcctgggatgactggggaaaaaggggggatcggattgcccggcctacctggggctaatggaatgaagggcgaaaagggcgactctggaatgcctggcccgcaggggccgagtattattgggccccctggaccgccagggccacacggaccccccgggcctatgggaccacacgggctgcccggacccaaaggcacagacgggccaatgggtccccacggacccgccggtcccaagggtgagcgaggtgagaagggagcaatgggcgaaccaggcccgcgtggcccctacgggctacctggcaaggacggggaaccggggctggatggctttcctggaccaagaggcgagaagggagatctgggcgaaaaaggtgaaaagggatttcggggcgtcaaaggtgagaagggggagccgggacaacccggtctggacggactagatgccccttgtcagctcggtccagacggcttaccgatgccgggttgttggcagaagtag

SEQ ID NO: 260424 - DNA, 1965 bp, Artificial Sequence
  derived and/or modified sequence
atgctgctgaagaagcacgccggcaagggcggcggccgggagccccgatccgaggaccccacccctgcggaacagcactgcgcccgaacaatgcccccctgtgcagtactagctgccctcctcagtgtggtcgcagtggtctcttgtctctatctcggcgtcaaaaccaacgaccttcaggccagaatcgctgcccttgagtctgccaagggagccccttccatccacctcctgccagacaccttagatcatctaaagaccatggtgcaggaaaaggtggaacggcttcttgcccagaaatcttatgagcacatggcaaagatacggattgcccgcgaagccccaagcgagtgcaattgtcccgcaggccctcccggcaagcggggtaagcgcggtcggcgaggcgagtctggtccccccggccagccaggcccacagggtccacccgggcccaagggcgataagggagagcagggagaccaggggccccgaatggtctttcccaaaatcaaccacggcttcctttccgcagatcaacaactgataaaacgccgcctcattaaaggggatcaagggcaggcaggcccacccggaccaccaggccccccagggccacgaggccccccaggtgacaccgggaaggatggtcctaggggcatgccgggcgtcccaggcgagccagggaaacccggcgaacagggtctcatggggcccctgggacctccaggccagaaagggtctatcggtgcccccgggatccccgggatgaacggccagaaaggcgaacctggactacctggagcggtgggacagaatgggatccctggaccaaaaggtgaacctggtgagcagggggaaaagggggacgctggcgagaatgggccaaagggcgacactggcgaaaagggggatcctggttcaagtgcagccgggattaaaggcgaaccaggagaatctgggcgccccgggcagaaaggtgagccgggcttgccagggctcccgggattgcccggtatcaaaggagagcctggcttcattggccctcagggagagcccgggctgccaggactgccagggacaaagggagaacgtggcgaagcaggtcccccgggcagaggcgaaagaggtgaaccaggcgcccctggtccaaagggaaagcagggcgagagcggcacaagaggacctaaggggtccaaaggagatcgaggagaaaaaggagatagcggagcgcaggggcctcgtggaccgcctggacagaaaggagaccagggagcaaccgaaatcattgactacaatggaaatctgcacgaagccctgcagagaattacaacccttaccgtcaccggacctcccggcccacccggcccccagggcttacaagggcccaagggtgagcaggggtcacctgggataccaggtatggacggtgaacagggcctgaaaggatccaagggggatatgggcgatcctggcatgactggtgagaagggaggtatcggcctgccaggcctgcctggcgcgaatggaatgaagggagaaaagggagactcaggtatgccgggaccacagggaccatctatcattggcccaccagggccaccaggtccccacggcccacccggtccgatggggccccacgggctgcccggccccaaggggaccgatggacctatgggccctcacgggccagcgggacccaaaggtgagaggggagaaaagggggccatgggcgagccaggacctcggggaccctacgggcttccgggcaaggacggagagccaggtttggatggctttccggggcctaggggagaaaagggcgatctgggggagaaaggcgaaaaaggctttcgaggcgttaaaggagaaaagggggagcccggtcagccagggctggacggcttggatgcaccctgccagctgggccctgacggccttcccatgcccggctgttggcaaaaatag

SEQ ID NO: 260425 - DNA, 1968 bp, Artificial Sequence
  derived and/or modified sequence
atgctgctgaagaagcacgcagggaaaggagggggccgggagcccagatccgaggacccgacccctgccgaacagcattgtgcccggaccatgcccccgtgtgccgtcctggcggccctcctgtcagtggtggccgtggtgtcttgcctgtacctgggtgtgaaaaccaacgacctccaggcgaggatcgccgctctcgaatccgccaaaggggccccttccattcatctgctgcctgataccctggatcacctcaagactatggtgcaagagaaagtggagcgacttctggctcagaaatcctatgaacatatggctaaaataagaatcgcaagagaagcaccttcagaatgtaactgcccagcaggccctccagggaaacgaggtaagagaggccgaagaggagaatctgctgggccgccaggggcacctgcccccagtcagggccctcctggtccaaaaggcgataagggagaacaaggtgatcagggacctaggatggtgtttcctaaaatcaatcatgggtttctctctgctgatcagcagctcattaaacgccgcctgattaagggtgaccaaggacaggcagggcctccaggaccccctggccctccaggcccaagagggccacctggggacacagggaaagatggcccccgtggaatgccaggagtacccggtgaaccaggaaagccaggagaacaaggcttgatgggtcctctagggcctccgggacaaaagggttctattggagcacctggaattccagggatgaatgggcaaaagggtgagcccgggttgcctggagcagtaggacagaatggaataccaggacctaagggagaacctggagaacaaggtgaaaagggagacgctggagagaacggccccaagggtgacacaggcgaaaagggtgaccctggatcatctgctgcaggaattaagggagaacctggggaatctggtcgtccagggcaaaagggtgaaccagggcttcctgggcttcctggacttccggggataaagggagaaccaggtttcattggtcctcaaggagaaccaggcttaccaggtttaccaggaacaaaaggtgaacggggggaagcagggcctcctggaagaggtgagcgaggggaacctggagcccccggaccaaaggggaaacaaggtgaatcaggaactagaggcccaaaggggtcaaagggggatcgtggagaaaaaggggactctggagctcagggaccaaggggtccacctggtcaaaaaggggatcaaggagccactgagatcatagactacaacggcaacctccacgaagccttacagaggattaccaccttaactgtcacgggtccccctggacctcctggacctcaaggactacaagggccaaagggagagcagggatctccaggaatcccaggaatggatggagagcagggactcaaaggctcaaagggagacatgggggacccaggtatgacaggtgaaaaaggaggaattggacttcctggattaccgggagccaatggaatgaaaggagaaaaaggagattctggaatgccgggtccacagggtccttctatcataggcccaccaggcccaccaggtccccatggcccacctggccccatgggacctcatggacttcctggaccaaagggtacagatggtcctatgggaccccatggccctgcaggtcccaaaggagaaagaggtgaaaaaggagctatgggagagcctggaccaagagggccctatgggctgcctgggaaagatggagagcctggtcttgatggcttccctggtccacggggtgagaagggtgatctaggagaaaagggagaaaagggattccgtggcgttaagggggaaaaaggggagccaggccagcctggcctggatgggctggatgccccttgccaattggggccagatggcttacccatgcctggctgttggcaaaag

SEQ ID NO: 260426 - DNA, 1971 bp, Artificial Sequence
  derived and/or modified sequence
atgctcttaaagaagcatgccggtaagggcggagggagggagcctcgctcagaggaccccacccctgcagagcaacattgcgccagaacaatgccgccttgcgccgttctagcagctttgctgtccgtggtggctgtggtcagctgcctgtacctgggggtgaagactaatgatttgcaggccaggatcgcagcacttgaatctgccaaaggagctccctccattcatctgctcccggacactctcgaccacctgaaaaccatggtccaagagaaagtggaacgactgctggcccagaagtcttatgagcacatggcaaaaattcgaatcgcccgtgaggccccatctgagtgcaactgccccgctggcccaccgggaaagcgagggaagaggggtcggcgtggggagtccgccggaccccctggagcccctgcaccttctcagggaccgccaggccctaagggagacaaaggcgaacagggggaccagggaccgcgaatggtgtttcccaagatcaaccacggcttcctgagcgcggatcaacagcttattaagaggcggctcatcaagggcgatcaggggcaggccggacctcctggcccaccaggccctcctggaccacgagggcctcctggcgacacaggcaaagatgggccacggggaatgccgggagtgcccggtgagcccggtaagcccggagagcaagggctgatgggccctcttgggccacccggtcagaagggctcaattggcgctccagggatacccggaatgaatggtcagaaaggagagcctggcctgccaggggctgtgggtcagaatggcatccccggtccaaaaggggagcccggtgagcaaggagaaaaaggggatgctggcgagaacggcccaaagggcgatacaggtgagaagggcgaccctggatccagcgctgccggaataaagggggaacctggtgagtcaggacggccagggcagaagggagaacccggtcttccaggtcttcccggactgcctgggatcaaaggcgaacctggatttatagggcctcaaggggaacctggacttcccggactccctggtacaaagggagagcggggagaggctggtccaccgggaagaggcgagcgcggagaacccggagcccctggtccaaaaggcaaacagggggagtccggtacacggggaccaaagggctcaaaaggcgatagaggggagaagggcgacagcggagcacaaggccctagggggccaccgggacaaaaaggggatcagggggctacggagattatcgactataatgggaacttgcacgaggcccttcaaagaataactacactgactgtgaccgggcctccaggtccacccggtccacagggcctccaagggcctaagggggagcagggttcacccggtatacccggaatggacggagagcaaggcctgaagggctcgaaaggggacatgggagacccgggaatgaccggtgagaaaggcggaatcggacttcccggacttcctggagcaaacggtatgaagggcgaaaaaggggactccggtatgccaggcccacaagggccatcgatcattggcccacctggcccaccagggcctcatggcccaccaggcccaatgggccctcacggcctacccggaccaaaaggcacagatggtcccatgggacctcatgggcctgccggtccgaagggagagagaggggagaagggcgcaatgggggagccaggccctagaggcccatacggactgccaggcaaagacggagagcctgggctcgatggatttccgggaccacggggagagaagggggatctcggggagaagggggagaaggggttcagaggagtgaagggagagaaaggcgagcctggccaacccggtctcgacgggcttgacgcaccctgccaactgggccctgacggactgcccatgcctggttgttggcaaaagtag

SEQ ID NO: 260427 - DNA, 1965 bp, Artificial Sequence
  derived and/or modified sequence
atgctgctcaagaagcacgctgggaaaggaggtggacgcgagccacgcagtgaggaccctactcctgccgagcaacactgcgccagaacaatgccgccttgtgccgttctcgccgctcttctatcggtggtggcagtggtgagctgtctgtatctcggggtgaaaacaaatgaccttcaggcacgcatcgctgcactcgagtccgctaaaggcgcaccgtccatacatttgttgccagacacacttgatcacctcaagacgatggtgcaggagaaagtagagcgcttgctggctcagaagagctacgagcacatggccaagattaggatcgcaagagaggccccaagcgagtgtaattgcccagccggaccacccggaaaacgcggtaagcgcggacggagaggtgagtccggccctcccggacaaccaggtccccagggcccacccggaccaaaaggtgacaaaggagagcaaggagaccaggggccacggatggtttttcctaagatcaaccatgggtttctctctgctgaccagcagctgattaagcgaagacttattaaaggcgatcagggccaggcaggccctcccggaccaccagggcctccgggaccacggggacctccaggagacaccggtaaggatgggccacgcggaatgcccggtgtgcccggagaaccgggtaagcccggagagcaaggcctgatgggacccctgggccctccaggtcagaaaggctctattggcgctcctggcattcctggcatgaacggtcagaagggagagccgggacttcccggtgccgtggggcagaatgggatccctggacccaaaggcgaacccggtgagcagggggaaaaaggtgatgccggagagaatggtcccaagggtgatactggcgaaaagggcgacccgggaagcagtgctgcaggaattaaaggggagcccggagaaagcggcaggccaggccagaagggcgagcccggactgccagggctccccggattgccagggataaaaggcgagccaggatttataggtccacagggagaaccaggcctcccaggcctcccgggtacaaaaggagagaggggagaagcagggccaccaggaagaggggaacgtggagagccaggagcgcctgggcctaaaggaaagcagggagaaagtgggacaaggggacccaagggttctaaaggcgatcggggagagaagggtgactccggagctcagggacccaggggacctccaggtcagaaaggagatcaaggagctaccgagattattgactacaatggcaacctgcacgaggccctgcagcggatcaccaccctgacagttaccgggcctccgggtccacccggaccccagggcctccaaggtcctaagggggagcagggctcccccggaattcccggtatggacggtgaacaaggcctgaagggatctaagggcgacatgggagacccgggaatgactggcgaaaagggcggtatcggcctgcccggtctgcctggcgcaaacggaatgaagggagagaaaggagatagcggaatgcctggtccacagggaccatcaatcatcggtcccccaggtccccctggcccacatggccctccaggacctatgggacctcacggcctcccaggtccgaaggggactgacggtcccatgggacctcacggtcctgccggaccaaaaggcgagaggggagaaaaaggcgctatgggggaaccaggccctcggggtccatacggattgcctggcaaagatggagaaccaggcctcgacgggtttcccggaccgaggggtgaaaagggcgacctgggtgaaaagggggaaaaagggtttcgcggtgtaaagggggaaaagggggaacctggacaacccggtcttgacggtctagacgccccttgtcagctcggccctgatggcctgcctatgccaggctgctggcagaaatag

SEQ ID NO: 260428 - DNA, 2724 bp, Artificial Sequence
  derived and/or modified sequence
ccgcgacttcggcttcgcgagtagcattggttccttgggtttatttcgttttcctctctcttctccaccttagtcgcccctttcgcgctgcgctgtagcgtgctctcacagcctttttgccttgaactgaatgcaggtgggaaacaggtcggcgtgccgaaagacaccgagtaggtagaaataaggcaaactcacagaggcgcaacaggtccggtcctccgtggccagggcgagccgcggccccgcgtggcgcctcggccgttgccctcggaccctgagcggccactgttggggccctcgaaagaggtgtcggtcctctgggagtcggaagagctgtctgggtgggtttcgtcttgctttttaccccaccgccacccagtccccggacggagggtgcttttcacttccagctgggaggagagaagaaagcggggatggtgcacgcctgcgggtctggacgctgagcaaggcaggggattatttgaggtgtagagggtgggaagcgaagccgagacggccgaccccgccacgatgctgctgaagaagcacgcagggaaaggagggggccgggagcccagatccgaggacccgacccctgccgaacagcattgtgcccggaccatgcccccgtgtgccgtcctggcggccctcctgtcagtggtggccgtggtgtcttgcctgtacctgggtgtgaaaaccaacgacctccaggcgaggatcgccgctctcgaatccgccaaaggggccccttccattcatctgctgcctgataccctggatcacctcaagactatggtgcaagagaaagtggagcgacttctggctcagaaatcctatgaacatatggctaaaataagaatcgcaagagaagcaccttcagaatgtaactgcccagcaggccctccagggaaacgaggtaagagaggccgaagaggagaatctggtcctcctggacagcctggtcctcagggccctcctggtccaaaaggcgataagggagaacaaggtgatcagggacctaggatggtgtttcctaaaatcaatcatgggtttctctctgctgatcagcagctcattaaacgccgcctgattaagggtgaccaaggacaggcagggcctccaggaccccctggccctccaggcccaagagggccacctggggacacagggaaagatggcccccgtggaatgccaggagtacccggtgaaccaggaaagccaggagaacaaggcttgatgggtcctctagggcctccgggacaaaagggttctattggagcacctggaattccagggatgaatgggcaaaagggtgagcccgggttgcctggagcagtaggacagaatggaataccaggacctaagggagaacctggagaacaaggtgaaaagggagacgctggagagaacggccccaagggtgacacaggcgaaaagggtgaccctggatcatctgctgcaggaattaagggagaacctggggaatctggtcgtccagggcaaaagggtgaaccagggcttcctgggcttcctggacttccggggataaagggagaaccaggtttcattggtcctcaaggagaaccaggcttaccaggtttaccaggaacaaaaggtgaacggggggaagcagggcctcctggaagaggtgagcgaggggaacctggagcccccggaccaaaggggaaacaaggtgaatcaggaactagaggcccaaaggggtcaaagggggatcgtggagaaaaaggggactctggagctcagggaccaaggggtccacctggtcaaaaaggggatcaaggagccactgagatcatagactacaacggcaacctccacgaagccttacagaggattaccaccttaactgtcacgggtccccctggacctcctggacctcaaggactacaagggccaaagggagagcagggatctccaggaatcccaggaatggatggagagcagggactcaaaggctcaaagggagacatgggggacccaggtatgacaggtgaaaaaggaggaattggacttcctggattaccgggagccaatggaatgaaaggagaaaaaggagattctggaatgccgggtccacagggtccttctatcataggcccaccaggcccaccaggtccccatggcccacctggccccatgggacctcatggacttcctggaccaaagggtacagatggtcctatgggaccccatggccctgcaggtcccaaaggagaaagaggtgaaaaaggagctatgggagagcctggaccaagagggccctatgggctgcctgggaaagatggagagcctggtcttgatggcttccctggtccacggggtgagaagggtgatctaggagaaaagggagaaaagggattccgtggcgttaagggggaaaaaggggagccaggccagcctggcctggatgggctggatgccccttgccaattggggccagatggcttacccatgcctggctgttggcaaaagtgatgaatctaacctttcaagcatgaagttgtgtatataagggtccatttttaatatttatagttgaaaactgaattgcagattttacaagtctgagatatgtttacatagggctgcttcttcctgctggcagtagtatacatgtccatttttactccacttacatctgaaattgggcaatttgtgaaaccagtgagaatcctgcaaaaaatatagatcagtatctcctta

SEQ ID NO: 260429 - DNA, 741 bp, Artificial Sequence
  derived and/or modified sequence
atggacctgcttcgggagctgaaagccatgccaattaccttgcacctgttgcagagtacgagggtgggtatgtctgtgaacgctctgcgaaagcagagtagcgacgaggaggtcatcgctctggccaagagtttaattaagagctggaaaaaacttctcgacgccagtgacgccaaggcacgcgagcggggacggggcatgccactgccgaccagtagccgcgacgcatccgaggcccccgaccctagtaggaaacgaccagagctcccaagagcgccctctaccccacgcatcacaacgtttccgcctgttccggttacttgcgacgccgtccgaaataagtgccgggaaatgctcacagcagcattgcaaactgatcacgatcacgtggcgattggagctgactgcgagcggttgtccgcacagatcgaagagtgtatcttccgggacgtggggaatactgatatgaaatacaaaaatagagtgagatcccgcatatctaacctcaaagatgctaaaaacccagacctccgccgtaatgtgctgtgtggcgctattacccctcaacaaatagcggtgatgacatcagaagagatggcaagcgacgagctcaaggaaatccggaaagccatgacgaaggaggctattcgagaacatcagatggccaggactgggggcacacaaacagacttattcacgtgcggcaaatgtcgcaagaagaattgcacttatacccaatag

SEQ ID NO: 260430 - DNA, 819 bp, Artificial Sequence
  derived and/or modified sequence
atggacctgctaagagagttaaaggcaatgcccataaccctgcacctgttacagagcacaagagtgggaatgtcagtgaatgcactgcgcaaacagtcaagtgacgaggaagtgatagcgctggccaaatccctgatcaagagctggaagaagctcctcgatgccagcgatgctaaggccagggaacgaggccgaggaatgcccttgcctacctcgtcaagggacgcttccgaagctcctgatccttcacggaagcggcctgagctccccagagctcctagtaccccccgaattactacatttcccccagtcccggtgacgtgtgacgccgtcagaaataaatgccgcgagatgcttacggcagcactgcagactgaccacgaccacgttgcaatcggagccgattgcgagagactgagcgctcaaatcgaggaatgcatttttagggacgtagggaataccgatatgaagtataagaatagggtaaggtcaagaattagcaatctgaaggacgccaagaatccagatctgcgcaggaacgtgctctgtggcgccatcacgccccagcagattgccgttatgaccagcgaggagatggcctcagatgagcttaaagagattagaaaggccatgaccaaagaggcaattagagagcaccaaatggctagaacaggagggactcagaccgacctattcacctgtgggaagtgcagaaaaaaaaattgcacctatacgcaggtgcagacccggagcagcgacgagcccatgacaacttttgttgtgtgtaacgaatgtgggaacaggtggaaattttgttag

SEQ ID NO: 260431 - DNA, 249 bp, Artificial Sequence
  derived and/or modified sequence
atggacctgctcagggagctgaaagccatgcctattacccttcacttgctgcaaagtaccagagttgggatgagcgtgaacgcattaaggaaacagtcctctgacgaggaggttatcgctcttgcgaaatcactgatcaaaagctggaagaagttgttagatgcttcagacgccaaagcccgtgaaaggggaagggggatgcccctcccgaccagtagtcgcgatgctagtgaagcccccgatccatag

SEQ ID NO: 260432 - DNA, 741 bp, Artificial Sequence
  derived and/or modified sequence
atggacctactgagggaactgaaagccatgccaatcacattgcatctacttcagagtacgcgggtcggtatgagcgtgaacgccctgcgcaagcagtcctcagacgaggaggtgatagctctggctaagtctctgatcaagtcttggaagaaacttctggacgcgtcagacgccaaggcaagagaacgcggccgcggcatgccactccctaccagcagccgggatgcctcagaagcaccagatcctagtaggaaacgaccagagctgccacgggctccttctactcctaggatcactacattcccgcctgtccctgttacttgtgatgccgtgaggaataagtgcagagagatgctgaccgccgcattgcagacggaccacgatcatgttgcgattggagctgactgtgagcggctgtctgcccagattgaagagtgcatatttcgggacgtgggaaacaccgacatgaagtacaagaaccgcgtccggtcgaggatatcaaatttgaaagacgctaagaacccagacctgagaagaaatgtgctgtgtggcgctatcacccctcagcagatagccgtcatgaccagcgaagagatggctagtgatgagctgaaggagatcagaaaagctatgacaaaggaggcgatccgtgaacatcagatggctagaaccggcgggacacaaacagacctgtttacatgtggcaaatgtaggaaaaaaaactgcacatatactcagtag

SEQ ID NO: 260433 - DNA, 813 bp, Artificial Sequence
  derived and/or modified sequence
atggatctgttaagagaacttaaggccatgcctattacattgcacctgctccagagcactagagtggggatgtccgtgaacgccctccgcaagcagtcttctgacgaagaggtgattgcactggccaaatccctcatcaaatcctggaagaagctgctggatgccagcgacgccaaggcacgagagcgcggaagaggtatgcctttacccacctcttcgagggatgcttcagaggccccagacccttctaggaaacggcccgaactgcctcgagcccccagcacgccgcgcataactactttccccccagttcccgtgacatgtgatgctgtgaggaataagtgtcgagagatgctgacagcggctctgcagactgaccacgaccatgttgccatcggcgctgattgtgagcggctctccgcacaaatcgaagaatgtatcttccgcgacgtgggtaacacggacatgaagtataagaacagggtaaggtccaggatcagcaacctcaaggacgccaaaaatcctgacctacgccggaacgtcttgtgtggcgccatcaccccccagcagatcgcggtcatgacctccgaagagatggctagcgacgaactgaaggagatccggaaagcaatgactaaagaggcaattagagaacaccagatggcacggactggcggaactcagaccgacctcttcacctgcggcaagtgtcggaagaagaactgcacctacactcaggtacagactagatcaagcgatgaacccatgacaaccttcgttgtgtgtaacgagtgcggtaataggtggaaatag

SEQ ID NO: 260434 - DNA, 741 bp, Artificial Sequence
  derived and/or modified sequence
atggacctgctgcgggagctgaaggccatgcccatcaccctgcacctgctgcagagcaccagggtgggcatgtctgtgaatgccctgaggaagcagagcagtgatgaggaggtgattgccctggccaagagcctcatcaagtcctggaagaagctgctggatgccagtgatgccaaggcccgggagcggggccggggcatgcccctgcccaccagcagcagagatgccagcgaggccccagaccccagcaggaagaggcctgagctgccccgggcccccagcaccccccgcatcaccaccttcccccctgtgcctgtgacctgtgatgctgtgaggaacaagtgccgggagatgctgacagctgccctgcagacagaccatgaccacgtggccatcggggctgactgtgagcggctgagcgcccagatcgaggagtgcatcttcagagatgtgggcaacacagacatgaagtacaagaacagagtgcgcagccgcatcagcaacctgaaggatgccaagaacccagacctgcggagaaatgtgctgtgtggggccatcaccccccagcagattgctgtgatgaccagcgaggagatggccagtgatgagctgaaggagatcaggaaggccatgaccaaggaggccatccgggagcaccagatggccaggactggaggcacccagacagacctcttcacctgtgggaagtgcaggaagaagaactgcacctacacccagtag

SEQ ID NO: 260435 - DNA, 819 bp, Artificial Sequence
  derived and/or modified sequence
atggacctgctgcgggagctgaaggccatgcccatcaccctgcacctgctgcagagcaccagggtgggcatgtctgtgaatgccctgaggaagcagagcagtgatgaggaggtgattgccctggccaagagcctcatcaagtcctggaagaagctgctggatgccagtgatgccaaggcccgggagcggggccggggcatgcccctgcccaccagcagcagagatgccagcgaggccccagaccccagcaggaagaggcctgagctgccccgggcccccagcaccccccgcatcaccaccttcccccctgtgcctgtgacctgtgatgctgtgaggaacaagtgccgggagatgctgacagctgccctgcagacagaccatgaccacgtggccatcggggctgactgtgagcggctgagcgcccagatcgaggagtgcatcttcagagatgtgggcaacacagacatgaagtacaagaacagagtgcgcagccgcatcagcaacctgaaggatgccaagaacccagacctgcggagaaatgtgctgtgtggggccatcaccccccagcagattgctgtgatgaccagcgaggagatggccagtgatgagctgaaggagatcaggaaggccatgaccaaggaggccatccgggagcaccagatggccaggactggaggcacccagacagacctcttcacctgtgggaagtgcaggaagaagaactgcacctacacccaggtgcagaccaggagcagtgatgagcccatgaccacctttgtggtgtgcaatgaatgtggcaaccgctggaagttctgctag

SEQ ID NO: 260436 - DNA, 249 bp, Artificial Sequence
  derived and/or modified sequence
atggacctgctgcgggagctgaaggccatgcccatcaccctgcacctgctgcagagcaccagggtgggcatgtctgtgaatgccctgaggaagcagagcagtgatgaggaggtgattgccctggccaagagcctcatcaagtcctggaagaagctgctggatgccagtgatgccaaggcccgggagcggggccggggcatgcccctgcccaccagcagcagagatgccagcgaggccccagacccctag

SEQ ID NO: 260437 - DNA, 813 bp, Artificial Sequence
  derived and/or modified sequence
atggacctgctgcgggagctgaaggccatgcccatcaccctgcacctgctgcagagcaccagggtgggcatgtctgtgaatgccctgaggaagcagagcagtgatgaggaggtgattgccctggccaagagcctcatcaagtcctggaagaagctgctggatgccagtgatgccaaggcccgggagcggggccggggcatgcccctgcccaccagcagcagagatgccagcgaggccccagaccccagcaggaagaggcctgagctgccccgggcccccagcaccccccgcatcaccaccttcccccctgtgcctgtgacctgtgatgctgtgaggaacaagtgccgggagatgctgacagctgccctgcagacagaccatgaccacgtggccatcggggctgactgtgagcggctgagcgcccagatcgaggagtgcatcttcagagatgtgggcaacacagacatgaagtacaagaacagagtgcgcagccgcatcagcaacctgaaggatgccaagaacccagacctgcggagaaatgtgctgtgtggggccatcaccccccagcagattgctgtgatgaccagcgaggagatggccagtgatgagctgaaggagatcaggaaggccatgaccaaggaggccatccgggagcaccagatggccaggactggaggcacccagacagacctcttcacctgtgggaagtgcaggaagaagaactgcacctacacccaggtgcagaccaggagcagtgatgagcccatgaccacctttgtggtgtgcaatgaatgtggcaaccgctggaagtag

SEQ ID NO: 260438 - DNA, 741 bp, Artificial Sequence
  derived and/or modified sequence
atggacctgctgcgggagctgaaggccatgcccatcaccctgcacctgttgcagtccacacgtgtcgggatgagcgtgaatgctttgcgaaaacagtcttctgacgaggaggtgatcgccttagcaaagagtctgatcaagtcctggaagaagctgttagacgcttcggatgctaaagccagggagaggggcagaggcatgcctctccccacgtccagtagagatgcctccgaggctcctgacccatctcgtaagcgtccagagcttccaagagccccaagcacaccacgaataaccacatttcctcccgttccagttacatgcgatgccgtgcgcaacaaatgcagggaaatgttaaccgcagccctccagaccgatcatgatcacgtggctattggcgccgattgtgaacgattgagcgcccagattgaggaatgcatctttagggatgtcggaaataccgacatgaagtacaagaacagggtaagatcacgaatttcaaaccttaaggacgctaagaatccagatttgcggcggaacgtcctctgcggtgcaatcactccacagcagattgcagtgatgactagtgaagaaatggcatccgatgaactgaaagagatcagaaaggccatgactaaagaggcaatccgcgagcatcaaatggcccgcaccggtggcacgcaaaccgatctttttacatgtggcaaatgtcggaaaaagaactgcacttacactcagtag

SEQ ID NO: 260439 - DNA, 819 bp, Artificial Sequence
  derived and/or modified sequence
atggacctgctgcgggagctgaaggccatgcccatcaccctgcacctgttgcaatccacccgggtggggatgtcggtgaatgccctgcgaaagcaatcgagcgacgaggaggtcatcgccctggcaaagtccctgattaagtcgtggaaaaagctccttgacgcatcggatgccaaagccagagagcgggggagaggtatgcccctcccaacatctagcagggacgcctccgaagcacccgatccttccagaaagaggcccgaacttcctagggctccttctacacccaggatcaccacatttcccccggtgccagtgacctgtgatgccgtcagaaacaagtgcagagagatgctgaccgctgcgcttcagacagatcatgaccatgtggctataggagctgactgtgaacgccttagcgcacagatcgaggaatgcattttcagggacgtgggtaatactgacatgaaatacaaaaacagagttcgctctcggatcagcaatctgaaggatgccaaaaacccagatctgcgacgcaatgtgctgtgtggggccataaccccccaacaaattgccgtcatgacatcggaggagatggcctcagacgagctgaaggaaatacgaaaggcaatgactaaggaagcgattcgggagcatcagatggcacgcaccggaggaacgcagacggacttgttcacatgtgggaagtgtagaaaaaaaaactgcacatatacacaggttcagaccagatctagcgacgaaccgatgacaaccttcgtcgtatgtaacgagtgcggcaatcgatggaagttctgctag

SEQ ID NO: 260440 - DNA, 249 bp, Artificial Sequence
  derived and/or modified sequence
atggacctgctgcgggagctgaaggccatgcccatcaccctgcacctcctgcagtctacacgcgtgggtatgagcgttaatgccctgcggaagcagtcaagcgatgaagaggtgatcgcccttgctaaatctttaataaagagttggaaaaaactgcttgacgcctccgacgcaaaggctcgggagaggggcagagggatgcctctgcctacctcctctcgtgacgctagcgaagcaccggacccatag

SEQ ID NO: 260441 - DNA, 741 bp, Artificial Sequence
  derived and/or modified sequence
atggacctgctgcgggagctgaaggccatgcccatcaccctgcacctcctccaatcaacgagagtgggaatgtcagttaatgctttgaggaagcaatccagtgacgaagaagttatagccctggctaagtcacttatcaaatcttggaaaaaattgctcgacgcaagcgatgcaaaagctcgagaaaggggaagggggatgccactccccactagcagtcgcgatgcctccgaggctccagatccgtcccgaaagcggccggagcttcctcgagcgccctcgaccccgcggattacgacttttcctccagtgcctgtgacttgtgacgctgtgcgcaacaagtgcagggagatgctgacggctgcattacagactgaccatgatcatgtggcaattggagccgattgtgaacgcttgtctgcccagatcgaggaatgcatcttccgggatgtaggaaataccgacatgaagtacaaaaatagagttcggtctaggatttccaacctgaaagatgccaagaaccccgacctgagacggaacgtgttgtgtggagctattacaccgcagcaaatcgccgtgatgactagcgaagagatggcctctgacgagctgaaggaaattcggaaagcaatgaccaaggaggctatcagggaacatcagatggccaggaccggaggaacacaaacagacttgttcacctgtggcaagtgtcgcaagaagaactgtacttatacacaatag

SEQ ID NO: 260442 - DNA, 813 bp, Artificial Sequence
  derived and/or modified sequence
atggacctgctgcgggagctgaaggccatgcccatcaccctgcacttgctccagagcactcgagtagggatgtccgttaacgctcttcgcaaacagtccagcgacgaggaagttatcgcactcgcaaagtcccttatcaaatcttggaaaaagctactggacgcctctgatgccaaggcgagggaacgcggtcgcgggatgccattgccaacaagcagccgagacgctagtgaggcaccagaccccagcaggaagagaccggagttgccgcgcgcccctagtacacctcggattacgacctttcccccagtgccggtcacatgcgacgcagtgagaaataaatgtagggagatgctgacagcagccctgcagaccgaccatgatcacgtcgcgattggcgccgactgtgagcggctatcagcccagatcgaggagtgtattttccgggacgtcggcaacactgacatgaagtacaaaaatagagttcgatctaggattagcaacttgaaggacgctaagaatccagaccttcgcaggaatgtcctgtgcggtgccattacgcctcagcagatcgctgtcatgaccagcgaggagatggcgtcggatgagctgaaagaaatccgaaaggcaatgactaaagaagctataagagaacatcaaatggctcggaccggcgggacccagaccgatctattcacgtgcggcaagtgcagaaagaagaattgcacttatacccaagtccagaccagatctagtgacgagcctatgaccactttcgtggtttgcaatgagtgtggcaatcggtggaaatag

SEQ ID NO: 260443 - DNA, 741 bp, Artificial Sequence
  derived and/or modified sequence
atggacctgcttcgcgagctcaaggccatgcccattactctccatcttctccagtcgaccagagtgggcatgagcgtgaatgcccttagaaagcagtcctccgacgaagaggtgatcgccctggcaaaaagccttattaagagctggaagaagctgctggacgccagcgatgccaaagcaagggaaagggggcgtggcatgccccttcccacttcctcacgggacgcctccgaggccccagaccccagtcgtaagcggcctgagctgccacgagccccttcaactcccagaataacaactttcccacccgtgcccgttacttgtgacgctgtcagaaataaatgtcgcgaaatgctgacagccgcactccagaccgatcacgatcacgtagccatcggggctgattgcgagcgactaagtgcacagattgaagagtgcattttccgcgatgtgggaaatactgacatgaagtacaaaaacagagttagatcgcgcatcagcaacttaaaggacgcaaaaaatccagacctgaggagaaatgtcctgtgcggcgctattaccccccagcagatagccgtgatgacttccgaggagatggcttcggatgaactcaaagagattagaaaagccatgaccaaagaggcaatacgcgagcaccagatggcaaggaccggcggaacacagactgatctgttcacctgcggcaaatgtcgaaagaaaaattgtacgtacacccagtag

SEQ ID NO: 260444 - DNA, 819 bp, Artificial Sequence
  derived and/or modified sequence
atggacctactccgggaactgaaagcaatgccaattacactccacttgcttcaaagtacccgtgtggggatgagcgtcaatgccctcagaaagcagtcgagtgatgaagaagttatcgcccttgctaagtcattaattaagtcgtggaaaaagctgctggacgccagcgatgcaaaagctagagagcggggaagagggatgccattgccaaccagttctagggatgcctccgaagctccagatccaagcaggaagcggccagagctgcctcgtgctccgtcaaccccaaggattaccactttcccacccgttcctgtgacctgcgatgccgtgagaaacaagtgccgggagatgctgaccgcagccctgcagacggaccatgatcacgtagccataggggctgattgcgagagactcagcgctcagatcgaagagtgtatattccgggatgttgggaataccgatatgaagtacaaaaacagggtgcggtcacgaatttcaaatctgaaggacgcaaagaatcccgatctacggcgtaacgtcctgtgtggagctatcacaccgcagcagatcgccgtgatgacaagtgaagagatggcttcagacgaacttaaggaaattaggaaggctatgaccaaagaggcaattcgggagcatcagatggccagaaccggtggcacacagactgatttgtttacgtgcggcaaatgcaggaaaaagaactgcacatatacccaggtacaaacaaggagttctgatgagccaatgacgactttcgttgtgtgtaatgagtgcggtaaccgatggaagttttgttag

SEQ ID NO: 260445 - DNA, 249 bp, Artificial Sequence
  derived and/or modified sequence
atggacctgttgagggagcttaaagctatgccaataaccctgcatctgctgcaatccacacgggtaggtatgtcagttaacgcacttaggaagcaatccagcgatgaggaagttatagccctggccaaatccctgatcaaatcttggaaaaagttattagacgcatccgacgcaaaagcacgcgagcgcggacggggaatgcctctgcccaccagcagtagggacgcctctgaggcccctgacccttag

SEQ ID NO: 260446 - DNA, 741 bp, Artificial Sequence
  derived and/or modified sequence
atggacttattgagagagctgaaggctatgcccatcacgttgcatctgttgcagtcaactcgtgtcggtatgagcgtgaacgcgctgcgcaagcaatctagtgatgaagaagtgattgcccttgccaagagtctgattaaatcttggaagaagctcttggatgccagtgatgctaaggcgagagagcgtggaagaggcatgcctttgccaacatcctcaagggacgcttccgaagctccagatccaagccgcaaacgcccagagttgcctagagccccaagcacccctagaattaccactttcccacccgtgcctgtgacctgtgatgcagttaggaacaagtgtagagagatgcttactgccgctctccagaccgaccacgaccacgtggctatcggagccgactgcgagcgtcttagtgcacaaatcgaagagtgcatatttcgcgacgttggcaacaccgacatgaaatataaaaatagggtacgaagcagaatctccaacctcaaagatgctaagaaccctgacctgcgcaggaacgtgctgtgtggggctattacaccacaacagattgcggtcatgacgagcgaagagatggcgagcgacgagcttaaagagatccgaaaagcaatgaccaaggaggccattcgcgaacaccagatggccagaacgggcggtacccaaactgacctctttacctgtgggaagtgccgtaaaaagaactgcacatacacacagtag

SEQ ID NO: 260447 - DNA, 813 bp, Artificial Sequence
  derived and/or modified sequence
atggacctgttacgggaactcaaggcaatgcccatcaccctccatctccttcagtctacgcgggtcggaatgtctgttaacgccctcagaaaacagtcctcagacgaagaggttatcgcccttgcgaagtctctgataaaaagctggaagaagttgctggatgcttctgacgctaaggcacgagagagaggcagaggaatgccccttcccacctccagccgggatgcaagtgaggctcccgacccatctcgtaaacgtccggagttgccccgtgctccttcaacccccaggataactacattccctccagtcccagttacatgcgatgccgtcagaaacaaatgccgtgagatgcttacagccgcacttcaaacagaccacgatcacgtcgccataggagccgactgtgagagactgtccgcacagatcgaagagtgtatcttccgggacgttggcaataccgacatgaaatacaaaaacagagtcagaagtcgaatctccaatctaaaggatgctaagaatcctgatctcaggcgtaacgtgctctgtggggctataacccctcaacagatcgctgttatgacctccgaggaaatggcctccgacgagttgaaagaaatcagaaaggctatgactaaggaggcaatcagggaacatcagatggctaggacaggtggcacccaaaccgacttgttcacatgcggcaaatgtaggaagaaaaactgtacttatactcaggtgcagacgagatcatccgacgaaccaatgacaacctttgttgtatgtaacgagtgtggaaataggtggaagtag

SEQ ID NO: 260448 - DNA, 741 bp, Artificial Sequence
  derived and/or modified sequence
atggacctgctgagagagctgaaggccatgcccatcaccctgcacctgctgcagagcaccagagtgggcatgagcgtgaacgccctgagaaagcagagcagcgacgaggaggtgatcgccctggccaagagcctgatcaagagctggaagaagctgctggacgccagcgacgccaaggccagagagagaggcagaggcatgcccctgcccaccagcagcagagacgccagcgaggcccccgaccccagcagaaagagacccgagctgcccagagcccccagcacccccagaatcaccaccttcccccccgtgcccgtgacctgcgacgccgtgagaaacaagtgcagagagatgctgaccgccgccctgcagaccgaccacgaccacgtggccatcggcgccgactgcgagagactgagcgcccagatcgaggagtgcatcttcagagacgtgggcaacaccgacatgaagtacaagaacagagtgagaagcagaatcagcaacctgaaggacgccaagaaccccgacctgagaagaaacgtgctgtgcggcgccatcaccccccagcagatcgccgtgatgaccagcgaggagatggccagcgacgagctgaaggagatcagaaaggccatgaccaaggaggccatcagagagcaccagatggccagaaccggcggcacccagaccgacctgttcacctgcggcaagtgcagaaagaagaactgcacctacacccagtag

SEQ ID NO: 260449 - DNA, 819 bp, Artificial Sequence
  derived and/or modified sequence
atggacctgctgagagagctgaaggccatgcccatcaccctgcacctgctgcagagcaccagagtgggcatgagcgtgaacgccctgagaaagcagagcagcgacgaggaggtgatcgccctggccaagagcctgatcaagagctggaagaagctgctggacgccagcgacgccaaggccagagagagaggcagaggcatgcccctgcccaccagcagcagagacgccagcgaggcccccgaccccagcagaaagagacccgagctgcccagagcccccagcacccccagaatcaccaccttcccccccgtgcccgtgacctgcgacgccgtgagaaacaagtgcagagagatgctgaccgccgccctgcagaccgaccacgaccacgtggccatcggcgccgactgcgagagactgagcgcccagatcgaggagtgcatcttcagagacgtgggcaacaccgacatgaagtacaagaacagagtgagaagcagaatcagcaacctgaaggacgccaagaaccccgacctgagaagaaacgtgctgtgcggcgccatcaccccccagcagatcgccgtgatgaccagcgaggagatggccagcgacgagctgaaggagatcagaaaggccatgaccaaggaggccatcagagagcaccagatggccagaaccggcggcacccagaccgacctgttcacctgcggcaagtgcagaaagaagaactgcacctacacccaggtgcagaccagaagcagcgacgagcccatgaccaccttcgtggtgtgcaacgagtgcggcaacagatggaagttctgctag

SEQ ID NO: 260450 - DNA, 249 bp, Artificial Sequence
  derived and/or modified sequence
atggacctgctgagagagctgaaggccatgcccatcaccctgcacctgctgcagagcaccagagtgggcatgagcgtgaacgccctgagaaagcagagcagcgacgaggaggtgatcgccctggccaagagcctgatcaagagctggaagaagctgctggacgccagcgacgccaaggccagagagagaggcagaggcatgcccctgcccaccagcagcagagacgccagcgaggcccccgacccctag

SEQ ID NO: 260451 - DNA, 813 bp, Artificial Sequence
  derived and/or modified sequence
atggacctgctgagagagctgaaggccatgcccatcaccctgcacctgctgcagagcaccagagtgggcatgagcgtgaacgccctgagaaagcagagcagcgacgaggaggtgatcgccctggccaagagcctgatcaagagctggaagaagctgctggacgccagcgacgccaaggccagagagagaggcagaggcatgcccctgcccaccagcagcagagacgccagcgaggcccccgaccccagcagaaagagacccgagctgcccagagcccccagcacccccagaatcaccaccttcccccccgtgcccgtgacctgcgacgccgtgagaaacaagtgcagagagatgctgaccgccgccctgcagaccgaccacgaccacgtggccatcggcgccgactgcgagagactgagcgcccagatcgaggagtgcatcttcagagacgtgggcaacaccgacatgaagtacaagaacagagtgagaagcagaatcagcaacctgaaggacgccaagaaccccgacctgagaagaaacgtgctgtgcggcgccatcaccccccagcagatcgccgtgatgaccagcgaggagatggccagcgacgagctgaaggagatcagaaaggccatgaccaaggaggccatcagagagcaccagatggccagaaccggcggcacccagaccgacctgttcacctgcggcaagtgcagaaagaagaactgcacctacacccaggtgcagaccagaagcagcgacgagcccatgaccaccttcgtggtgtgcaacgagtgcggcaacagatggaagtag

SEQ ID NO: 260452 - protein, 305 aa, Artificial Sequence
  derived and/or modified sequence
MWPLVAALLLGSACCGSAQLLFNKTKSVEFTFCNDTVVIPCFVTNMEAQNTTEVYVKWKFKGRDIYTFDGALNKSTVPTDFSSAKIEVSQLLKGDASLKMDKSDAVSHTGNYTCEVTELTREGETIIELKYRVVSWFSPNENILIVIFPIFAILLFWGQFGIKTLKYRSGGMDEKTIALLVAGLVITVIVIVGAILFVPGEYSLKNATGLGLIVTSTGILILLHYYVFSTAIGLTSFVIAILVIQVIAYILAVVGLSLCIAACIPMHGPLLISGLSILALAQLLGLVYMKFVASNQKTIQPPRNN

SEQ ID NO: 260453 - DNA, 918 bp, Artificial Sequence
  derived and/or modified sequence
atgtggccattggtcgcggccctcctgcttggaagcgcctgttgcgggtccgctcagttactttttaacaaaactaaatccgtggaatttaccttttgtaacgatactgtcgtgatcccttgcttcgtgaccaacatggaagcccagaacacaacagaggtctacgtcaagtggaagtttaaaggcagagatatttacacattcgacggcgcgctcaacaagagtactgtgccaactgatttctcctctgctaagatagaagtgtcccagctattgaaaggggacgcctccctgaaaatggataagagcgacgcagtaagccacactggaaactatacctgcgaagtgacagaactcactcgtgaaggggaaacgataatcgagttgaagtatcgcgtggtgagctggttctcgccaaacgagaatatcttgatcgtgatctttccaatctttgcgatcttgctgttctggggccaattcgggatcaagacactaaaataccggtctggaggaatggacgagaagacaatcgctttattagttgctgggttggttatcacagtcatcgtgattgtgggtgcaattctgtttgtgcctggagaatactcactcaagaacgccacaggccttggcctgatcgtgacaagcactggcatactgatactgcttcattattacgtgtttagtaccgcaattggattgacaagttttgtaatcgccatcctcgttattcaggtgatcgcctacattcttgcggtagtaggactgagcttgtgcattgcagcttgtatccccatgcatggaccgctgcttatttcagggctatccattctagcgctggcccagctgcttgggctcgtttatatgaagtttgttgctagtaatcaaaagactatccagcctccccggaacaattag

SEQ ID NO: 260454 - DNA, 918 bp, Artificial Sequence
  derived and/or modified sequence
atgtggcccctggtggccgccctgctgctgggcagcgcctgctgcggcagcgcccagctgctcttcaacaagaccaagtctgtggagttcaccttctgcaatgacacagtggtgatcccctgctttgtgaccaacatggaggcccagaacaccacagaggtgtatgtgaagtggaagttcaagggccgggacatctacacctttgatggagccctgaacaagagcacagtgcccacagacttcagcagcgccaagattgaggtgtcccagctgctgaagggagatgccagcctgaagatggacaagagtgatgctgtgagccacactggaaactacacctgtgaggtgacagagctgacccgggagggggagaccatcatcgagctgaagtacagagtggtgtcctggttcagccccaatgaaaacatcctgattgtcatcttccccatctttgccatcctgctcttctggggccagtttggcatcaagaccctgaagtacagaagtggcggcatggatgagaagaccatcgccctgctggtggccggcctggtgatcaccgtgattgtgattgtgggcgccatcctgtttgtgcctggagagtacagcctgaagaatgccaccggcctgggcctgattgtgaccagcacaggcatcctgatcctgctgcactactacgtgttcagcacagccatcggcctgaccagctttgtgattgccatcctggtgatccaggtgattgcctacatcctggccgtggtgggcctgagcctgtgcatcgccgcctgcatccccatgcacggccccctgctgatcagcggcctgagcatcctggccctggcccagctgctgggcctggtgtacatgaagtttgtggccagcaaccagaagaccatccagcccccaagaaacaactag

SEQ ID NO: 260455 - DNA, 918 bp, Artificial Sequence
  derived and/or modified sequence
atgtggcccctggtggccgccctgctgctgggcagcgcctgctgcggatccgcccagctgctttttaacaagaccaaatctgtcgaattcacattctgcaatgacactgtggtgatcccatgtttcgttaccaatatggaagcacagaacactacggaggtctacgtcaaatggaaatttaagggccgcgatatttacacattcgacggggcgttgaacaaatctacagtgcctacggattttagcagtgctaaaattgaggtctcacaactgttaaaaggagacgcctccctcaagatggacaagagtgatgcagtctcccacaccggcaactacacatgtgaggttactgagctaaccagggaaggagagaccattattgagctgaagtaccgggtggtaagttggttctcacccaacgaaaatattctcatcgtgatcttccccattttcgctatcctgctgttctggggacaattcgggataaagacactcaaatacagatccgggggcatggatgagaagactattgcacttctggtagccggtctagtcatcaccgttatcgtgatagttggagcgatcctgttcgtgcccggtgaatatagtctgaagaatgcaacgggactggggctgatcgtaacgtctactggtatcctgattctgctacattactatgtattttctaccgcaataggcttaacaagtttcgttattgctattctggtgatccaggttatcgcctatatcctggcggtcgtcggactctccctatgtatcgccgcgtgtattcctatgcacggcccattgcttataagtggcctgtctatcctggctcttgcccagctactgggcctggtttacatgaaatttgtggcgagcaatcagaagacaattcagccccctcgcaacaactag

SEQ ID NO: 260456 - DNA, 918 bp, Artificial Sequence
  derived and/or modified sequence
atgtggccgctcgtggccgctctgctgctgggtagcgcctgctgtgggagcgcccagctcctgttcaataaaaccaaaagtgtcgaattcacattctgtaatgatactgttgtcataccttgtttcgtgaccaatatggaagctcagaacactaccgaggtgtatgtgaaatggaaatttaaaggaagagacatatacacatttgatggggcattaaataaaagtacagtccccaccgatttctctagtgcaaagattgaggtgtctcaattactgaaaggcgatgctagtctcaagatggacaagagcgacgctgtcagccacaccgggaattacacatgtgaggttaccgaactaacacgcgaaggcgaaacaattattgagcttaagtacagagtagtgtcctggttcagtcccaatgaaaacattctgattgtgatttttccaatattcgctatccttttattttggggacagtttggaattaagactttaaagtaccggtcaggcggtatggacgaaaagaccatagcccttcttgtggccggacttgttatcacggttattgtaatcgtgggcgcaattctgttcgtgccaggagaatactcactaaaaaatgcgactgggttgggtctgatcgtgacatctacaggaatcctgatcctccttcattactatgtcttcagcacggccatcggtctgacttcctttgttatcgccattctggtcatacaagtgatcgcctatatcctggccgtggtgggcttatcactctgtatcgccgcatgcataccaatgcatggtccacttcttatctctgggctgtcaattctggccctcgctcagctcctcgggttggtgtacatgaagttcgtcgccagcaatcaaaaaacgattcagccgccacggaacaattag

SEQ ID NO: 260457 - DNA, 5020 bp, Artificial Sequence
  derived and/or modified sequence
tgggcagtgggtcctgcctgtgacgcgcggcggcggtcggtcctgcctgtaacggcggcggcggctgctgctccggacacctgcggcggcggcggcgaccccgcggcgggcgcggagatgtggcccctggtagcggcgctgttgctgggctcggcgtgctgcggatcagctcagctactatttaataaaacaaaatctgtagaattcacgttttgtaatgacactgtcgtcattccatgctttgttactaatatggaggcacaaaacactactgaagtatacgtaaagtggaaatttaaaggaagagatatttacacctttgatggagctctaaacaagtccactgtccccactgactttagtagtgcaaaaattgaagtctcacaattactaaaaggagatgcctctttgaagatggataagagtgatgctgtctcacacacaggaaactacacttgtgaagtaacagaattaaccagagaaggtgaaacgatcatcgagctaaaatatcgtgttgtttcatggttttctccaaatgaaaatattcttattgttattttcccaatttttgctatactcctgttctggggacagtttggtattaaaacacttaaatatagatccggtggtatggatgagaaaacaattgctttacttgttgctggactagtgatcactgtcattgtcattgttggagccattcttttcgtcccaggtgaatattcattaaagaatgctactggccttggtttaattgtgacttctacagggatattaatattacttcactactatgtgtttagtacagcgattggattaacctccttcgtcattgccatattggttattcaggtgatagcctatatcctcgctgtggttggactgagtctctgtattgcggcgtgtataccaatgcatggccctcttctgatttcaggtttgagtatcttagctctagcacaattacttggactagtttatatgaaatttgtggcttccaatcagaagactatacaacctcctaggaataactgaagtgaagtgatggactccgatttggagagtagtaagacgtgaaaggaatacacttgtgtttaagcaccatggccttgatgattcactgttggggagaagaaacaagaaaagtaactggttgtcacctatgagacccttacgtgattgttagttaagtttttattcaaagcagctgtaatttagttaataaaataattatgatctatgttgtttgcccaattgagatccagttttttgttgttatttttaatcaattaggggcaatagtagaatggacaatttccaagaatgatgcctttcaggtcctagggcctctggcctctaggtaaccagtttaaattggttcagggtgataactacttagcactgccctggtgattacccagagatatctatgaaaaccagtggcttccatcaaacctttgccaactcaggttcacagcagctttgggcagttatggcagtatggcattagctgagaggtgtctgccacttctgggtcaatggaataataaattaagtacaggcaggaatttggttgggagcatcttgtatgatctccgtatgatgtgatattgatggagatagtggtcctcattcttgggggttgccattcccacattcccccttcaacaaacagtgtaacaggtccttcccagatttagggtacttttattgatggatatgttttccttttattcacataaccccttgaaaccctgtcttgtcctcctgttacttgcttctgctgtacaagatgtagcaccttttctcctctttgaacatggtctagtgacacggtagcaccagttgcaggaaggagccagacttgttctcagagcactgtgttcacacttttcagcaaaaatagctatggttgtaacatatgtattcccttcctctgatttgaaggcaaaaatctacagtgtttcttcacttcttttctgatctggggcatgaaaaaagcaagattgaaatttgaactatgagtctcctgcatggcaacaaaatgtgtgtcaccatcaggccaacaggccagcccttgaatggggatttattactgttgtatctatgttgcatgataaacattcatcaccttcctcctgtagtcctgcctcgtactccccttcccctatgattgaaaagtaaacaaaacccacatttcctatcctggttagaagaaaattaatgttctgacagttgtgatcgcctggagtacttttagacttttagcattcgttttttacctgtttgtggatgtgtgtttgtatgtgcatacgtatgagataggcacatgcatcttctgtatggacaaaggtggggtacctacaggagagcaaaggttaattttgtgcttttagtaaaaacatttaaatacaaagttctttattgggtggaattatatttgatgcaaatatttgatcacttaaaacttttaaaacttctaggtaatttgccacgctttttgactgctcaccaataccctgtaaaaatacgtaattcttcctgtttgtgtaataagatattcatatttgtagttgcattaataatagttatttcttagtccatcagatgttcccgtgtgcctcttttatgccaaattgattgtcatatttcatgttgggaccaagtagtttgcccatggcaaacctaaatttatgacctgctgaggcctctcagaaaactgagcatactagcaagacagctcttcttgaaaaaaaaaatatgtatacacaaatatatacgtatatctatatatacgtatgtatatacacacatgtatattcttccttgattgtgtagctgtccaaaataataacatatatagagggagctgtattcctttatacaaatctgatggctcctgcagcactttttccttctgaaaatatttacattttgctaacctagtttgttactttaaaaatcagttttgatgaaaggagggaaaagcagatggacttgaaaaagatccaagctcctattagaaaaggtatgaaaatctttatagtaaaattttttataaactaaagttgtaccttttaatatgtagtaaactctcatttatttggggttcgctcttggatctcatccatccattgtgttctctttaatgctgcctgccttttgaggcattcactgccctagacaatgccaccagagatagtgggggaaatgccagatgaaaccaactcttgctctcactagttgtcagcttctctggataagtgaccacagaagcaggagtcctcctgcttgggcatcattgggccagttccttctctttaaatcagatttgtaatggctcccaaattccatcacatcacatttaaattgcagacagtgttttgcacatcatgtatctgttttgtcccataatatgctttttactccctgatcccagtttctgctgttgactcttccattcagttttatttattgtgtgttctcacagtgacaccatttgtccttttctgcaacaacctttccagctacttttgccaaattctatttgtcttctccttcaaaacattctcctttgcagttcctcttcatctgtgtagctgctcttttgtctcttaacttaccattcctatagtactttatgcatctctgcttagttctattagttttttggccttgctcttctccttgattttaaaattccttctatagctagagcttttctttctttcattctctcttcctgcagtgttttgcatacatcagaagctaggtacataagttaaatgattgagagttggctgtatttagatttatcactttttaatagggtgagcttgagagttttctttctttctgttttttttttttgttttttttttttttttttttttttttttttttgactaatttcacatgctctaaaaaccttcaaaggtgattatttttctcctggaaactccaggtccattctgtttaaatccctaagaatgtcagaattaaaataacagggctatcccgtaattggaaatatttcttttttcaggatgctatagtcaatttagtaagtgaccaccaaattgttatttgcactaacaaagctcaaaacacgataagtttactcctccatctcagtaataaaaattaagctgtaatcaaccttctaggtttctcttgtcttaaaatgggtattcaaaaatggggatctgtggtgtatgtatggaaacacatactccttaatttacctgttgttggaaactggagaaatgattgtcgggcaaccgtttattttttattgtattttatttggttgagggatttttttataaacagttttacttgtgtcatattttaaaattactaactgccatcacctgctggggtcctttgttaggtcattttcagtgactaatagggataatccaggtaactttgaagagatgagcagtgagtgaccaggcagtttttctgcctttagctttgacagttcttaattaagatcattgaagaccagctttctcataaatttctctttttgaaaaaaagaaagcatttgtactaagctcctctgtaagacaacatcttaaatcttaaaagtgttgttatcatgactggtgagagaagaaaacattttgtttttattaaatggagcattatttacaaaaagccattgttgagaattagatcccacatcgtataaatatctattaaccattctaaataaagagaactccagtgttgctatgtgcaagatcctctcttggagcttttttgcatagcaattaaaggtgtgctatttgtcagtagccatttttttgcagtgatttgaagaccaaagttgttttacagctgtgttaccgttaaaggtttttttttttatatgtattaaatcaatttatcactgtttaaagctttgaatatctgcaatctttgccaaggtacttttttatttaaaaaaaaacataactttgtaaatattaccctgtaatattatatatacttaataaaacattttaagcta

SEQ ID NO: 260458 - DNA, 918 bp, Artificial Sequence
  derived and/or modified sequence
atgtggcccctggtggccgccctgctgctgggcagcgcctgctgcggcagcgcccagctgctgttcaacaagaccaagagcgtggagttcaccttctgcaacgacaccgtggtgatcccctgcttcgtgaccaacatggaggcccagaacaccaccgaggtgtacgtgaagtggaagttcaagggcagagacatctacaccttcgacggcgccctgaacaagagcaccgtgcccaccgacttcagcagcgccaagatcgaggtgagccagctgctgaagggcgacgccagcctgaagatggacaagagcgacgccgtgagccacaccggcaactacacctgcgaggtgaccgagctgaccagagagggcgagaccatcatcgagctgaagtacagagtggtgagctggttcagccccaacgagaacatcctgatcgtgatcttccccatcttcgccatcctgctgttctggggccagttcggcatcaagaccctgaagtacagaagcggcggcatggacgagaagaccatcgccctgctggtggccggcctggtgatcaccgtgatcgtgatcgtgggcgccatcctgttcgtgcccggcgagtacagcctgaagaacgccaccggcctgggcctgatcgtgaccagcaccggcatcctgatcctgctgcactactacgtgttcagcaccgccatcggcctgaccagcttcgtgatcgccatcctggtgatccaggtgatcgcctacatcctggccgtggtgggcctgagcctgtgcatcgccgcctgcatccccatgcacggccccctgctgatcagcggcctgagcatcctggccctggcccagctgctgggcctggtgtacatgaagttcgtggccagcaaccagaagaccatccagccccccagaaacaactag

SEQ ID NO: 260459 - protein, 1189 aa, Artificial Sequence
  derived and/or modified sequence
MSVKSPFNVMSRNNLEAPPCKMTEPFNFEKNENKLPPHESLRSPGTLPNHPNFRLKSSENGNKKNNFLLCEQTKQYLASQEDNSVSSNPNGINGEVVGSKGDRKKLPAGNSVSPPSAESNSPPKEVNIKPGNNVRPAKSKKLNKLVENSLSISNPGLFTSLGPPLRSTTCHRCGLFGSLRCSQCKQTYYCSTACQRRDWSAHSIVCRPVQPNFHKLENKSSIETKDVEVNNKSDCPLGVTKEIAIWAERIMFSDLRSLQLKKTMEIKGTVTEFKHPGDFYVQLYSSEVLEYMNQLSASLKETYANVHEKDYIPVKGEVCIAKYTVDQTWNRAIIQNVDVQQKKAHVLYIDYGNEEIIPLNRIYHLNRNIDLFPPCAIKCFVANVIPAEGNWSSDCIKATKPLLMEQYCSIKIVDILEEEVVTFAVEVELPNSGKLLDHVLIEMGYGLKPSGQDSKKENADQSDPEDVGKMTTENNIVVDKSDLIPKVLTLNVGDEFCGVVAHIQTPEDFFCQQLQSGRKLAELQASLSKYCDQLPPRSDFYPAIGDICCAQFSEDDQWYRASVLAYASEESVLVGYVDYGNFEILSLMRLCPIIPKLLELPMQAIKCVLAGVKPSLGIWTPEAICLMKKLVQNKIITVKVVDKLENSSLVELIDKSETPHVSVSKVLLDAGFAVGEQSMVTDKPSDVKETSVPLGVEGKVNPLEWTWVELGVDQTVDVVVCVIYSPGEFYCHVLKEDALKKLNDLNKSLAEHCQQKLPNGFKAEIGQPCCAFFAGDGSWYRALVKEILPNGHVKVHFVDYGNIEEVTADELRMISSTFLNLPFQGIRCQLADIQSRNKHWSEEAITRFQMCVAGIKLQARVVEVTENGIGVELTDLSTCYPRIISDVLIDEHLVLKSASPHKDLPNDRLVNKHELQVHVQGLQATSSAEQWKTIELPVDKTIQANVLEIISPNLFYALPKGMPENQEKLCMLTAELLEYCNAPKSRPPYRPRIGDACCAKYTSDDFWYRAVVLGTSDTDVEVLYADYGNIETLPLCRVQPITSSHLALPFQIIRCSLEGLMELNGSSSQLIIMLLKNFMLNQNVMLSVKGITKNVHTVSVEKCSENGTVDVADKLVTFGLAKNITPQRQSALNTEKMYRMNCCCTELQKQVEKHEHILLFLLNNSTNQNKFIEMKKLLKKTASLGGKPL

SEQ ID NO: 260460 - DNA, 3570 bp, Artificial Sequence
  derived and/or modified sequence
atgagcgtgaagagccccttcaacgtgatgagcagaaacaacctggaggcccccccctgcaagatgaccgagcccttcaacttcgagaagaacgagaacaagctgcccccccacgagagcctgagaagccccggcaccctgcccaaccaccccaacttcagactgaagagcagcgagaacggcaacaagaagaacaacttcctgctgtgcgagcagaccaagcagtacctggccagccaggaggacaacagcgtgagcagcaaccccaacggcatcaacggcgaggtggtgggcagcaagggcgacagaaagaagctgcccgccggcaacagcgtgagcccccccagcgccgagagcaacagcccccccaaggaggtgaacatcaagcccggcaacaacgtgagacccgccaagagcaagaagctgaacaagctggtggagaacagcctgagcatcagcaaccccggcctgttcaccagcctgggcccccccctgagaagcaccacctgccacagatgcggcctgttcggcagcctgagatgcagccagtgcaagcagacctactactgcagcaccgcctgccagagaagagactggagcgcccacagcatcgtgtgcagacccgtgcagcccaacttccacaagctggagaacaagagcagcatcgagaccaaggacgtggaggtgaacaacaagagcgactgccccctgggcgtgaccaaggagatcgccatctgggccgagagaatcatgttcagcgacctgagaagcctgcagctgaagaagaccatggagatcaagggcaccgtgaccgagttcaagcaccccggcgacttctacgtgcagctgtacagcagcgaggtgctggagtacatgaaccagctgagcgccagcctgaaggagacctacgccaacgtgcacgagaaggactacatccccgtgaagggcgaggtgtgcatcgccaagtacaccgtggaccagacctggaacagagccatcatccagaacgtggacgtgcagcagaagaaggcccacgtgctgtacatcgactacggcaacgaggagatcatccccctgaacagaatctaccacctgaacagaaacatcgacctgttccccccctgcgccatcaagtgcttcgtggccaacgtgatccccgccgagggcaactggagcagcgactgcatcaaggccaccaagcccctgctgatggagcagtactgcagcatcaagatcgtggacatcctggaggaggaggtggtgaccttcgccgtggaggtggagctgcccaacagcggcaagctgctggaccacgtgctgatcgagatgggctacggcctgaagcccagcggccaggacagcaagaaggagaacgccgaccagagcgaccccgaggacgtgggcaagatgaccaccgagaacaacatcgtggtggacaagagcgacctgatccccaaggtgctgaccctgaacgtgggcgacgagttctgcggcgtggtggcccacatccagacccccgaggacttcttctgccagcagctgcagagcggcagaaagctggccgagctgcaggccagcctgagcaagtactgcgaccagctgccccccagaagcgacttctaccccgccatcggcgacatctgctgcgcccagttcagcgaggacgaccagtggtacagagccagcgtgctggcctacgccagcgaggagagcgtgctggtgggctacgtggactacggcaacttcgagatcctgagcctgatgagactgtgccccatcatccccaagctgctggagctgcccatgcaggccatcaagtgcgtgctggccggcgtgaagcccagcctgggcatctggacccccgaggccatctgcctgatgaagaagctggtgcagaacaagatcatcaccgtgaaggtggtggacaagctggagaacagcagcctggtggagctgatcgacaagagcgagaccccccacgtgagcgtgagcaaggtgctgctggacgccggcttcgccgtgggcgagcagagcatggtgaccgacaagcccagcgacgtgaaggagaccagcgtgcccctgggcgtggagggcaaggtgaaccccctggagtggacctgggtggagctgggcgtggaccagaccgtggacgtggtggtgtgcgtgatctacagccccggcgagttctactgccacgtgctgaaggaggacgccctgaagaagctgaacgacctgaacaagagcctggccgagcactgccagcagaagctgcccaacggcttcaaggccgagatcggccagccctgctgcgccttcttcgccggcgacggcagctggtacagagccctggtgaaggagatcctgcccaacggccacgtgaaggtgcacttcgtggactacggcaacatcgaggaggtgaccgccgacgagctgagaatgatcagcagcaccttcctgaacctgcccttccagggcatcagatgccagctggccgacatccagagcagaaacaagcactggagcgaggaggccatcaccagattccagatgtgcgtggccggcatcaagctgcaggccagagtggtggaggtgaccgagaacggcatcggcgtggagctgaccgacctgagcacctgctaccccagaatcatcagcgacgtgctgatcgacgagcacctggtgctgaagagcgccagcccccacaaggacctgcccaacgacagactggtgaacaagcacgagctgcaggtgcacgtgcagggcctgcaggccaccagcagcgccgagcagtggaagaccatcgagctgcccgtggacaagaccatccaggccaacgtgctggagatcatcagccccaacctgttctacgccctgcccaagggcatgcccgagaaccaggagaagctgtgcatgctgaccgccgagctgctggagtactgcaacgcccccaagagcagacccccctacagacccagaatcggcgacgcctgctgcgccaagtacaccagcgacgacttctggtacagagccgtggtgctgggcaccagcgacaccgacgtggaggtgctgtacgccgactacggcaacatcgagaccctgcccctgtgcagagtgcagcccatcaccagcagccacctggccctgcccttccagatcatcagatgcagcctggagggcctgatggagctgaacggcagcagcagccagctgatcatcatgctgctgaagaacttcatgctgaaccagaacgtgatgctgagcgtgaagggcatcaccaagaacgtgcacaccgtgagcgtggagaagtgcagcgagaacggcaccgtggacgtggccgacaagctggtgaccttcggcctggccaagaacatcaccccccagagacagagcgccctgaacaccgagaagatgtacagaatgaactgctgctgcaccgagctgcagaagcaggtggagaagcacgagcacatcctgctgttcctgctgaacaacagcaccaaccagaacaagttcatcgagatgaagaagctgctgaagaagaccgccagcctgggcggcaagcccctgtag

SEQ ID NO: 260461 - DNA, 3570 bp, Artificial Sequence
  derived and/or modified sequence
atgtccgttaaatctcccttcaacgttatgagtaggaataacctcgaagccccaccctgcaagatgactgagccatttaatttcgagaaaaacgagaataagctccccccccacgagagtctgcgcagccccgggaccctcccaaaccatccaaatttccgcctcaaaagctccgaaaacggaaataaaaagaataatttcctcctctgcgagcagacaaagcagtacttggcttcccaggaggacaactcagtgtccagcaatcctaacgggattaacggagaagtcgtgggcagcaaaggagataggaaaaagctacctgctggcaatagcgtgagccccccgagcgcggagagtaacagtccgcccaaagaagtgaatataaaacccggcaacaacgttagacccgccaagagcaagaagctgaacaaacttgtggagaacagcctctcaatttccaatcctggcttattcacgtctctcggaccaccactgagatcgacaacctgccatcgatgcggcctattcggcagtctgcgctgctctcagtgtaagcagacatactattgtagcacagcctgtcagcgccgtgactggtctgctcacagcatagtctgccggcccgttcagcccaattttcataagcttgagaacaagagttcaatcgagaccaaggacgttgaggttaacaacaagtctgactgtcctctgggcgtaacaaaggaaatcgcaatctgggctgagcgcattatgttctcagaccttaggtcactgcagcttaaaaaaactatggaaatcaaaggcaccgtgacggaatttaaacaccccggcgacttttatgtacagctgtatagcagcgaagtgcttgaatatatgaatcagctgtccgcctccctcaaggagacctacgcaaatgtacatgagaaggactacattcccgtgaaaggggaggtgtgcattgccaagtataccgtggatcagacctggaacagagcaatcattcagaacgtggacgtccagcagaaaaaagcacatgtgctgtacattgactacggaaatgaagagattattccactcaaccgaatctaccatcttaatcggaatattgatctgttccccccttgcgcaataaagtgctttgtagccaatgtaattcccgccgaaggaaactggtcctctgactgcatcaaggcaacaaagccattgctcatggaacagtactgctctatcaaaatcgtggatatcttggaggaggaagtggtcacttttgccgtcgaggtggaattgccaaattcaggcaagctgctagaccacgtgttgatcgagatgggttacggcttaaaaccctccggacaggattccaagaaggagaatgccgatcagagtgatcccgaagacgttggtaaaatgactacagagaacaatattgttgtggataagagcgacctgattccaaaagttttgacgttgaatgttggcgatgaattttgcggggttgtcgcacacattcagactccagaggactttttctgccagcagctccagtccggcaggaagttagccgaactgcaagcaagcctttctaagtactgtgatcagctgccgcccagatccgacttttatccagccatcggggatatctgctgtgcccagttttcagaggatgaccagtggtatagagccagtgtcctggcatatgcttcggaggagagcgtgttagtaggctatgtggattacggcaatttcgagattctgtcactgatgcggctttgccccattattcccaagctcctggaactcccaatgcaggcaatcaaatgtgtgctagctggggtgaagccatccctgggcatttggaccccagaggctatctgcctgatgaagaaactcgtacaaaacaaaatcattactgtgaaggttgtggacaaattagaaaattcatctctcgtggagttgatcgacaagagcgaaacaccacacgtgtcggtgagtaaggttctgttggatgccggttttgccgtgggggagcagtctatggtcacggataagccttcggatgtgaaggaaacttccgtcccactgggggtcgaaggaaaggtaaacccactcgagtggacatgggtcgagctgggagtggaccagaccgtggacgtggtcgtctgtgttatatacagtcctggcgagttttattgccacgtgttaaaagaggacgcattgaagaaactcaacgacctgaacaaatcactggccgaacattgtcagcagaaactgcccaacgggtttaaagctgagattgggcagccgtgttgtgctttttttgccggggacgggtcctggtatcgagccctcgtgaaagaaatacttccgaacggtcacgtgaaagtacatttcgtcgactatggaaacattgaagaagttaccgctgacgagctcagaatgatcagcagtacttttctgaatttgccatttcaggggatacgctgccaattggccgatatccagtcccggaacaaacactggagcgaggaagcaattacgagattccagatgtgtgtcgccgggataaagctccaggctcgagtggttgaagtaactgagaatggtatcggcgttgaactgactgatttatccacttgctacccccgaatcattagcgatgtccttattgacgagcacctggtcctgaaatcagcttcaccacacaaggatctgccaaacgatcgccttgtaaataagcacgaactgcaagttcatgtgcagggcctgcaggcaacctcaagcgcggaacagtggaaaaccattgagctcccagtggacaaaaccattcaggccaacgtgctggagattatttctccgaacctgttttatgccctgcccaagggtatgccagagaatcaggaaaagctatgcatgctgacggcagaattgcttgagtattgcaacgcacctaaaagccgcccaccataccgacccaggattggtgacgcttgctgtgccaaatataccagcgacgatttttggtaccgggctgttgtgctgggcacctctgacaccgatgtcgaggttttgtacgccgattatggtaacatcgaaaccctgcccctctgtcgggtgcagccaattacatccagtcacttagccctgccgttccagataatccgatgttccctggaaggcctcatggaactgaatgggagttcctcccagctaattatcatgctcctgaagaattttatgcttaaccaaaacgttatgctcagcgtgaagggcataacaaagaatgttcatacagtctccgtagagaagtgctcagagaacggcacggtggacgtcgcagataagctcgtcacttttggcctggccaaaaacatcaccccccagcgccagagcgctctcaataccgagaaaatgtaccgtatgaattgctgctgtaccgaactgcagaagcaggtggagaagcatgaacacatactgctttttcttcttaacaattccactaaccagaacaaatttattgaaatgaagaaactgctcaaaaagaccgcctccctgggtggcaaacccctgtag

SEQ ID NO: 260462 - DNA, 3570 bp, Artificial Sequence
  derived and/or modified sequence
atgtctgtgaagagccccttcaacgtgatgagcaggaacaacctggaggccccaccctgcaagatgacagagcccttcaactttgagaagaatgaaaacaagctgccccctcatgagagcctgcggagccctggcaccctgcccaaccaccccaacttccggctgaagagcagtgaaaatggaaacaagaagaacaacttcctgctgtgtgagcagaccaagcagtacctggccagccaggaggacaacagcgtgagcagcaaccccaacggcatcaatggagaggtggtgggcagcaagggggacaggaagaagctgcctgctggcaacagcgtgagcccccccagcgctgagagcaacagcccccccaaggaggtgaacatcaagccaggcaacaacgtgcggcctgccaagagcaagaagctgaacaagctggtggagaacagcctgagcatcagcaaccctggcctcttcaccagcctgggcccccccctgcggagcaccacctgccaccgctgtggcctgtttggcagcctgcgctgcagccagtgcaagcagacctactactgcagcacagcctgccagaggcgggactggagcgcccacagcatcgtgtgcaggcctgtgcagcccaacttccacaagctggagaacaagagcagcattgagaccaaggatgtggaggtgaacaacaagagtgactgccccctgggcgtgaccaaggagatcgccatctgggccgagcgcatcatgttcagtgacctgcggagcctgcagctgaagaagaccatggagatcaagggcaccgtgacagagttcaagcaccctggggacttctacgtgcagctgtacagcagcgaggtgctggagtacatgaaccagctgagcgccagcctgaaggagacctacgccaacgtgcatgagaaggactacatccctgtgaagggggaggtgtgcatcgccaagtacacagtggaccagacctggaacagagccatcatccagaatgtggatgtgcagcagaagaaggcccacgtgctgtacattgattatggaaatgaggagatcatccccctgaaccgcatctaccacctgaacagaaatattgacctcttccccccctgtgccatcaagtgctttgtggccaacgtcatcccagctgagggcaactggagcagtgactgcatcaaggccaccaagcccctgctgatggagcagtactgcagcatcaagatcgtggacatcctggaggaggaggtggtgacctttgctgtggaggtggagctgcccaacagcggcaagctgctggaccacgtgctgattgagatgggctacggcctgaagcccagcggccaggacagcaagaaggaaaatgctgaccagagcgaccctgaagatgtgggcaagatgaccacagagaacaacatcgtggtggacaagagtgacctgatccccaaggtgctgaccctgaatgtgggagatgagttctgtggggtggtggcccacatccagaccccagaggacttcttctgccagcagctgcagagcggcaggaagctggccgagctgcaggccagcctgagcaagtactgtgaccagctgcccccaagaagtgacttctacccagccatcggggacatctgctgtgcccagttctctgaagatgaccagtggtaccgggcctctgtgctggcctatgccagcgaggagagcgtgctggtgggctacgtggactatggcaactttgagatcctgagcctgatgaggctgtgccccatcatccccaagctgctggagctgcccatgcaggccatcaagtgtgtgctggccggcgtgaagcccagcctgggcatctggaccccagaggccatctgcctgatgaagaagctggtgcagaacaagatcatcaccgtgaaggtggtggacaagctggagaacagcagcctggtggagctgattgacaagtctgagaccccccacgtgtctgtgtccaaggtgctgctggatgctggctttgctgtgggggagcagagcatggtgacagacaagcccagtgatgtgaaggagacctctgtgcccctgggcgtggagggcaaggtgaaccccctggagtggacctgggtggagctgggcgtggaccagacagtggatgtggtggtgtgtgtgatctacagccctggagagttctactgccacgtgctgaaggaggatgccctgaagaagctgaatgacctgaacaagagcctggccgagcactgccagcagaagctgcccaacggcttcaaggccgagatcggccagccctgctgtgccttctttgctggagatggctcctggtaccgggccctggtgaaggagatcctgcccaacggccacgtgaaggtgcactttgtggactatggcaacatcgaggaggtgacagcagatgagctgaggatgatcagcagcaccttcctgaacctgcccttccagggcatccgctgccagctggccgacatccagagcaggaacaagcactggagcgaggaggccatcacccgcttccagatgtgtgtggccggcatcaagctgcaggcccgggtggtggaggtgacagaaaatggaattggagtggagctgacagacctgagcacctgctacccccgcatcatcagtgatgtgctgattgatgagcacctggtgctgaagagcgccagcccccacaaggacctgcccaatgaccggctggtgaacaagcatgagctgcaggtgcacgtgcagggcctgcaggccaccagcagcgctgagcagtggaagaccatcgagctgcctgtggacaagaccatccaggccaacgtgctggagatcatcagccccaacctcttctacgccctgcccaagggcatgcctgagaaccaggagaagctgtgcatgctgacagctgagctgctggagtactgcaatgcccccaagagcaggcctccctaccggcccagaattggagatgcctgctgtgccaagtacaccagtgatgacttctggtacagagctgtggtgctgggcaccagtgacacagatgtggaggtgctgtatgctgactatggcaacatcgagaccctgcccctgtgccgggtgcagcccatcaccagcagccacctggccctgcccttccagatcatccgctgcagcctggagggcctgatggagctgaatggcagcagcagccagctgatcatcatgctgctgaagaacttcatgctgaaccagaatgtgatgctgtctgtgaagggcatcaccaagaatgtgcacacagtgtctgtggagaagtgcagtgaaaatggcaccgtggatgtggccgacaagctggtgaccttcggcctggccaagaacatcaccccccagaggcagagcgccctgaacacagagaagatgtacaggatgaactgctgctgcacagagctgcagaagcaggtggagaagcatgagcacatcctgctcttcctgctgaacaacagcaccaaccagaacaagttcatcgagatgaagaagctgctgaagaagacagccagcctgggcggcaagcccctgtag

SEQ ID NO: 260463 - DNA, 3570 bp, Artificial Sequence
  derived and/or modified sequence
atgagcgtgaagagccccttcaacgtgatgagccggaacaacctggaagccccaccatgcaaaatgactgaaccattcaatttcgagaaaaatgaaaacaaattaccacctcacgaaagtctgagatcccccggcactctccctaatcatccgaatttccgtcttaagagcagtgagaacggcaataaaaaaaataatttcctattatgcgaacaaacgaagcagtacttggctagccaggaggataatagcgtttcttctaatcctaacgggatcaacggcgaggtcgtcggttcgaaaggggataggaaaaaactgccggcaggtaactccgtatccccacctagcgccgaaagcaactcacccccgaaggaggttaatatcaagccaggaaataatgttaggcccgccaaatccaagaaactcaacaagctggtggaaaactcgttgagcatttccaacccaggactgttcacgtctctgggtcccccactcagaagtacgacatgtcatagatgtgggctctttgggtctctgcgatgttctcaatgcaagcaaacgtattattgctccactgcctgccaacggcgggattggtctgctcacagtatcgtctgtcgtcccgttcagccaaactttcacaaactggaaaacaagtcttccatcgagactaaggatgtcgaggtgaataataaatccgactgccctctgggagtgacaaaagaaattgccatttgggccgagcggataatgttcagcgacttgagatccctccagctgaagaagaccatggagatcaaaggaactgttactgaattcaaacaccccggcgacttctacgtgcagctctattccagcgaggtactggagtatatgaaccagctgtcggctagtcttaaggaaacttacgctaacgttcacgagaaggattatattcctgtgaaaggggaagtgtgcatcgctaagtacaccgttgaccagacatggaatagagccattatacagaatgtggatgtgcagcagaaaaaagcccatgtgctgtacatcgattacggaaatgaggaaattattcctcttaacaggatttatcatctgaaccgtaacattgatttgttcccaccttgtgcgatcaagtgcttcgtcgccaacgttattccagccgagggaaactggagttctgactgcattaaagcaaccaagccattgttgatggagcagtactgctcaattaagattgtcgacatcctggaggaggaagtggtgactttcgcagtcgaagtggagctgcccaactcagggaaactgctggatcacgtgcttatcgagatggggtatggacttaaaccttctggacaggacagtaaaaaagaaaatgccgatcagtctgacccagaagatgtaggcaagatgactactgagaacaacatcgttgtggataagtctgacttaatccccaaggtgctcaccttgaatgtcggagacgaattctgcggtgtcgtggcccacatccagacgccagaagatttcttctgtcaacagttgcaaagtgggcgcaaattggcggaactgcaggccagtctgtccaagtactgcgatcagctgcctccaagatcggatttctacccagcaatcggcgacatctgttgtgcccagttttcagaagacgaccagtggtatagggcatcagtattggcatacgcctctgaagaaagcgtattagtaggctacgtggattacggcaatttcgagatcttgtctctcatgcggctttgtccaatcattcccaaattgctggagctgcctatgcaggcaattaagtgtgtgctggccggcgtgaagccttcacttggaatctggacccccgaagccatttgtttgatgaagaaactggtccagaataagataattacagttaaggttgtcgataagcttgaaaacagctcgctggtcgagctgattgacaagagcgagactcctcacgtgtcagtctctaaggtgttgctggacgccggatttgccgtcggcgagcagtcgatggtcactgataaacccagcgacgtgaaggagacttccgttcctcttggcgtcgagggaaaggtgaaccccctggagtggacgtgggtggagctgggtgtggatcagaccgtggacgtggtggtttgtgtaatatacagtcctggtgagttctactgccacgtgctgaaggaagatgcgcttaaaaagttgaacgacttgaacaaatccctcgctgaacactgccagcaaaagctgccaaacggctttaaagctgagatcggacagccgtgctgtgctttcttcgccggggacggtagttggtaccgggccctcgtaaaagaaattctgccaaatggccatgttaaagtccattttgttgattacgggaacattgaggaggtaacagcagatgaactgcgaatgatttcatcaactttcctaaacctgcctttccaaggcattcgatgccagttagctgacatacagtcacggaataagcactggtccgaagaagcgataacacggtttcagatgtgcgttgccgggataaaactgcaggcgcgggttgttgaggtcacagagaatgggatcggagtggaacttactgacctctctacttgttatcccaggattatcagtgatgtgctcatcgacgagcacctggtcctcaaatctgccagcccccacaaagacctgcccaatgacaggttagttaacaaacacgaactgcaggtccatgtgcagggcttgcaggccaccagctctgctgagcagtggaagactatagagctccccgtggacaagacaatccaggcaaacgtcctggaaatcatctcacctaacttgttttatgccctgcctaagggcatgcctgagaaccaggagaagctttgtatgctgacagcagagctcctcgagtattgcaacgcacctaagagtaggcccccataccgcccgcgaattggcgacgcctgctgtgcaaaatacacaagcgatgacttctggtacagggcagtcgtgctcggtacgtccgacactgacgtggaagtcttgtacgccgactacggcaacatagagacactgcccctgtgccgagtccaaccgatcaccagttcgcatctcgccctgccctttcagattataagatgctcccttgagggcttaatggaacttaacggcagcagttcccagctcatcatcatgttgcttaagaacttcatgctgaaccaaaatgtgatgctgtccgtgaagggaatcaccaaaaacgtgcatactgtgtctgtggaaaagtgttccgagaacggaactgtagatgtagccgataagctagtcacattcgggctggctaagaacataactccgcaacgacaaagcgctctgaacacagagaagatgtatcggatgaattgctgctgcacagagctgcagaaacaggttgagaagcatgaacatatacttctgttcctgctaaacaactctacaaatcaaaataaatttattgaaatgaaaaagttgctcaagaagactgcctccctgggaggcaagcctctgtag

SEQ ID NO: 260464 - DNA, 3570 bp, Artificial Sequence
  derived and/or modified sequence
atgtccgtgaagtcccccttcaatgtgatgtcacgtaataatctagaagctcctccgtgcaagatgacagaaccctttaacttcgagaagaatgagaacaaactgcctccccatgaaagccttagatctcccggtactttacccaatcatcccaactttaggctcaagtctagcgagaacgggaacaaaaaaaacaatttcctcctgtgtgagcagacaaagcagtacctggcttctcaggaagataattccgtcagcagcaacccgaatgggatcaacggagaggtggttgggtcaaaaggcgacaggaagaaactgccagcaggtaactcagttagccctccttccgctgaatcaaattcgcctccaaaggaggtgaatatcaagccaggaaataacgtccggccagctaagtctaagaaactaaacaagctcgtggagaactctctgagtatctccaatcctggtctgttcacttctttagggcctccactgagatcaactacatgtcacagatgtggcctgttcggtagcctgcggtgttctcaatgcaaacagacgtactattgcagcaccgcctgccagaggcgagactggtccgcccactcaattgtgtgccgccctgtgcagcctaacttccacaagctggagaacaagagtagtatcgagactaaagatgtcgaagtcaacaataaatccgactgccccctgggcgtcactaaggaaatcgcaatttgggccgagaggattatgttctctgatctccgttccctccagctcaaaaagaccatggagatcaaaggcaccgtgaccgagttcaagcaccccggagacttctatgttcagttgtacagctcagaggtgctggaatatatgaatcagctctccgcaagcttgaaagagacgtatgctaacgtgcacgaaaaggactatatccctgtaaaaggagaagtttgtatcgccaagtatactgtggatcagacatggaatagagcaatcattcaaaacgtggacgttcagcaaaagaaggcccatgtactgtatatagactatggaaacgaggaaattatacctctgaataggatctatcaccttaacagaaacattgatctcttccccccatgtgctattaagtgtttcgtagctaatgtaatccctgcagagggaaattggtcctcagactgcattaaggctactaaacccctcttaatggagcaatactgcagcattaagattgtcgacatactggaggaagaagtggtgacatttgccgttgaggttgagctgcctaacagcggcaagcttctggaccatgtgttgattgagatgggctacggccttaaaccatccgggcaggactcaaaaaaagagaacgccgaccaatcagaccctgaagacgtcggaaaaatgacaaccgagaataatatcgtcgtggacaaaagtgatctcattcctaaggtccttaccttgaatgttggggatgaattttgcggagtggtcgcacacattcagacccctgaggatttcttttgtcagcaactgcagtccgggcgaaagctcgctgagttacaagcaagcctttccaagtactgtgaccagttaccgccaagatctgacttctacccagcaatcggtgatatttgctgtgctcaatttagcgaggacgaccagtggtaccgggcatcggtattagcttatgcaagcgaagagtccgtgctcgtgggctatgtggattacggcaatttcgagatcctgtccctgatgaggctgtgtcccattattcccaagttgctcgaattacctatgcaggccataaagtgcgtgttggcaggtgtgaaacctagcctcgggatctggacaccagaagcaatctgcctgatgaagaagctggtgcaaaataaaatcatcaccgtgaaagtggtggacaagctggaaaatagctctctggtggaactcatcgataaaagcgaaacccctcatgtttctgtcagcaaggtgctcttggatgcaggctttgccgtaggagagcagagtatggtgactgataagccctcagatgttaaagaaacaagcgtacccctgggagtggagggtaaggtgaaccccctggaatggacttgggtcgaactgggcgtcgaccagactgtagacgtggttgtgtgtgtgatttatagccctggcgagttttattgccacgtgctcaaagaagatgcgctcaagaaacttaacgaccttaataagagtttggcagaacactgtcagcaaaaactgcccaatgggttcaaagcagagatagggcagccttgctgcgctttcttcgctggagacggcagttggtatagagctttggttaaggaaatcctgccaaatggccacgttaaagtgcacttcgtggactacgggaacatcgaggaagtgaccgctgatgaactgcgtatgatcagtagcacatttctaaatctaccctttcaaggaatccgctgccagctggcagacatccagagtcgcaacaaacactggtcggaagaggccatcaccagatttcaaatgtgtgtcgctggcatcaagctgcaagccagagtggttgaggtaaccgaaaatgggataggggtggagctcaccgatctctctacgtgttacccgcgaatcatctcggacgtgctgatcgatgagcatctcgtgctgaagagcgcctccccccacaaggatctccctaatgaccgcttggtcaacaagcacgaactccaggtgcacgtgcaggggctccaggcaacctcctctgcggagcagtggaagacaatcgagcttcccgtcgataagacgatccaagccaatgtgctggagattatcagccccaaccttttctacgcgttgcctaaaggcatgccagagaatcaagaaaagctctgtatgttgaccgcagagttgctcgagtactgcaacgcccctaaaagcaggccaccctatagacccaggatcggagacgcctgttgcgctaaatataccagcgacgacttctggtaccgcgctgtggtcctgggaacatcagacactgacgtcgaagtcctctatgctgactacggcaacatcgagactctgcctctgtgtagggttcagcccatcacctcttcacatctggcgttacctttccaaatcatccgctgcagtctcgaaggtctgatggagctgaatggcagctcatcacagctcattatcatgctgctgaagaatttcatgctgaatcagaacgtaatgttaagcgtgaagggcatcactaagaatgtgcacacagtaagcgtggagaagtgctccgagaacggcacggtggacgtcgccgacaaactagtgaccttcggtttagcaaagaatatcaccccccagaggcaaagtgctctgaataccgaaaagatgtaccggatgaactgctgttgtaccgagctccaaaagcaggtggagaaacacgaacacattctactgtttctcttgaacaatagcacaaatcagaacaagtttatcgagatgaagaagctcttgaaaaaaacagcttctttggggggtaaaccactgtag

SEQ ID NO: 260465 - DNA, 4510 bp, Artificial Sequence
  derived and/or modified sequence
gctgaggccaggagggcgcactggggattggaggcgagggaagtgcagggcgcatcccaggcggcagggctcccagcatcggcagtcgccatcaccgccagaccgcagagacaggttcggatccgcggtcctcttgcctctttccaggcctcgatgagtgttaaatcgccatttaatgtgatgtcaagaaataatttggaagcacctccttgtaagatgacagagccatttaattttgagaaaaatgaaaacaagcttccaccacatgagtctttaagaagtcctggaacacttcctaaccaccctaatttcaggctgaaaagctcagagaatggaaataaaaagaacaattttttgctttgtgagcaaaccaaacaatatttggctagtcaggaagacaattcagtttcttcaaacccgaatggcatcaacggagaagtagttggctccaaaggagacaggaaaaaattgccagcaggaaactcagtgtcaccaccaagtgctgaaagtaattcaccacccaaagaagtgaatattaagcctggaaataatgtacgtcctgcaaaatcaaaaaaactaaacaagttggtcgagaattccttgtccataagtaatccagggctcttcacctccttaggacctcctcttcggtccacaacttgccatcgctgtggcctatttggatcgctgaggtgctctcagtgcaagcagacctactattgctccacagcatgtcaaagaagagactggtctgcacacagcatcgtgtgcaggcctgttcagccaaatttccacaaacttgaaaataaatcatctattgaaacaaaggatgtggaggtaaacaataagagtgactgtccacttggagttactaaggaaatagccatttgggctgagagaataatgttttctgatttgagaagtctacaactcaagaaaaccatggaaataaagggtacggttaccgaattcaaacacccaggggacttctacgtgcagttatattcttcagaagttttagaatacatgaaccaactctctgccagcttaaaagaaacatatgcaaatgtgcatgaaaaagactatattcctgttaagggggaagtttgtattgccaagtacactgttgatcagacctggaacagagcaatcatacaaaacgttgatgtgcagcaaaagaaggcacatgtcttatatattgattatggaaatgaagaaataattccattaaacagaatttaccacctcaacaggaacattgacttgtttcctccttgtgccataaagtgctttgtagccaatgttatcccagcagaagggaattggagcagtgattgtatcaaagctactaaaccactgttaatggagcagtactgctccataaagattgtcgacatcttggaagaggaagtggttacctttgctgtagaagttgagctgccaaattcaggaaaacttttagaccatgtgcttatagaaatgggatatggcttgaaacccagtggacaagattctaagaaggaaaatgcagatcaaagtgatcctgaagatgttggaaaaatgacaactgaaaacaacattgtcgtagacaaaagtgacctaatcccaaaagtgttaactttgaatgtaggtgatgagttttgtggtgtggttgcccacattcaaacaccagaagacttcttttgtcaacaactgcaaagtggccgaaagcttgctgaacttcaggcatcccttagcaagtactgtgatcagttgcctccacgctctgatttttatccagccattggtgatatatgttgtgctcagttctcagaggatgatcagtggtaccgtgcctctgttttggcttacgcttctgaagaatctgtactggtcggatatgtagattatggaaactttgaaatccttagtttgatgagactttgtcccataatcccaaagttgttggaattgccaatgcaagctataaagtgtgtactagcaggagtaaagccatcattaggaatttggactccagaagctatttgtctcatgaaaaaacttgtacagaacaaaataatcacagtgaaagtggtggacaagttggaaaacagttccctggtggagcttattgataaatccgagacgcctcatgtcagtgttagcaaagttctcctagatgcaggctttgctgtgggagaacagagtatggtgacagataaacccagtgacgtgaaagaaaccagtgttcccttgggtgtggaaggaaaagtaaatccattggagtggacatgggttgaacttggtgttgaccaaacagtagatgttgtggtctgtgtgatatatagtcctggagaattttattgccatgtgcttaaagaggatgctttaaagaaactcaatgatttgaacaagtcattagcagaacactgccagcagaagttacctaatggtttcaaggcagagataggacaaccttgttgtgctttttttgcaggtgatggtagttggtatcgtgctttagtcaaggaaatcttaccaaatggacatgttaaagtacattttgtggattatggaaacatcgaagaagttactgcagatgaactccgaatgatatcatcaacatttttaaaccttccctttcagggaatacggtgccagttagcagatatacagtctagaaacaaacattggtctgaagaagccataacaagattccagatgtgtgttgctgggataaaattgcaagccagagtggttgaagtcactgaaaatgggataggagttgaactcaccgatctctccacttgttatcccagaataattagtgatgttctgattgatgaacatctggttttaaaatctgcttcaccacataaagacttaccaaatgacagacttgttaataaacatgagcttcaagttcatgtacagggacttcaagctacctcttcagctgagcaatggaagacgatagaattgccagtggataaaactatacaagcaaatgtattagaaatcataagcccaaacttgttttatgctctaccaaaagggatgccagaaaatcaggaaaagctgtgcatgttgacagctgaattattagaatactgcaatgctccgaaaagtcgaccaccctatagaccaagaattggagacgcatgctgtgccaaatacacaagtgatgatttttggtatcgtgcagttgttctggggacatcagacactgatgtggaagtgctctatgcagactatggaaacattgaaaccctgcctctttgcagagtgcaaccaatcacctctagccacctggcgcttcctttccaaattattagatgttcacttgaaggattaatggaattgaatggaagctcttctcaattaataataatgctattaaaaaatttcatgttgaatcagaatgtaatgctttctgtgaaaggaattacaaagaatgtccatacagtgtcagttgagaaatgttctgagaatgggactgtcgatgtagctgataagctagtgacatttggtctggcaaaaaacatcacacctcaaaggcagagtgctttaaatacagaaaagatgtataggatgaattgctgctgcacagagttacagaaacaagttgaaaaacatgaacatattcttctcttcctcttaaacaattcaaccaatcaaaataaatttattgaaatgaaaaaactgttaaaaaaaacagcatctcttggaggtaaacccttatgagacaggaaacagcaaaggctagctttaggagagaaagtacagcacctggtgtttttatttatgagaaccttttctttgtccactttctctgtaatgaccttctatccctccgtttttgcctgcctgccattctcctattaggttggtggtttttattttcctctaagttccttccaccaaataaatattacgtaaaaaattcataccaaatcaatgagaatactggcaaggaatacatagggactttctgctatatatgtaactttttattacttaaaggtaccgaaggaaggccaggtgcagtggctcacgcccagcactttgggaggctgaggtgggaggatcccttgaggccaggagttcaaggttacagtgagctatgatagtgccactgcactccagcctgggtgacagattttgtcttaaaaaaaaaaaaaaaaaagttgatatgagttttattttctgtccgtttgaaatattttgtaatattccctgcattctctgtcgtctgcctcttccacataatgtcctttgctttcatgtttgttatcttctttttctgttcactcagaggtcatcaatttctttctctccgtccttaattggattatttttcttttggcctttgggcacagagtctgacctctggaccactctaactggagaaggaactttatgttccctctcctgctgtgtccacaaccttagaaatctgtagctagatttttgttgttatagatagaatttactgtttctgaaacccaaatacagttatcagtttaaggtt

SEQ ID NO: 260466 - protein, 874 aa, Artificial Sequence
  derived and/or modified sequence
MEKLLRLCCWYSWLLLFYYNFQVRGVYSRSQDHPGFQVLASASHYWPLENVDGIHELQDTTGDIVEGKVNKGIYLKEEKGVTLLYYGRYNSSCISKPEQCGPEGVTFSFFWKTQGEQSRPIPSAYGGQVISNGFKVCSSGGRGSVELYTRDNSMTWEASFSPPGPYWTHVLFTWKSKEGLKVYVNGTLSTSDPSGKVSRDYGESNVNLVIGSEQDQAKCYENGAFDEFIIWERALTPDEIAMYFTAAIGKHALLSSTLPSLFMTSTASPVMPTDAYHPIITNLTEERKTFQSPGVILSYLQNVSLSLPSKSLSEQTALNLTKTFLKAVGEILLLPGWIALSEDSAVVLSLIDTIDTVMGHVSSNLHGSTPQVTVEGSSAMAEFSVAKILPKTVNSSHYRFPAHGQSFIQIPHEAFHRHAWSTVVGLLYHSMHYYLNNIWPAHTKIAEAMHHQDCLLFATSHLISLEVSPPPTLSQNLSGSPLITVHLKHRLTRKQHSEATNSSNRVFVYCAFLDFSSGEGVWSNHGCALTRGNLTYSVCRCTHLTNFAILMQVVPLELARGHQVALSSISYVGCSLSVLCLVATLVTFAVLSSVSTIRNQRYHIHANLSFAVLVAQVLLLISFRLEPGTTPCQVMAVLLHYFFLSAFAWMLVEGLHLYSMVIKVFGSEDSKHRYYYGMGWGFPLLICIISLSFAMDSYGTSNNCWLSLASGAIWAFVAPALFVIVVNIGILIAVTRVISQISADNYKIHGDPSAFKLTAKAVAVLLPILGTSWVFGVLAVNGCAVVFQYMFATLNSLQGLFIFLFHCLLNSEVRAAFKHKTKVWSLTSSSARTSNAKPFHSDLMNGTRPGMASTKLSPWDKSSHSAHRVDLSAV

SEQ ID NO: 260467 - DNA, 5168 bp, Artificial Sequence
  derived and/or modified sequence
actcactccccctccacccagagagcaggacggaggtgtgaacttgagccagaccagaaggagctcgagagcggccgcaggacaagcccgaggagcaggcgggcgctccaggggaaaaccacgcacaaaaccttcttcagagaaaagggaagctccaaacctgactgagacaaacggaggctcttgaaataaaaagaaaataccgcaggacaaacagcctcccgtccccgggcgcaggtcgcggtcacagtggtgacctgggattgctttcccaggactgcgagtcgggtttgggtttctcctccctgcattccacagctgctctggtcatcgcaacgtgtttattgatcactgaagaatctcaagttttgagacgaggaagaaacacccattaggtctccaagacagctgtgtttcacaaactttaaggagacagaaattttctcccctggaacctgtgaaaatgtcccttttccaaggaagtgaaggttaagaggtcccgttctcacagaccctcaggaatttcacttggctccgagctttgacctccgagagagccatggaaaagctgctgcggctgtgctgctggtactcctggctgctgctattttattacaactttcaggtgcgtggcgtctactccagatcgcaggaccatccaggatttcaggtgttggcgtctgcttcccattactggccactggagaatgtggatgggatccatgaacttcaggatacaactggagatattgtggaagggaaggtcaacaaaggcatttacctgaaagaggaaaagggagtcacgcttctctattacggcaggtacaacagctcctgcatcagcaagccagagcagtgtggccctgaaggggtcacgttttcttttttctggaagacacaaggagaacagtctagaccaatcccttctgcgtatgggggacaggtcatctccaatgggttcaaagtctgctccagcggtggcagaggctctgtggagctgtatacgcgggacaattccatgacatgggaggcctccttcagccccccaggcccctattggactcatgtcctatttacatggaaatccaaggagggcctgaaagtctacgtcaacgggaccctgagcacctctgatccgagtggaaaagtgtctcgtgactatggagagtccaacgtcaacctcgtgatagggtctgagcaggaccaggccaagtgttatgagaacggtgctttcgatgagttcatcatctgggagcgggctctgactccggatgagatcgccatgtacttcactgctgccattggaaagcatgctttattgtcttcaacgctgccaagcctcttcatgacatccacagcaagccccgtgatgcccacagatgcctaccatcccatcataaccaacctgacagaagagagaaaaaccttccaaagtcccggagtgatactgagttacctccaaaatgtatccctcagcttacccagtaagtccctctcggagcagacagccttgaatctcaccaagaccttcttaaaagccgtgggagagatccttctactgcctggttggattgctctgtcagaggacagcgccgtggtactgagtctcatcgacactattgacaccgtcatgggccatgtatcctccaacctgcacggcagcacgccccaggtcaccgtggagggctcctctgccatggcagagttttccgtggccaaaatcctgcccaagaccgtgaattcctcccattaccgcttcccggcccacgggcagagcttcatccagatcccccacgaggccttccacaggcacgcctggagcaccgtcgtgggtctgctgtaccacagcatgcactactacctgaacaacatctggcccgcccacaccaagatcgcggaggccatgcatcaccaggactgcctgctgttcgccaccagccacctgatttccctggaggtgtccccaccacccaccctgtctcagaacctgtcgggctctccactcattacggtccacctcaagcacagattgacacgtaagcagcacagtgaggccaccaacagcagcaaccgagtcttcgtgtactgcgccttcctggacttcagctccggagaaggggtctggtcgaaccacggctgtgcgctcacgagaggaaacctcacctactccgtctgccgctgcactcacctcaccaactttgccatcctcatgcaggtggtcccgctggagcttgcacgcggacaccaggtggcgctgtcgtctatcagctatgtgggctgctccctctccgtgctctgcctggtggccacgctggtcaccttcgccgtgctgtcctccgtgagcaccatccggaaccagcgctaccacatccacgccaacctgtccttcgccgtgctggtggcccaggtcctgctgctcattagtttccgcctcgagccgggcacgaccccctgccaagtgatggccgtgctcctacactacttcttcctgagtgccttcgcatggatgctggtggaggggctgcacctctacagcatggtgatcaaggtctttgggtcggaggacagcaagcaccgttactactatgggatgggatggggttttcctcttctgatctgcatcatttcactgtcatttgccatggacagttacggaacaagcaacaattgctggctgtcgttggcgagtggcgccatctgggcctttgtagcccctgccctgtttgtcatcgtggtcaacattggcatcctcatcgctgtgaccagagtcatctcacagatcagcgccgacaactacaagatccatggagaccccagtgccttcaagttgacagccaaggcagtggccgtgctgctgcccatcctgggtacctcgtgggtctttggcgtgcttgctgtcaacggttgtgctgtggttttccagtacatgtttgccacgctcaactccctgcagggactgttcatattcctctttcattgtctcctgaattcagaggtgagagccgccttcaagcacaaaaccaaggtctggtcgctcacgagcagctctgcccgcacctccaacgcgaagcccttccactcggacctcatgaatgggacccggccaggcatggcctccaccaagctcagcccttgggacaagagcagccactctgcccaccgcgtcgacctgtcagccgtgtgagccgggaggctgccaaccaggccaggctgcgctcagaacacacccccccaaacagaatgaaatgccccacctttgcccatggaccctctccttgctgctgtctggacatgggtgttgtggccccgagacagctgtcctcccctgtgactctggctgtcggagcacactgctcagcccagcagcctgatgcccaggccagcgtgggccctcctgccttgcatccacccgtgggctgagtgacttcctcgggggattcccaggacacagtggcctgactgtgatggtgcccttgagcctcccttcatcactcagcatcagacccagcgaggccaggacactcggggccggtcccgcagcaccaggaggggatgttcagcctctgtgccttggtggggcttggggactcagggccaaagaggtggttcaggtccccacgcaccctcagtcaggcgcaggcagctgggggtgtgtggggaagagcatgcggagtccccagtgtctgaatccactgagtggtgagttccccacagccggcgctagccgtggtgtgtgtctctgtaggtggtgccggcgtgggccaacctgtgctgtgtcatcagttgggggcccctgcccaagccgagctcgagccgtgggcgggagtcgttgactctccaggtgagggcgacccctctgccctgtccttgggggggtcccctctgctcacgtgaagagccgctctgggccttgaggctgcctgatggtgcctgtgcttgggggagcttctcggccatccgctgtgagttttgcctctttggaccccaattcggccttaagatgccctcctccctcgtgtgccagcctccttggttgttcttgggccacaggagctggccgtgtccccgcagtgcctggtgtccaggtggaaagtggagggcattttccagggcactgctttccccagaggcttcctcatggctcacaggcactctacgaagtttctaatgggcagaccacgcggcaggtagcacagtgcgctccgtctggtcaccatgagaccgacctgcgctgagtccccactgacctggagagggagggctggtgacagccgtgtcttctgtgttgagggaaatttatggactcagattcagccccagaggagatgggataattgttatggacccatgtgtgggcatgatcctgtggaacacaggtttgggatcatagatgtgaattaagacaccaccgagatacgggctgtgaggttcatactgtgctgatagcactcgtggtgtctgtgaaatgtgggtaagacattcaaacctggttttgatactggaaactcttcctttaaaactgtgaccatgatttcattcagcccctccacacccctatgtctgccttgtttcagagtgagttttctatggagcctgtggcccttttgcagcccacctggtggcttcttaatgtaactcttcccctggtcgcctggagtggaccactcatctgcaggcctctcctgcatggggagggtaggcagggagcagcatgtctgcaggggtgaacctttgctcttctgtcaggcgaggcccaggctgcaccagccacctgccacatggtgacagtgccacgggccctgcgtatggcccctgcaaccgtgctctggcgggcacacctggctgctgcaggccaaggccgctgttcagtgaagagtcccatgtttagtatggactaaagtcccatgtttagccactgccccaggctcccgtgaccccagaaaccaggtcacatggaccacagtgccagatcctcatcacgccggtgagcacctagaagtgagaacactgtattcctacaatgtacacttggatatttctccttatttagtttctagtgaaacaaatcaagtaaggaactatctttagtttagatggaattatttgtttttaattgttgccgtattcatctatatagctaatatttcaagataagtaatgaacaaaac

SEQ ID NO: 260468 - DNA, 2625 bp, Artificial Sequence
  derived and/or modified sequence
atggaaaagctgctgcgactttgttgttggtatagctggctgctactcttctattataactttcaggtgagaggggtgtatagcagaagccaggatcacccaggatttcaagtgctcgcttcagcttcccactattggcctctggagaatgtggacggaatccatgaattacaagacaccacaggagacatcgtggaaggtaaggtcaacaaaggcatctatctaaaggaggaaaagggcgtcacattactgtactatggccgctacaactctagctgcatttccaaaccagagcagtgcggacctgagggagtgactttctcttttttctggaagacccagggagagcagagcaggcccatcccatctgcttatggaggacaagtgatctccaatgggtttaaggtctgtagcagcgggggccgaggaagcgtagagctatacactcgcgacaatagcatgacgtgggaggctagcttcagcccacctggtccctattggactcatgtcctattcacttggaagagcaaagagggattgaaggtctacgtcaatggtacgttatctaccagtgatccaagcgggaaagtatcaagggactatggcgaaagtaacgtcaacctcgtaatcggaagtgagcaggaccaggccaagtgctacgagaatggagcattcgacgagttcatcatctgggaaagggccctgacgcccgatgaaatcgctatgtatttcactgctgcaataggtaagcacgcactgttgagttctacccttccctcactatttatgacctcaaccgcaagccctgtaatgccgaccgacgcctaccatccaataattaccaatctgaccgaggagaggaagaccttccagtctccaggagtcatcctgtcttatctacagaatgtcagcctcagtctcccttcaaagagcctgtccgaacaaacagcccttaatttaaccaagaccttcctgaaagctgtaggcgaaatcctgctgctccccggatggatcgccctcagcgaggactccgccgtggtgttgtccctgattgacaccatcgacacagtgatgggccacgtgtcatccaatctacatggcagtacaccccaggttacagtggaagggtcaagtgccatggcagagttctctgtggctaagattctgcctaaaaccgttaactcttcacactacagattccccgcacacggacagtcttttatccaaatcccgcacgaggccttccatcggcacgcctggagtaccgttgtgggactgctctatcattccatgcactattacctgaataacatctggcccgcccatacaaaaatagcggaggctatgcaccaccaagactgtcttcttttcgctacaagtcaccttatttccttagaggtttctccaccgccaacactgtcacaaaacctgtccgggtcacctctgattacagtgcatctcaagcaccggctgactcggaaacaacatagcgaagctacaaattccagtaacagggtgtttgtgtattgtgctttcctagatttctcctctggagaaggcgtctggagcaatcacggctgtgctctgaccaggggtaacctgacatacagcgtctgccgatgcacccatctgaccaatttcgccatcttgatgcaggtggtgcccctagagttggcccgtggccaccaggtcgctttaagcagtatttcatacgtggggtgcagtttaagtgtgttgtgtctagtagccacactcgtgacctttgctgtgctgtcgtccgtctctaccataaggaatcagaggtatcatattcatgccaatctgtcatttgcagtgctcgtggcgcaggtgctgctgctgatctccttccgcctggaacccggtaccacaccgtgccaggtgatggccgtactgctacactatttttttctctcagcctttgcttggatgttggtagagggcttgcacctgtacagtatggtcatcaaggtgttcggaagcgaagattctaagcatcggtactattatggcatgggttgggggttcccactccttatttgtatcattagcctaagtttcgccatggattcatatgggacatccaataactgttggctctcactcgcttctggagccatttgggctttcgtggcaccagccctgtttgtgattgtcgtgaatattggtattctgatagccgttactcgtgtgatatcccaaatatcagcagacaattacaaaattcatggagacccatcggctttcaaactgaccgcaaaagcggtcgcggtcctgttgcctattcttggtactagttgggtatttggggtgctggccgtgaacggttgtgccgtcgtgtttcagtatatgttcgcaacactaaactcactccaagggctgttcattttcctgtttcactgcttactgaattccgaggtgagggctgccttcaaacacaaaacaaaagtttggtctctcacctccagcagtgctcgaacctccaatgctaagccctttcatagtgacttgatgaacgggaccaggcccggcatggcctctacaaaactgagtccttgggacaaatcctcccattcagcccatagagtggacctgtccgcagtgtag

SEQ ID NO: 260469 - DNA, 2625 bp, Artificial Sequence
  derived and/or modified sequence
atggagaagctgctgcggctgtgctgctggtacagctggctgctgctcttctactacaacttccaggtgcggggcgtgtacagccgcagccaggaccaccctggcttccaggtgctggccagcgccagccactactggcccctggagaatgtggatggcatccacgagctgcaggacaccactggagacatcgtggagggcaaggtgaacaagggcatctacctgaaggaggagaagggcgtgaccctgctgtactacggccgctacaacagcagctgcatcagcaagccagagcagtgtggccctgagggcgtgaccttctccttcttctggaagacccagggcgagcagagccggcccatccccagcgcctatggaggccaggtgatcagcaatggcttcaaggtgtgcagcagcggcggccggggctctgtggagctgtacacccgggacaacagcatgacctgggaggccagcttcagccccccaggcccctactggacccacgtgctcttcacctggaagagcaaggagggcctgaaggtgtatgtgaatggcaccctgagcaccagtgaccccagcggcaaggtgtcccgggactatggagagagcaatgtgaacctggtgattggcagcgagcaggaccaggccaagtgctatgaaaatggagcctttgatgagttcatcatctgggagcgggccctgaccccagatgagatcgccatgtacttcaccgctgccatcggcaagcacgccctgctgagcagcaccctgcccagcctcttcatgaccagcacagccagccctgtgatgcccacagatgcctaccaccccatcatcaccaacctgacagaggagaggaagaccttccagagccctggggtcatcctgagctacctgcagaatgtgtccctgagcctgcccagcaagagcctgtctgagcagacagccctgaacctgaccaagaccttcctgaaggctgtgggggagatcctgctgctgcccggctggatcgccctgtctgaggacagcgctgtggtgctgagcctgattgacaccatcgacacagtgatgggccacgtgagcagcaacctgcacggcagcaccccccaggtgacagtggagggcagcagcgccatggccgagttctctgtggccaagatcctgcccaagacagtgaacagcagccactaccgcttccctgcccacggccagagcttcatccagatcccccatgaggccttccacagacatgcctggagcacagtggtgggcctgctgtaccacagcatgcactactacctgaacaacatctggccagcccacaccaagattgctgaggccatgcaccaccaggactgcctgctgtttgccaccagccacctgatcagcctggaggtgtccccaccacccaccctgagccagaacctgagcggcagccccctcatcaccgtgcacctgaagcaccggctgaccaggaagcagcacagcgaggccaccaacagcagcaacagagtgtttgtgtactgtgccttcctggacttcagcagtggagagggcgtgtggagcaaccacggctgtgccctgacccggggcaacctgacctacagcgtgtgccgctgcacccacctgaccaactttgccatcctgatgcaggtggtgcccctggagctggcccggggccaccaggtggccctgagcagcatctcctatgtgggctgcagcctgtctgtgctgtgcctggtggccaccctggtgacctttgctgtgctgagctctgtgtccaccatccggaaccagcgctaccacatccacgccaacctgagctttgctgtgctggtggcccaggtgctgctgctgatctccttccggctggagcccggcaccaccccctgccaggtgatggctgtgctgctgcactacttcttcctgagcgcctttgcctggatgctggtggagggcctgcacctgtacagcatggtgatcaaggtgtttggaagtgaggacagcaagcaccgctactactacggcatgggctggggcttccccctgctgatctgcatcatcagcctgagctttgccatggacagctatggcaccagcaacaactgctggctgagcctggccagcggggccatctgggcctttgtggccccagccctcttcgtcatcgtggtgaacatcggcatcctgattgctgtgaccagggtcatcagccagatctctgctgacaactacaagatccatggagaccccagcgccttcaagctgacagccaaggctgtggccgtgctgctgcccatcctgggcacctcctgggtgtttggagtgctggccgtgaatggctgtgctgtggtgttccagtacatgtttgccaccctgaacagcctgcagggcctcttcatcttcctgttccactgcctgctgaacagcgaggtgcgggccgccttcaagcacaagaccaaggtgtggagcctgaccagcagcagcgcccggaccagcaatgccaagcccttccacagcgacctgatgaatggcaccaggcctggcatggccagcaccaagctgagcccctgggacaagagcagccacagcgcccaccgggtggacctgtctgctgtgtag

SEQ ID NO: 260470 - DNA, 2625 bp, Artificial Sequence
  derived and/or modified sequence
atggagaagctgctgcggctgtgctgctggtacagctggctgctgctgttctattataattttcaagtgagaggtgtatatagtcggagccaggaccatcccggcttccaggtgctggcctccgcctcacactactggcccttagagaatgttgacggcatccacgagctccaggatactaccggcgacatcgtcgaaggcaaggtgaataagggaatttacttaaaggaggagaagggagttacgttgctatattatggcaggtacaatagtagctgcatctcgaaacccgagcagtgcggacctgagggtgtgacatttagttttttttggaagacccagggggaacaaagccggcccatcccatctgcctatggcgggcaggtgattagtaatggctttaaggtatgctccagcgggggcagaggctctgttgaactatatacacgtgataatagtatgacttgggaagcttcgttcagcccccctgggccatactggacccatgtcctgtttacttggaaatcgaaggagggcctaaaagtgtacgtgaacggaaccctttctacaagtgaccctagtggcaaagtgtcacgcgactatggagagagtaatgtgaacctggtgataggtagtgaacaggatcaggcaaagtgctacgaaaacggcgcctttgatgaattcatcatttgggaacgggcactaaccccagacgaaatcgctatgtacttcacagccgccattggtaaacacgcccttttatcaagcactcttccaagcctgtttatgactagcacggcaagcccggtaatgcctaccgacgcctatcaccccattatcacgaatctgactgaggagcgaaaaaccttccagagtcccggggtgatcctctcctatctgcaaaatgtatccttgtcccttcccagtaagtcgctttctgaacagactgcactcaatttaacgaagacgtttctcaaagccgtcggcgagatcctgttgcttccggggtggatcgctctgtccgaggattctgccgtggtgttgtctctgatcgacaccattgataccgtaatggggcacgtgtcttcgaacctgcacggcagcacgccacaggttacggtcgagggatcctccgcaatggccgagttctccgtggccaagatcctgccaaaaactgtcaacagctcacattacaggttcccagcccacggtcagtcgtttatccaaattccacacgaggcttttcacagacatgcttggtctaccgtcgttggtttgctctaccactcgatgcattactatctcaacaacatctggcctgcccatactaagattgcggaggccatgcaccatcaggactgtctcctgtttgccacgtcacacctgatttctctcgaagtcagccccccccccaccctctcccagaacctgagtggatcaccactgattacagtccacctaaaacatagactgacacgcaaacaacactcagaggccaccaactcgtcgaacagagttttcgtgtactgcgccttccttgatttcagcagcggagagggtgtgtggtctaaccacgggtgtgcgctgaccagaggcaatctgacctactctgtgtgtaggtgtacccatttgacaaattttgcaattttgatgcaggtggttcctcttgagctggcgcgaggacaccaagttgccctgtctagcatctcctatgtaggctgctctttgtccgtgctgtgcctggtggctaccctagtgacctttgcagtgctgtctagcgtgtccacaatccgaaatcagaggtatcacatccatgccaacttaagcttcgctgtgcttgtggcgcaagtgcttctgctgataagtttccgcctcgagcccggcaccaccccctgccaagtgatggccgtgttgctgcattattttttcctgagcgcttttgcctggatgttagttgagggactgcacttgtacagcatggtcattaaagtgtttggtagcgaggacagcaaacatcgatattattacgggatgggttggggattcccccttctgatctgtattatctccctgtccttcgctatggactcatacggtacatccaataactgctggttgtcacttgccagcggcgctatatgggccttcgttgctccggcactgtttgtcattgtggtgaacatcggcatactcattgccgttactagggtgatcagtcaaatttccgctgacaattacaagattcacggcgaccccagcgcatttaagctcacagccaaagctgttgccgtgctgttgcctatcttgggcaccagttgggtttttggcgtgctggcagtcaatggttgcgctgtagtgttccagtacatgtttgcgactctcaacagtctgcagggcctgttcattttcctgtttcattgtctgctgaatagcgaagtcagggcagcctttaaacacaagaccaaggtatggtcactgaccagctcaagcgcgcgaactagcaatgccaagccctttcactccgatttgatgaacggcacaaggcccgggatggcttctactaagctcagtccttgggataagtctagtcattccgcccatagagtggatctttccgcagtctag

SEQ ID NO: 260471 - DNA, 2625 bp, Artificial Sequence
  derived and/or modified sequence
atggagaagctgcttaggctgtgttgctggtattcctggctgctgcttttttactataatttccaagtgcggggagtgtatagccgctcacaggatcacccaggctttcaggttctcgcttccgcttctcactattggccactcgagaatgtggacggtattcacgagttacaggatacaacgggcgatattgtcgaggggaaggttaataagggtatttacctcaaagaagaaaagggggtgacactattgtattatggcaggtataactcttcgtgcatctccaaacccgagcaatgtggaccagagggcgtgacattttcttttttctggaaaacccagggggagcagagtagacccattcccagcgcttacggcggacaagtcattagtaatggattcaaggtatgcagttcaggcggacgaggtagcgtggagctgtatacccgcgacaactcaatgacttgggaagcgtccttttctccgccaggcccatactggacacacgtcctttttacatggaagagcaaggaggggctcaaggtgtatgtgaacggaaccctttctacatctgatccctcaggaaaggtgtcccgagattatggcgaatcgaatgtgaacttggtaatcggatccgagcaggatcaagcgaaatgttacgaaaacggagcgtttgatgagtttattatctgggaaagggctctcacaccagacgagatagcaatgtactttacagccgcaatcggaaaacacgccctcttgtcctcgacccttccatctctgttcatgacctctactgcttctccggtcatgcccactgatgcatatcacccaatcattacaaatttaaccgaagaacgaaaaactttccaatctcccggagtgatactcagttatctgcagaatgtgtcactgtcgttgccgtcaaagtcactgagcgaacagacggctttgaatcttaccaagacattcctaaaggctgtcggagaaatcctgctgctgccagggtggatagcacttagcgaggactctgccgtagtgttgtctctgatcgatactattgataccgttatggggcacgtgtcctctaatctccatggctccactcctcaggtgacagtggagggaagtagcgccatggcagaatttagcgtcgcgaagatattacctaagactgtgaattcaagccactatcggttccccgcacatgggcagtcctttatccagatcccccacgaagccttccaccgtcacgcctggtccactgttgtcggcctgttgtaccacagcatgcactattacctgaacaacatttggcctgctcacacgaagatcgctgaggctatgcaccaccaggactgcttgctgtttgcaacttctcacctgattagcctggaggtaagtcctccgcctacgctgtcccagaacttgagtggcagtccgctgatcactgtccacctcaagcacagactcacaaggaaacagcactccgaagccactaactcatcaaatagagtgtttgtctactgtgctttcctggactttagtagtggtgagggagtgtggtccaaccatgggtgcgcattgaccagaggtaacctcacgtattcagtctgccgttgtactcacttgacaaatttcgcaatcctgatgcaagttgtgcctttggaattagctcgcggacaccaagtcgcattaagttctattagctacgtcggctgtagcttaagcgtgctatgtctggtggctacactggtgactttcgctgtcctctcctctgtgtctacaattagaaaccagagataccatattcatgccaatttgtcctttgcggtactggtggctcaggttttgctgctcatcagctttaggctagagcctggaaccaccccctgtcaagtgatggctgtcctgctgcactactttttcctgtctgcttttgcctggatgctcgtcgagggcttgcacttatactcaatggtgatcaaagttttcggaagcgaagattctaagcatcgctactactatggtatgggttggggatttcctctgctaatctgtattatttctctgagcttcgcaatggatagttatggaacatccaacaattgttggctgtccctcgccagtggcgctatctgggctttcgttgcacccgctctgtttgtgattgtggtcaacatagggatactcatcgcggttacgcgcgtgatctctcagatctctgccgataattataaaatccacggagatcctagcgccttcaaactcacagccaaagctgtagcggtgttgcttccaattctggggacatcctgggtgttcggcgtcctggccgtcaacgggtgcgcagttgtttttcaatacatgtttgctacgctgaatagcctccaggggctctttatctttttgtttcattgcctactgaactcagaggtaagagctgcctttaaacacaagactaaagtctggtccttgacttcatcaagcgctagaacaagcaatgcaaaaccctttcacagcgacctgatgaacggcactcgccctggcatggcaagcaccaaactgtcaccatgggataaatcttcgcactcagcccatcgtgttgacttatcggccgtgtag

SEQ ID NO: 260472 - DNA, 2625 bp, Artificial Sequence
  derived and/or modified sequence
atggagaagctgctgagactgtgctgctggtacagctggctgctgctgttctactacaacttccaggtgagaggcgtgtacagcagaagccaggaccaccccggcttccaggtgctggccagcgccagccactactggcccctggagaacgtggacggcatccacgagctgcaggacaccaccggcgacatcgtggagggcaaggtgaacaagggcatctacctgaaggaggagaagggcgtgaccctgctgtactacggcagatacaacagcagctgcatcagcaagcccgagcagtgcggccccgagggcgtgaccttcagcttcttctggaagacccagggcgagcagagcagacccatccccagcgcctacggcggccaggtgatcagcaacggcttcaaggtgtgcagcagcggcggcagaggcagcgtggagctgtacaccagagacaacagcatgacctgggaggccagcttcagcccccccggcccctactggacccacgtgctgttcacctggaagagcaaggagggcctgaaggtgtacgtgaacggcaccctgagcaccagcgaccccagcggcaaggtgagcagagactacggcgagagcaacgtgaacctggtgatcggcagcgagcaggaccaggccaagtgctacgagaacggcgccttcgacgagttcatcatctgggagagagccctgacccccgacgagatcgccatgtacttcaccgccgccatcggcaagcacgccctgctgagcagcaccctgcccagcctgttcatgaccagcaccgccagccccgtgatgcccaccgacgcctaccaccccatcatcaccaacctgaccgaggagagaaagaccttccagagccccggcgtgatcctgagctacctgcagaacgtgagcctgagcctgcccagcaagagcctgagcgagcagaccgccctgaacctgaccaagaccttcctgaaggccgtgggcgagatcctgctgctgcccggctggatcgccctgagcgaggacagcgccgtggtgctgagcctgatcgacaccatcgacaccgtgatgggccacgtgagcagcaacctgcacggcagcaccccccaggtgaccgtggagggcagcagcgccatggccgagttcagcgtggccaagatcctgcccaagaccgtgaacagcagccactacagattccccgcccacggccagagcttcatccagatcccccacgaggccttccacagacacgcctggagcaccgtggtgggcctgctgtaccacagcatgcactactacctgaacaacatctggcccgcccacaccaagatcgccgaggccatgcaccaccaggactgcctgctgttcgccaccagccacctgatcagcctggaggtgagccccccccccaccctgagccagaacctgagcggcagccccctgatcaccgtgcacctgaagcacagactgaccagaaagcagcacagcgaggccaccaacagcagcaacagagtgttcgtgtactgcgccttcctggacttcagcagcggcgagggcgtgtggagcaaccacggctgcgccctgaccagaggcaacctgacctacagcgtgtgcagatgcacccacctgaccaacttcgccatcctgatgcaggtggtgcccctggagctggccagaggccaccaggtggccctgagcagcatcagctacgtgggctgcagcctgagcgtgctgtgcctggtggccaccctggtgaccttcgccgtgctgagcagcgtgagcaccatcagaaaccagagataccacatccacgccaacctgagcttcgccgtgctggtggcccaggtgctgctgctgatcagcttcagactggagcccggcaccaccccctgccaggtgatggccgtgctgctgcactacttcttcctgagcgccttcgcctggatgctggtggagggcctgcacctgtacagcatggtgatcaaggtgttcggcagcgaggacagcaagcacagatactactacggcatgggctggggcttccccctgctgatctgcatcatcagcctgagcttcgccatggacagctacggcaccagcaacaactgctggctgagcctggccagcggcgccatctgggccttcgtggcccccgccctgttcgtgatcgtggtgaacatcggcatcctgatcgccgtgaccagagtgatcagccagatcagcgccgacaactacaagatccacggcgaccccagcgccttcaagctgaccgccaaggccgtggccgtgctgctgcccatcctgggcaccagctgggtgttcggcgtgctggccgtgaacggctgcgccgtggtgttccagtacatgttcgccaccctgaacagcctgcagggcctgttcatcttcctgttccactgcctgctgaacagcgaggtgagagccgccttcaagcacaagaccaaggtgtggagcctgaccagcagcagcgccagaaccagcaacgccaagcccttccacagcgacctgatgaacggcaccagacccggcatggccagcaccaagctgagcccctgggacaagagcagccacagcgcccacagagtggacctgagcgccgtgtag

SEQ ID NO: 260473 - protein, 250 aa, Artificial Sequence
  derived and/or modified sequence
MGEKVSEAPEPVPRGCSGHGSRTPASALVAASSPGASSAESSSGSETLSEEGEPGGFSREHQPPPPPPLGGTLGARAPAAWAPASVLLERGVLALPPPLPGGAVPPAPRGSSASQEEQDEELDHILSPPPMPFRKCSNPDVASGPGKSLKYKRQLSEDGRQLRRGSLGGALTGRYLLPNPVAGQAWPASAETSNLVRMRSQALGQSAPSLTASLKELSLPRRGSLIDSQKWNCLVKRPVCPNAGRTSPLG

SEQ ID NO: 260474 - DNA, 753 bp, Artificial Sequence
  derived and/or modified sequence
atgggcgagaaggtgagcgaggcccccgagcccgtgcccagaggctgcagcggccacggcagcagaacccccgccagcgccctggtggccgccagcagccccggcgccagcagcgccgagagcagcagcggcagcgagaccctgagcgaggagggcgagcccggcggcttcagcagagagcaccagccccccccccccccccccctgggcggcaccctgggcgccagagcccccgccgcctgggcccccgccagcgtgctgctggagagaggcgtgctggccctgcccccccccctgcccggcggcgccgtgccccccgcccccagaggcagcagcgccagccaggaggagcaggacgaggagctggaccacatcctgagccccccccccatgcccttcagaaagtgcagcaaccccgacgtggccagcggccccggcaagagcctgaagtacaagagacagctgagcgaggacggcagacagctgagaagaggcagcctgggcggcgccctgaccggcagatacctgctgcccaaccccgtggccggccaggcctggcccgccagcgccgagaccagcaacctggtgagaatgagaagccaggccctgggccagagcgcccccagcctgaccgccagcctgaaggagctgagcctgcccagaagaggcagcctgatcgacagccagaagtggaactgcctggtgaagagacccgtgtgccccaacgccggcagaaccagccccctgggctag

SEQ ID NO: 260475 - DNA, 753 bp, Artificial Sequence
  derived and/or modified sequence
atgggtgagaaggtatctgaagcgcccgaacctgtaccgcgaggatgttcagggcacggcagcaggacaccggcaagcgcactggtggcggcttccagccccggagcctccagcgcagagagttctagtggaagtgagacccttagcgaggaaggagagcctggaggattttcccgtgagcaccaacctcctccacccccccctctcggcggtacgcttggggcacgggcgccagccgcctgggctccagcttccgtcctgttggaacggggtgtgctggcgctgccgccaccgttgccagggggagccgtgccaccagccccacggggcagttccgcgagccaggaagagcaagacgaggagctggatcatattctgtcgcctcctccaatgccattcaggaaatgttccaatcctgatgtcgccagcgggcctggcaagagtctgaagtataaaagacaactaagcgaagacgggaggcagttacgccgaggcagcctggggggagccctgaccgggcgctacctgctgcccaaccctgtggccggtcaggcctggccagcaagcgcagagacaagtaatctcgtgcgtatgaggtctcaggccctaggtcagtcagccccttctttgacggcgagtctgaaggagctgtccctcccaagaagaggctccttgattgactcccaaaaatggaactgcctggtgaaaagaccggtctgcccaaatgcaggccggacatctccactcggctag

SEQ ID NO: 260476 - DNA, 753 bp, Artificial Sequence
  derived and/or modified sequence
atgggagagaaggtgtctgaggcccctgagcctgtgccccggggctgcagcggccacggcagcaggaccccagccagcgccctggtggccgccagcagccctggggccagcagcgctgagagcagcagcggcagcgagaccctgtctgaggagggggagcccggcggcttcagccgggagcaccagcccccacctcctccacccctgggcggcaccctgggcgcccgggccccagctgcctgggccccagcctctgtgctgctggagcggggcgtgctggccctgcccccacccctgcccggcggcgctgtgcccccagccccccggggcagcagcgccagccaggaggagcaggatgaggagctggaccacatcctgagccccccacccatgcccttcaggaagtgcagcaacccagatgtggccagcggccctgggaagagcctgaagtacaagaggcagctgtctgaagatggccggcagctgcggcggggcagcctgggcggggccctgaccggccgctacctgctgcccaaccctgtggccggccaggcctggccagccagcgctgagaccagcaacctggtgaggatgaggagccaggccctgggccagagcgcccccagcctgacagccagcctgaaggagctgagcctgccccggcggggcagcctgattgacagccagaagtggaactgcctggtgaagaggcctgtgtgccccaatgccggccgcaccagccccctgggctag

SEQ ID NO: 260477 - DNA, 753 bp, Artificial Sequence
  derived and/or modified sequence
atgggcgagaaggtgagcgaggcccccgagcccgtgccccggggctgcagcgggcatgggagtcgcacgcccgccagcgccctggtggccgcatcttcaccaggcgcttccagcgcagaatctagctcaggtagcgaaaccctttccgaagagggagagccagggggtttctctagagaacatcagcccccgccaccgcctcctttaggggggacccttggcgcccgcgctcccgctgcatgggcccccgcttccgtgctgctcgagaggggcgtactggccctgccccccccactgccggggggagcggtgccccccgcgccacgtgggtccagcgcaagccaggaagagcaggatgaggagcttgatcatatcctttcccccccacctatgccctttagaaagtgttctaatcccgacgttgcatcgggtcctggcaaatcactgaagtacaaaaggcagctcagcgaagacgggaggcagctgcgccgaggatctctcggaggggcactgacagggcgttacctcctgccaaatcctgtggcaggtcaagcctggcctgcttctgctgagacatctaatttggtaaggatgagaagtcaggcccttggccagagcgcgcccagtttgactgcaagcttgaaggagctgtccctgcctcgaagggggagtttaattgactcccagaaatggaattgcctggtcaaacggcccgtgtgcccaaatgctggaaggacctcccctttaggatag

SEQ ID NO: 260478 - DNA, 1066 bp, Artificial Sequence
  derived and/or modified sequence
gcagcgcgggagcacagtggagcgcagatcgcggacccgagcgggcatgtccccgcgcgcgggagcctccgtttgcggccgggcccgggcggctgtgaacttagcagcgggctcctgcggccccgtcactgccatgtagtcgctggcggggctccctgcagcccgggagcggcagtgccagtgagcctgagcccaggagcccgcgtcttccccgggaggcgctgagtgcgcgccgcgcccccgccgctcgggaggcactttgggccagacagggaaatgggggagaaagtttcggaggcgccagagccggtgccccgcggctgcagtggccacggcagccggactccagcctctgcgctggtcgccgcgtcctctccgggtgcttcctcggccgagtcctcctcgggctcagaaactctgtcggaggaaggggagcccggcggcttctccagagagcatcagccgccgccgccgccgccgttgggaggcaccctgggcgcccgggcgcccgccgcgtgggctccggcaagcgtgctgctggagcgcggagtccttgcgctgccgccgccgcttcccggaggagctgtgccgcccgcgccccggggcagcagcgcgtcccaggaggagcaggacgaggagcttgaccacatattatcccctccacccatgccgtttcggaaatgcagcaacccagatgtggcttctggccctggaaaatcactgaagtataaaagacagctgagtgaggatggaagacagctaaggcgagggagcctgggaggagccctgactgggaggtaccttcttccaaacccggtggcgggacaggcctggccggcctctgcagagacgtccaacctcgtgcgcatgcgcagccaggccctgggccagtcggcgccctcgctcaccgccagcctgaaggagctgagtctccccagaagaggaagtttgatagattcccagaagtggaattgcttggtcaaacgccctgtgtgtccaaatgctgggagaacatcaccccttggatgaattgccaccacattaaataaaacatatccaaagctca

SEQ ID NO: 260479 - DNA, 753 bp, Artificial Sequence
  derived and/or modified sequence
atgggcgagaaggttagtgaagctcccgaacccgtacctcgaggatgcagtggccacggaagtagaactccagcaagcgcactggtggctgcctcctctcctggtgcctcttccgcagaatcttccagtgggtcagaaactctcagcgaggaaggcgaaccaggagggttctcccgggagcaccagccaccgcctccccctccattgggcggaactcttggagcaagggccccagccgcttgggccccagcaagtgttttgctggagcgaggcgtgctagccttgccaccgccactgcccggaggagctgtgcctcccgctcctcgaggatcttccgcaagccaggaagagcaagacgaagaactagaccatattctgtcacccccaccaatgccctttagaaagtgttcaaacccagacgtggcctctgggcctggtaagagcctcaagtataaaaggcagttatctgaagatggtaggcaactgcgccgtggctccctgggaggcgctctgacggggaggtatctcctgcccaacccagtggcagggcaggcctggccggcatctgcggagacatcaaacctggtgcgcatgaggtcccaggccctggggcagagtgcgccatccctgaccgcctccctgaaagagctttccctgccaagacgcggtagcctaatcgactcccaaaagtggaattgtctggttaaacgcccagtgtgcccgaatgcagggagaacttcccccctcggctag

SEQ ID NO: 260480 - protein, 830 aa, Artificial Sequence
  derived and/or modified sequence
MSAKAISEQTGKELLYKFICTTSAIQNRFKYARVTPDTDWARLLQDHPWLLSQNLVVKPDQLIKRRGKLGLVGVNLTLDGVKSWLKPRLGQEATGIVRAIRDYQGPLKEHEVTIFVRRGGPNYQEGLRVMGEVGKTTGIPIHVFGTETHMTAIVGMALGHRPIPNQPPTAAHTANFLLNASGSTSTPAPSRTASFSESRADEVAPAKKAKPAMPQGKSTTLFSRHTKAIVWGMQTRAVQGMLDFDYVCSRDEPSVAAMVYPFTGDHKQKFYWGHKEILIPVFKNMADAMRKHPEVDVLINFASLRSAYDSTMETMNYAQIRTIAIIAEGIPEALTRKLIKKADQKGVTIIGPATVGGIKPGCFKIGNTGGMLDNILASKLYRPGSVAYVSRSGGMSNELNNIISRTTDGVYEGVAIGGDRYPGSTFMDHVLRYQDTPGVKMIVVLGEIGGTEEYKICRGIKEGRLTKPIVCWCIGTCATMFSSEVQFGHAGACANQASETAVAKNQALKEAGVFVPRSFDELGEIIQSVYEDLVANGVIVPAQEVPPPTVPMDYSWARELGLIRKPASFMTSICDERGQELIYAGMPITEVFKEEMGIGGVLGLLWFQKRLPKYSCQFIEMCLMVTADHGPAVSGAHNTIICARAGKDLVSSLTSGLLTIGDRFGGALDAAAKMFSKAFDSGIIPMEFVNKMKKEGKLIMGIGHRVKSINNPDMRVQILKDYVRQHFPATPLLDYALEVEKITTSKKPNLILNVDGLIGVAFVDMLRNCGSFTREEADEYIDIGALNGIFVLGRSMGFIGHYLDQKRLKQGLYRHPWDDISYVLPEHMSM

SEQ ID NO: 260481 - protein, 374 aa, Artificial Sequence
  derived and/or modified sequence
MDDLCEANGTFAISLFKILGEEDNSRNVFFSPMSISSALAMVFMGAKGSTAAQMSQALCLYKDGDIHRGFQSLLSEVNRTGTQYLLRTANRLFGEKTCDFLPDFKEYCQKFYQAELEELSFAEDTEECRKHINDWVAEKTEGKISEVLDAGTVDPLTKLVLVNAIYFKGKWNEQFDRKYTRGMLFKTNEEKKTVQMMFKEAKFKMGYADEVHTQVLELPYVEEELSMVILLPDDNTDLAVVEKALTYEKFKAWTNSEKLTKSKVQVFLPRLKLEESYDLEPFLRRLGMIDAFDEAKADFSGMSTEKNVPLSKVAHKCFVEVNEEGTEAAAATAVVRNSRCSRMEPRFCADHPFLFFIRHHKTNCILFCGRFSSP

SEQ ID NO: 260482 - protein, 192 aa, Artificial Sequence
  derived and/or modified sequence
MLFKTNEEKKTVQMMFKEAKFKMGYADEVHTQVLELPYVEEELSMVILLPDDNTDLAVVEKALTYEKFKAWTNSEKLTKSKVQVFLPRLKLEESYDLEPFLRRLGMIDAFDEAKADFSGMSTEKNVPLSKVAHKCFVEVNEEGTEAAAATAVVRNSRCSRMEPRFCADHPFLFFIRHHKTNCILFCGRFSSP

SEQ ID NO: 260483 - DNA, 1125 bp, Artificial Sequence
  derived and/or modified sequence
atggacgacctttgcgaagccaatggaacttttgccatctccctctttaagatcctcggtgaggaagacaattctcggaatgtattcttttctcccatgtcaatttcttcagcgttagctatggtgttcatgggcgctaaaggatcaactgctgcgcagatgagccaggctctgtgtctctacaaagacggagatatccaccggggtttccagagcttactttctgaggtgaaccgtactggtacacagtacctgctgaggaccgcgaacaggctctttggcgagaaaacctgcgatttcctgcccgatttcaaggaatactgtcagaagttctatcaggctgagctggaggaactgagtttcgccgaagacacagaagagtgccgaaaacatatcaacgactgggtcgcggaaaaaaccgagggaaagatttccgaggtgctcgacgcgggcactgttgacccccttaccaagctggtgctggtgaatgctatttattttaagggcaagtggaacgaacagttcgaccggaagtacactcgcgggatgctctttaagactaacgaagagaagaagacagtgcagatgatgtttaaggaagctaagtttaagatgggttacgcagacgaagtacatacacaggtgcttgagctgccctacgtggaggaagaattgtcgatggtgattctgttgcccgacgataacaccgatctggcagtggtggagaaagcgctcacatatgagaagtttaaggcatggacgaatagtgagaagctcactaagtcaaaggtgcaagttttccttccaagactcaagctcgaagagtcatacgacctggaaccatttctgcggcgcctgggaatgatcgacgcattcgatgaagcaaaggccgatttcagcggcatgtcaacggagaagaacgtgcccctgtccaaagttgcccacaagtgcttcgtggaggtgaacgaagagggaacggaagccgctgctgccactgccgtcgttcggaactccagatgctcgagaatggagcccagattttgcgctgatcacccctttctattcttcattcgtcaccacaaaaccaactgtatactgttctgcgggagattcagctctccttag

SEQ ID NO: 260484 - DNA, 1125 bp, Artificial Sequence
  derived and/or modified sequence
atggacgatctctgcgaggcgaacggcacctttgcgataagtctgtttaaaatactgggcgaggaggataactcccgcaatgttttctttagtcccatgtccatatctagtgccttggcgatggtttttatgggggcaaaagggtctacagcggctcagatgagtcaagccttgtgcctatataaggatggcgacatccataggggctttcagtcactcctttcggaagtaaatcggaccggaactcagtacttgctccggaccgctaacagactcttcggggagaagacctgcgacttcctacctgatttcaaggagtactgccaaaagttctaccaggctgagctggaggaactctcctttgccgaggataccgaagaatgtcgcaagcacatcaatgattgggtggcggagaaaacagaagggaaaatcagcgaggtactggatgcagggacagtcgatccactcactaaactagtccttgtcaacgcaatctatttcaagggaaaatggaatgaacagtttgaccggaagtatactaggggaatgctcttcaaaaccaacgaggaaaaaaagaccgttcaaatgatgtttaaagaggcaaagtttaagatgggttacgccgatgaggtgcatacacaggtgttggaattaccttatgtggaggaggaactaagtatggtaattctgttgccggacgacaacacggatcttgcagttgtcgagaaggccctgacctacgaaaaattcaaggcctggaccaactctgaaaagctgacaaagtcgaaggtacaagtctttctccccagactgaagctcgaagagtcctatgacctggaacctttccttaggcggctggggatgattgatgctttcgatgaggcaaaggcagacttttccgggatgagtacggagaagaatgtgccactaagcaaggtcgctcataagtgcttcgtggaggttaacgaggagggaactgaggcagccgcagctacggccgtcgttaggaattcgaggtgctctaggatggaaccaaggttctgtgctgaccacccatttttgttcttcatccgacatcataagaccaactgcattctgttttgcgggcgcttttccagcccttag

SEQ ID NO: 260485 - DNA, 1125 bp, Artificial Sequence
  derived and/or modified sequence
atggatgacctgtgtgaggccaacggcacctttgccatcagcctcttcaagatcctgggggaggaggacaacagcagaaatgtgttcttcagccccatgagcatcagcagcgccctggccatggtgttcatgggcgccaagggcagcacagctgcccagatgagccaggccctgtgcctgtacaaggatggagacatccaccggggcttccagagcctgctgtctgaggtgaacagaacaggcacccagtacctgctgaggacagccaaccggctgtttggagagaagacctgtgacttcctgcctgacttcaaggagtactgccagaagttctaccaggccgagctggaggagctgagctttgctgaggacacagaagaatgtaggaagcacatcaatgactgggtggccgagaagacagagggcaagatcagcgaggtgctggatgctggcaccgtggaccccctgaccaagctggtgctggtgaatgccatctacttcaagggcaagtggaatgagcagtttgacaggaagtacacccggggcatgctgttcaagaccaatgaggagaagaagacagtgcagatgatgttcaaggaggccaagttcaagatgggctatgcagatgaggtgcacacccaggtgctggagctgccctacgtggaggaggagctgtccatggtgatcctgctgcctgatgacaacacagacctggccgtggtggagaaggccctgacctatgagaagttcaaggcctggaccaacagcgagaagctgaccaagagcaaggtgcaggtgttcctgccccggctgaagctggaggagagctatgacctggagcccttcctgcggcggctgggcatgattgatgcctttgatgaggccaaggctgacttcagcggcatgagcacagagaagaatgtgcccctgagcaaggtggcccacaagtgctttgtggaggtgaatgaggagggcacagaggccgccgccgccacagctgtggtgaggaacagccgctgcagcaggatggagccccgcttctgtgccgaccaccccttcctgttcttcatccgccaccacaagaccaactgcatcctcttctgtggccgcttcagcagcccctag

SEQ ID NO: 260486 - DNA, 1125 bp, Artificial Sequence
  derived and/or modified sequence
atggacgacctgtgcgaggccaacggcaccttcgccatcagcctgttcaagattttaggcgaggaagacaacagtcgcaacgtgttctttagcccaatgtcgatatcatctgccttggctatggtatttatgggcgccaaagggagtactgccgcccagatgtcacaagccttgtgcctctataaagatggagacattcaccggggatttcagagtctactgtccgaagtgaatcgcactggtactcagtacctgctgaggaccgctaaccgactttttggcgagaagacttgcgacttcctgcccgattttaaagagtattgtcaaaagttctaccaggcggagctcgaggagctctctttcgccgaagatacagaggagtgtagaaagcatatcaacgactgggtggcggagaaaaccgaaggcaaaatctccgaggttctcgacgcaggaaccgtcgaccctctgaccaagctggttctcgttaacgccatctattttaaaggaaagtggaatgaacagtttgaccggaaatacactagagggatgctattcaaaactaatgaagaaaaaaagaccgtgcaaatgatgttcaaggaagcaaaatttaagatgggatatgccgacgaggtacacacgcaagttcttgagctgccgtatgtcgaggaggagctgagtatggtcatcttgctgcccgatgacaatacggatttggccgtcgtggagaaggctcttacatacgagaagttcaaggcctggacgaacagcgaaaaactcaccaaatcaaaagtgcaggtgttccttcctaggctgaagctggaagagagctatgacctggaaccatttcttcggcgcctcggcatgattgacgcttttgacgaagccaaggctgattttagcggaatgagtaccgagaagaatgttccattaagcaaggtggcacacaagtgtttcgtcgaggtaaatgaagagggaacagaggcggccgcagcgacagctgtggttcggaacagtaggtgtagccgcatggaaccgcgcttttgtgcggatcatccctttctgttcttcatccgccatcacaaaaccaactgcatcctcttttgcgggcgctttagctctccgtag

SEQ ID NO: 260487 - DNA, 1125 bp, Artificial Sequence
  derived and/or modified sequence
atggacgacctgtgcgaggccaacggcaccttcgccatcagcctgttcaagattctgggggaggaagataactctaggaatgtgttcttttctcccatgagtatcagtagtgcattagcgatggtgtttatgggggctaagggctctacggccgcacaaatgtctcaagcgttatgcctgtacaaggacggggacattcatagaggctttcagagccttttaagtgaggtcaatcgcaccgggacccagtacttactgagaaccgccaatcgactgtttggcgagaagacctgcgactttctgcctgatttcaaggagtactgtcagaaattctaccaagccgaactagaggagctgagtttcgcagaagacaccgaggagtgccgcaaacatattaatgattgggtggccgaaaagaccgaagggaagatctctgaggtgctggatgccggaaccgtcgacccattgaccaagctcgtgctcgtcaatgccatctattttaagggaaagtggaatgaacagtttgatagaaaatacactaggggtatgcttttcaagaccaatgaggagaagaagactgtccagatgatgtttaaggaggcgaaatttaagatggggtatgccgatgaagtgcatacccaggtacttgagctaccttatgttgaggaagaactgtccatggtcatacttcttcccgatgacaataccgatctcgcagtggtcgagaaggccctgacttatgagaagtttaaggcttggaccaactctgaaaagctaaccaagagcaaagtgcaggtgttccttcctagactcaaactcgaggagtcctacgacttggaacctttcctcaggaggcttgggatgatcgacgcctttgacgaggccaaggcagattttagcgggatgtccacggagaaaaatgttcctctctcgaaggtggcacataagtgcttcgtcgaagtaaacgaagaaggaacagaggccgcagcggctaccgcagtggttcgtaactcaagatgttcgaggatggaacccagattctgtgctgatcacccctttctgttcttcatccgacatcacaagacgaattgcattttgttttgtggacgcttctctagtccctag

SEQ ID NO: 260488 - DNA, 1125 bp, Artificial Sequence
  derived and/or modified sequence
atggatgacctttgtgaggcaaacgggaccttcgccattagcctattcaagattctcggggaggaggataatagtcggaacgtgttcttttctcccatgtctatctcaagcgcgctcgctatggttttcatgggggctaaggggagcaccgccgctcagatgagtcaggccctttgtctctataaagacggggacatccatcggggttttcagtcgctgttatccgaggtgaatagaacaggcacccagtacctcttgcgtactgcaaaccgactattcggcgagaaaacctgtgatttcttgccagatttcaaagagtattgccagaaattttaccaagccgagttggaagagctttctttcgccgaggataccgaagaatgccgcaagcacatcaacgattgggtcgccgagaaaacggagggcaagatttcagaggtgctcgacgctggtacagtcgatccactcacgaaattggtcctggtcaacgccatatacttcaagggaaaatggaatgagcagttcgacagaaaatatacaaggggaatgttgtttaagacaaatgaagagaaaaagaccgtacagatgatgtttaaagaagccaaattcaaaatgggctacgcagacgaagtgcatacccaggtgctcgagttaccatatgtggaggaagaactgagtatggtgatcttactgccagacgacaatacagaccttgccgtagtagaaaaagctctgacgtacgaaaagttcaaggcctggacgaacagcgagaaactgaccaaaagcaaagttcaagttttcctgccacgcctcaaacttgaagagtcctacgacctggaacctttccttcgaagacttggtatgattgatgcatttgatgaagccaaagcagactttagcggcatgtcaaccgaaaagaatgtgcctctatctaaggtagctcacaagtgttttgttgaggttaatgaagaaggcactgaagctgcagctgcaactgcggtcgtgcgtaactcccggtgttctaggatggagccaagattctgtgcggatcatccttttctgtttttcattcgccatcataagaccaactgcatattattctgtgggcgttttagtagtccttag

SEQ ID NO: 260489 - DNA, 1125 bp, Artificial Sequence
  derived and/or modified sequence
atggacgacctatgtgaagccaacgggacattcgccatttccctgttcaagattttgggggaggaggacaattcccgaaacgtctttttttcaccgatgtcaatatcctctgcactggcaatggtgtttatgggtgctaaggggagcacagccgctcaaatgagtcaggccctttgtctgtataaggacggggatattcatcgcggtttccaatccctgttgtccgaagttaatcgaacaggcacacagtacctgctgaggaccgctaataggctgttcggcgagaagacttgcgatttcttacccgattttaaggagtattgtcagaagttctaccaggctgaactagaggaactttcatttgccgaagatactgaagaatgccggaaacacatcaacgactgggtcgcagagaagacagagggtaaaatcagtgaagtccttgacgccggtacggtggacccattaaccaagttagttttggttaatgctatttactttaagggaaaatggaatgaacaattcgatcgaaaatacacccgcggaatgttattcaagacaaatgaagaaaagaagaccgtccagatgatgtttaaagaagctaagtttaaaatgggctacgccgacgaagtgcacacgcaagttctcgaactcccttacgtcgaggaggaacttagcatggtgatactgctgccggatgataatactgatctcgcagttgtcgaaaaggcccttacctatgagaaattcaaggcctggactaactctgaaaagttgacgaagtcaaaagttcaggtctttctgcctcggttgaaactggaagagtcatacgatctggagccatttctacgtcgcctcggtatgatcgatgctttcgacgaagcaaaggccgatttctcaggaatgagcaccgaaaagaacgtgccactatctaaagtggcccataagtgcttcgtcgaagtgaacgaggagggtacggaagcagctgcagcgaccgctgttgttcggaactccagatgcagccgcatggagcctaggttctgtgcagatcatcccttcctatttttcatccgccaccataagactaactgcattcttttctgtggtcgcttttcctccccatag

SEQ ID NO: 260490 - DNA, 3387 bp, Artificial Sequence
  derived and/or modified sequence
caagccagagcaatcgaacggttctgagtcatctgccggaagccttgccctcaatcaaggcggacgtgaagcatctacaaaggaggaatagtcaaagcagcagcggcggcggcggcggcggcagcagcagcagcagcaggaggtgggggcctctgccagaccttctctgatggatgacctctgtgaagcaaatggcacttttgccatcagcttatttaaaatattgggggaagaggacaactcaagaaacgtattcttctctcccatgagcatctcctctgccctggccatggtcttcatgggggcaaagggaagcactgcagcccagatgtcccaggcactttgtttatacaaagacggagatattcaccgaggtttccagtcacttctcagtgaagttaacagaactggcactcagtacttgcttagaactgccaacagactctttggagaaaagacgtgtgatttccttccagactttaaagaatactgtcagaagttctatcaggcagagctggaggagttgtcctttgctgaagacactgaagagtgcaggaagcatataaatgactgggtggcagagaagactgaaggtaagatttcagaggtactggatgctgggacagtcgatcccctgacaaagctggtccttgtgaatgccatttatttcaagggaaagtggaatgagcaatttgacagaaagtacacaaggggaatgctctttaaaaccaacgaggaaaaaaagacagtgcagatgatgtttaaggaagctaagtttaaaatggggtatgcggatgaggtacacacccaggtcctggagctgccctatgtggaagaggagctgagcatggtcattctgcttcccgatgacaacacggacctcgccgtggtggaaaaagcacttacatatgagaaattcaaagcctggacaaattcagaaaagttgacaaaaagtaaggttcaagttttccttcccagattaaagctggaggagagttatgacttggagcctttccttcgaagattaggaatgatcgatgcttttgacgaagccaaggcagacttttctggaatgtcaactgagaagaatgtgcctctgtccaaggttgcccacaagtgcttcgtggaggtcaatgaggaaggcacagaggctgccgcagccactgctgtggtcaggaattcccggtgcagcagaatggagccaagattctgtgcagaccacccttttcttttcttcatcaggcaccacaaaaccaactgcatcttgttctgtggcaggttctcttctccgtaaagaggagcaattgctgtacataccctcctttccttctacctatcttgccttaattaacattccctgtgacctagttggtgcagtggcttgaatgccaaaataaagcgtgtgcactggatagtgtgtgaaagtctttgctgaaagttccagagccattgagaataactgaggccgcagatgcatgaaatttgggcctgggaaggctatgctggttttggagtgtttggggtgcctgccattgcctctgccttcacctaagtctgtgcccattgtttcaggggatcttatggagcatctcagggcttcaggagccagccctcttccatccgcccggctctgcccaccaccactgccaggctgaacaggggactagtgcccaggtgacactgcacacaaagccaagggcaaaccctatagagtaaagctgcagccaccctgtgtctcatgtgcagctgaaatagtgatctgcttctgtcactgtcacatagacagccctgcatgccccctgtctcacacagtttgtaatgaagacagctccttctcatctttccataagcctgagatacaagttcagggactcagcaatgcactttaggactgagctaggaggcaaatatctgaagcttgctatgctgttctttccattccttttccctctgaaacacacaaaataccaaaggaacttacgcaacacaccactgagtcctctaactaatcatatgtgctcagacacagctcaagcacaccccttagttaagaaagaacctccatatacattaatttttttctgcctaaaaataaaattgcgttgtggcagcaatttggaaactacagcaaagtctccaaaaaaattgaagtcacccacaattccaacacacagcaatcactgctgttaatagtgatatacatccttccctattatgtgtatgcaaatagaaatttataagcattttactacaagttaatcatatccttcagtagcttatttcttcccttatgaaaaacctcccttaagatctttccaggtcatcaatttgatgtgcatagtattccactgtgtggctggatttctataattgaatctaattttagacagtttgagtaattaaaattatttctattaacaaataatagattgctaataatatatattatgctgttttggatatactaaatatttgctcacatccttaatatattttttaaaattcctaacaatagtactgttgagataaaagttgagcacattttgagacttcttccaaattggtccctagaaagttacactggtttgtactctcacttatgtcactgtttataccaccactgactgctgcctgctttattatttctttaatgagttggactgaacagtggttaatcctgactctgtttttgactgacagttaacagttacatgaaccattcatattacagctcttacttaaatttgaccaagccaggatatatctgttaggccacattcatttagggatcatgttttccaaagcaggtttgggcaaaattaatccacaggactgaaaggtatacatctgtgagttttgttctcacttccacctctaatttgaagaacactttaattgacacagaatacatttcacatatttaacctctacaataagttctgacacattttccatgaaacaaaccatcgctatattcaagataatgaacctatctatcatactcccaaattccttcttgcatctttgtaatttctcactcttccttctccctctccccgtcccatcccaaccactgatctgctcaggcaactaccaatcttctttctgtcactatagattaatttgcatttttaaagaaatttacatacatggaaccatacatcatctatgctttgtagtatgactcctgtcactcagtacaattattttgagattcatttatgttattgtatgtatcaatagttcatcccttttattggtaagtaacatttttttgtataggtataccatgatttgttgatgaacaaatttacctgttgatgaacatttacgttgttaccaagatttttgctattgaaaataaagtttttatgaatatttatatat

SEQ ID NO: 260491 - DNA, 3477 bp, Artificial Sequence
  derived and/or modified sequence
caatgtgtacactttttataaaaaccaccctccaaggaccaggcactggccctctctccggtgcccacagacatccacacaggcccaaagaatcagggattgcacaagccagagcaatcgaacggttctgagtcatctgccggaagccttgccctcaatcaaggcggacgtgaagcatctacaaaggaggaatagtcaaagcagcagcggcggcggcggcggcggcagcagcagcagcagcaggagaccttctctgatggatgacctctgtgaagcaaatggcacttttgccatcagcttatttaaaatattgggggaagaggacaactcaagaaacgtattcttctctcccatgagcatctcctctgccctggccatggtcttcatgggggcaaagggaagcactgcagcccagatgtcccaggcactttgtttatacaaagacggagatattcaccgaggtttccagtcacttctcagtgaagttaacagaactggcactcagtacttgcttagaactgccaacagactctttggagaaaagacgtgtgatttccttccagactttaaagaatactgtcagaagttctatcaggcagagctggaggagttgtcctttgctgaagacactgaagagtgcaggaagcatataaatgactgggtggcagagaagactgaaggtaagatttcagaggtactggatgctgggacagtcgatcccctgacaaagctggtccttgtgaatgccatttatttcaagggaaagtggaatgagcaatttgacagaaagtacacaaggggaatgctctttaaaaccaacgaggaaaaaaagacagtgcagatgatgtttaaggaagctaagtttaaaatggggtatgcggatgaggtacacacccaggtcctggagctgccctatgtggaagaggagctgagcatggtcattctgcttcccgatgacaacacggacctcgccgtggtggaaaaagcacttacatatgagaaattcaaagcctggacaaattcagaaaagttgacaaaaagtaaggttcaagttttccttcccagattaaagctggaggagagttatgacttggagcctttccttcgaagattaggaatgatcgatgcttttgacgaagccaaggcagacttttctggaatgtcaactgagaagaatgtgcctctgtccaaggttgcccacaagtgcttcgtggaggtcaatgaggaaggcacagaggctgccgcagccactgctgtggtcaggaattcccggtgcagcagaatggagccaagattctgtgcagaccacccttttcttttcttcatcaggcaccacaaaaccaactgcatcttgttctgtggcaggttctcttctccgtaaagaggagcaattgctgtacataccctcctttccttctacctatcttgccttaattaacattccctgtgacctagttggtgcagtggcttgaatgccaaaataaagcgtgtgcactggatagtgtgtgaaagtctttgctgaaagttccagagccattgagaataactgaggccgcagatgcatgaaatttgggcctgggaaggctatgctggttttggagtgtttggggtgcctgccattgcctctgccttcacctaagtctgtgcccattgtttcaggggatcttatggagcatctcagggcttcaggagccagccctcttccatccgcccggctctgcccaccaccactgccaggctgaacaggggactagtgcccaggtgacactgcacacaaagccaagggcaaaccctatagagtaaagctgcagccaccctgtgtctcatgtgcagctgaaatagtgatctgcttctgtcactgtcacatagacagccctgcatgccccctgtctcacacagtttgtaatgaagacagctccttctcatctttccataagcctgagatacaagttcagggactcagcaatgcactttaggactgagctaggaggcaaatatctgaagcttgctatgctgttctttccattccttttccctctgaaacacacaaaataccaaaggaacttacgcaacacaccactgagtcctctaactaatcatatgtgctcagacacagctcaagcacaccccttagttaagaaagaacctccatatacattaatttttttctgcctaaaaataaaattgcgttgtggcagcaatttggaaactacagcaaagtctccaaaaaaattgaagtcacccacaattccaacacacagcaatcactgctgttaatagtgatatacatccttccctattatgtgtatgcaaatagaaatttataagcattttactacaagttaatcatatccttcagtagcttatttcttcccttatgaaaaacctcccttaagatctttccaggtcatcaatttgatgtgcatagtattccactgtgtggctggatttctataattgaatctaattttagacagtttgagtaattaaaattatttctattaacaaataatagattgctaataatatatattatgctgttttggatatactaaatatttgctcacatccttaatatattttttaaaattcctaacaatagtactgttgagataaaagttgagcacattttgagacttcttccaaattggtccctagaaagttacactggtttgtactctcacttatgtcactgtttataccaccactgactgctgcctgctttattatttctttaatgagttggactgaacagtggttaatcctgactctgtttttgactgacagttaacagttacatgaaccattcatattacagctcttacttaaatttgaccaagccaggatatatctgttaggccacattcatttagggatcatgttttccaaagcaggtttgggcaaaattaatccacaggactgaaaggtatacatctgtgagttttgttctcacttccacctctaatttgaagaacactttaattgacacagaatacatttcacatatttaacctctacaataagttctgacacattttccatgaaacaaaccatcgctatattcaagataatgaacctatctatcatactcccaaattccttcttgcatctttgtaatttctcactcttccttctccctctccccgtcccatcccaaccactgatctgctcaggcaactaccaatcttctttctgtcactatagattaatttgcatttttaaagaaatttacatacatggaaccatacatcatctatgctttgtagtatgactcctgtcactcagtacaattattttgagattcatttatgttattgtatgtatcaatagttcatcccttttattggtaagtaacatttttttgtataggtataccatgatttgttgatgaacaaatttacctgttgatgaacatttacgttgttaccaagatttttgctattgaaaataaagtttttatgaatatttatatatata

SEQ ID NO: 260492 - DNA, 1324 bp, Artificial Sequence
  derived and/or modified sequence
aatcaaggcggacgtgaagcatctacaaaggaggaatagtcaaagcagcagcggcggcggcggcggcggcagcagcagcagcagcaggaggcactttgtttatacaaagacggagatattcaccgaggtttccagtcacttctcagtgaagttaacagaactggcactcagtacttgcttagaactgccaacagactctttggagaaaagacgtgtgatttccttccagactttaaagaatactgtcagaagttctatcaggcagagctggaggagttgtcctttgctgaagacactgaagagtgcaggaagcatataaatgactgggtggcagagaagactgaaggtaagatttcagaggtactggatgctgggacagtcgatcccctgacaaagctggtccttgtgaatgccatttatttcaagggaaagtggaatgagcaatttgacagaaagtacacaaggggaatgctctttaaaaccaacgaggaaaaaaagacagtgcagatgatgtttaaggaagctaagtttaaaatggggtatgcggatgaggtacacacccaggtcctggagctgccctatgtggaagaggagctgagcatggtcattctgcttcccgatgacaacacggacctcgccgtggtggaaaaagcacttacatatgagaaattcaaagcctggacaaattcagaaaagttgacaaaaagtaaggttcaagttttccttcccagattaaagctggaggagagttatgacttggagcctttccttcgaagattaggaatgatcgatgcttttgacgaagccaaggcagacttttctggaatgtcaactgagaagaatgtgcctctgtccaaggttgcccacaagtgcttcgtggaggtcaatgaggaaggcacagaggctgccgcagccactgctgtggtcaggaattcccggtgcagcagaatggagccaagattctgtgcagaccacccttttcttttcttcatcaggcaccacaaaaccaactgcatcttgttctgtggcaggttctcttctccgtaaagaggagcaattgctgtacataccctcctttccttctacctatcttgccttaattaacattccctgtgacctagttggtgcagtggcttgaatgccaaaataaagcgtgtgcactggatagtgtgtgaaagtctttgctgaaagttccagagccattgagaataactgaggccgcagatgcatgaaatttgggcctgggaaggctatgctggttttggagtgtttggggtgcctgccattgcctctgccttcacctaagtctgtgcccattgtttca

SEQ ID NO: 260493 - DNA, 1125 bp, Artificial Sequence
  derived and/or modified sequence
atggacgacctgtgcgaggccaacggcaccttcgccatcagcctgttcaagatcctgggcgaggaggacaacagcagaaacgtgttcttcagccccatgagcatcagcagcgccctggccatggtgttcatgggcgccaagggcagcaccgccgcccagatgagccaggccctgtgcctgtacaaggacggcgacatccacagaggcttccagagcctgctgagcgaggtgaacagaaccggcacccagtacctgctgagaaccgccaacagactgttcggcgagaagacctgcgacttcctgcccgacttcaaggagtactgccagaagttctaccaggccgagctggaggagctgagcttcgccgaggacaccgaggagtgcagaaagcacatcaacgactgggtggccgagaagaccgagggcaagatcagcgaggtgctggacgccggcaccgtggaccccctgaccaagctggtgctggtgaacgccatctacttcaagggcaagtggaacgagcagttcgacagaaagtacaccagaggcatgctgttcaagaccaacgaggagaagaagaccgtgcagatgatgttcaaggaggccaagttcaagatgggctacgccgacgaggtgcacacccaggtgctggagctgccctacgtggaggaggagctgagcatggtgatcctgctgcccgacgacaacaccgacctggccgtggtggagaaggccctgacctacgagaagttcaaggcctggaccaacagcgagaagctgaccaagagcaaggtgcaggtgttcctgcccagactgaagctggaggagagctacgacctggagcccttcctgagaagactgggcatgatcgacgccttcgacgaggccaaggccgacttcagcggcatgagcaccgagaagaacgtgcccctgagcaaggtggcccacaagtgcttcgtggaggtgaacgaggagggcaccgaggccgccgccgccaccgccgtggtgagaaacagcagatgcagcagaatggagcccagattctgcgccgaccaccccttcctgttcttcatcagacaccacaagaccaactgcatcctgttctgcggcagattcagcagcccctag

SEQ ID NO: 260494 - protein, 2268 aa, Artificial Sequence
  derived and/or modified sequence
MSGLHLVKQGRDRKKIDSQRDFTVASPAEFVTRFGGNKVIEKVLIANNGIAAVKCMRSIRRWSYEMFRNERAIRFVVMVTPEDLKANAEYIKMADHYVPVPGGPNNNNYANVELILDIAKRIPVQAVWAGWGHASENPKLPELLLKNGIAFMGPPSQAMWALGDKIASSIVAQTAGIPTLPWSGSGLRVDWQENDFSKRILNVPQELYEKGYVKDVDDGLQAAEEVGYPVMIKASEGGGGKGIRKVNNADDFPNLFRQVQAEVPGSPIFVMRLAKQSRHLEVQILADQYGNAISLFGRDCSVQRRHQKIIEEAPATIATPAVFEHMEQCAVKLAKMVGYVSAGTVEYLYSQDGSFYFLELNPRLQVEHPCTEMVADVNLPAAQLQIAMGIPLYRIKDIRMMYGVSPWGDSPIDFEDSAHVPCPRGHVIAARITSENPDEGFKPSSGTVQELNFRSNKNVWGYFSVAAAGGLHEFADSQFGHCFSWGENREEAISNMVVALKELSIRGDFRTTVEYLIKLLETESFQMNRIDTGWLDRLIAEKVQAERPDTMLGVVCGALHVADVSLRNSVSNFLHSLERGQVLPAHTLLNTVDVELIYEGVKYVLKVTRQSPNSYVVIMNGSCVEVDVHRLSDGGLLLSYDGSSYTTYMKEEVDRYRITIGNKTCVFEKENDPSVMRSPSAGKLIQYIVEDGGHVFAGQCYAEIEVMKMVMTLTAVESGCIHYVKRPGAALDPGCVLAKMQLDNPSKVQQAELHTGSLPRIQSTALRGEKLHRVFHYVLDNLVNVMNGYCLPDPFFSSKVKDWVERLMKTLRDPSLPLLELQDIMTSVSGRIPPNVEKSIKKEMAQYASNITSVLCQFPSQQIANILDSHAATLNRKSEREVFFMNTQSIVQLVQRYRSGIRGHMKAVVMDLLRQYLRVETQFQNGHYDKCVFALREENKSDMNTVLNYIFSHAQVTKKNLLVTMLIDQLCGRDPTLTDELLNILTELTQLSKTTNAKVALRARQVLIASHLPSYELRHNQVESIFLSAIDMYGHQFCIENLQKLILSETSIFDVLPNFFYHSNQVVRMAALEVYVRRAYIAYELNSVQHRQLKDNTCVVEFQFMLPTSHPNRGNIPTLNRMSFSSNLNHYGMTHVASVSDVLLDNSFTPPCQRMGGMVSFRTFEDFVRIFDEVMGCFSDSPPQSPTFPEAGHTSLYDEDKVPRDEPIHILNVAIKTDCDIEDDRLAAMFREFTQQNKATLVDHGIRRLTFLVAQKDFRKQVNYEVDRRFHREFPKFFTFRARDKFEEDRIYRHLEPALAFQLELNRMRNFDLTAIPCANHKMHLYLGAAKVEVGTEVTDYRFFVRAIIRHSDLVTKEASFEYLQNEGERLLLEAMDELEVAFNNTNVRTDCNHIFLNFVPTVIMDPSKIEESVRSMVMRYGSRLWKLRVLQAELKINIRLTPTGKAIPIRLFLTNESGYYLDISLYKEVTDSRTAQIMFQAYGDKQGPLHGMLINTPYVTKDLLQSKRFQAQSLGTTYIYDIPEMFRQSLIKLWESMSTQAFLPSPPLPSDMLTYTELVLDDQGQLVHMNRLPGGNEIGMVAWKMTFKSPEYPEGRDIIVIGNDITYRIGSFGPQEDLLFLRASELARAEGIPRIYVSANSGARIGLAEEIRHMFHVAWVDPEDPYKGYRYLYLTPQDYKRVSALNSVHCEHVEDEGESRYKITDIIGKEEGIGPENLRGSGMIAGESSLAYNEIITISLVTCRAIGIGAYLVRLGQRTIQVENSHLILTGAGALNKVLGREVYTSNNQLGGIQIMHNNGVTHCTVCDDFEGVFTVLHWLSYMPKSVHSSVPLLNSKDPIDRIIEFVPTKTPYDPRWMLAGRPHPTQKGQWLSGFFDYGSFSEIMQPWAQTVVVGRARLGGIPVGVVAVETRTVELSIPADPANLDSEAKIIQQAGQVWFPDSAFKTYQAIKDFNREGLPLMVFANWRGFSGGMKDMYDQVLKFGAYIVDGLRECCQPVLVYIPPQAELRGGSWVVIDSSINPRHMEMYADRESRGSVLEPEGTVEIKFRRKDLVKTMRRVDPVYIHLAERLGTPELSTAERKELENKLKEREEFLIPIYHQVAVQFADLHDTPGRMQEKGVISDILDWKTSRTFFYWRLRRLLLEDLVKKKIHNANPELTDGQIQAMLRRWFVEVEGTVKAYVWDNNKDLAEWLEKQLTEEDGVHSVIEENIKCISRDYVLKQIRSLVQANPEVAMDSIIHMTQHISPTQRAEVIRILSTMDSPST

SEQ ID NO: 260495 - protein, 2383 aa, Artificial Sequence
  derived and/or modified sequence
MWWSTLMSILRARSFWKWISTQTVRIIRAVRAHFGGIMDEPSPLAQPLELNQHSRFIIGSVSEDNSEDEISNLVKLDLLEEKEGSLSPASVGSDTLSDLGISSLQDGLALHIRSSMSGLHLVKQGRDRKKIDSQRDFTVASPAEFVTRFGGNKVIEKVLIANNGIAAVKCMRSIRRWSYEMFRNERAIRFVVMVTPEDLKANAEYIKMADHYVPVPGGPNNNNYANVELILDIAKRIPVQAVWAGWGHASENPKLPELLLKNGIAFMGPPSQAMWALGDKIASSIVAQTAGIPTLPWSGSGLRVDWQENDFSKRILNVPQELYEKGYVKDVDDGLQAAEEVGYPVMIKASEGGGGKGIRKVNNADDFPNLFRQVQAEVPGSPIFVMRLAKQSRHLEVQILADQYGNAISLFGRDCSVQRRHQKIIEEAPATIATPAVFEHMEQCAVKLAKMVGYVSAGTVEYLYSQDGSFYFLELNPRLQVEHPCTEMVADVNLPAAQLQIAMGIPLYRIKDIRMMYGVSPWGDSPIDFEDSAHVPCPRGHVIAARITSENPDEGFKPSSGTVQELNFRSNKNVWGYFSVAAAGGLHEFADSQFGHCFSWGENREEAISNMVVALKELSIRGDFRTTVEYLIKLLETESFQMNRIDTGWLDRLIAEKVQAERPDTMLGVVCGALHVADVSLRNSVSNFLHSLERGQVLPAHTLLNTVDVELIYEGVKYVLKVTRQSPNSYVVIMNGSCVEVDVHRLSDGGLLLSYDGSSYTTYMKEEVDRYRITIGNKTCVFEKENDPSVMRSPSAGKLIQYIVEDGGHVFAGQCYAEIEVMKMVMTLTAVESGCIHYVKRPGAALDPGCVLAKMQLDNPSKVQQAELHTGSLPRIQSTALRGEKLHRVFHYVLDNLVNVMNGYCLPDPFFSSKVKDWVERLMKTLRDPSLPLLELQDIMTSVSGRIPPNVEKSIKKEMAQYASNITSVLCQFPSQQIANILDSHAATLNRKSEREVFFMNTQSIVQLVQRYRSGIRGHMKAVVMDLLRQYLRVETQFQNGHYDKCVFALREENKSDMNTVLNYIFSHAQVTKKNLLVTMLIDQLCGRDPTLTDELLNILTELTQLSKTTNAKVALRARQVLIASHLPSYELRHNQVESIFLSAIDMYGHQFCIENLQKLILSETSIFDVLPNFFYHSNQVVRMAALEVYVRRAYIAYELNSVQHRQLKDNTCVVEFQFMLPTSHPNRGNIPTLNRMSFSSNLNHYGMTHVASVSDVLLDNSFTPPCQRMGGMVSFRTFEDFVRIFDEVMGCFSDSPPQSPTFPEAGHTSLYDEDKVPRDEPIHILNVAIKTDCDIEDDRLAAMFREFTQQNKATLVDHGIRRLTFLVAQKDFRKQVNYEVDRRFHREFPKFFTFRARDKFEEDRIYRHLEPALAFQLELNRMRNFDLTAIPCANHKMHLYLGAAKVEVGTEVTDYRFFVRAIIRHSDLVTKEASFEYLQNEGERLLLEAMDELEVAFNNTNVRTDCNHIFLNFVPTVIMDPSKIEESVRSMVMRYGSRLWKLRVLQAELKINIRLTPTGKAIPIRLFLTNESGYYLDISLYKEVTDSRTAQIMFQAYGDKQGPLHGMLINTPYVTKDLLQSKRFQAQSLGTTYIYDIPEMFRQSLIKLWESMSTQAFLPSPPLPSDMLTYTELVLDDQGQLVHMNRLPGGNEIGMVAWKMTFKSPEYPEGRDIIVIGNDITYRIGSFGPQEDLLFLRASELARAEGIPRIYVSANSGARIGLAEEIRHMFHVAWVDPEDPYKGYRYLYLTPQDYKRVSALNSVHCEHVEDEGESRYKITDIIGKEEGIGPENLRGSGMIAGESSLAYNEIITISLVTCRAIGIGAYLVRLGQRTIQVENSHLILTGAGALNKVLGREVYTSNNQLGGIQIMHNNGVTHCTVCDDFEGVFTVLHWLSYMPKSVHSSVPLLNSKDPIDRIIEFVPTKTPYDPRWMLAGRPHPTQKGQWLSGFFDYGSFSEIMQPWAQTVVVGRARLGGIPVGVVAVETRTVELSIPADPANLDSEAKIIQQAGQVWFPDSAFKTYQAIKDFNREGLPLMVFANWRGFSGGMKDMYDQVLKFGAYIVDGLRECCQPVLVYIPPQAELRGGSWVVIDSSINPRHMEMYADRESRGSVLEPEGTVEIKFRRKDLVKTMRRVDPVYIHLAERLGTPELSTAERKELENKLKEREEFLIPIYHQVAVQFADLHDTPGRMQEKGVISDILDWKTSRTFFYWRLRRLLLEDLVKKKIHNANPELTDGQIQAMLRRWFVEVEGTVKAYVWDNNKDLAEWLEKQLTEEDGVHSVIEENIKCISRDYVLKQIRSLVQANPEVAMDSIIHMTQHISPTQRAEVIRILSTMDSPST

SEQ ID NO: 260496 - protein, 2370 aa, Artificial Sequence
  derived and/or modified sequence
SFWKWISTQTVRIIRAVRAHFGGIMDEPSPLAQPLELNQHSRFIIGSVSEDNSEDEISNLVKLDLLEEKEGSLSPASVGSDTLSDLGISSLQDGLALHIRSSMSGLHLVKQGRDRKKIDSQRDFTVASPAEFVTRFGGNKVIEKVLIANNGIAAVKCMRSIRRWSYEMFRNERAIRFVVMVTPEDLKANAEYIKMADHYVPVPGGPNNNNYANVELILDIAKRIPVQAVWAGWGHASENPKLPELLLKNGIAFMGPPSQAMWALGDKIASSIVAQTAGIPTLPWSGSGLRVDWQENDFSKRILNVPQELYEKGYVKDVDDGLQAAEEVGYPVMIKASEGGGGKGIRKVNNADDFPNLFRQVQAEVPGSPIFVMRLAKQSRHLEVQILADQYGNAISLFGRDCSVQRRHQKIIEEAPATIATPAVFEHMEQCAVKLAKMVGYVSAGTVEYLYSQDGSFYFLELNPRLQVEHPCTEMVADVNLPAAQLQIAMGIPLYRIKDIRMMYGVSPWGDSPIDFEDSAHVPCPRGHVIAARITSENPDEGFKPSSGTVQELNFRSNKNVWGYFSVAAAGGLHEFADSQFGHCFSWGENREEAISNMVVALKELSIRGDFRTTVEYLIKLLETESFQMNRIDTGWLDRLIAEKVQAERPDTMLGVVCGALHVADVSLRNSVSNFLHSLERGQVLPAHTLLNTVDVELIYEGVKYVLKVTRQSPNSYVVIMNGSCVEVDVHRLSDGGLLLSYDGSSYTTYMKEEVDRYRITIGNKTCVFEKENDPSVMRSPSAGKLIQYIVEDGGHVFAGQCYAEIEVMKMVMTLTAVESGCIHYVKRPGAALDPGCVLAKMQLDNPSKVQQAELHTGSLPRIQSTALRGEKLHRVFHYVLDNLVNVMNGYCLPDPFFSSKVKDWVERLMKTLRDPSLPLLELQDIMTSVSGRIPPNVEKSIKKEMAQYASNITSVLCQFPSQQIANILDSHAATLNRKSEREVFFMNTQSIVQLVQRYRSGIRGHMKAVVMDLLRQYLRVETQFQNGHYDKCVFALREENKSDMNTVLNYIFSHAQVTKKNLLVTMLIDQLCGRDPTLTDELLNILTELTQLSKTTNAKVALRARQVLIASHLPSYELRHNQVESIFLSAIDMYGHQFCIENLQKLILSETSIFDVLPNFFYHSNQVVRMAALEVYVRRAYIAYELNSVQHRQLKDNTCVVEFQFMLPTSHPNRGNIPTLNRMSFSSNLNHYGMTHVASVSDVLLDNSFTPPCQRMGGMVSFRTFEDFVRIFDEVMGCFSDSPPQSPTFPEAGHTSLYDEDKVPRDEPIHILNVAIKTDCDIEDDRLAAMFREFTQQNKATLVDHGIRRLTFLVAQKDFRKQVNYEVDRRFHREFPKFFTFRARDKFEEDRIYRHLEPALAFQLELNRMRNFDLTAIPCANHKMHLYLGAAKVEVGTEVTDYRFFVRAIIRHSDLVTKEASFEYLQNEGERLLLEAMDELEVAFNNTNVRTDCNHIFLNFVPTVIMDPSKIEESVRSMVMRYGSRLWKLRVLQAELKINIRLTPTGKAIPIRLFLTNESGYYLDISLYKEVTDSRTAQIMFQAYGDKQGPLHGMLINTPYVTKDLLQSKRFQAQSLGTTYIYDIPEMFRQSLIKLWESMSTQAFLPSPPLPSDMLTYTELVLDDQGQLVHMNRLPGGNEIGMVAWKMTFKSPEYPEGRDIIVIGNDITYRIGSFGPQEDLLFLRASELARAEGIPRIYVSANSGARIGLAEEIRHMFHVAWVDPEDPYKGYRYLYLTPQDYKRVSALNSVHCEHVEDEGESRYKITDIIGKEEGIGPENLRGSGMIAGESSLAYNEIITISLVTCRAIGIGAYLVRLGQRTIQVENSHLILTGAGALNKVLGREVYTSNNQLGGIQIMHNNGVTHCTVCDDFEGVFTVLHWLSYMPKSVHSSVPLLNSKDPIDRIIEFVPTKTPYDPRWMLAGRPHPTQKGQWLSGFFDYGSFSEIMQPWAQTVVVGRARLGGIPVGVVAVETRTVELSIPADPANLDSEAKIIQQAGQVWFPDSAFKTYQAIKDFNREGLPLMVFANWRGFSGGMKDMYDQVLKFGAYIVDGLRECCQPVLVYIPPQAELRGGSWVVIDSSINPRHMEMYADRESRGSVLEPEGTVEIKFRRKDLVKTMRRVDPVYIHLAERLGTPELSTAERKELENKLKEREEFLIPIYHQVAVQFADLHDTPGRMQEKGVISDILDWKTSRTFFYWRLRRLLLEDLVKKKIHNANPELTDGQIQAMLRRWFVEVEGTVKAYVWDNNKDLAEWLEKQLTEEDGVHSVIEENIKCISRDYVLKQIRSLVQANPEVAMDSIIHMTQHISPTQRAEVIRILSTMDSPST

SEQ ID NO: 260497 - DNA, 7152 bp, Artificial Sequence
  derived and/or modified sequence
atgtggtggtccacgctaatgtccatcctccgagcaaggtcattctggaaatggatctccacacagacggtcagaattatccgggcagtccgcgcacatttcggcggaattatggacgagccttcacctctcgcgcaacccctcgaattgaaccagcacagccgcttcattataggcagtgtcagcgaggataattctgaggatgagatctcgaatctggttaaactcgacttgctcgaagagaaagaggggtcactttccccagcaagtgttggatctgacactctgtctgacctgggtatctcatcactacaagatgggctggctctgcatatcaggtcctcaatgtccggacttcatctggtcaagcaagggcgagacaggaagaaaatcgactcccagagagactttactgttgccagcccagcagagttcgttacaaggttcggtgggaacaaagtgatcgaaaaggtacttatcgccaacaatggcattgccgctgtcaagtgcatgcggagtatcagaaggtggagctatgagatgttccggaatgaaagagcgatacgattcgtggttatggtgactccggaggacctgaaagctaacgccgagtatatcaaaatggccgaccactatgtccccgtgcccgggggacccaataacaataactacgcaaacgtggagctcattctggatatcgcaaagcggattcccgtacaggcagtttgggccggctgggggcacgcatccgaaaaccccaaacttcctgaactactgctgaaaaacggcattgcttttatggggcctccatcacaggccatgtgggccctgggagacaaaattgcctcatctatcgtggctcagactgctggtataccaacattgccctggagcggctccgggctgcgagttgactggcaggaaaacgacttttcgaagcggatacttaacgttccccaagagctgtatgagaaagggtatgtgaaggatgtggacgatgggctgcaggccgccgaagaggtgggttaccccgtgatgatcaaggcgtctgaaggcggaggcgggaaagggattaggaaagtgaataacgccgatgatttcccgaacctgttcagacaggtgcaggccgaagttcctggctcccctatcttcgtcatgaggctggccaagcaaagtcgtcacctggaggtgcagatcctggccgatcagtacggcaatgctataagcctttttggcagggactgctctgtacagcgccgacatcagaagataatcgaggaggccccggctacaatagcaactcctgccgtgttcgagcacatggaacagtgtgccgtgaaacttgccaagatggtgggatatgtaagtgccggaaccgtggaatacctttacagccaggacgggtctttctattttctggaactgaatcctcgcctgcaggttgaacacccttgcaccgagatggtggctgatgtgaatctgcctgcagctcagctacagattgccatgggcatccccttgtaccgaattaaggacatacgaatgatgtacggcgtcagtccctggggcgactctccaatcgacttcgaagactcagcacacgtcccctgtccacggggccatgtgattgccgccagaattacgtctgagaacccagacgaggggttcaaaccaagctccggtaccgtgcaggagttgaactttcgctccaataagaatgtctgggggtatttttccgtcgccgcggcagggggcttgcacgaattcgcagattcacagtttggacactgctttagctggggggaaaaccgggaggaagccatatctaatatggtggttgccctgaaggaactcagcatccggggagattttaggaccactgttgagtatctgatcaagctcctcgaaacggagtccttccaaatgaatcgcatcgacacaggctggctggaccgtctgattgccgagaaggtgcaggccgaacggcctgatacaatgctgggggtcgtttgtggagcgctccacgtcgccgacgtgagtctcagaaatagtgtcagtaactttctacacagcttggaacgcggacaggttttacccgcacacactttattaaacacagtcgatgttgaactgatctatgagggtgtcaaatacgttctcaaggtgaccagacagagtcccaacagctacgtcgttatcatgaatggcagttgcgtggaggtagacgtacatagattgtctgatggaggcctgctgctaagctatgatggctcatcatacactacctacatgaaggaagaagtggacaggtaccgcattaccattggcaataagacttgtgtgttcgagaaggagaacgacccatctgtgatgaggtcaccttcggctggcaaattaatccagtatatcgttgaggacggcggacacgtgttcgccggccaatgctatgctgagatcgaggtcatgaaaatggtgatgaccctgacagccgtagaatccggatgtatccactatgtcaaaaggccaggggcagctcttgatcccgggtgcgtcctggccaagatgcagcttgataatccctcaaaggtgcaacaggcagagttacacaccggtagcttgccgcgaatacaaagcactgcgctaaggggtgagaagttgcatcgagtgttccactatgtgctggacaatctcgtaaatgtcatgaacggctattgtctgcccgaccccttcttctcctccaaggtgaaggattgggtcgagagacttatgaagacactgagagacccttctttgcccttgttggagctccaggacataatgaccagcgtctcagggagaattccgcccaatgtcgagaagtccataaagaaggagatggcacagtatgcctctaacatcacctccgtgctgtgccagtttccttcccagcagatcgcaaatatcctcgattcacatgcggctaccctgaaccgaaagtcagagagagaagtattttttatgaatacacagtcaattgttcagcttgtccagcgctatagatccgggataagagggcacatgaaggccgtcgtgatggatctgctgcgtcagtatctgcgcgtagagacacagttccagaacggccattacgataaatgcgtgtttgccctcagggaagagaacaagtctgacatgaacaccgttcttaactatatctttagtcatgcacaggtgacaaaaaagaacctgcttgtgaccatgctcattgaccagttatgcggacgcgatcccactttgacagatgaactgttgaacatcctcaccgagctgacacagttgagcaaaaccaccaacgctaaggttgccctgcgggcccgtcaggtcttgattgcaagccacctccccagttacgagttgagacataaccaggttgagtcaatctttttgtcagcaattgatatgtatggacaccagttttgtatagaaaacctgcagaaattgattctttccgaaacttcgatattcgacgtgttgcccaattttttctaccactccaaccaggtggtccggatggcagccctggaggtgtatgtgagacgggcctacattgcctacgagctgaactccgtccagcaccgccagttaaaggacaacacttgcgtggtggagtttcagttcatgttgccaacttcacaccccaacaggggtaacatcccaactctgaatagaatgtcattttccagcaaccttaatcactatgggatgacacacgtagcctccgtgtccgacgtgctgttggacaattccttcacgccaccctgccagcgaatggggggaatggtgagcttccgaacttttgaagatttcgtgcggatttttgatgaagtcatggggtgtttctccgattctcctcctcagagtccgacatttccagaagccgggcacaccagcttgtacgatgaggacaaggtgccacgcgatgaaccgatccacattctcaatgtggctattaagacagactgtgacattgaagacgataggcttgcggccatgttcagagagtttacgcagcagaataaggctactctggtcgatcatggcataaggcgcctgacttttttagtggcacaaaaggatttccggaaacaagtcaactacgaggtggaccgaagatttcaccgtgaatttcccaagttttttaccttcagagcccgggataaatttgaagaagacagaatttaccggcatctagagcccgccctggcatttcagctggaattaaatagaatgcgaaatttcgatcttacggctataccctgcgccaatcacaaaatgcatctctatttgggtgctgctaaggtcgaggtgggtacggaggtcaccgactatcgatttttcgtcagggccatcatacggcactcggatctggtgacaaaggaagcttcgttcgaatacctgcagaatgaaggcgaacgtcttctgctcgaggctatggacgaattagaagtcgcttttaataacactaatgtgagaactgattgcaaccacatatttttgaatttcgtaccgaccgtaattatggaccccagtaagatcgaagaatcagtgcgctccatggtgatgaggtacggatctcggttgtggaaactgagggtgttacaggctgagttgaagattaacatccggctgacgccaacaggaaaggccatcccaatcagactcttcttaacgaatgagtccgggtactaccttgatatatcactgtataaagaggtaactgattcccggactgcccagattatgtttcaggcttacggggacaaacagggtcctctgcatgggatgctgattaacacaccttacgtgactaaggacctgctccaaagtaaacgattccaggcgcagtccctgggcactacgtatatttacgatatcccggaaatgtttcgacagtctcttatcaaactttgggagtcgatgagcacccaggcatttctgccttctccacctctcccttctgacatgctcacctacaccgagctggtgttagatgaccaaggccagttggtacacatgaaccgccttccagggggcaacgagattggaatggttgcatggaagatgaccttcaagagccctgaatacccagaggggagagatattatagttataggcaatgatatcacataccgcatcggatcatttggccctcaggaagaccttcttttcttgcgggccagcgagcttgcgcgcgccgaagggataccacgaatctacgtctccgccaatagcggagcacgcattggactggccgaggagatacgccatatgttccatgtggcctgggtggaccccgaagatccctacaaagggtacagatacctgtacctaactcctcaggattacaagcgggtaagcgcactcaacagtgttcactgcgagcacgtcgaggatgaaggtgaaagccggtacaagatcactgatattatcggcaaggaagagggcatcgggcccgaaaatctccggggaagcgggatgattgctggagagagctccctggcatataacgagattatcacaattagcctggtgacgtgtagggcaattggcataggagcctatctcgtccgtcttggtcagcgcaccattcaggtcgaaaactcccatctgatcctgaccggcgccggggccttaaataaagtgctgggcagggaggtgtatacatccaacaatcaactgggggggatccagattatgcacaacaacggggttacacattgcaccgtctgcgatgacttcgagggcgtgttcacggtgctgcactggctaagttacatgccaaagagcgttcatagcagcgtcccacttctaaactcaaaggatcccattgatcgcatcatcgaatttgtgcctactaagactccatatgacccacgctggatgctggcgggcagacctcaccctactcagaaaggacagtggctcagcggctttttcgactatggatccttctctgagataatgcagccatgggcccaaaccgtcgtcgtcggaagggcaaggctggggggcattcccgtaggggttgtcgccgtagaaacacgcaccgtggaactgtctatcccggctgaccctgccaacctggatagtgaagctaaaataatccagcaggccgggcaggtgtggttcccggattccgccttcaaaacttatcaggccattaaggacttcaatagggagggactgccgctgatggtgtttgcaaattggcggggttttagtggcggcatgaaagacatgtatgaccaggtactgaaattcggtgcctacattgttgatgggcttagagagtgttgccagccagtgttagtgtacattccacctcaggctgagctccgtggcgggtcatgggtggtcatcgattcctccatcaacccgagacatatggagatgtacgccgacagagagtcaagaggttccgtgttggagcccgaaggtaccgtggaaattaagttcagacggaaagacctagtgaaaacaatgagacgcgtcgaccccgtgtacattcaccttgcagaacgattaggcacaccagagctgagcaccgctgagagaaaggaacttgagaacaagctcaaggagagggaggagttcttgatccccatttaccaccaggtggctgtgcaattcgcggacctccacgatacacctggaaggatgcaggaaaagggagtgatctcggacatcctggattggaagaccagtcgcaccttcttctattggagactccggagactccttttggaggatttggtaaagaagaaaatacataatgcaaaccccgagctgaccgatggccaaatccaggccatgctaaggcgctggttcgtcgaggtagaagggacagtgaaggcatatgtttgggacaacaacaaggatctagccgaatggctggagaagcagctcactgaggaggatggtgtccacagcgtgattgaggaaaatatcaagtgtatttccagggactatgttctcaaacagatccgctctctggtgcaggcgaaccccgaggtagccatggatagtatcatccatatgacacagcacatatctccaacccagagagcagaagtaatacgcattctgtctacgatggactctccctctacctag

SEQ ID NO: 260498 - DNA, 129 bp, Artificial Sequence
  derived and/or modified sequence
atgtccggactccacctggtgaaacagggacgcgataggaagaagatagatagccagcgagattttaccgtcgcgagtcccgccgaatttgtcaccagatttggcggtaacaaggtaatcgagaagtag

SEQ ID NO: 260499 - DNA, 129 bp, Artificial Sequence
  derived and/or modified sequence
atgagtgggcttcatctcgtcaagcagggcagggataggaagaaaatagactctcagcgggacttcaccgtagcttcaccagcagagttcgttacaaggtttggggggaataaagtaatcgagaaatag

SEQ ID NO: 260500 - DNA, 234 bp, Artificial Sequence
  derived and/or modified sequence
atggatgaaccttctcctttggcgcaacccctggagctgaatcagcattccagattcatcattggaagcgtttccgaggacaatagcgaggatgagatctccaacctcgtgaaactcgatctgcttgaggagaaggagggctcgttaagcccggcttcagtcggatcagacacactcagcgacctcggaatctcctcactgcaggacggcctggccctgcacataagattatag

SEQ ID NO: 260501 - DNA, 363 bp, Artificial Sequence
  derived and/or modified sequence
atggatgagccctcacccttggcccagcccttagagcttaaccaacactctcgctttatcattgggtccgtgagtgaggacaattcggaagatgaaatcagtaatctcgttaaactggatttgctcgaggagaaagaaggaagcctgtctcctgccagtgtagggagtgataccttgtctgatctggggatctcatccttgcaggatggacttgctctccatatccgttcgagcatgagcggcttgcacttggtgaagcagggtcgagatcggaagaaaatcgactcccagagggatttcacagtagcctctcccgctgaattcgtgactaggttcgggggcaataaagtgattgagaaatag

SEQ ID NO: 260502 - DNA, 7113 bp, Artificial Sequence
  derived and/or modified sequence
agcttctggaagtggatcagcactcagacagtgagaattatccgggctgtgagagcgcattttggcggaatcatggatgaaccatctccactggctcagccattggagctgaaccagcacagtaggtttattattggttcagtctctgaagataatagtgaagatgagattagtaatctggtgaagttggacctacttgaggaaaaggaaggatctttgtcacccgctagtgttggctccgataccttaagtgatctgggcatctcctctctgcaagacgggctggccttgcacatacgaagttctatgtcgggactgcatttggtgaaacagggtagggaccgcaagaaaattgatagccagcgggatttcactgtggcgtcccccgccgagtttgtaacccggttcggcggtaataaggttattgaaaaggtgcttattgcaaacaacgggatcgctgcggtaaaatgcatgagatccatcagaagatggtcatatgagatgtttaggaacgagcgagccattcgttttgtcgtgatggtgacccctgaggatctaaaagccaatgctgagtacattaagatggcagaccattatgtcccagtgccaggcggccccaataacaataactatgccaacgttgagctaatcctggacattgctaagagaatacccgtgcaagcagtgtgggccgggtgggggcatgcttcagaaaatcccaagttacccgagttgttactcaagaatggaatcgcgtttatgggtcccccatcacaagcgatgtgggctctcggggataagatagcctcatctatagtcgcccagaccgccgggattcctaccctgccctggagtggctccggtctacgagtggattggcaggaaaacgacttttcaaagaggatactcaatgtcccccaagagctgtacgagaagggctacgtaaaagatgtcgatgacggccttcaggcagccgaagaagtgggatatccagtgatgatcaaagccagcgagggaggtggtggcaaaggaatacggaaagtcaacaacgctgatgattttccaaacctctttcggcaggttcaggccgaggtgcccggcagcccaatttttgtgatgagactggccaagcagtcacggcaccttgaagtccaaattctggcggatcagtatggtaacgctatttcactgtttggaagagactgttccgttcagaggcgacaccagaagataatcgaggaagctccggccacaatagctacacctgcggtcttcgagcatatggaacagtgcgccgtgaaactcgcgaagatggttgggtatgtctcagcaggcactgtcgagtacctttattcccaagacggcagtttctactttctcgaactgaatccaaggctacaggtcgaacacccctgtaccgagatggtagctgacgtgaatctgcccgccgcccagttgcagattgccatggggatccctctctatagaatcaaggacattaggatgatgtatggggtctccccttggggcgacagccctattgattttgaggattcagcacacgttccctgtccccggggccatgttattgctgctcgcatcacatcagagaaccccgacgaaggtttcaagcccagctccggcaccgtccaagagctaaacttcaggtccaacaagaatgtttgggggtacttctctgttgccgcagcaggtgggttgcacgaattcgccgacagccaatttggacactgcttctcgtggggggagaaccgcgaggaggccataagtaatatggtggtggcactgaaggaactaagcatcaggggagattttcgcactaccgtggaatatctcatcaagttactggaaactgagagctttcagatgaataggatcgacaccggctggctggacaggctgattgctgagaaggtccaagccgagcgtccagacacgatgctaggtgtcgtctgtggcgctctacatgtcgccgacgtgtcgctgcgcaactcagtgtctaatttcttgcacagtctggagcgcggtcaggtgctgcctgcccatacactgctcaataccgtcgatgtggaactcatttacgaaggagtaaagtacgttttaaaagttactcggcagtcccccaatagctatgtcgtcataatgaacggcagctgtgtggaagtggacgtgcatcggctaagtgatgggggactgctgctcagttacgatggaagttcttacacgacgtacatgaaggaagaggttgatcgctatcgcattaccatcggcaacaagacatgcgtgttcgagaaagaaaatgaccctagcgttatgcggtcaccttctgcaggcaaattgatccaatatattgtggaagatggcggtcacgtcttcgcaggtcagtgctacgcagaaattgaggtcatgaagatggttatgacattgactgcagtagagtctgggtgtattcattatgtcaaacggcccggtgcggctttagaccccggctgcgtccttgccaagatgcagctagacaacccttccaaagttcagcaggcagaattgcatacaggatcactgcctagaatacaatcaaccgccctcaggggggaaaaactccatcgagtgtttcactacgtgctagataatctcgtcaacgttatgaatggctactgcctccctgatccttttttttcttccaaggtgaaggattgggtagagagactcatgaagactctacgcgatccatcactgccattactcgagcttcaagacatcatgacgtcggtcagtggccggataccacccaacgttgaaaaatcaatcaagaaggaaatggcccagtacgcttccaacatcacgtctgtgctctgtcagtttcctagccaacagatagccaacatccttgattcacacgcagcaacactcaacaggaagtctgaacgcgaggtattcttcatgaacacgcagagcatcgtacagctcgtccagaggtacagaagcgggatcaggggccatatgaaggccgtcgtgatggacctgctgcgccagtatcttcgggtggagacgcagttccagaacggtcactacgataagtgcgtcttcgcgctccgcgaagagaataaatcagatatgaacactgttctcaactacattttcagtcatgcccaggtcacaaagaagaacctactagtcactatgctgattgatcagctgtgcgggcgagatcccacattgacagacgaattgttgaacatccttaccgaattgacccaactgtcaaaaacaaccaacgctaaagtggccctccgagcccgccaagttctgattgccagtcacttgcccagttacgaactccgtcataatcaggtggaaagtatcttcttaagcgccatagacatgtacggccaccagttttgtatcgaaaacctacaaaagctcatcctgtccgagacgtccatctttgatgtgcttcccaactttttctaccactcgaatcaggtcgtcaggatggctgccctcgaagtgtacgttaggagagcgtacatcgcctacgaactgaatagcgtgcagcacaggcagcttaaggataacacctgcgtggtcgaatttcagtttatgctaccgactagtcatcctaatcgcggcaatattcccactctgaatcgtatgagtttctcttccaacctcaatcactatgggatgactcacgtagcaagtgtctccgacgtgttgctcgataactcttttacacccccgtgtcagcgcatgggaggcatggttagcttccggactttcgaggactttgtgcgaatcttcgatgaggttatggggtgttttagcgactcaccccctcaaagccccacttttcccgaggctggccacaccagcctgtacgacgaggacaaggtgcccagagacgaaccaattcacatcctgaacgtagcgattaaaacagactgtgatatcgaggatgatcgactggccgccatgttccgagagttcacacagcagaataaggcaacccttgttgatcatgggataagacgcctgactttcctcgtggcccagaaggatttccggaagcaggttaattacgaggtagaccggagattccatagagagttcccaaaattcttcacattccgcgctagggataagttcgaagaagatcgcatctaccgtcacctggaacctgccttggcctttcagctggaactcaacaggatgcgaaacttcgatctgacagctattccctgtgctaaccacaaaatgcacctgtatttgggcgctgcaaaggttgaggtcggaaccgaggttaccgactatcggttcttcgtccgagcgatcatccgccatagcgacctggttacaaaggaggcatctttcgagtaccttcagaacgagggcgagcgtttactcctggaggccatggacgaactggaggtcgcattcaacaatacaaatgttcgaactgactgcaatcacatcttcctcaactttgtgccaacagtgattatggacccatctaagatagaagaatcggtcaggtcgatggtgatgaggtacgggagtaggttgtggaagctgcgggtgttacaggcggagctgaagattaacatccgtctgaccccaacggggaaagcaattccaatcaggctgtttcttacaaacgaaagcggttattatcttgacatctctctgtataaggaagtgaccgactcccggactgctcagattatgtttcaggcttatggcgataaacagggccccctgcatggaatgctcattaacacaccgtacgtgactaaggatctgctgcaatccaaacggttccaggcgcagtcactaggaacaacctatatctacgacattcctgaaatgtttagacagtctctcataaaactgtgggagtctatgtcgactcaggcgttcctgccatctccaccactcccttctgacatgctaacatatacagaattggtgctcgatgaccagggacagttggtccatatgaacagactgccaggggggaacgagatcggcatggttgcctggaaaatgacattcaaaagtccagagtaccctgagggcagagatattatcgtgatcggtaatgatatcacataccgcatcgggtcttttggcccccaggaggatctgctgttcttacgtgcttcagagctcgcaagagctgaggggatccctagaatctatgtgtctgctaactcgggagccagaattggactggccgaggaaattcgtcatatgtttcatgtcgcatgggttgaccctgaagatccgtataagggatacaggtacctttacctcacccctcaggactataaacgagtttctgccctgaattcggttcactgcgagcacgtcgaggatgagggagagtcaaggtataaaataacagacattataggcaaagaagagggaatcgggccagaaaatcttagaggcagcggaatgattgccggagagagtagcctcgcgtataatgagatcatcaccatcagtctcgtcacttgccgagccattgggataggcgcttatctggtgcgactagggcagaggactattcaggtggagaatagccacctgatcctgaccggcgccggcgcacttaacaaagtgctgggccgcgaggtgtatacctctaataaccaactgggtggcatacagattatgcataacaacggcgtcacgcattgtacagtttgcgatgacttcgagggagtgttcaccgtgttgcactggctttcatacatgcctaagagcgttcactcctccgtccccctgctgaattccaaggacccaattgatcgcatcatcgagtttgttcctaccaagaccccgtatgatccacgctggatgttagcggggcggcctcacccaacacagaagggacagtggttgagtggtttcttcgactatgggtcatttagtgagattatgcagccttgggcacagactgtggtcgtcggaagagctagactggggggcatccccgtgggcgttgtcgcagtggagacccgcaccgttgaacttagtattcctgctgaccccgctaacctcgacagcgaggcaaagatcatacagcaggcgggtcaggtgtggtttcccgactccgcgtttaagacataccaggcaatcaaggacttcaatcgggaaggactcccgctcatggtgtttgccaactggagagggttttcgggcgggatgaaagatatgtacgaccaggtgctgaagttcggcgcatacatcgttgatgggttaagggagtgctgccagcccgtgctggtgtatatccctccacaggctgagctgcgtggcggttcctgggtggttatcgacagctccataaacccacgccatatggaaatgtacgccgaccgcgaaagtcgagggtcagtcctggaaccagaaggcaccgtggaaattaagttccggcggaaagacttagtcaagacaatgaggagagtagatccggtgtatattcacttggccgagcggcttggcacccctgagctgtcaaccgccgagagaaaggaattggagaacaagctgaaagaacgggaagaattcctcatccccatataccatcaagtggcagtgcaattcgctgacctccacgacactccaggaaggatgcaggaaaaaggtgtaatttccgatatcctggattggaagaccagtagaacctttttttactggaggcttagacgcctgcttctagaggatttagtcaagaaaaagatccataacgccaatcccgagctaacagacggacagatacaggcaatgctccgaagatggttcgttgaggtagaaggtactgtcaaggcatacgtgtgggataataataaagatctcgccgaatggctggaaaaacagctaacagaagaggacggggtacattccgtaatagaagaaaacataaaatgcattagcagggactacgtactcaagcaaatccgctccctggttcaggccaacccggaagtcgcaatggacagcataatacatatgacccaacacatcagccccacccaacgtgctgaggtaatccggattctgagtaccatggactcaccgtccacatag

SEQ ID NO: 260503 - DNA, 144 bp, Artificial Sequence
  derived and/or modified sequence
atggatgaaccaagccctcttgctcagcctcttgagctgaaccagcactcacgctttatcatcggaagtgtcagcgaagacaacagcgaagacgagataagcaatctcgtgaagctggaccttctcgaagagaaggaaggatag

SEQ ID NO: 260504 - DNA, 7152 bp, Artificial Sequence
  derived and/or modified sequence
atgtggtggagcaccctgatgagcatcctgcgggcccggagcttctggaagtggatcagcacccagacagtgcgcatcatccgggctgtgcgggcccactttggaggcatcatggatgagcccagccccctggcccagcccctggagctgaaccagcacagccgcttcatcatcggctctgtgtctgaggacaacagtgaagatgagatcagcaacctggtgaagctggacctgctggaggagaaggagggcagcctgagccctgcctctgtgggcagtgacaccctgagtgacctgggcatcagcagcctgcaggacggcctggccctgcacatccgcagctccatgagcggcctgcacctggtgaagcagggccgggacaggaagaagattgacagccagagggacttcaccgtggccagccctgctgagtttgtgaccaggtttggaggcaacaaggtgattgagaaggtgctgattgccaacaatggaattgctgctgtgaagtgcatgaggagcatccgccgctggagctatgagatgttcagaaatgaaagagccatccgctttgtggtgatggtgaccccagaggacctgaaggccaatgctgagtacatcaagatggctgaccactacgtgcctgtgcctgggggccccaacaacaacaactatgccaacgtggagctgatcctggacatcgccaagagaattcctgtgcaggccgtgtgggccggctggggccacgccagcgagaaccccaagctgcctgagctgctgctgaagaatggcatcgccttcatgggcccccccagccaggccatgtgggccctgggggacaagatcgccagcagcatcgtggcccagacagctggcatccccaccctgccctggagcggcagcggcctgcgggtggactggcaggagaatgacttcagcaagaggatcctgaatgtgccccaggagctgtatgagaagggctacgtgaaggatgtggatgatggcctgcaggccgctgaggaggtgggctaccctgtgatgatcaaggccagcgagggcggcggcggcaagggcatcaggaaggtgaacaatgctgatgacttccccaacctcttccggcaggtgcaggccgaggtgcccggcagccccatctttgtgatgaggctggccaagcagagccgccacctggaggtgcagatcctggccgaccagtatggaaatgccatcagcctgtttggccgggactgcagcgtgcagaggaggcaccagaagatcatcgaggaggccccagccaccatcgccaccccagctgtgtttgagcacatggagcagtgtgctgtgaagctggccaagatggtgggctacgtgtctgctggcaccgtggagtacctgtacagccaggacggcagcttctacttcctggagctgaacccccggctgcaggtggagcacccctgcacagagatggtggctgatgtgaacctgcctgctgcccagctgcagatcgccatgggcatccccctgtaccgcatcaaggacatccgcatgatgtatggagtgagcccctggggagacagccccatcgactttgaggacagcgcccacgtgccctgcccccggggccacgtgattgctgcccgcatcaccagcgagaacccagatgagggcttcaagcccagcagcggcaccgtgcaggagctgaacttccgcagcaacaagaatgtgtggggctacttctctgtggccgctgctgggggcctgcatgaatttgctgacagccagtttggccactgcttctcctggggcgagaaccgggaggaggccatcagcaacatggtggtggccctgaaggagctgagcatccggggggacttccgcaccaccgtggagtacctgatcaagctgctggagacagagagcttccagatgaacagaattgacaccggctggctggaccggctgattgctgagaaggtgcaggccgagaggccagacaccatgctgggcgtggtgtgtggggccctgcacgtggctgatgtgtccctgaggaacagcgtgagcaacttcctgcacagcctggagcggggccaggtgctgcctgcccacaccctgctgaacacagtggatgtggagctgatctatgaaggagtgaagtatgtgctgaaggtgacccggcagagccccaacagctatgtggtgatcatgaatggcagctgtgtggaggtggatgtgcaccggctgagtgatggcggcctgctgctgtcctatgatggcagcagctacaccacctacatgaaggaggaggtggaccgctaccgcatcaccatcggcaacaagacctgtgtgtttgagaaggaaaatgaccccagcgtgatgaggagccccagcgctgggaagctgatccagtacatcgtggaggatggcggccacgtgtttgctggccagtgctacgcagaaattgaggtgatgaagatggtgatgaccctgacagctgtggagagcggctgcatccactacgtgaagaggcctggggccgccctggaccccggctgtgtgctggccaagatgcagctggacaaccccagcaaggtgcagcaggccgagctgcacacaggcagcctgccccgcatccagagcacagccctgcggggggagaagctgcacagggtcttccactacgtgctggacaacctggtgaatgtgatgaatggctactgcctgcctgaccccttcttcagcagcaaggtgaaggactgggtggagcggctgatgaagaccctgcgggaccccagcctgcccctgctggagctgcaggacatcatgacctctgtgtctggccgcatcccccccaacgtggagaagagcatcaagaaggagatggcccagtatgccagcaacatcacctctgtgctgtgccagttccccagccagcagatcgccaacatcctggacagccacgccgccaccctgaacaggaagtctgagcgggaggtgttcttcatgaacacccagagcatcgtgcagctggtgcagcgctaccgcagcggcatccggggccacatgaaggctgtggtgatggacctgctgcggcagtacctgcgggtggagacccagttccagaatggccactatgacaagtgtgtgtttgccctgcgggaggagaacaagagtgacatgaacacagtgctgaactacatcttcagccacgcccaggtgaccaagaagaacctgctggtgaccatgctgattgaccagctgtgtggccgggaccccaccctgacagatgagctgctgaacatcctgacagagctgacccagctgagcaagaccaccaatgccaaggtggccctgcgggcccggcaggtgctgattgccagccacctgcccagctatgagctgcggcacaaccaggtggagagcatcttcctgagcgccatcgacatgtatggccaccagttctgcatcgagaacctgcagaagctgatcctgtctgagaccagcatctttgatgtgctgcccaacttcttctaccacagcaaccaggtggtgaggatggccgccctggaggtgtatgtgcggcgggcctacatcgcctatgagctgaacagcgtgcagcaccggcagctgaaggacaacacctgtgtggtggagttccagttcatgctgcccaccagccaccccaacagaggcaacatccccaccctgaacaggatgtccttcagcagcaacctgaaccactacggcatgacccacgtggcctctgtgtctgatgtgctgctggacaacagcttcaccccaccctgccagaggatgggcggcatggtgtccttccgcacctttgaggactttgtgcgcatctttgatgaggtgatgggctgcttcagtgacagccccccccagagccccaccttccctgaggccggccacaccagcctgtatgatgaggacaaggtgcccagagatgagcccatccacatcctgaatgtggccatcaagacagactgtgacattgaagatgaccggctggccgccatgttccgggagttcacccagcagaacaaggccaccctggtggaccacggcatccggcggctgaccttcctggtggcccagaaggacttcaggaagcaggtgaactatgaggtggaccggcgcttccaccgggagttccccaagttcttcaccttccgggcccgggacaagtttgaagaagatcgcatctaccgccacctggagcccgccctggccttccagctggagctgaacaggatgaggaactttgacctgacagccatcccctgtgccaaccacaagatgcacctgtacctgggcgccgccaaggtggaggtgggcacagaggtgacagactaccgcttctttgtgcgggccatcatccgccacagcgacctggtgaccaaggaggccagctttgagtacctgcagaatgaaggagagcggctgctgctggaggccatggatgagctggaggtggccttcaacaacaccaacgtgaggacagactgcaaccacatcttcctgaactttgtgcccaccgtcatcatggaccccagcaagattgaggagagcgtgcgctccatggtgatgagatatggcagccggctgtggaagctgcgggtgctgcaggccgagctgaagatcaacatccggctgacccccaccgggaaggccatccccatccgcctcttcctgaccaatgaaagtggctactacctggacatcagcctgtacaaggaggtgacagacagcaggacagcccagatcatgttccaggcctacggggacaagcagggccccctgcacggcatgctgatcaacaccccctacgtgaccaaggacctgctgcagagcaagcgcttccaggcccagagcctgggcaccacctacatctatgacatccctgagatgttccggcagagcctcatcaagctgtgggagagcatgagcacccaggccttcctgcccagcccccccctgcccagcgacatgctgacctacacagagctggtgctggatgaccagggccagctggtgcacatgaaccggctgcccggcggcaatgagatcggcatggtggcctggaagatgaccttcaagagccctgagtacccagagggccgggacatcatcgtgattggaaatgacatcacctacagaattggcagctttggcccccaggaggacctgctcttcctgcgggccagcgagctggcccgggcagagggcatcccccgcatctacgtgtctgccaacagcggggccagaattggcctggccgaggagatccgccacatgttccacgtggcctgggtggaccctgaggacccctacaagggctaccgctacctgtacctgaccccccaggactacaagagggtgtctgccctgaacagcgtgcactgtgagcacgtggaggatgaaggagagagccgctacaagatcacagacatcatcggcaaggaggagggcatcggccctgagaacctgcggggcagcggcatgattgctggggagagcagcctggcctacaatgagatcatcaccatcagcctggtgacctgccgggccatcggcatcggggcctacctggtgcggctgggccagaggaccatccaggtggagaacagccacctgatcctgaccggggccggggccctgaacaaggtgctgggccgggaggtgtacaccagcaacaaccagctgggcggcatccagatcatgcacaacaatggagtgacccactgcaccgtgtgtgatgactttgagggcgtcttcaccgtgctgcactggctgagctacatgcccaagtctgtgcacagctctgtgcccctgctgaacagcaaggaccccatcgaccgcatcatcgagtttgtgcccaccaagaccccctatgacccccgctggatgctggccggccggccccaccccacccagaagggccagtggctgagcggcttctttgattatggcagcttcagcgagatcatgcagccctgggcccagacagtggtggtgggccgggcccggctgggcggcatccctgtgggcgtggtggccgtggagaccaggacagtggagctgagcatcccagctgaccctgccaacctggacagcgaggccaagatcatccagcaggccggccaggtgtggttcccagattctgccttcaagacctaccaggccatcaaggacttcaaccgggagggcctgcccctgatggtgtttgccaactggaggggcttcagcggcggcatgaaggacatgtatgaccaggtgctgaagtttggagcctacatcgtggatggcctgcgggagtgctgccagcctgtgctggtgtacatccccccccaggccgagctgcggggcggctcctgggtggtgattgacagcagcatcaaccccaggcacatggagatgtatgctgaccgggagagccggggctctgtgctggagcctgagggcaccgtggagatcaagttccggaggaaggacctggtgaagaccatgagaagagtggaccctgtgtacatccacctggccgagcggctgggcaccccagagctgagcacagctgagaggaaggagctggagaacaagctgaaggagcgggaggagttcctgatccccatctaccaccaggtggccgtgcagtttgctgacctgcatgacaccccaggccgcatgcaggagaagggcgtcatcagtgacatcctggactggaagaccagcaggaccttcttctactggaggctgcggcggctgctgctggaggacctggtgaagaagaagatccacaatgccaaccctgagctgacagatggccagatccaggccatgctgcggcgctggtttgtggaggtggagggcaccgtgaaggcctacgtgtgggacaacaacaaggacctggccgagtggctggagaagcagctgacagaggaggatggagtgcacagcgtgattgaggagaacatcaagtgcatcagccgggactatgtgctgaagcagatccgcagcctggtgcaggccaaccctgaggtggccatggacagcatcatccacatgacccagcacatcagccccacccagagagctgaggtgatccgcatcctgagcaccatggacagccccagcacctag

SEQ ID NO: 260505 - DNA, 129 bp, Artificial Sequence
  derived and/or modified sequence
atgagcggcctgcacctggtgaagcagggccgggacaggaagaagattgacagccagagggacttcaccgtggccagccctgctgagtttgtgaccaggtttggaggcaacaaggtgattgagaagtag

SEQ ID NO: 260506 - DNA, 234 bp, Artificial Sequence
  derived and/or modified sequence
atggatgagcccagccccctggcccagcccctggagctgaaccagcacagccgcttcatcatcggctctgtgtctgaggacaacagtgaagatgagatcagcaacctggtgaagctggacctgctggaggagaaggagggcagcctgagccctgcctctgtgggcagtgacaccctgagtgacctgggcatcagcagcctgcaggacggcctggccctgcacatccggctgtag

SEQ ID NO: 260507 - DNA, 363 bp, Artificial Sequence
  derived and/or modified sequence
atggatgagcccagccccctggcccagcccctggagctgaaccagcacagccgcttcatcatcggctctgtgtctgaggacaacagtgaagatgagatcagcaacctggtgaagctggacctgctggaggagaaggagggcagcctgagccctgcctctgtgggcagtgacaccctgagtgacctgggcatcagcagcctgcaggacggcctggccctgcacatccgcagctccatgagcggcctgcacctggtgaagcagggccgggacaggaagaagattgacagccagagggacttcaccgtggccagccctgctgagtttgtgaccaggtttggaggcaacaaggtgattgagaagtag

SEQ ID NO: 260508 - DNA, 7113 bp, Artificial Sequence
  derived and/or modified sequence
tccttctggaagtggatcagcacccagacagtgcgcatcatccgggctgtgcgggcccactttggaggcatcatggatgagcccagccccctggcccagcccctggagctgaaccagcacagccgcttcatcatcggctctgtgtctgaggacaacagtgaagatgagatcagcaacctggtgaagctggacctgctggaggagaaggagggcagcctgagccctgcctctgtgggcagtgacaccctgagtgacctgggcatcagcagcctgcaggacggcctggccctgcacatccgcagctccatgagcggcctgcacctggtgaagcagggccgggacaggaagaagattgacagccagagggacttcaccgtggccagccctgctgagtttgtgaccaggtttggaggcaacaaggtgattgagaaggtgctgattgccaacaacggcattgctgctgtgaagtgcatgaggagcatccgccgctggagctatgagatgttcagaaatgaaagagccatccgctttgtggtgatggtgaccccagaggacctgaaggccaatgctgagtacatcaagatggctgaccactacgtgcctgtgcctgggggccccaacaacaacaactatgccaacgtggagctgatcctggacatcgccaagagaattcctgtgcaggccgtgtgggccggctggggccacgccagcgagaaccccaagctgcctgagctgctgctgaagaatggaattgccttcatgggcccccccagccaggccatgtgggccctgggggacaagatcgccagcagcatcgtggcccagacagctggcatccccaccctgccctggagcggcagcggcctgcgggtggactggcaggagaatgacttcagcaagaggatcctgaatgtgccccaggagctgtatgagaagggctacgtgaaggatgtggatgatggcctgcaggccgctgaggaggtgggctaccctgtgatgatcaaggccagcgagggcggcggcggcaagggcatcaggaaggtgaacaatgctgatgacttccccaacctcttccggcaggtgcaggccgaggtgcccggcagccccatctttgtgatgaggctggccaagcagagccgccacctggaggtgcagatcctggccgaccagtatggaaatgccatcagcctgtttggccgggactgcagcgtgcagaggaggcaccagaagatcatcgaggaggccccagccaccatcgccaccccagctgtgtttgagcacatggagcagtgtgctgtgaagctggccaagatggtgggctacgtgtctgctggcaccgtggagtacctgtacagccaggacggcagcttctacttcctggagctgaacccccggctgcaggtggagcacccctgcacagagatggtggctgatgtgaacctgcctgctgcccagctgcagatcgccatgggcatccccctgtaccgcatcaaggacatccgcatgatgtatggagtgagcccctggggagacagccccatcgactttgaagattctgcccacgtgccctgcccccggggccacgtgattgctgcccgcatcaccagtgaaaatccagatgagggcttcaagcccagcagcggcaccgtgcaggagctgaacttccgcagcaacaagaatgtgtggggctacttctctgtggccgccgccggcggcctgcacgagtttgctgacagccagtttggccactgcttctcctggggagaaaatcgggaggaggccatcagcaacatggtggtggccctgaaggagctgagcatccggggggacttccgcaccaccgtggagtacctgatcaagctgctggagacagagagcttccagatgaacagaattgacaccggctggctggaccggctgattgctgagaaggtgcaggccgagaggccagacaccatgctgggcgtggtgtgtggggccctgcacgtggctgatgtgtccctgagaaattctgtgagcaacttcctgcacagcctggagcggggccaggtgctgcctgcccacaccctgctgaacacagtggatgtggagctgatctatgagggcgtgaagtatgtgctgaaggtgacccggcagagccccaacagctatgtggtgatcatgaatggcagctgtgtggaggtggatgtgcaccggctgagtgatggcggcctgctgctgtcctatgatggcagcagctacaccacctacatgaaggaggaggtggaccgctaccgcatcaccatcggcaacaagacctgtgtgtttgagaaggaaaatgaccccagcgtgatgaggagccccagcgctgggaagctgatccagtacatcgtggaggatggcggccacgtgtttgctggccagtgctacgccgagattgaggtgatgaagatggtgatgaccctgacagctgtggagagcggctgcatccactacgtgaagaggcctggagctgccctggaccccggctgtgtgctggccaagatgcagctggacaaccccagcaaggtgcagcaggccgagctgcacacaggcagcctgccccgcatccagagcacagccctgcggggggagaagctgcacagggtcttccactacgtgctggacaacctggtgaatgtgatgaatggctactgcctgcctgaccccttcttcagcagcaaggtgaaggactgggtggagcggctgatgaagaccctgcgggaccccagcctgcccctgctggagctgcaggacatcatgacctctgtgtctggccgcatccccccaaatgtggagaagagcatcaagaaggagatggcccagtatgccagcaacatcacctctgtgctgtgccagttccccagccagcagatcgccaacatcctggacagccatgctgccaccctgaacaggaagtctgagcgggaggtgttcttcatgaacacccagagcatcgtgcagctggtgcagcgctacagaagtggcatccggggccacatgaaggctgtggtgatggacctgctgcggcagtacctgcgggtggagacccagttccagaatggccactatgacaagtgtgtgtttgccctgcgggaggagaacaagagtgacatgaacacagtgctgaactacatcttcagccacgcccaggtgaccaagaagaacctgctggtgaccatgctgattgaccagctgtgtggccgggaccccaccctgacagatgagctgctgaacatcctgacagagctgacccagctgagcaagaccaccaatgccaaggtggccctgcgggcccggcaggtgctgattgccagccacctgcccagctatgagctgcggcacaaccaggtggagagcatcttcctgagcgccatcgacatgtatggccaccagttctgcatcgagaacctgcagaagctgatcctgtctgagaccagcatctttgatgtgctgcccaacttcttctaccacagcaaccaggtggtgaggatggccgccctggaggtgtatgtgagaagagcctacatcgcctatgagctgaacagcgtgcagcaccggcagctgaaggacaacacctgtgtggtggagttccagttcatgctgcccaccagccaccccaacagaggcaacatccccaccctgaacaggatgtccttcagcagcaacctgaaccactacggcatgacccacgtggcctctgtgtctgatgtgctgctggacaacagcttcaccccaccctgccagaggatgggcggcatggtgtccttccgcacctttgaagattttgtgcgcatctttgatgaggtgatgggctgcttcagtgacagccccccccagagccccaccttccctgaggccggccacaccagcctgtatgatgaggacaaggtgcccagagatgagcccatccacatcctgaatgtggccatcaagacagactgtgacattgaagatgaccggctggccgccatgttccgggagttcacccagcagaacaaggccaccctggtggaccacggcatccggcggctgaccttcctggtggcccagaaggacttcaggaagcaggtgaactatgaggtggaccggcgcttccaccgggagttccccaagttcttcaccttccgggcccgggacaagtttgaggaggaccgcatctaccgccacctggagcccgccctggccttccagctggagctgaacaggatgaggaactttgacctgacagccatcccctgtgccaaccacaagatgcacctgtacctgggcgccgccaaggtggaggtgggcacagaggtgacagactaccgcttctttgtgcgggccatcatccgccacagcgacctggtgaccaaggaggccagctttgagtacctgcagaatgaaggagagcggctgctgctggaggccatggatgagctggaggtggccttcaacaacaccaacgtgaggacagactgcaaccacatcttcctgaactttgtgcccaccgtcatcatggaccccagcaagattgaggagagcgtgcgctccatggtgatgagatatggcagccggctgtggaagctgcgggtgctgcaggccgagctgaagatcaacatccggctgacccccaccgggaaggccatccccatccgcctcttcctgaccaatgaaagtggctactacctggacatcagcctgtacaaggaggtgacagacagcaggacagcccagatcatgttccaggcctatggagacaagcagggccccctgcacggcatgctgatcaacaccccctacgtgaccaaggacctgctgcagagcaagcgcttccaggcccagagcctgggcaccacctacatctatgacatccctgagatgttccggcagagcctcatcaagctgtgggagagcatgagcacccaggccttcctgcccagcccccccctgcccagcgacatgctgacctacacagagctggtgctggatgaccagggccagctggtgcacatgaaccggctgcccggcggcaatgaaattggcatggtggcctggaagatgaccttcaagagccctgagtacccagagggccgggacatcatcgtgattggaaatgacatcacctaccgcatcggcagctttggcccccaggaggacctgctcttcctgcgggccagcgagctggcccgggcagagggcatcccccgcatctacgtgtctgccaacagcggggcccgcatcggcctggccgaggagatccgccacatgtttcatgtggcctgggtggaccctgaggacccctacaagggctaccgctacctgtacctgaccccccaggactacaagagggtgtctgccctgaacagcgtgcactgtgaacatgtggaggatgaaggagagagccgctacaagatcacagacatcatcggcaaggaggagggcatcggccctgagaacctgcggggcagcggcatgattgctggggagagcagcctggcctacaatgagatcatcaccatcagcctggtgacctgccgggccatcggcattggagcctacctggtgcggctgggccagaggaccatccaggtggagaacagccacctgatcctgactggagctggggccctgaacaaggtgctgggccgggaggtgtacaccagcaacaaccagctgggcggcatccagatcatgcacaacaacggggtgacccactgcaccgtgtgtgatgactttgaaggagtcttcaccgtgctgcactggctgagctacatgcccaagtctgtgcacagctctgtgcccctgctgaacagcaaggaccccatcgaccgcatcattgaatttgtgcccaccaagaccccctatgacccccgctggatgctggccggccggccccaccccacccagaagggccagtggctgagcggcttctttgattatggcagcttcagcgagatcatgcagccctgggcccagacagtggtggtgggccgggcccggctgggcggcatccctgtgggcgtggtggccgtggagaccaggacagtggagctgagcatcccagctgaccctgccaacctggacagcgaggccaagatcatccagcaggccggccaggtgtggttcccagacagcgccttcaagacctaccaggccatcaaggacttcaaccgggagggcctgcccctgatggtgtttgccaactggaggggcttcagcggcggcatgaaggacatgtatgaccaggtgctgaagtttggagcctacatcgtggatggcctgcgggagtgctgccagcctgtgctggtgtacatccccccccaggccgagctgcggggcggctcctgggtggtgattgacagcagcatcaaccccaggcacatggagatgtatgctgaccgggagagccggggctctgtgctggagcctgagggcaccgtggagatcaagttccggaggaaggacctggtgaagaccatgagaagagtggaccctgtgtacatccacctggccgagcggctgggcaccccagagctgagcacagctgagaggaaggagctggagaacaagctgaaggagcgggaggagttcctgatccccatctaccaccaggtggccgtgcagtttgctgacctgcatgacaccccaggccgcatgcaggagaagggcgtcatcagtgacatcctggactggaagaccagcaggaccttcttctactggaggctgcggcggctgctgctggaggacctggtgaagaagaagatccacaatgccaaccctgagctgacagatggccagatccaggccatgctgcggcgctggtttgtggaggtggagggcaccgtgaaggcctacgtgtgggacaacaacaaggacctggccgagtggctggagaagcagctgacagaagaagatggagtgcacagcgtcatcgaggagaacatcaagtgcatcagccgggactatgtgctgaagcagatccgcagcctggtgcaggccaaccctgaggtggccatggacagcatcatccacatgacccagcacatcagccccacccagagagctgaggtgatccgcatcctgagcaccatggacagccccagcacctag

SEQ ID NO: 260509 - DNA, 144 bp, Artificial Sequence
  derived and/or modified sequence
atggatgagcccagccccctggcccagcccctggagctgaaccagcacagccgcttcatcatcggctctgtgtctgaggacaacagtgaagatgagatcagcaacctggtgaagctggacctgctggaggagaaggagggctag

SEQ ID NO: 260510 - DNA, 9962 bp, Artificial Sequence
  derived and/or modified sequence
gccctcttggccttttcccggtccccgccgcgcgcctgctgctgtccccgtgcccgaggactgggaggatggggctgagccgcttgcctgacttttgatccgaccagtaatcactttgcccgtgtggcgcgtggcccgttgcctgaggcttcctggcgcgtggggctgtttggtcccctccggagtgcggtgaggcgggccgagccgggactgcctgggtttggggataacgttcccatctccacccctgttgcagcaagggaaattgaggctgagggaactgggcccagggacggcgagccgtggctgcctctccagtccgggccccgaagggctgctcgtggatgaaccagactgattttaaggggtgaagagggtgcgtttcaatcagatgcttctggaacgtcgaaattgtcttctttggaaagaaccatcccctctttgggcttcagaggcccaaattgaggcgcaatgatgagaggatgtggtggtctactctgatgtcaatcttgagggctaggtctttctggaagtggatatctactcagacagtaagaattataagagctgtaagagctcattttggaggaataatggatgaaccatctcccttggcccaacctctggagctgaaccagcactctcgattcataataggttctgtgtctgaagataactcagaggatgagatcagcaacctggtgaagttggacctactggaggagaaggagggctccttgtcacctgcttctgttggctcagatacactctctgatttggggatctctagcctacaggatggcttggccttgcacataaggtccagcatgtctggcttgcacctagtaaagcagggccgagacagaaagaaaatagattctcaacgagatttcactgtggcttctccagcagaatttgttactcgctttgggggaaataaagtgattgagaaggttcttattgctaacaatggcattgcagcagtgaaatgcatgcggtctatccgtaggtggtcttatgaaatgtttcgaaatgaacgtgcaattagattcgttgtcatggtcacacctgaagaccttaaagccaatgcagaatacattaagatggcagatcactatgtgccagtgcctggaggaccaaacaacaacaactatgcaaatgtggaattaattcttgatattgctaaaaggatcccagtacaagcagtgtgggctggctggggtcatgcttctgagaatcccaaactaccggaacttctcttgaaaaatggcattgccttcatgggtcctccaagccaggccatgtgggctttaggggataagattgcatcttccatagtggctcaaactgcaggtatcccaactcttccctggagcggcagtggtcttcgtgtggactggcaggaaaatgatttttcaaaacgtatcttaaatgttccccaggagctatatgaaaaaggttatgtgaaagatgtggatgatgggctacaggcagctgaggaagttggatatccagtaatgatcaaggcctcagagggaggaggagggaagggaattagaaaagtcaacaatgcagatgacttccctaatctcttcagacaggttcaagctgaagttcctggatctcccatatttgtgatgagactagccaaacaatctcgtcatctggaggtgcagatcttagcggaccaatatggcaatgctatctctttgtttggtcgtgattgctctgtacaacgcaggcatcagaagattattgaagaagcacctgctactattgctactccagcagtatttgaacacatggaacagtgtgcggtgaaacttgccaaaatggtgggttatgtgagtgctgggactgtggaatacctgtacagccaggatggcagcttctactttctggaattgaatcctcggctgcaggtagagcacccttgtacagagatggtggctgatgtcaatctccctgcagcacagctccagattgccatggggattcctctatatagaatcaaggatatccgtatgatgtatggggtatctccctggggtgattctcccattgattttgaagattctgcacacgttccttgtccaaggggccatgttattgctgctcggatcactagtgaaaatccagatgagggttttaagcccagctcaggaacagttcaggagctaaatttccgcagcaataagaatgtttggggatatttcagtgttgctgctgcagggggacttcatgaatttgctgattctcagtttggtcactgcttttcttggggagaaaacagagaagaggcaatttcaaacatggtggtggctttgaaggagctgtctattcggggtgactttcgaactacagttgaatacctgatcaaattgttagagactgaaagctttcagatgaacagaattgatactggctggctggacagactgatagcagaaaaagtacaggctgagcgacctgacaccatgttgggggttgtgtgtggtgccctccacgtggcagatgtgagcctgcggaatagcgtctctaacttccttcactccttagaaaggggtcaagtccttcctgctcatacacttctgaatacagtagatgttgaacttatctatgagggagtcaagtatgtacttaaggtgactcgacagtcccccaactcctatgtggtgatcatgaatggctcatgtgtagaagtagatgtacatcggctgagtgacggtggactgctcttgtcctatgatggcagcagttatactacgtatatgaaagaggaagtggatagatatcgcatcacaattggcaataaaacctgtgtgtttgagaaggaaaatgacccatcggtgatgcgctcaccttctgctgggaagttaatccagtacattgtagaagatggaggtcatgtgtttgccggccagtgctatgctgagattgaggtaatgaagatggtaatgaccttaacagctgtggagtctggctgtatccattacgtcaagcgacctggagcagctcttgaccctggctgtgtactagccaaaatgcaactggacaaccccagcaaggttcagcaggctgaacttcacacaggtagtctgccacggatccagagcacggcactcagaggcgagaaactccatcgagtgttccattatgtcctggataatctggtcaatgtaatgaatggatactgccttccagatcctttctttagcagcaaggtaaaagactgggtagagcgattgatgaaaaccctcagagatccctccctgcctctcctagaattgcaagatattatgaccagtgtgtctggccgcattccccccaatgtggagaagtctatcaagaaggaaatggctcagtatgctagcaacatcacatcagtcctctgtcagtttcccagccagcagattgcaaacatcctagatagccatgcagctacattgaaccggaaatctgaacgggaagtcttctttatgaatactcagagcattgttcagctggtacagaggtaccgaagtggcatccgaggccacatgaaggctgtggtgatggatctgctccggcagtacctgcgagtagagacacaattccagaatggtcactatgacaaatgtgtattcgccctccgagaagagaataaaagtgacatgaacactgtactgaactacatcttctctcacgctcaagtcaccaagaagaatcttctggtcacaatgcttattgatcagttgtgtggccgggaccctactctcactgatgagctgctgaatattctcacagagctaactcaactcagtaagaccaccaatgccaaagtagcacttcgagcacgccaggttcttattgcctcccatttgccatcatatgagcttcgccataaccaagtagagtctatcttcctatcagctattgacatgtatggacatcaattttgcattgagaacctgcagaaactcatcctatcagaaacatctatttttgatgtcctaccaaacttcttctatcacagcaaccaagtagtgaggatggcagctctggaggtgtatgttcgaagggcttatattgcctatgaacttaacagcgtacaacaccgccagcttaaggacaacacctgtgtggtggaattccagttcatgctgcccacatctcatccaaacagagggaacatccctacgctaaacagaatgtccttctcctccaacctcaaccactatggcatgacccatgtagctagtgtcagcgatgtactgttggacaactcattcactccaccttgtcagcggatgggcggaatggtctcttttcggacttttgaagattttgtcaggatctttgatgaagtgatgggctgcttctctgactccccaccccagagtcccacattccctgaggcaggtcacacgtctctttatgatgaggataaggttcccagggatgaaccaattcacattctcaatgtggctatcaagactgactgtgatattgaggatgacaggctggcagctatgttcagagaatttacccagcaaaataaagctaccctggttgaccatgggatccggcgccttactttcctggttgcacaaaaggatttcagaaagcaggtcaactatgaggtggatcggagatttcatagagaattccctaaattttttacattccgagcaagggataagtttgaggaggatcgtatctatcgtcatctggagcctgctctggctttccagttagagctgaaccggatgagaaattttgacctcactgccattccatgtgctaatcacaagatgcacctgtatctcggggcagccaaggtggaagtgggcacagaagtgacagactacaggttctttgttcgtgcaatcatcaggcattctgatctggtcaccaaggaagcttcttttgaatatctgcaaaatgaaggggagcggctactcctggaagccatggatgagttggaagttgcttttaacaatacaaatgtccgcactgactgtaaccacatcttcctcaactttgtgcccacggttatcatggacccatcaaagattgaggaatccgtgcggagcatggtaatgcggtatggaagtcgcctgtggaaattgcgcgtcctccaggcagaactgaaaatcaacattcgcctgacgccaactggaaaagcaattcccatccgcctcttcctgacaaacgagtctggctattacttggatatcagcctatacaaggaagtgactgactccaggacagcacagatcatgtttcaggcatatggagacaaacagggaccactgcatggaatgttaatcaatactccatatgtgaccaaagacctgctgcaatcaaagaggttccaggcacaatccttagggacaacatacatatatgatatcccagagatgtttcggcagtccctgatcaaactctgggagtctatgtccactcaagcatttcttccatctccccctctgccttctgacatgctgacttacactgaactggtactggatgatcaaggtcagctggtccacatgaacaggcttccaggaggaaatgagattggcatggtagcttggaaaatgacctttaaaagtcctgaatatccagaaggccgagatatcattgttattggcaatgacatcacataccgaattgggtcctttgggcctcaagaggatttgttatttctcagagcttccgaacttgctagggcagaaggtattccacgcatctatgtatcagccaacagtggagcaagaatcggactggcagaagaaattcgccatatgtttcatgtggcctgggtagatcctgaggatccttacaagggatacaggtatttatatctgactcctcaagattataagagagtcagtgctctcaactctgtccattgtgaacacgtggaagatgaaggagaatccaggtacaagataacagatattattgggaaagaagagggaattggacccgagaaccttcgaggttctggaatgattgctggagaatcctcattggcctataatgagatcattaccatcagcctggtgacgtgccgggccattgggattggggcttaccttgtccggctgggacagagaaccatccaggttgagaattctcacttaattctaacaggagctggagccctcaacaaagtcctcgggcgggaagtgtacacctccaataaccagctggggggcatccagattatgcacaacaatggggtgacccactgcactgtgtgtgatgactttgaaggggttttcactgtcctgcactggctgtcttacatgcccaagagcgtgcacagttcagttcctcttctgaactcaaaggatcctatagacagaatcatcgagtttgttcccacaaagaccccatacgatcctcgatggatgctagcaggccgtcctcacccaacccaaaaaggtcagtggttgagtggcttttttgactatggatctttctcagagattatgcagccctgggcacagactgtggtggttggtagagccaggctaggaggaatacctgtgggagttgttgctgtagaaacccgaacagtagaactaagtatcccagctgatccagcaaacctggattctgaagccaagataatccagcaggctggccaggtttggttcccagattctgcgtttaagacatatcaggccatcaaggacttcaaccgggaagggctgcctctgatggtctttgccaactggagaggcttctctggtggaatgaaagatatgtacgaccaagtgctgaagtttggtgcttacattgtggatggcttgagggagtgctgccagcctgtgctggtttacattcctccccaggctgagctgcggggtggctcctgggtggtgattgactcctccatcaacccccggcacatggagatgtatgctgaccgagaaagcaggggatctgttctggagccagaagggacagtagaaatcaaattccgcagaaaggatctggtgaaaaccatgcgtcgggtggacccagtctacatccacttggctgagcgattggggaccccagagctaagcacagctgagcggaaggagttggagaacaagttgaaggagcgggaggaattcctaattcccatttaccatcaggtagccgtgcagtttgctgacttgcacgacacaccaggccggatgcaggagaagggtgttattagcgatatcctggattggaaaacatcccgtaccttcttctactggcggctgaggcgtcttctgctggaggacctggtcaagaagaaaatccacaatgccaaccctgagctgactgatggccagattcaagccatgttaaggcgctggtttgtggaagtggaaggaacagtgaaggcttatgtttgggacaataataaggatctggcggagtggctagagaaacagctgacagaggaggatggtgttcactcggtaatagaggaaaacatcaaatgcatcagcagagactacgtcctcaagcaaatccgcagcttggtccaggccaatccagaggttgccatggattccatcatccatatgacgcagcacatatcacccactcagcgagcagaagtcatacggatcctctccacaatggattccccttccacgtaggaagagcttcctgcctgtccctgccctgtctctggagaaaagggctagagctgccttttacaactgtaaccactgtaatgagaaggcacaggagacccagcactggagtcaaatggcattttacttcctctcgtttcaggttatgcatgacatcctgggatgtaagatcacagaatccccctccagcccaccagtcacacctaccccattcagtatttattaccctggccaggcctagtcctccactccctgcacaggactgagaaggcaatgaaaggtacaaacatgtaccatgaggtcttactaaccaaagtagggctgcccctcctgtcctgacagccccttggcctcccagcatggggaagcgtgaggagttgcccagcagtgagcagcccccctcactcctggccccatgagccgcagccacaggcagcagaggagggctaaggagaggaggaagcctcaagtccattgtttattaccccgactcttagcccagcacacagtaggcactggagaggaatgattcccagtttaaccacactacggtaccttttatgaagaaaaattagagcataaaatctactacaagctccataggaactcaaagatgagggcaaaactgtgagccaagaagcagagaaagaaaatagaaccagttattcttgatttaggggacctcaaccttgggttcagtctctgaggacaaagggaaaggtagttgttggcctgcctctcgcctgcacgtcactgctggactagctgtcgcatgtggctgggagctgcaaggccagtgcttgaggggccccagcagttccacaggtggtgaagcctgagttggcagaggaggagccagaagagaactgccctttctgcactggtggaaactagttatttatgccatgtggagagccagtgagatagatagatagtctgtttgttttgaggacttggaaagttgttcctatgaagcctggagcttggatggttttgagaggttaatggtgcctccacactcactcttccctagttccaggattactgtcctagcagctaacggttctactctcttccccagagtgtagacaggcagcaggtctccccacagctctgaaaggaccctggtgacagctacaccctcagcaccaggagctggccttcctgatgagggaggcttccaggaaacacagaatccacatgaccttaagattatttacaactcagtcatggtgctgctgtcctccaggcttactggcccctcctgactggcatcaggggcttcctcaggtggtggagagagtttactttcaacaactagtttattcaagaaaagaacttactgattcctctgttcctaaagcaagagtggcaggtgatcagggctggtgtagcatccggttcctttagtgcagctaactgcatttgtcactgatgaccaaggaggaaatcactaagacatttgagaagcagtggtatgaacgttcttggacaagccacagttctgagccttaaccctgtagtttgcacacaagaacgagctccacctccccttcttcaggaggaatctgtgcggatagattggctggacttttcaatggttctgggttgcaggtgggcactgtatggctgggtatggagcggacagcccccaggagtcagagcctcagcccggctgccctggtggaaggtacaggtgttcagcaccttcagaaaagggcataaagtggtgggggacaattctcagtccaggaaaatgcattgaccattgctggctatttgcttacctagtaagaattggattcatttttgaccagattattcttctatgcttttttgcaataaatcaaatcccacatatctacaagtggtatgaagtcctgcaccccccaggaggcctgtccaggcatgtcttcagaggcagggtgggttacactcatttacctcccctctccccaccaaattatgacacaaacgagtatgtttcctctctagaaccctgtaatgcctcctcccccatccccagagctccttactgtaggtcttaccctggacaaggattttttcaagttggaggcacagaacatgagcaatctgacattcccacagcccctcaaacatgcaaggctactaaggcaggaggagtataaatgatggatattgaccaagacctgcttggacggagaccgccatattatctgttctcttcgttcacaaaacagccttcacttgtctcagaatttgatggacacatactgtgatgagcaggagcttcagatgcactctttacacattttgttgaaataaacctctacatttgtagaagagtta

SEQ ID NO: 260511 - DNA, 662 bp, Artificial Sequence
  derived and/or modified sequence
cggcctggtgctgcacgcctgtcagccatcgcccgagccgccggcgtctcctcccgcccagcagttcctccacgcaggggctccggaatcgcccgaccgcacacgttgccaccctgaggtctttctggaagtggatatctactcagacagtaagaattataagagctgtaagagctcattttggaggaataatggatgaaccatctcccttggcccaacctctggagctgaaccagcactctcgattcataataggttctgtgtctgaagataactcagaggatgagatcagcaacctggtgaagttggacctactggaggagaaggagggctccttgtcacctgcttctgttggctcagatacactctctgatttggggatctctagcctacaggatggcttggccttgcacataagactttgaaatactcgtgggatatgaagtggaggtgcctagagggttgaagataatgaggacagatgaagaaatgtttgattgtgccatacttacagttgctgattttcaaggtccagcatgtctggcttgcacctagtaaagcagggccgagacagaaagaaaatagattctcaacgagatttcactgtggcttctccagcagaatttgttactcgctttgggggaaataaagtgattgagaag

SEQ ID NO: 260512 - DNA, 9554 bp, Artificial Sequence
  derived and/or modified sequence
cggcctggtgctgcacgcctgtcagccatcgcccgagccgccggcgtctcctcccgcccagcagttcctccacgcaggggctccggaatcgcccgaccgcacacgttgccaccctgaggtctttctggaagtggatatctactcagacagtaagaattataagagctgtaagagctcattttggaggaataatggatgaaccatctcccttggcccaacctctggagctgaaccagcactctcgattcataataggttctgtgtctgaagataactcagaggatgagatcagcaacctggtgaagttggacctactggaggagaaggagggctccttgtcacctgcttctgttggctcagatacactctctgatttggggatctctagcctacaggatggcttggccttgcacataaggtccagcatgtctggcttgcacctagtaaagcagggccgagacagaaagaaaatagattctcaacgagatttcactgtggcttctccagcagaatttgttactcgctttgggggaaataaagtgattgagaaggttcttattgctaacaatggcattgcagcagtgaaatgcatgcggtctatccgtaggtggtcttatgaaatgtttcgaaatgaacgtgcaattagattcgttgtcatggtcacacctgaagaccttaaagccaatgcagaatacattaagatggcagatcactatgtgccagtgcctggaggaccaaacaacaacaactatgcaaatgtggaattaattcttgatattgctaaaaggatcccagtacaagcagtgtgggctggctggggtcatgcttctgagaatcccaaactaccggaacttctcttgaaaaatggcattgccttcatgggtcctccaagccaggccatgtgggctttaggggataagattgcatcttccatagtggctcaaactgcaggtatcccaactcttccctggagcggcagtggtcttcgtgtggactggcaggaaaatgatttttcaaaacgtatcttaaatgttccccaggagctatatgaaaaaggttatgtgaaagatgtggatgatgggctacaggcagctgaggaagttggatatccagtaatgatcaaggcctcagagggaggaggagggaagggaattagaaaagtcaacaatgcagatgacttccctaatctcttcagacaggttcaagctgaagttcctggatctcccatatttgtgatgagactagccaaacaatctcgtcatctggaggtgcagatcttagcggaccaatatggcaatgctatctctttgtttggtcgtgattgctctgtacaacgcaggcatcagaagattattgaagaagcacctgctactattgctactccagcagtatttgaacacatggaacagtgtgcggtgaaacttgccaaaatggtgggttatgtgagtgctgggactgtggaatacctgtacagccaggatggcagcttctactttctggaattgaatcctcggctgcaggtagagcacccttgtacagagatggtggctgatgtcaatctccctgcagcacagctccagattgccatggggattcctctatatagaatcaaggatatccgtatgatgtatggggtatctccctggggtgattctcccattgattttgaagattctgcacacgttccttgtccaaggggccatgttattgctgctcggatcactagtgaaaatccagatgagggttttaagcccagctcaggaacagttcaggagctaaatttccgcagcaataagaatgtttggggatatttcagtgttgctgctgcagggggacttcatgaatttgctgattctcagtttggtcactgcttttcttggggagaaaacagagaagaggcaatttcaaacatggtggtggctttgaaggagctgtctattcggggtgactttcgaactacagttgaatacctgatcaaattgttagagactgaaagctttcagatgaacagaattgatactggctggctggacagactgatagcagaaaaagtacaggctgagcgacctgacaccatgttgggggttgtgtgtggtgccctccacgtggcagatgtgagcctgcggaatagcgtctctaacttccttcactccttagaaaggggtcaagtccttcctgctcatacacttctgaatacagtagatgttgaacttatctatgagggagtcaagtatgtacttaaggtgactcgacagtcccccaactcctatgtggtgatcatgaatggctcatgtgtagaagtagatgtacatcggctgagtgacggtggactgctcttgtcctatgatggcagcagttatactacgtatatgaaagaggaagtggatagatatcgcatcacaattggcaataaaacctgtgtgtttgagaaggaaaatgacccatcggtgatgcgctcaccttctgctgggaagttaatccagtacattgtagaagatggaggtcatgtgtttgccggccagtgctatgctgagattgaggtaatgaagatggtaatgaccttaacagctgtggagtctggctgtatccattacgtcaagcgacctggagcagctcttgaccctggctgtgtactagccaaaatgcaactggacaaccccagcaaggttcagcaggctgaacttcacacaggtagtctgccacggatccagagcacggcactcagaggcgagaaactccatcgagtgttccattatgtcctggataatctggtcaatgtaatgaatggatactgccttccagatcctttctttagcagcaaggtaaaagactgggtagagcgattgatgaaaaccctcagagatccctccctgcctctcctagaattgcaagatattatgaccagtgtgtctggccgcattccccccaatgtggagaagtctatcaagaaggaaatggctcagtatgctagcaacatcacatcagtcctctgtcagtttcccagccagcagattgcaaacatcctagatagccatgcagctacattgaaccggaaatctgaacgggaagtcttctttatgaatactcagagcattgttcagctggtacagaggtaccgaagtggcatccgaggccacatgaaggctgtggtgatggatctgctccggcagtacctgcgagtagagacacaattccagaatggtcactatgacaaatgtgtattcgccctccgagaagagaataaaagtgacatgaacactgtactgaactacatcttctctcacgctcaagtcaccaagaagaatcttctggtcacaatgcttattgatcagttgtgtggccgggaccctactctcactgatgagctgctgaatattctcacagagctaactcaactcagtaagaccaccaatgccaaagtagcacttcgagcacgccaggttcttattgcctcccatttgccatcatatgagcttcgccataaccaagtagagtctatcttcctatcagctattgacatgtatggacatcaattttgcattgagaacctgcagaaactcatcctatcagaaacatctatttttgatgtcctaccaaacttcttctatcacagcaaccaagtagtgaggatggcagctctggaggtgtatgttcgaagggcttatattgcctatgaacttaacagcgtacaacaccgccagcttaaggacaacacctgtgtggtggaattccagttcatgctgcccacatctcatccaaacagagggaacatccctacgctaaacagaatgtccttctcctccaacctcaaccactatggcatgacccatgtagctagtgtcagcgatgtactgttggacaactcattcactccaccttgtcagcggatgggcggaatggtctcttttcggacttttgaagattttgtcaggatctttgatgaagtgatgggctgcttctctgactccccaccccagagtcccacattccctgaggcaggtcacacgtctctttatgatgaggataaggttcccagggatgaaccaattcacattctcaatgtggctatcaagactgactgtgatattgaggatgacaggctggcagctatgttcagagaatttacccagcaaaataaagctaccctggttgaccatgggatccggcgccttactttcctggttgcacaaaaggatttcagaaagcaggtcaactatgaggtggatcggagatttcatagagaattccctaaattttttacattccgagcaagggataagtttgaggaggatcgtatctatcgtcatctggagcctgctctggctttccagttagagctgaaccggatgagaaattttgacctcactgccattccatgtgctaatcacaagatgcacctgtatctcggggcagccaaggtggaagtgggcacagaagtgacagactacaggttctttgttcgtgcaatcatcaggcattctgatctggtcaccaaggaagcttcttttgaatatctgcaaaatgaaggggagcggctactcctggaagccatggatgagttggaagttgcttttaacaatacaaatgtccgcactgactgtaaccacatcttcctcaactttgtgcccacggttatcatggacccatcaaagattgaggaatccgtgcggagcatggtaatgcggtatggaagtcgcctgtggaaattgcgcgtcctccaggcagaactgaaaatcaacattcgcctgacgccaactggaaaagcaattcccatccgcctcttcctgacaaacgagtctggctattacttggatatcagcctatacaaggaagtgactgactccaggacagcacagatcatgtttcaggcatatggagacaaacagggaccactgcatggaatgttaatcaatactccatatgtgaccaaagacctgctgcaatcaaagaggttccaggcacaatccttagggacaacatacatatatgatatcccagagatgtttcggcagtccctgatcaaactctgggagtctatgtccactcaagcatttcttccatctccccctctgccttctgacatgctgacttacactgaactggtactggatgatcaaggtcagctggtccacatgaacaggcttccaggaggaaatgagattggcatggtagcttggaaaatgacctttaaaagtcctgaatatccagaaggccgagatatcattgttattggcaatgacatcacataccgaattgggtcctttgggcctcaagaggatttgttatttctcagagcttccgaacttgctagggcagaaggtattccacgcatctatgtatcagccaacagtggagcaagaatcggactggcagaagaaattcgccatatgtttcatgtggcctgggtagatcctgaggatccttacaagggatacaggtatttatatctgactcctcaagattataagagagtcagtgctctcaactctgtccattgtgaacacgtggaagatgaaggagaatccaggtacaagataacagatattattgggaaagaagagggaattggacccgagaaccttcgaggttctggaatgattgctggagaatcctcattggcctataatgagatcattaccatcagcctggtgacgtgccgggccattgggattggggcttaccttgtccggctgggacagagaaccatccaggttgagaattctcacttaattctaacaggagctggagccctcaacaaagtcctcgggcgggaagtgtacacctccaataaccagctggggggcatccagattatgcacaacaatggggtgacccactgcactgtgtgtgatgactttgaaggggttttcactgtcctgcactggctgtcttacatgcccaagagcgtgcacagttcagttcctcttctgaactcaaaggatcctatagacagaatcatcgagtttgttcccacaaagaccccatacgatcctcgatggatgctagcaggccgtcctcacccaacccaaaaaggtcagtggttgagtggcttttttgactatggatctttctcagagattatgcagccctgggcacagactgtggtggttggtagagccaggctaggaggaatacctgtgggagttgttgctgtagaaacccgaacagtagaactaagtatcccagctgatccagcaaacctggattctgaagccaagataatccagcaggctggccaggtttggttcccagattctgcgtttaagacatatcaggccatcaaggacttcaaccgggaagggctgcctctgatggtctttgccaactggagaggcttctctggtggaatgaaagatatgtacgaccaagtgctgaagtttggtgcttacattgtggatggcttgagggagtgctgccagcctgtgctggtttacattcctccccaggctgagctgcggggtggctcctgggtggtgattgactcctccatcaacccccggcacatggagatgtatgctgaccgagaaagcaggggatctgttctggagccagaagggacagtagaaatcaaattccgcagaaaggatctggtgaaaaccatgcgtcgggtggacccagtctacatccacttggctgagcgattggggaccccagagctaagcacagctgagcggaaggagttggagaacaagttgaaggagcgggaggaattcctaattcccatttaccatcaggtagccgtgcagtttgctgacttgcacgacacaccaggccggatgcaggagaagggtgttattagcgatatcctggattggaaaacatcccgtaccttcttctactggcggctgaggcgtcttctgctggaggacctggtcaagaagaaaatccacaatgccaaccctgagctgactgatggccagattcaagccatgttaaggcgctggtttgtggaagtggaaggaacagtgaaggcttatgtttgggacaataataaggatctggcggagtggctagagaaacagctgacagaggaggatggtgttcactcggtaatagaggaaaacatcaaatgcatcagcagagactacgtcctcaagcaaatccgcagcttggtccaggccaatccagaggttgccatggattccatcatccatatgacgcagcacatatcacccactcagcgagcagaagtcatacggatcctctccacaatggattccccttccacgtaggaagagcttcctgcctgtccctgccctgtctctggagaaaagggctagagctgccttttacaactgtaaccactgtaatgagaaggcacaggagacccagcactggagtcaaatggcattttacttcctctcgtttcaggttatgcatgacatcctgggatgtaagatcacagaatccccctccagcccaccagtcacacctaccccattcagtatttattaccctggccaggcctagtcctccactccctgcacaggactgagaaggcaatgaaaggtacaaacatgtaccatgaggtcttactaaccaaagtagggctgcccctcctgtcctgacagccccttggcctcccagcatggggaagcgtgaggagttgcccagcagtgagcagcccccctcactcctggccccatgagccgcagccacaggcagcagaggagggctaaggagaggaggaagcctcaagtccattgtttattaccccgactcttagcccagcacacagtaggcactggagaggaatgattcccagtttaaccacactacggtaccttttatgaagaaaaattagagcataaaatctactacaagctccataggaactcaaagatgagggcaaaactgtgagccaagaagcagagaaagaaaatagaaccagttattcttgatttaggggacctcaaccttgggttcagtctctgaggacaaagggaaaggtagttgttggcctgcctctcgcctgcacgtcactgctggactagctgtcgcatgtggctgggagctgcaaggccagtgcttgaggggccccagcagttccacaggtggtgaagcctgagttggcagaggaggagccagaagagaactgccctttctgcactggtggaaactagttatttatgccatgtggagagccagtgagatagatagatagtctgtttgttttgaggacttggaaagttgttcctatgaagcctggagcttggatggttttgagaggttaatggtgcctccacactcactcttccctagttccaggattactgtcctagcagctaacggttctactctcttccccagagtgtagacaggcagcaggtctccccacagctctgaaaggaccctggtgacagctacaccctcagcaccaggagctggccttcctgatgagggaggcttccaggaaacacagaatccacatgaccttaagattatttacaactcagtcatggtgctgctgtcctccaggcttactggcccctcctgactggcatcaggggcttcctcaggtggtggagagagtttactttcaacaactagtttattcaagaaaagaacttactgattcctctgttcctaaagcaagagtggcaggtgatcagggctggtgtagcatccggttcctttagtgcagctaactgcatttgtcactgatgaccaaggaggaaatcactaagacatttgagaagcagtggtatgaacgttcttggacaagccacagttctgagccttaaccctgtagtttgcacacaagaacgagctccacctccccttcttcaggaggaatctgtgcggatagattggctggacttttcaatggttctgggttgcaggtgggcactgtatggctgggtatggagcggacagcccccaggagtcagagcctcagcccggctgccctggtggaaggtacaggtgttcagcaccttcagaaaagggcataaagtggtgggggacaattctcagtccaggaaaatgcattgaccattgctggctatttgcttacctagtaagaattggattcatttttgaccagattattcttctatgcttttttgcaataaatcaaatcccacatatctacaagtggtatgaagtcctgcaccccccaggaggcctgtccaggcatgtcttcagaggcagggtgggttacactcatttacctcccctctccccaccaaattatgacacaaacgagtatgtttcctctctagaaccctgtaatgcctcctcccccatccccagagctccttactgtaggtcttaccctggacaaggattttttcaagttggaggcacagaacatgagcaatctgacattcccacagcccctcaaacatgcaaggctactaaggcaggaggagtataaatgatggatattgaccaagacctgcttggacggagaccgccatattatctgttctcttcgttcacaaaacagccttcacttgtctcagaatttgatggacacatactgtgatgagcaggagcttcagatgcactctttacacattttgttgaaataaacctctacatttgtagaa

SEQ ID NO: 260513 - DNA, 1064 bp, Artificial Sequence
  derived and/or modified sequence
gccctcttggccttttcccggtccccgccgcgcgcctgctgctgtccccgtgcccgaggactgggaggatggggctgagccgcttgcctgacttttgatccgaccagtaatcactttgcccgtgtggcgcgtggcccgttgcctgaggcttcctggcgcgtggggctgtttggtcccctccggagtgcggtgaggcgggccgagccgggactgcctgggtttggggataacgttcccatctccacccctgttgcagcaagggaaattgaggctgagggaactgggcccagggacggcgagccgtggctgcctctccagtccgggccccgaagggctgctcgtggatgaaccagactgattttaaggggtgaagagggtgcgtttcaatcagatgcttctggaacgtcgaaattgtcttctttggaaagaaccatcccctctttgggcttcagaggcccaaattgaggcgcaatgatgagaggatgtggtggtctactctgatgtcaatcttgagggctaggtctttctggaagtggatatctactcagacagtaagaattataagagctgtaagagctcattttggaggaataatggatgaaccatctcccttggcccaacctctggagctgaaccagcactctcgattcataataggttctgtgtctgaagataactcagaggatgagatcagcaacctggtgaagttggacctactggaggagaaggagggctccttgtcacctgcttctgttggctcagatacactctctgatttggggatctctagcctacaggatggcttggccttgcacataagactttgaaatactcgtgggatatgaagtggaggtgcctagagggttgaagataatgaggacagatgaagaaatgtttgattgtgccatacttacagttgctgattttcaaggtccagcatgtctggcttgcacctagtaaagcagggccgagacagaaagaaaatagattctcaacgagatttcactgtggcttctccagcagaatttgttactcgctttgggggaaataaagtgattgagaag

SEQ ID NO: 260514 - DNA, 9836 bp, Artificial Sequence
  derived and/or modified sequence
ggcccccgccgggtgctgagcgcccgccaccgccctcttggccttttcccggtccccgccgcgcgcctgctgctgtccccgtgcccgaggactgggaggatggggctgagccgcttgcctgacttttgatccgaccagtaatcactttgcccgtgtggcgcgtggcccgttgcctgaggcttcctggcgcgtggggctgtttggtcccctccggagtgcggtgaggcgggccgagccgggactgcctgggtttggggataacgttcccatctccacccctgttgcagcaagggaaattgaggctgagggaactgggcccagggacggcgagccgtggctgcctctccagtccgggccccgaagggctgctcgtggatgaaccagactgattttaaggggtgaagagggtgcgtttcaatcagatgcttctggaacgtcgaaattgtcttctttggaaagaaccatcccctctttgggcttcagaggcccaaattgaggcgcaatgatgagaggatgtggtggtctactctgatgtcaatcttgagggctaggtctttctggaagtggatatctactcagacagtaagaattataagagctgtaagagctcattttggaggaataatggatgaaccatctcccttggcccaacctctggagctgaaccagcactctcgattcataataggttctgtgtctgaagataactcagaggatgagatcagcaacctggtgaagttggacctactggaggagaaggagggctccttgtcacctgcttctgttggctcagatacactctctgatttggggatctctagcctacaggatggcttggccttgcacataaggtccagcatgtctggcttgcacctagtaaagcagggccgagacagaaagaaaatagattctcaacgagatttcactgtggcttctccagcagaatttgttactcgctttgggggaaataaagtgattgagaaggttcttattgctaacaatggcattgcagcagtgaaatgcatgcggtctatccgtaggtggtcttatgaaatgtttcgaaatgaacgtgcaattagattcgttgtcatggtcacacctgaagaccttaaagccaatgcagaatacattaagatggcagatcactatgtgccagtgcctggaggaccaaacaacaacaactatgcaaatgtggaattaattcttgatattgctaaaaggatcccagtacaagcagtgtgggctggctggggtcatgcttctgagaatcccaaactaccggaacttctcttgaaaaatggcattgccttcatgggtcctccaagccaggccatgtgggctttaggggataagattgcatcttccatagtggctcaaactgcaggtatcccaactcttccctggagcggcagtggtcttcgtgtggactggcaggaaaatgatttttcaaaacgtatcttaaatgttccccaggagctatatgaaaaaggttatgtgaaagatgtggatgatgggctacaggcagctgaggaagttggatatccagtaatgatcaaggcctcagagggaggaggagggaagggaattagaaaagtcaacaatgcagatgacttccctaatctcttcagacaggttcaagctgaagttcctggatctcccatatttgtgatgagactagccaaacaatctcgtcatctggaggtgcagatcttagcggaccaatatggcaatgctatctctttgtttggtcgtgattgctctgtacaacgcaggcatcagaagattattgaagaagcacctgctactattgctactccagcagtatttgaacacatggaacagtgtgcggtgaaacttgccaaaatggtgggttatgtgagtgctgggactgtggaatacctgtacagccaggatggcagcttctactttctggaattgaatcctcggctgcaggtagagcacccttgtacagagatggtggctgatgtcaatctccctgcagcacagctccagattgccatggggattcctctatatagaatcaaggatatccgtatgatgtatggggtatctccctggggtgattctcccattgattttgaagattctgcacacgttccttgtccaaggggccatgttattgctgctcggatcactagtgaaaatccagatgagggttttaagcccagctcaggaacagttcaggagctaaatttccgcagcaataagaatgtttggggatatttcagtgttgctgctgcagggggacttcatgaatttgctgattctcagtttggtcactgcttttcttggggagaaaacagagaagaggcaatttcaaacatggtggtggctttgaaggagctgtctattcggggtgactttcgaactacagttgaatacctgatcaaattgttagagactgaaagctttcagatgaacagaattgatactggctggctggacagactgatagcagaaaaagtacaggctgagcgacctgacaccatgttgggggttgtgtgtggtgccctccacgtggcagatgtgagcctgcggaatagcgtctctaacttccttcactccttagaaaggggtcaagtccttcctgctcatacacttctgaatacagtagatgttgaacttatctatgagggagtcaagtatgtacttaaggtgactcgacagtcccccaactcctatgtggtgatcatgaatggctcatgtgtagaagtagatgtacatcggctgagtgacggtggactgctcttgtcctatgatggcagcagttatactacgtatatgaaagaggaagtggatagatatcgcatcacaattggcaataaaacctgtgtgtttgagaaggaaaatgacccatcggtgatgcgctcaccttctgctgggaagttaatccagtacattgtagaagatggaggtcatgtgtttgccggccagtgctatgctgagattgaggtaatgaagatggtaatgaccttaacagctgtggagtctggctgtatccattacgtcaagcgacctggagcagctcttgaccctggctgtgtactagccaaaatgcaactggacaaccccagcaaggttcagcaggctgaacttcacacaggtagtctgccacggatccagagcacggcactcagaggcgagaaactccatcgagtgttccattatgtcctggataatctggtcaatgtaatgaatggatactgccttccagatcctttctttagcagcaaggtaaaagactgggtagagcgattgatgaaaaccctcagagatccctccctgcctctcctagaattgcaagatattatgaccagtgtgtctggccgcattccccccaatgtggagaagtctatcaagaaggaaatggctcagtatgctagcaacatcacatcagtcctctgtcagtttcccagccagcagattgcaaacatcctagatagccatgcagctacattgaaccggaaatctgaacgggaagtcttctttatgaatactcagagcattgttcagctggtacagaggtaccgaagtggcatccgaggccacatgaaggctgtggtgatggatctgctccggcagtacctgcgagtagagacacaattccagaatggtcactatgacaaatgtgtattcgccctccgagaagagaataaaagtgacatgaacactgtactgaactacatcttctctcacgctcaagtcaccaagaagaatcttctggtcacaatgcttattgatcagttgtgtggccgggaccctactctcactgatgagctgctgaatattctcacagagctaactcaactcagtaagaccaccaatgccaaagtagcacttcgagcacgccaggttcttattgcctcccatttgccatcatatgagcttcgccataaccaagtagagtctatcttcctatcagctattgacatgtatggacatcaattttgcattgagaacctgcagaaactcatcctatcagaaacatctatttttgatgtcctaccaaacttcttctatcacagcaaccaagtagtgaggatggcagctctggaggtgtatgttcgaagggcttatattgcctatgaacttaacagcgtacaacaccgccagcttaaggacaacacctgtgtggtggaattccagttcatgctgcccacatctcatccaaacagagggaacatccctacgctaaacagaatgtccttctcctccaacctcaaccactatggcatgacccatgtagctagtgtcagcgatgtactgttggacaactcattcactccaccttgtcagcggatgggcggaatggtctcttttcggacttttgaagattttgtcaggatctttgatgaagtgatgggctgcttctctgactccccaccccagagtcccacattccctgaggcaggtcacacgtctctttatgatgaggataaggttcccagggatgaaccaattcacattctcaatgtggctatcaagactgactgtgatattgaggatgacaggctggcagctatgttcagagaatttacccagcaaaataaagctaccctggttgaccatgggatccggcgccttactttcctggttgcacaaaaggatttcagaaagcaggtcaactatgaggtggatcggagatttcatagagaattccctaaattttttacattccgagcaagggataagtttgaggaggatcgtatctatcgtcatctggagcctgctctggctttccagttagagctgaaccggatgagaaattttgacctcactgccattccatgtgctaatcacaagatgcacctgtatctcggggcagccaaggtggaagtgggcacagaagtgacagactacaggttctttgttcgtgcaatcatcaggcattctgatctggtcaccaaggaagcttcttttgaatatctgcaaaatgaaggggagcggctactcctggaagccatggatgagttggaagttgcttttaacaatacaaatgtccgcactgactgtaaccacatcttcctcaactttgtgcccacggttatcatggacccatcaaagattgaggaatccgtgcggagcatggtaatgcggtatggaagtcgcctgtggaaattgcgcgtcctccaggcagaactgaaaatcaacattcgcctgacgccaactggaaaagcaattcccatccgcctcttcctgacaaacgagtctggctattacttggatatcagcctatacaaggaagtgactgactccaggacagcacagatcatgtttcaggcatatggagacaaacagggaccactgcatggaatgttaatcaatactccatatgtgaccaaagacctgctgcaatcaaagaggttccaggcacaatccttagggacaacatacatatatgatatcccagagatgtttcggcagattggcatggtagcttggaaaatgacctttaaaagtcctgaatatccagaaggccgagatatcattgttattggcaatgacatcacataccgaattgggtcctttgggcctcaagaggatttgttatttctcagagcttccgaacttgctagggcagaaggtattccacgcatctatgtatcagccaacagtggagcaagaatcggactggcagaagaaattcgccatatgtttcatgtggcctgggtagatcctgaggatccttacaagggatacaggtatttatatctgactcctcaagattataagagagtcagtgctctcaactctgtccattgtgaacacgtggaagatgaaggagaatccaggtacaagataacagatattattgggaaagaagagggaattggacccgagaaccttcgaggttctggaatgattgctggagaatcctcattggcctataatgagatcattaccatcagcctggtgacgtgccgggccattgggattggggcttaccttgtccggctgggacagagaaccatccaggttgagaattctcacttaattctaacaggagctggagccctcaacaaagtcctcgggcgggaagtgtacacctccaataaccagctggggggcatccagattatgcacaacaatggggtgacccactgcactgtgtgtgatgactttgaaggggttttcactgtcctgcactggctgtcttacatgcccaagagcgtgcacagttcagttcctcttctgaactcaaaggatcctatagacagaatcatcgagtttgttcccacaaagaccccatacgatcctcgatggatgctagcaggccgtcctcacccaacccaaaaaggtcagtggttgagtggcttttttgactatggatctttctcagagattatgcagccctgggcacagactgtggtggttggtagagccaggctaggaggaatacctgtgggagttgttgctgtagaaacccgaacagtagaactaagtatcccagctgatccagcaaacctggattctgaagccaagataatccagcaggctggccaggtttggttcccagattctgcgtttaagacatatcaggccatcaaggacttcaaccgggaagggctgcctctgatggtctttgccaactggagaggcttctctggtggaatgaaagatatgtacgaccaagtgctgaagtttggtgcttacattgtggatggcttgagggagtgctgccagcctgtgctggtttacattcctccccaggctgagctgcggggtggctcctgggtggtgattgactcctccatcaacccccggcacatggagatgtatgctgaccgagaaagcaggggatctgttctggagccagaagggacagtagaaatcaaattccgcagaaaggatctggtgaaaaccatgcgtcgggtggacccagtctacatccacttggctgagcgattggggaccccagagctaagcacagctgagcggaaggagttggagaacaagttgaaggagcgggaggaattcctaattcccatttaccatcaggtagccgtgcagtttgctgacttgcacgacacaccaggccggatgcaggagaagggtgttattagcgatatcctggattggaaaacatcccgtaccttcttctactggcggctgaggcgtcttctgctggaggacctggtcaagaagaaaatccacaatgccaaccctgagctgactgatggccagattcaagccatgttaaggcgctggtttgtggaagtggaaggaacagtgaaggcttatgtttgggacaataataaggatctggcggagtggctagagaaacagctgacagaggaggatggtgttcactcggtaatagaggaaaacatcaaatgcatcagcagagactacgtcctcaagcaaatccgcagcttggtccaggccaatccagaggttgccatggattccatcatccatatgacgcagcacatatcacccactcagcgagcagaagtcatacggatcctctccacaatggattccccttccacgtaggaagagcttcctgcctgtccctgccctgtctctggagaaaagggctagagctgccttttacaactgtaaccactgtaatgagaaggcacaggagacccagcactggagtcaaatggcattttacttcctctcgtttcaggttatgcatgacatcctgggatgtaagatcacagaatccccctccagcccaccagtcacacctaccccattcagtatttattaccctggccaggcctagtcctccactccctgcacaggactgagaaggcaatgaaaggtacaaacatgtaccatgaggtcttactaaccaaagtagggctgcccctcctgtcctgacagccccttggcctcccagcatggggaagcgtgaggagttgcccagcagtgagcagcccccctcactcctggccccatgagccgcagccacaggcagcagaggagggctaaggagaggaggaagcctcaagtccattgtttattaccccgactcttagcccagcacacagtaggcactggagaggaatgattcccagtttaaccacactacggtaccttttatgaagaaaaattagagcataaaatctactacaagctccataggaactcaaagatgagggcaaaactgtgagccaagaagcagagaaagaaaatagaaccagttattcttgatttaggggacctcaaccttgggttcagtctctgaggacaaagggaaaggtagttgttggcctgcctctcgcctgcacgtcactgctggactagctgtcgcatgtggctgggagctgcaaggccagtgcttgaggggccccagcagttccacaggtggtgaagcctgagttggcagaggaggagccagaagagaactgccctttctgcactggtggaaactagttatttatgccatgtggagagccagtgagatagatagatagtctgtttgttttgaggacttggaaagttgttcctatgaagcctggagcttggatggttttgagaggttaatggtgcctccacactcactcttccctagttccaggattactgtcctagcagctaacggttctactctcttccccagagtgtagacaggcagcaggtctccccacagctctgaaaggaccctggtgacagctacaccctcagcaccaggagctggccttcctgatgagggaggcttccaggaaacacagaatccacatgaccttaagattatttacaactcagtcatggtgctgctgtcctccaggcttactggcccctcctgactggcatcaggggcttcctcaggtggtggagagagtttactttcaacaactagtttattcaagaaaagaacttactgattcctctgttcctaaagcaagagtggcaggtgatcagggctggtgtagcatccggttcctttagtgcagctaactgcatttgtcactgatgaccaaggaggaaatcactaagacatttgagaagcagtggtatgaacgttcttggacaagccacagttctgagccttaaccctgtagtttgcacacaagaacgagctccacctccccttcttcaggaggaatctgtgcggatagattggctggacttttcaatggttctgggttgcaggtgggcactgtatggctgggtatggagcggacagcccccaggagtcagagcctcagcccggctgccctggtggaaggtacaggtgttcagcaccttcagaaaagggcataaagtggtgggggacaattctcagtccaggaaaatgcattgaccattgctggctatttgcttacctagtaagaattggattcatttttgaccagattattcttctatgcttttttgcaataaatcaaatcccacatatctacaagtggtatgaagtcctgcaccccccaggaggcctgtccaggcatgtcttcagaggcagggtgggttacactcatttacctcccctctccccaccaaattatgacacaaacgagtatgtttcctctctagaaccctgtaatgcctcctcccccatccccagagctccttactgtaggtcttaccctggacaaggattttttcaagttggaggcacagaacatgagcaatctgacattcccacagcccctcaaacatgcaaggctactaaggcaggaggagtataaatgatggatattgaccaagacctgcttggacggagaccgccatattatctgttctcttcgttcacaaaacagccttcacttgtctcagaatttgatggacacatactgtgatgagcaggagcttcagatgcactctttacacattttgttgaaataaacctctacatttgt

SEQ ID NO: 260515 - DNA, 10657 bp, Artificial Sequence
  derived and/or modified sequence
ggcccccgccgggtgctgagcgcccgccaccgccctcttggccttttcccggtccccgccgcgcgcctgctgctgtccccgtgcccgaggactgggaggatggggctgagccgcttgcctgacttttgatccgaccagtaatcactttgcccgtgtggcgcgtggcccgttgcctgaggcttcctggcgcgtggggctgtttggtcccctccggagtgcggtgaggcgggccgagccgggactgcctgggtttggggataacgttcccatctccacccctgttgcagcaagggaaattgaggctgagggaactgggcccagggacggcgagccgtggctgcctctccagtccgggccccgaagggctgctcgtggatgaaccagactgattttaaggggtgaagagggtgcgtttcaatcagatgcttctggaacgtcgaaattgtcttctttggaaagaaccatcccctctttgggcttcagaggcccaaattgaggcgcaatgatgagaggatgtggtggtctactctgatgtcaatcttgagggctagggtcttgctatgtcacccagcctggagtggaattgtgtgatcaagactcactgaagcctccaactcctgggctcaagcaatcctcccacctcagccacccaagtagctgggactacaggctggagtgcaatggcatgatcttggctcactgcaacctccgcctcccggattcaacggattctcctgcctcagcctcctgagtagctgggattataggtgcctgccacaacacccaggaccagacttatgaagtggccttcctgaggagattttctgaccttatggtatgaagttccttcaggctcttaattctggataaactggagtgattaacaagagcaaagagacatagtattcagataaggactttgtgtcttatttttcttttatatcacaactggagccacagttgtgggcaaggcactgactttcttgatgaattctgtccatctgtaaagcagctatatatcccactggaggctttgcctctcagagacaacgtgaagacggataagcaggcatcaggagcagagtggcctctcagctggtcagattctccgaagaaggatcctctaggctgggcacggtggctcacacctataatcccagcactttgggaggccgaggcaggtggatcacgaggtcaggagttcgaggccagcctggccaatatggtctttctggaagtggatatctactcagacagtaagaattataagagctgtaagagctcattttggaggaataatggatgaaccatctcccttggcccaacctctggagctgaaccagcactctcgattcataataggttctgtgtctgaagataactcagaggatgagatcagcaacctggtgaagttggacctactggaggagaaggagggctccttgtcacctgcttctgttggctcagatacactctctgatttggggatctctagcctacaggatggcttggccttgcacataaggtccagcatgtctggcttgcacctagtaaagcagggccgagacagaaagaaaatagattctcaacgagatttcactgtggcttctccagcagaatttgttactcgctttgggggaaataaagtgattgagaaggttcttattgctaacaatggcattgcagcagtgaaatgcatgcggtctatccgtaggtggtcttatgaaatgtttcgaaatgaacgtgcaattagattcgttgtcatggtcacacctgaagaccttaaagccaatgcagaatacattaagatggcagatcactatgtgccagtgcctggaggaccaaacaacaacaactatgcaaatgtggaattaattcttgatattgctaaaaggatcccagtacaagcagtgtgggctggctggggtcatgcttctgagaatcccaaactaccggaacttctcttgaaaaatggcattgccttcatgggtcctccaagccaggccatgtgggctttaggggataagattgcatcttccatagtggctcaaactgcaggtatcccaactcttccctggagcggcagtggtcttcgtgtggactggcaggaaaatgatttttcaaaacgtatcttaaatgttccccaggagctatatgaaaaaggttatgtgaaagatgtggatgatgggctacaggcagctgaggaagttggatatccagtaatgatcaaggcctcagagggaggaggagggaagggaattagaaaagtcaacaatgcagatgacttccctaatctcttcagacaggttcaagctgaagttcctggatctcccatatttgtgatgagactagccaaacaatctcgtcatctggaggtgcagatcttagcggaccaatatggcaatgctatctctttgtttggtcgtgattgctctgtacaacgcaggcatcagaagattattgaagaagcacctgctactattgctactccagcagtatttgaacacatggaacagtgtgcggtgaaacttgccaaaatggtgggttatgtgagtgctgggactgtggaatacctgtacagccaggatggcagcttctactttctggaattgaatcctcggctgcaggtagagcacccttgtacagagatggtggctgatgtcaatctccctgcagcacagctccagattgccatggggattcctctatatagaatcaaggatatccgtatgatgtatggggtatctccctggggtgattctcccattgattttgaagattctgcacacgttccttgtccaaggggccatgttattgctgctcggatcactagtgaaaatccagatgagggttttaagcccagctcaggaacagttcaggagctaaatttccgcagcaataagaatgtttggggatatttcagtgttgctgctgcagggggacttcatgaatttgctgattctcagtttggtcactgcttttcttggggagaaaacagagaagaggcaatttcaaacatggtggtggctttgaaggagctgtctattcggggtgactttcgaactacagttgaatacctgatcaaattgttagagactgaaagctttcagatgaacagaattgatactggctggctggacagactgatagcagaaaaagtacaggctgagcgacctgacaccatgttgggggttgtgtgtggtgccctccacgtggcagatgtgagcctgcggaatagcgtctctaacttccttcactccttagaaaggggtcaagtccttcctgctcatacacttctgaatacagtagatgttgaacttatctatgagggagtcaagtatgtacttaaggtgactcgacagtcccccaactcctatgtggtgatcatgaatggctcatgtgtagaagtagatgtacatcggctgagtgacggtggactgctcttgtcctatgatggcagcagttatactacgtatatgaaagaggaagtggatagatatcgcatcacaattggcaataaaacctgtgtgtttgagaaggaaaatgacccatcggtgatgcgctcaccttctgctgggaagttaatccagtacattgtagaagatggaggtcatgtgtttgccggccagtgctatgctgagattgaggtaatgaagatggtaatgaccttaacagctgtggagtctggctgtatccattacgtcaagcgacctggagcagctcttgaccctggctgtgtactagccaaaatgcaactggacaaccccagcaaggttcagcaggctgaacttcacacaggtagtctgccacggatccagagcacggcactcagaggcgagaaactccatcgagtgttccattatgtcctggataatctggtcaatgtaatgaatggatactgccttccagatcctttctttagcagcaaggtaaaagactgggtagagcgattgatgaaaaccctcagagatccctccctgcctctcctagaattgcaagatattatgaccagtgtgtctggccgcattccccccaatgtggagaagtctatcaagaaggaaatggctcagtatgctagcaacatcacatcagtcctctgtcagtttcccagccagcagattgcaaacatcctagatagccatgcagctacattgaaccggaaatctgaacgggaagtcttctttatgaatactcagagcattgttcagctggtacagaggtaccgaagtggcatccgaggccacatgaaggctgtggtgatggatctgctccggcagtacctgcgagtagagacacaattccagaatggtcactatgacaaatgtgtattcgccctccgagaagagaataaaagtgacatgaacactgtactgaactacatcttctctcacgctcaagtcaccaagaagaatcttctggtcacaatgcttattgatcagttgtgtggccgggaccctactctcactgatgagctgctgaatattctcacagagctaactcaactcagtaagaccaccaatgccaaagtagcacttcgagcacgccaggttcttattgcctcccatttgccatcatatgagcttcgccataaccaagtagagtctatcttcctatcagctattgacatgtatggacatcaattttgcattgagaacctgcagaaactcatcctatcagaaacatctatttttgatgtcctaccaaacttcttctatcacagcaaccaagtagtgaggatggcagctctggaggtgtatgttcgaagggcttatattgcctatgaacttaacagcgtacaacaccgccagcttaaggacaacacctgtgtggtggaattccagttcatgctgcccacatctcatccaaacagagggaacatccctacgctaaacagaatgtccttctcctccaacctcaaccactatggcatgacccatgtagctagtgtcagcgatgtactgttggacaactcattcactccaccttgtcagcggatgggcggaatggtctcttttcggacttttgaagattttgtcaggatctttgatgaagtgatgggctgcttctctgactccccaccccagagtcccacattccctgaggcaggtcacacgtctctttatgatgaggataaggttcccagggatgaaccaattcacattctcaatgtggctatcaagactgactgtgatattgaggatgacaggctggcagctatgttcagagaatttacccagcaaaataaagctaccctggttgaccatgggatccggcgccttactttcctggttgcacaaaaggatttcagaaagcaggtcaactatgaggtggatcggagatttcatagagaattccctaaattttttacattccgagcaagggataagtttgaggaggatcgtatctatcgtcatctggagcctgctctggctttccagttagagctgaaccggatgagaaattttgacctcactgccattccatgtgctaatcacaagatgcacctgtatctcggggcagccaaggtggaagtgggcacagaagtgacagactacaggttctttgttcgtgcaatcatcaggcattctgatctggtcaccaaggaagcttcttttgaatatctgcaaaatgaaggggagcggctactcctggaagccatggatgagttggaagttgcttttaacaatacaaatgtccgcactgactgtaaccacatcttcctcaactttgtgcccacggttatcatggacccatcaaagattgaggaatccgtgcggagcatggtaatgcggtatggaagtcgcctgtggaaattgcgcgtcctccaggcagaactgaaaatcaacattcgcctgacgccaactggaaaagcaattcccatccgcctcttcctgacaaacgagtctggctattacttggatatcagcctatacaaggaagtgactgactccaggacagcacagatcatgtttcaggcatatggagacaaacagggaccactgcatggaatgttaatcaatactccatatgtgaccaaagacctgctgcaatcaaagaggttccaggcacaatccttagggacaacatacatatatgatatcccagagatgtttcggcagtccctgatcaaactctgggagtctatgtccactcaagcatttcttccatctccccctctgccttctgacatgctgacttacactgaactggtactggatgatcaaggtcagctggtccacatgaacaggcttccaggaggaaatgagattggcatggtagcttggaaaatgacctttaaaagtcctgaatatccagaaggccgagatatcattgttattggcaatgacatcacataccgaattgggtcctttgggcctcaagaggatttgttatttctcagagcttccgaacttgctagggcagaaggtattccacgcatctatgtatcagccaacagtggagcaagaatcggactggcagaagaaattcgccatatgtttcatgtggcctgggtagatcctgaggatccttacaagggatacaggtatttatatctgactcctcaagattataagagagtcagtgctctcaactctgtccattgtgaacacgtggaagatgaaggagaatccaggtacaagataacagatattattgggaaagaagagggaattggacccgagaaccttcgaggttctggaatgattgctggagaatcctcattggcctataatgagatcattaccatcagcctggtgacgtgccgggccattgggattggggcttaccttgtccggctgggacagagaaccatccaggttgagaattctcacttaattctaacaggagctggagccctcaacaaagtcctcgggcgggaagtgtacacctccaataaccagctggggggcatccagattatgcacaacaatggggtgacccactgcactgtgtgtgatgactttgaaggggttttcactgtcctgcactggctgtcttacatgcccaagagcgtgcacagttcagttcctcttctgaactcaaaggatcctatagacagaatcatcgagtttgttcccacaaagaccccatacgatcctcgatggatgctagcaggccgtcctcacccaacccaaaaaggtcagtggttgagtggcttttttgactatggatctttctcagagattatgcagccctgggcacagactgtggtggttggtagagccaggctaggaggaatacctgtgggagttgttgctgtagaaacccgaacagtagaactaagtatcccagctgatccagcaaacctggattctgaagccaagataatccagcaggctggccaggtttggttcccagattctgcgtttaagacatatcaggccatcaaggacttcaaccgggaagggctgcctctgatggtctttgccaactggagaggcttctctggtggaatgaaagatatgtacgaccaagtgctgaagtttggtgcttacattgtggatggcttgagggagtgctgccagcctgtgctggtttacattcctccccaggctgagctgcggggtggctcctgggtggtgattgactcctccatcaacccccggcacatggagatgtatgctgaccgagaaagcaggggatctgttctggagccagaagggacagtagaaatcaaattccgcagaaaggatctggtgaaaaccatgcgtcgggtggacccagtctacatccacttggctgagcgattggggaccccagagctaagcacagctgagcggaaggagttggagaacaagttgaaggagcgggaggaattcctaattcccatttaccatcaggtagccgtgcagtttgctgacttgcacgacacaccaggccggatgcaggagaagggtgttattagcgatatcctggattggaaaacatcccgtaccttcttctactggcggctgaggcgtcttctgctggaggacctggtcaagaagaaaatccacaatgccaaccctgagctgactgatggccagattcaagccatgttaaggcgctggtttgtggaagtggaaggaacagtgaaggcttatgtttgggacaataataaggatctggcggagtggctagagaaacagctgacagaggaggatggtgttcactcggtaatagaggaaaacatcaaatgcatcagcagagactacgtcctcaagcaaatccgcagcttggtccaggccaatccagaggttgccatggattccatcatccatatgacgcagcacatatcacccactcagcgagcagaagtcatacggatcctctccacaatggattccccttccacgtaggaagagcttcctgcctgtccctgccctgtctctggagaaaagggctagagctgccttttacaactgtaaccactgtaatgagaaggcacaggagacccagcactggagtcaaatggcattttacttcctctcgtttcaggttatgcatgacatcctgggatgtaagatcacagaatccccctccagcccaccagtcacacctaccccattcagtatttattaccctggccaggcctagtcctccactccctgcacaggactgagaaggcaatgaaaggtacaaacatgtaccatgaggtcttactaaccaaagtagggctgcccctcctgtcctgacagccccttggcctcccagcatggggaagcgtgaggagttgcccagcagtgagcagcccccctcactcctggccccatgagccgcagccacaggcagcagaggagggctaaggagaggaggaagcctcaagtccattgtttattaccccgactcttagcccagcacacagtaggcactggagaggaatgattcccagtttaaccacactacggtaccttttatgaagaaaaattagagcataaaatctactacaagctccataggaactcaaagatgagggcaaaactgtgagccaagaagcagagaaagaaaatagaaccagttattcttgatttaggggacctcaaccttgggttcagtctctgaggacaaagggaaaggtagttgttggcctgcctctcgcctgcacgtcactgctggactagctgtcgcatgtggctgggagctgcaaggccagtgcttgaggggccccagcagttccacaggtggtgaagcctgagttggcagaggaggagccagaagagaactgccctttctgcactggtggaaactagttatttatgccatgtggagagccagtgagatagatagatagtctgtttgttttgaggacttggaaagttgttcctatgaagcctggagcttggatggttttgagaggttaatggtgcctccacactcactcttccctagttccaggattactgtcctagcagctaacggttctactctcttccccagagtgtagacaggcagcaggtctccccacagctctgaaaggaccctggtgacagctacaccctcagcaccaggagctggccttcctgatgagggaggcttccaggaaacacagaatccacatgaccttaagattatttacaactcagtcatggtgctgctgtcctccaggcttactggcccctcctgactggcatcaggggcttcctcaggtggtggagagagtttactttcaacaactagtttattcaagaaaagaacttactgattcctctgttcctaaagcaagagtggcaggtgatcagggctggtgtagcatccggttcctttagtgcagctaactgcatttgtcactgatgaccaaggaggaaatcactaagacatttgagaagcagtggtatgaacgttcttggacaagccacagttctgagccttaaccctgtagtttgcacacaagaacgagctccacctccccttcttcaggaggaatctgtgcggatagattggctggacttttcaatggttctgggttgcaggtgggcactgtatggctgggtatggagcggacagcccccaggagtcagagcctcagcccggctgccctggtggaaggtacaggtgttcagcaccttcagaaaagggcataaagtggtgggggacaattctcagtccaggaaaatgcattgaccattgctggctatttgcttacctagtaagaattggattcatttttgaccagattattcttctatgcttttttgcaataaatcaaatcccacatatctacaagtggtatgaagtcctgcaccccccaggaggcctgtccaggcatgtcttcagaggcagggtgggttacactcatttacctcccctctccccaccaaattatgacacaaacgagtatgtttcctctctagaaccctgtaatgcctcctcccccatccccagagctccttactgtaggtcttaccctggacaaggattttttcaagttggaggcacagaacatgagcaatctgacattcccacagcccctcaaacatgcaaggctactaaggcaggaggagtataaatgatggatattgaccaagacctgcttggacggagaccgccatattatctgttctcttcgttcacaaaacagccttcacttgtctcagaatttgatggacacatactgtgatgagcaggagcttcagatgcactctttacacattttgttgaaataaacctctacatttgt

SEQ ID NO: 260516 - DNA, 7152 bp, Artificial Sequence
  derived and/or modified sequence
atgtggtggagcaccctgatgagcatcctgcgggcccggagcttctggaaatggataagcacccaaacggtccggattattagggccgttcgggcacactttgggggaatcatggatgaaccatctcccttagctcagcctctggagctgaatcagcattctaggttcattattggcagcgtgagtgaagataactcagaagatgagatctcaaacctggtaaaactggaccttttggaggagaaagaggggagtctatcccctgcttccgtgggatctgacacactcagtgatttgggtatatcatctctgcaggacggcctcgcactgcatatccgttcttcaatgtccggtctgcatctggtgaaacagggccgggatagaaagaaaattgacagccaaagggacttcaccgtggcttcacccgctgaatttgttacccggtttggggggaacaaagtgattgagaaggtcctgatcgcaaacaatggcatcgccgctgtgaagtgcatgcgatcaatcaggagatggagttatgaaatgtttcgtaacgagcgggctatccgcttcgtggtcatggttacacctgaggacttaaaagccaatgccgagtacattaagatggcggaccattacgtgcccgtaccgggaggtccaaataataataattacgcaaacgtagaacttatcctggacattgcgaagcgcataccagtccaggcagtgtgggctggatggggacacgcatcagagaatcctaaactgccagaattgttactaaaaaatggaatcgccttcatgggtccaccgtcacaagccatgtgggctctcggagacaagattgctagttctattgtggcccagaccgcaggcatacccaccctgccctggtctggcagtggactccgggtcgattggcaggaaaacgatttttcaaagcgaatattaaatgttcctcaggagctgtacgagaaggggtacgtgaaagatgttgacgacggactgcaggccgccgaagaggtcgggtaccccgttatgataaaagccagtgagggcggcggaggaaaaggaatcaggaaggttaacaacgctgatgattttcctaatttgtttcgtcaggtgcaggcagaggttccgggaagtccaatatttgtgatgcggctggctaagcagtccaggcatctcgaggtacagatcctggcagatcagtacggcaacgctatcagtctctttggaagggactgctcagtgcagcggagacaccagaagattatagaggaggctcctgctaccatagctacacctgccgtgtttgagcacatggagcaatgtgccgtcaagctggctaaaatggttggatacgtctcggctggaaccgtggaatacctgtactctcaggacggctccttttacttcctggagctgaacccacggcttcaagtcgagcacccatgcacggagatggttgcggacgttaatctacctgccgcccagctgcagatagctatgggtatccccctgtatcggattaaggatataagaatgatgtacggcgtttctccttggggagactccccaattgatttcgaggactctgcccacgtgccctgtccgcgaggacacgtgatcgccgcacgaatcacatcggagaatccagatgaaggtttcaaaccttcctcaggcacagtgcaggagcttaatttccggtcgaataagaacgtgtggggctatttctccgtcgcagccgccggcgggctgcatgagttcgcagattcccagttcggtcattgctttagctggggggagaaccgcgaggaggcaatatccaatatggtagtggctctgaaagagttgtccatccgtggggacttccggacaaccgttgagtatcttataaagcttctagagacagagtcttttcagatgaatcgaatagacaccggttggctcgacaggctgatcgctgaaaaggtgcaggcagagcggcccgacacaatgctgggagttgtttgtggcgccttacacgtggccgatgtctccctgcgaaacagtgtgagcaacttcctgcactcccttgaaagaggtcaagtgctcccggctcacacactgctgaataccgttgacgtcgaactcatctacgagggagttaaatacgttcttaaagttactagacagtcccccaactcatacgtggtgattatgaatgggagctgtgtcgaggtggacgtgcacagactttcggacggggggctgctactctcctacgatggctccagctatacgacttacatgaaggaggaagttgatcgctaccgcattactataggaaacaagacttgcgtctttgaaaaagaaaatgatccatctgtgatgcgaagcccttctgcaggaaagttgatccagtacatcgtagaagatgggggacacgtattcgcaggacaatgctacgccgagattgaagttatgaagatggtgatgacgcttacagcagtcgagagcgggtgcatccactacgtcaagcgccccggcgctgctcttgatcccggctgcgtgcttgccaagatgcaactcgataatccttcaaaggtgcaacaagcagagttacataccgggtcactaccgaggattcagagcacagctctgaggggagagaaattacaccgagtattccattatgtccttgacaatctcgtgaacgtcatgaacggctactgcctccccgatccatttttttcctctaaggtcaaggactgggtggagcggttgatgaagaccctgagggatcccagtctccctctgttagaattgcaagatatcatgaccagtgtcagtggcaggattcccccaaacgtagagaaaagcatcaagaaggaaatggcacagtatgctagcaacatcacttccgttctctgtcagtttccctcccaacagatagctaacattctggattcccatgctgcaaccctaaataggaagtcggagcgggaagtgttcttcatgaatactcagtcaatcgtacagctagtgcagaggtaccgatccgggattagaggccatatgaaagcggtcgtgatggatctgctcaggcagtatctgagagtcgagactcagttccagaacggacactacgacaagtgcgtgttcgcattacgggaggagaacaaaagcgacatgaacactgtcctaaattacatcttttctcacgcacaggttacaaaaaaaaatttgcttgtgaccatgttaatcgaccagctttgtggacgcgacccgactctcaccgacgaactgctgaacattttgacggagctcactcagctcagcaagactacgaacgctaaggttgctctgcgagctcggcaggtcctaatagcctcccatcttcctagctacgaacttaggcacaaccaggtcgagtctatcttcttgagcgcgatcgacatgtatggccaccagttttgcattgagaacctccagaagctgattctcagtgagacaagtattttcgacgtgttgcctaactttttctaccactccaatcaggtggtgcgaatggcggcattagaggtatatgtccgtagggcttatattgcatatgaacttaatagtgtgcaacaccgccagctgaaggataatacatgtgttgtggaattccagttcatgctgcctacctcccatcccaatcgcggcaacattcccacattaaacaggatgagcttttcaagcaatctgaatcactacgggatgacccacgttgcgtccgtaagtgacgttttgctcgacaatagcttcaccccaccttgtcagcgtatgggcggtatggtgtccttccggaccttcgaggactttgtccgtatcttcgatgaagttatgggctgcttttcagactcccctcctcagtctccaacatttccagaagctggccatacgtcattgtacgacgaagacaaggtcccacgggacgagccaattcacatcttaaacgttgcaattaagaccgattgcgatatagaggatgatcgactcgccgcaatgttccgagagtttacgcaacagaataaagctacactcgtggaccatgggatacggaggcttacatttctggtggcacagaaggactttaggaaacaggtgaactacgaggtcgatcgacggtttcacagagagtttccaaaatttttcacgtttcgagcacgagacaagttcgaggaggacaggatttatcggcacctggagcccgcactggcttttcaactagaactgaatcgcatgcggaattttgaccttacggctatcccctgtgctaaccacaagatgcacctctatctgggcgctgcaaaggttgaagtgggaactgaagttaccgattacagatttttcgtcagggctataattcggcatagcgatctcgtgaccaaggaagccagcttcgaatacttgcagaatgaaggggagcggttactgctcgaggcaatggacgaactggaggtggccttcaataatacaaacgtgcgcactgactgtaatcatatcttcctgaacttcgtccccaccgtaatcatggatcctagcaagattgaagaaagcgtcaggtcaatggtgatgagatatggttcaaggttatggaagcttagagtcctccaggccgaactgaagatcaatattagactgacacccacgggcaaggccatccctattaggctgttcctgaccaatgagagcgggtactacttagatatcagtctgtacaaagaggtcacggatagcagaactgctcagatcatgtttcaggcatacggggacaagcaggggcctcttcatgggatgctcatcaacaccccatacgttaccaaggacctcttgcagagcaagagattccaggcacagtcacttggtaccacctacatctacgacatccccgaaatgtttaggcaatcattaatcaaactgtgggaatctatgtcaacgcaggctttcctgccatctcccccccttccctcggatatgctcacctatactgaacttgttctcgacgaccagggccagttagtgcatatgaatcgactgcctgggggcaacgagatcgggatggtggcatggaaaatgacatttaaatcccccgaatatcccgaaggccgagatattattgtcattggcaacgacataacataccgtatcggatcattcggccctcaggaggacttgctttttctacgggccagtgagcttgccagggcagagggaatacctagaatctacgtaagtgcgaacagcggggctaggattggcttagcagaggaaattagacacatgttccatgtggcgtgggtggatcccgaagatccgtacaaagggtatcggtatctatacctaaccccacaggattataagcgggtttctgcattgaacagtgtccactgcgagcacgttgaggacgaaggggaaagccgctataaaataaccgatatcatcggtaaagaggagggaattggccctgagaacctgagaggatccggcatgattgccggcgagtctagccttgcctacaatgagattattacaatctctctggtcacgtgcagagcaattggaataggggcttacctggtccgccttggacagcggacaattcaggtagaaaatagtcacctcatcctgacgggcgccggggctcttaacaaagttttggggagagaagtgtataccagcaataatcagctgggtgggatccagattatgcacaataatggagtgacgcactgcaccgtgtgtgatgactttgagggggtcttcacggtcctgcattggctttcctacatgccaaaatccgtccactcttctgtgcctctccttaacagcaaagatcctatcgaccgtatcattgagtttgtgccaacaaagactccttatgaccctcgatggatgctggccgggagaccccaccctacgcagaaaggtcagtggttgtccgggttctttgattatgggagcttttctgagattatgcaaccctgggcgcagacggtcgtggtcggtagggcccgactgggcggtattcctgtgggcgtggtcgccgtggaaacccgaactgtagaattaagcatacctgctgacccagccaacctcgacagtgaggcaaagataatccagcaggccggtcaggtctggttccccgacagcgctttcaagacctatcaggccattaaggattttaaccgagaagggctgccactgatggtgttcgcaaattggcgtggctttagtggtggaatgaaagatatgtatgaccaggtacttaagtttggagcttacatagtggacggcttgagggagtgctgtcagccggtgctcgtctacattcctcctcaggccgagttacgcggcggaagctgggtggtaatcgatagtagcataaacccaaggcacatggagatgtatgctgatagagagagcagagggtccgtcctcgagcctgaaggtacagttgagattaagttcagaaggaaagacctggtgaagactatgcggcgagttgaccctgtctacatccatctggccgaacgcttggggacccccgaactgagcaccgccgaacgaaaagagctggagaacaaactgaaggagagggaagagtttttaattcctatataccaccaggtggcggtacagttcgctgacttacatgataccccagggcgaatgcaggagaaaggtgtcattagcgacattcttgattggaaaacgtctagaacctttttctactggcggctgagacggcttctcttagaggatctcgttaaaaagaagattcataacgccaatcccgagctgacagatgggcagatccaggccatgctgcgaagatggttcgtcgaagtggaagggactgtgaaagcgtatgtctgggataataacaaagacctggcagagtggctcgaaaagcagcttaccgaggaagacggagtgcatagtgtaattgaggagaatatcaaatgtattagcagggactacgtccttaaacaaattcgaagcctggtgcaggcaaacccagaggtcgccatggacagcatcattcatatgacccagcatatttctccaacccagcgagcggaggttattaggatcctatcaactatggactctccgtctacctag

SEQ ID NO: 260517 - DNA, 129 bp, Artificial Sequence
  derived and/or modified sequence
atgagcggcctgcacctggtgaagcagggccgggaccggaagaagattgacagtcagcgggattttaccgtggcttccccggctgaatttgtgactagattcggagggaacaaggtgatagagaagtag

SEQ ID NO: 260518 - DNA, 129 bp, Artificial Sequence
  derived and/or modified sequence
atgagcggcctgcacctggtgaagcagggccgggaccggaagaagatcgatagtcaacgggacttcacagtagcaagcccagccgagtttgtcactagatttggtggaaacaaagtgattgaaaaatag

SEQ ID NO: 260519 - DNA, 234 bp, Artificial Sequence
  derived and/or modified sequence
atggacgagcccagccccctggcccagcccctggagctgaaccagcactcacggtttattatcgggtccgtgtctgaggacaactccgaggatgagatctctaacctggtcaaactcgatctgcttgaggaaaaggaggggagtctcagtcccgcctcagtgggctccgatactctgtctgatctgggcatctcttcccttcaggatggactagctctgcacattcgtctgtag

SEQ ID NO: 260520 - DNA, 363 bp, Artificial Sequence
  derived and/or modified sequence
atggacgagcccagccccctggcccagcccctggagctgaaccagcattcccggttcataatcggcagcgtctctgaggacaacagcgaggacgagatctctaacctagtaaagctcgacctgctggaggaaaaagaaggttctctctcacccgcgagtgttgggtccgatacactctccgacctggggattagctcattacaagatggtttggcgctccatattcggagctccatgtcgggtctgcatttagttaaacaggggcgcgaccggaagaaaattgatagccaacgcgactttaccgtagctagcccagctgaattcgtgactcgcttcgggggaaataaggtgatcgagaaatag

SEQ ID NO: 260521 - DNA, 7113 bp, Artificial Sequence
  derived and/or modified sequence
agcttctggaagtggatcagcacccagaccgtgcggatcatccgggccgtgcgcgctcattttggaggcatcatggacgaacctagtccgttggctcagcctttggaactgaaccagcactcccgctttatcattggctcagtgtctgaggacaattccgaagatgaaatctctaatctcgtgaagctagatcttctggaggagaaagaaggcagcctgagcccggcaagcgtgggcagcgatacgctgagcgacctgggaatcagcagtctgcaagatggtctcgccctgcatatacgctcatctatgagcgggctgcaccttgttaagcaaggccgcgaccgcaagaagatcgattctcagagagactttaccgtggccagccccgccgaatttgttacaaggtttgggggaaataaggtgatcgaaaaggtcctcatcgctaacaacggcatcgctgccgtcaaatgcatgagatcgatccgtcggtggtcttacgagatgttccgaaatgagagggctatccggtttgtcgttatggtgacacctgaagatttaaaagctaacgccgagtacatcaaaatggcagatcattatgtgccggtgccaggtggcccaaataataataactacgccaatgtggagctgatccttgatattgcaaagcgcataccagtccaagccgtatgggccggatggggacacgcctccgagaatcctaaactccccgagctcctgctgaagaacggtatcgcatttatggggcctccttctcaggctatgtgggcgctcggggataaaatagctagttctatcgtcgcgcagactgcagggattcccaccctgccctggtccggatctggccttagagtggattggcaagaaaatgatttctccaagcggattctgaacgtgccacaagaattatacgagaaaggctatgttaaggacgtcgacgacggtcttcaggccgccgaggaggtaggctatcccgtgatgattaaggcatccgaaggtggaggtggaaagggcatacgaaaggtgaacaatgccgatgattttccaaacttgttccgtcaggtgcaggccgaggttcccggatcacccatctttgtgatgcggctagcgaaacaaagccggcacctggaagtgcaaatcttggccgatcaatatggtaacgcgatctcgctctttggaagagactgctccgtccagagacgacatcagaaaatcatcgaggaggcaccagccacaatcgctacgccagcagtttttgagcacatggaacagtgtgccgtgaagctggccaagatggtcggatatgtatccgctggaaccgtcgaatacctgtactcccaggatggcagcttctactttctcgaactcaatcctcggctgcaagtcgagcacccttgtacggaaatggttgccgacgtcaatctccccgcagcccagctgcagatagccatgggaattccattgtatagaattaaggacatacggatgatgtatggggtgtccccatggggagactcccctatcgacttcgaggacagcgcccacgtgccttgtcctcgtggccacgtgattgctgcacgcattacaagtgaaaaccctgacgaaggctttaaaccttctagcgggacagtccaggaacttaatttcaggtcgaataaaaatgtatggggatatttctcggtggcggcggcagggggcctacacgagtttgcagactcccagtttggacactgttttagttggggggagaaccgcgaggaagctatctccaatatggtggtcgccttgaaagagttgtctatcaggggcgacttcaggactacggttgagtatcttatcaaactgctcgagaccgagagtttccagatgaaccgcatcgacactggctggctggatcggcttatagccgaaaaggtgcaggcagagaggcccgatacgatgcttggggttgtgtgtggagcattgcacgtagcagacgtgtctttacgtaatagcgtttcgaacttcctccatagcctggagcggggccaagtactacccgcccatacccttctcaacacagttgatgttgaactgatctacgagggcgtgaagtacgtgcttaaggtgactaggcagtcaccaaatagttatgttgtcattatgaacggctcttgtgtggaagtagatgttcacagactcagcgatggcggtctcctcctatcctatgacggatcaagctatacaacatacatgaaagaagaggtcgaccggtatagaattacaatcgggaataagacctgtgtttttgagaaggaaaacgatccatcagtcatgcgatcccccagcgcgggcaagcttatccagtacatcgttgaggatggaggacacgtgttcgccggacagtgttacgctgagatcgaagtcatgaaaatggttatgacattaaccgccgtagagtccggctgtatacactacgtaaaaagacctggagccgccctcgatcctggctgtgttctggccaagatgcaactggataaccctagcaaggtgcagcaggcagaactgcacacgggatccttgccaagaatccagtccacggcccttaggggggaaaagctgcacagggtattccattacgtgttggataacctcgttaatgtgatgaacggctactgcctacccgacccctttttttcaagcaaggtcaaggattgggtggaaaggctgatgaagactctacgagatcctagtttacccctcctggaacttcaagacataatgacttccgttagcggccggattccacccaatgtggaaaaatctatcaagaaggaaatggcccaatatgcttccaatatcacatccgtcctttgccagttcccgtctcaacagatagccaacatactcgacagccacgcagccactttgaatagaaagagtgaacgtgaggtattctttatgaacacgcagtctatagtacagctggtccagcgatatagatctggtattcgcgggcatatgaaggcagtggtaatggacttgctaagacagtatctgcgggtagagacccagttccagaatgggcactatgacaaatgcgtgttcgccctgcgtgaagagaacaaatccgatatgaacacagtgctgaattacatcttctcgcacgctcaggtgacaaagaagaacctgctcgtgacaatgctgattgatcagctttgtggaagagaccccactctaaccgacgaactgctgaatatcctaacggaactgacacaactgagtaaaactactaatgcgaaggtcgctctcagggctagacaggtgttgatagctagccacctccccagctacgagttaagacataatcaggttgagtcgatttttttatctgctattgatatgtatggacaccaattctgcattgaaaaccttcagaaactcatcttgagcgaaacttctatatttgatgtgctgcctaatttcttttaccattctaatcaagtcgtgagaatggctgcgttggaagtgtacgtaaggagagcttacattgcctacgaactgaacagcgtgcagcataggcagttgaaggacaacacttgtgtggtagaattccagtttatgctccctactagccatcccaatcgaggtaatattccaaccctgaatagaatgtccttcagttccaatctaaatcattacggaatgactcacgtcgcttcagtttccgacgtgctattggacaactcctttacacctccgtgtcagcgtatgggtggcatggtgagctttaggaccttcgaggattttgtgcggatctttgatgaggtgatgggatgttttagtgattcaccaccccagagtcccaccttcccagaggccggacacacgagcctgtatgacgaagacaaggtgcctcgtgacgagcccatccatattctgaacgtcgcaatcaagaccgactgcgatattgaggatgatcggcttgcagctatgttccgagaatttacgcagcagaacaaggcaacgctggtggaccacggcatcaggcgcctgactttcctagtggcccagaaagattttagaaagcaggtcaactacgaggtcgaccgcaggttccaccgggagttcccaaaatttttcacatttcgggcacgtgataaatttgaggaggaccggatttaccggcacctggagcccgcactagccttccagctcgaactcaacaggatgaggaacttcgatcttactgcgatcccttgcgccaaccataagatgcatttgtatctcggggctgctaaggtggaggtgggaaccgaagtgaccgactaccgcttttttgtgagagcgataatcaggcacagcgacctggtaactaaggaggccagcttcgaataccttcagaatgagggtgaaaggctcttattggaagcaatggacgagctggaggttgccttcaacaataccaatgtgcggacggattgcaaccacatatttctgaactttgtcccaactgttatcatggatccaagcaagatcgaggaaagcgtcaggagcatggttatgagatatggaagccggctgtggaaacttagggtgctccaggcagaattgaaaattaacatcaggctgacccctacaggtaaagctattccgatccggctgttcctcaccaacgagagcggctactatctggacatttctctctacaaggaagtcactgacagccggactgcgcagataatgtttcaggcttatggggataaacagggccccctgcatgggatgctgatcaatactccctacgtcaccaaggatctgctgcagtccaagcgctttcaagcacagtctctgggaacgacttatatttacgatattcccgaaatgttcaggcagagcttgatcaagctgtgggagtcaatgagtacacaggcttttctgccctccccaccattaccctccgacatgttgacctacacagagctggtactggatgaccaaggccagctggtgcatatgaatagactcccggggggcaatgaaattggaatggtggcctggaagatgacctttaagtccccagaataccccgagggccgtgatataatagtgattggcaatgacatcacctataggattggctcctttgggccacaggaggacctgctgtttctccgtgcgagtgaacttgcgcgcgccgagggcattcctcgcatatacgtcagtgccaattctggcgctaggatagggctcgctgaggaaattaggcacatgtttcatgtcgcctgggtggacccagaggacccttataaagggtaccggtacttgtatcttacccctcaagactacaagagggtcagtgctttgaatagtgtgcactgtgaacacgtggaagacgagggagagtcaagatataagatcaccgacattatcgggaaagaggaaggaattggtccggaaaatctgagaggatccggaatgattgcaggagagagttccttagcctacaacgagatcattacaataagcctagttacgtgccgggcaattggaatcggtgcttatttagtgcgcttagggcagagaactattcaggttgaaaactcgcacctgattcttacaggtgccggggctctgaacaaagtccttggtcgtgaggtctacacttccaataaccagctgggtggaatccagatcatgcacaataatggggtcactcactgcaccgtgtgcgatgatttcgagggggtgtttaccgtgctacactggctgtcgtatatgcctaagtcagtacactctagtgttccactcctcaatagtaaggatccaatcgatagaataatcgaattcgtcccaaccaagacaccctatgacccccgctggatgctcgctgggcggccccatcctacacaaaagggccagtggctctctgggttttttgactacggatctttctccgaaatcatgcagccctgggctcagacagttgtagtgggccgcgctaggctgggtggaattcccgtcggggttgtcgctgttgagacgcgtaccgtggaattgtccatccctgccgaccctgcaaatctggatagcgaagccaaaattatccaacaggccggccaggtgtggttccccgattctgcttttaagacctaccaagccatcaaggactttaatcgagagggtttacccctcatggtctttgctaattggagagggttttctggtggcatgaaggacatgtacgaccaggttcttaagttcggggcatacatcgttgacggtcttagagaatgctgccagcccgtactagtgtacatccctccacaggccgaactgcgcgggggtagttgggtggtgattgactccagcatcaacccgaggcatatggaaatgtacgcagaccgcgaatcccgggggagtgtactcgaaccagaaggcactgtggaaatcaagttccggagaaaagacctggtgaaaacaatgaggagggttgaccctgtctatatacacttggccgaacgactgggcacacctgagttgagcacggccgagagaaaggagttggagaataagcttaaagaaagggaggagtttttgattcctatctaccatcaggtcgctgttcagttcgcggaccttcacgataccccaggccgtatgcaggaaaagggtgttatctctgatatactcgactggaaaaccagtcgtacgttcttctactggagacttcgacggcttctgctggaagacctggttaagaaaaaaattcacaatgcgaaccccgagttgactgatggacaaattcaggccatgctgcgtaggtggtttgtggaggtcgaggggacagttaaggcctacgtctgggataataacaaagatctcgctgaatggctcgagaagcagttaacggaggaagacggcgtgcactccgtgatcgaagaaaatataaaatgcatctctagggattacgttcttaaacaaatccggagtctggttcaggctaatcctgaggttgctatggatagtataatccacatgacccagcacatcagcccaactcaaagggccgaagtcattcggatcctgtcaaccatggatagtcccagtacttag

SEQ ID NO: 260522 - DNA, 144 bp, Artificial Sequence
  derived and/or modified sequence
atggacgagcccagccccctggcccagcccctggagctgaaccagcattcaaggtttattattggaagcgtgtccgaagataactctgaggatgaaatttctaacctagtgaagctggacctgcttgaagagaaggagggttag

SEQ ID NO: 260523 - DNA, 7151 bp, Artificial Sequence
  derived and/or modified sequence
atgtggtggtccaccctgatgagcattctgcgagccagatctttctggaagtggatcagcacccagaccgtaagaatcatccgcgcagttcgggcacatttcggcggaatcatggacgagccatccccactggcccagccactggagctcaaccagcattccagatttattataggatcggttagtgaagacaatagcgaggatgagatatctaatctggtaaaattggatctcttggaagagaaagaaggatctctgagcccggctagcgtcggctctgatacgctctcggacctcggcatatcaagtttacaggatggcctggccttacatatcagatcctctatgagcggcctgcacctcgtcaagcagggcagggacaggaaaaagattgattcccagagagatttcacagtggcttctcccgcagaattcgtaactagatttgggggaaacaaggtaatcgagaaggtcctgattgctaataatggcatagcagcggttaaatgtatgcgaagtataagaagatggagctacgagatgttccggaacgaacgggcaattcggttcgtggtgatggtgactcccgaagacttaaaggcaaacgccgaatatatcaagatggcagaccactacgtgccggttcctgggggacctaataacaacaactatgccaacgtcgagttgatccttgacatcgccaagaggatcccggttcaagctgtgtgggccggatggggtcatgcgtccgaaaacccaaaactgcccgaacttctgctgaaaaacgggattgcatttatgggacctccatctcaagccatgtgggccctcggagacaaaattgccagctccattgtagctcaaacggcgggtatccctacgctgccgtggagtgggtctggacttcgtgtggactggcaagagaatgacttctcaaaaagaattcttaatgtaccacaggaactgtatgaaaaaggatacgtgaaggacgttgatgatggcctacaagctgcagaggaagtgggctaccccgtcatgatcaaggcaagcgagggcggtgggggaaagggcataaggaaggttaataatgcggacgactttcccaacttatttagacaagtgcaggcagaggtgccaggctcccccatttttgtcatgcggctcgcaaagcaatcccgccacctggaggtccagatcctcgcagaccagtacggcaacgcgatctctctcttcggtagggactgctcagttcaacgaaggcaccagaaaatcatagaggaggccccagccacaatagctacacccgctgtgttcgaacacatggagcagtgcgccgtcaaactagcaaaaatggtgggatacgtttcagccggaaccgtcgagtatttatattcccaagacggcagcttctactttctggaactgaatcccagactgcaggtcgagcatccctgcacagaaatggttgccgacgtcaaccttcccgctgctcaactgcagatcgccatgggcatccctctgtaccgcataaaagacattcgaatgatgtacggggtctccccttggggagattccccgattgattttgaggacagtgctcatgttccatgcccaagggggcatgtgattgcagctaggatcacatctgagaatcccgatgaggggttcaaaccatctagcggcaccgtacaggaactgaattttcgctccaacaaaaacgtgtggggctatttctcggtagccgcagcgggtggcctccacgagttcgctgacagccaattcggacactgcttctcatggggtgagaacagggaagaggccattagcaatatggttgtggccttgaaggaactgagcatcagaggcgatttcaggaccactgtagaatacctgatcaaactgctcgaaacggaatcttttcagatgaatcgtatagacacgggctggctcgaccgcctgatcgccgaaaaggtacaggcagagaggccggacacaatgcttggcgtggtgtgtggcgcactccatgtcgcagatgtgtcattacgaaattcggtcagtaatttcctgcacagtctagaacggggacaggttctgccagctcatacgttgttaaatacggtagatgtcgagttaatctatgagggagtcaagtatgtgctcaaagtcacacggcaaagtcctaattcctatgtagtcattatgaatggcagctgcgttgaggtggacgtacataggcttagtgatggaggtctgctgctcagttatgatggaagctcctataccacttatatgaaggaagaggtggataggtatcggataaccattggcaacaaaacgtgcgttttcgagaaagaaaatgatcccagcgtcatgcggtctccaagcgctggcaaacttatccagtacatcgtcgaggacgggggacacgtcttcgcgggacagtgctatgcagagatcgaagtgatgaagatggtcatgaccctcactgccgtggagagcggttgtatacactacgtgaagcgaccgggagctgcactggaccccggatgcgtcctggcaaagatgcagctggacaacccaagcaaagtgcagcaggccgagctgcacactggatcattaccaaggatccaaagcacagcactgagaggcgaaaaactgcatagagtattccactatgtcctagacaacctggtgaacgtcatgaatgggtattgtttgccagacccattcttcagctccaaggtgaaggattgggttgagcggctaatgaaaacactcagggatccgagtctgcccctcttagaattgcaggacatcatgacaagtgtgtccgggagaattccgccaaatgtcgagaagtctataaagaaggagatggcacagtatgcaagcaacattactagtgtgctgtgccaatttccttcacagcagatcgcgaatatactcgattctcatgcggcaaccctgaacagaaagtccgaacgagaggtgttttttatgaacacccagtctatcgtgcagctggtgcagagatatcggtctggcatccgtggacacatgaaagccgtcgttatggacttacttcgccagtacctgagagtggagacacaatttcagaacggtcattacgataaatgtgtgttcgctcttagggaggagaacaagtccgatatgaacacagtcctgaattatatattttcacacgcacaggtgactaagaagaatctgctggttacaatgctcatcgaccaattgtgcggcagggatccaacccttaccgatgagctgctcaacatcctaactgagctgacccagttgtcaaagaccactaatgccaaagtggctctcagggctaggcaggtgctgattgcgtcccatctgccaagctacgaactgagacacaaccaggtggagtctatttttctttccgcgatagacatgtatggccatcagttctgcattgagaacttgcagaagttgatcctgtctgaaacaagtattttcgatgtgcttccaaatttcttttaccactccaaccaggtcgttagaatggcagccctggaggtctatgtgagacgggcatatattgcttacgagctgaattcagtccagcatagacagttgaaggacaatacctgtgtagtagaatttcagttcatgctgcctacttctcaccccaatcgcggaaacattccaacgctgaaccggatgtctttttcctcaaatttaaaccattatgggatgacccacgtggcctccgtctccgacgtgctgctcgataatagctttacccctccctgtcagaggatgggcggtatggtgtccttccggacatttgaggactttgtccggatcttcgacgaagtgatggggtgcttttctgattcaccaccccaatctcccacctttcctgaagctgggcacacctcattatatgacgaagacaaggtccctagagacgagcctatccacatcctcaatgtcgccattaagacagattgtgatatcgaagatgaccggttggcagccatgtttcgggagttcacacagcaaaataaggccactcttgttgaccacggcattcggagactcacctttttggtggctcagaaagattttagaaaacaagtgaactacgaagttgatcggaggtttcaccgcgaatttccaaagttttttaccttcagggctagagataagttcgaagaagatcgcatataccgccacctggaaccggcactggcttttcagttggaacttaacaggatgcggaattttgatctgaccgcaatcccatgtgccaatcacaagatgcatttgtatttaggggctgcgaaggttgaggtgggaaccgaggtgactgattaccgcttctttgtgcgagctatcatccggcattctgacctggttaccaaggaagcatcctttgaatatctgcaaaatgaaggcgagcggctcctgctcgaggccatggatgaactggaggtggcttttaacaatacaaatgtccggaccgactgcaatcacatcttcctgaactttgtcccaacagttatcatggacccttccaagatcgaagagtccgtgcggtccatggtgatgcgttacgggtcacgactttggaagcttcgagtactgcaggcagaactgaaaatcaatatacgtctgaccccgacggggaaagcaatccctatacggctgttcttgacgaatgagagcggatactacctggacatcagtctctacaaggaggtgaccgacagccgcactgctcagattatgttccaggcttatggcgataagcagggccctctgcacggtatgctcatcaacacaccatatgtcactaaagaccttctgcagtccaagaggtttcaggcccagagcctgggcactacctatatctatgacattcccgaaatgttccggcagtcattgatcaagttgtgggagtctatgtccacacaggcctttttaccaagccctcctttgccaagtgatatgcttacatataccgagctggtccttgatgatcagggccagctagtgcacatgaacagactcccagggggaaacgagatcgggatggtggcgtggaagatgactttcaagtccccagagtacccagagggacgcgacattattgtcatcggcaacgacatcacttatcgaatcggcagtttcggaccacaggaagacctgttatttctccgtgcttctgagctcgcacgtgctgaaggaatccctcgcatatatgtgagcgctaatagtggagccagaatcgggttggccgaggaaattcgacacatgttccatgtcgcctgggtggatcctgaggatccgtacaagggctaccggtacctctacttgaccccccaggattacaaacgcgtgagcgccttaaattccgtccactgtgaacatgtggaggatgagggtgaaagtagatacaagattacagatataatcggaaaggaagagggtataggcccagaaaacctccgcggtagcggaatgattgctggggagagcagcctggcctataatgagatcatcacaatctcactagtaacctgccgtgccataggcataggagcctacctcgtccgtctgggacagcgcaccatccaggtggagaattcacacctgatcctcacaggggcaggggcacttaataaggtgctgggccgagaagtgtatacctcaaacaaccagctcggaggcatacagatcatgcataacaacggagtgacccactgcacggtttgcgacgattttgaaggggttttcacagtcctccactggctctcatacatgcctaaaagcgtccactcctcggttcccctgttaaactccaaggatcccatcgaccgaatcatcgaatttgtgcccaccaagacaccgtatgaccctaggtggatgttggcagggagaccgcaccccacacagaagggacagtggctcagcggattttttgattacgggagtttcagcgagatcatgcaaccatgggcgcagactgtcgttgtgggccgagcaagactgggcggtataccagttggagtggtggccgttgagacccggaccgtggaactgtccattccagccgacccagcgaatctggattctgaggctaagattatccagcaagcagggcaagtgtggtttcccgatagcgcgttcaagacctaccaggctataaaagactttaaccgggaaggccttccacttatggtttttgcaaactggaggggattctcagggggaatgaaagatatgtacgatcaggtccttaagtttggagcttatatcgtagatggtttgcgggagtgctgccaacccgtgttagtgtatatcccaccacaggccgagcttcggggagggagttgggtggtcatcgactcttctatcaaccctcgtcacatggaaatgtatgcggacagggagagtcggggttctgtgctcgaacctgaggggacggtagagattaaattcagaaggaaggaccttgtgaaaactatgagaagggttgatccggtgtacattcacctcgcagaacgactggggactcccgagctctccacagcagagagaaaagagctagagaacaaactgaaggaacgcgaagaatttctgattccaatctaccaccaggttgctgtccagtttgccgatctacatgacacacccggacgtatgcaagaaaaaggcgtgataagcgatattctggattggaagacctcccggacattcttttattggcggttacggcgactgctgctggaggacctggtgaagaaaaagattcataacgccaaccccgagctcacagatggacagattcaggctatgctcagacggtggttcgtggaagtagaggggaccgtcaaagcgtacgtctgggacaacaacaaagatctggcagagtggcttgagaagcaacttacggaggaagacggtgtccactctgtaattgaagaaaatatcaagtgtatttcccgggattatgtgctgaaacaaattcggagtctggtacaggcaaatcctgaagttgctatggattccataatccacatgacacaacacatcagccctacccagcgggcagaggttatacgcatactatcgacgatggactccccaagtactta

SEQ ID NO: 260524 - DNA, 129 bp, Artificial Sequence
  derived and/or modified sequence
atgtccggtctgcacctcgtgaagcagggtagagaccggaagaagatagacagtcagcgcgacttcacagtggcttcccctgccgagttcgtgactagatttggcggaaataaggttattgaaaaatag

SEQ ID NO: 260525 - DNA, 129 bp, Artificial Sequence
  derived and/or modified sequence
atgagtgggctccatctagtcaagcagggcagagacagaaagaagatcgacagccagcgagactttacagtggcttcacctgcagaatttgttacccggttcgggggtaacaaggtcatagaaaaatag

SEQ ID NO: 260526 - DNA, 234 bp, Artificial Sequence
  derived and/or modified sequence
atggatgagcctagtcctctggctcagccacttgagctgaaccaacactctagatttattattgggagtgtgtctgaggacaacagcgaggatgagatctccaatctggttaaactcgacctgctggaagagaaagagggaagcctgtccccagcgtctgtgggctccgatactttgtcggacctcggtatcagcagtcttcaggatgggctggcactgcacatcagactctag

SEQ ID NO: 260527 - DNA, 363 bp, Artificial Sequence
  derived and/or modified sequence
atggatgagcccagccctctcgctcagcccttggagttaaaccagcattccagatttatcattggatccgtgtctgaggacaattctgaggatgagatttccaacctggttaagctggatctactcgaagaaaaggaagggagcctgagccccgctagcgtcggaagcgacaccctgagcgatctcggaatcagttctttacaggacggcctggcacttcacatcaggtccagcatgtccggattacacctggtgaagcaggggcgagatagaaagaagatagacagccagcgagattttacagtcgcatctcctgcagaatttgttactagattcggaggtaacaaagtgattgagaaatag

SEQ ID NO: 260528 - DNA, 7112 bp, Artificial Sequence
  derived and/or modified sequence
tccttttggaaatggatctccacccagacagtgcgtattattagggctgtcagggcccacttcggtggcatcatggatgagccctcacccctggcccaacccctggagctcaaccaacacagcaggttcataatcgggtcagtgagtgaggacaattctgaagacgagatctcaaatctggttaagctggacctcttagaagagaaggagggcagtcttagccctgccagtgtaggctctgataccctcagcgacttgggaatcagcagtctgcaggacggcctggcccttcacatcaggtccagcatgagcgggctacacctggtgaaacaagggagggaccgcaagaaaattgacagccaacgagattttacggtggcgagtcccgctgagtttgtgactcggtttggcggaaataaggtgatagagaaagtcctgatcgctaacaacgggatcgctgcagtgaagtgtatgcgcagcataagacgctggtcgtacgagatgttccggaatgagcgcgctatccggttcgtggtgatggttacccctgaggacctaaaggcaaacgcggagtatatcaagatggcagaccactacgtcccagtgcccggagggcctaacaacaataattatgccaatgtcgagctcatccttgacattgcaaagcggatccctgtgcaggccgtatgggccggttggggccatgcttctgaaaatccaaaattgcccgagctgctcctgaaaaacggcattgccttcatgggccctcccagtcaggcaatgtgggcattaggtgacaaaatcgcgagttctatcgtcgcccagaccgctggcattcctactttgccatggtccgggagcggcttgagggttgattggcaggagaatgacttcagcaagcgaattctaaacgtgccgcaggaactgtatgaaaagggttacgtgaaagacgtggacgacggactgcaggctgcagaggaggtgggatacccagtaatgattaaggcatctgaggggggaggcggaaaaggaataaggaaggtaaacaacgccgacgacttccctaacttgttccgccaggtccaggcagaagtccctggcagtccgatcttcgtgatgaggctcgcaaaacagtctcggcacctcgaggtccagattttggccgaccagtacggcaacgcaatctccctgtttggcagagattgctctgtgcagcgacgacatcaaaagatcatagaggaagccccagctactatagccacccccgcagtgtttgaacacatggagcagtgtgccgttaaactcgctaagatggtggggtacgtgtccgccggtaccgtcgaatacctttactcccaggacggctcattttattttctggagctcaacccgaggctccaggtagaacacccttgtacagaaatggtggccgatgttaatttgcccgctgcccagttgcagatcgccatggggatccccctatatcgtattaaagatatcaggatgatgtatggggtgtcgccctggggggattcaccaattgactttgaggattctgcccatgtgccatgtcccagaggccacgtcatcgcagctcgcatcacttccgaaaaccccgatgaaggcttcaagcctagttccggaacagtgcaagaactgaacttccgtagcaacaagaatgtctggggctatttctcagttgccgctgcaggaggcttgcacgaattcgctgatagtcaatttggccattgcttcagctggggcgagaacagggaggaagctatcagcaacatggtggtggcgctgaaagaactctccatcagaggggacttccggaccactgttgagtatctgattaaacttttggagacagaaagcttccaaatgaaccgaatcgacaccgggtggctggaccgcttgatagcggaaaaggttcaggcagagcgccctgatactatgctgggtgtcgtgtgcggagccctgcacgttgcggacgtttccctgcggaactctgtgtccaacttcctccactccctcgaacgtggacaagtattgccagcccacactctgctcaacaccgtggacgtcgaactcatttacgagggagttaagtacgtcttgaaagtgacccgacagagtcccaattcttacgtagtaatcatgaacgggtcttgcgtcgaggttgatgtccacaggctgtctgatgggggactgctgctgtcttatgatggtagtagctataccacatacatgaaagaagaggtagatcgttatcgcatcacaataggcaacaaaacctgcgtcttcgagaaagagaacgatccttccgtaatgagatccccgtccgccggaaaattaatacagtatatcgtcgaagatggtggacacgtgttcgccggtcagtgttacgccgagatagaggtcatgaagatggttatgaccttaacagccgtcgaatcggggtgcattcactatgtcaagcgccctggagccgctctcgatcccggatgcgtcctggccaagatgcagctggataatcccagtaaggtgcagcaggcagaactgcataccggctctttgcccaggatccaaagcacagccctgaggggcgagaaactccacagagtattccactatgtgctggacaacctggttaacgtcatgaacggctactgtctgccggatccttttttttcctctaaggtgaaagactgggtagagagactgatgaaaacccttcgcgatccctctctccccctgctggagctgcaggacatcatgacgtccgtgagtggacgcatccccccaaacgtcgagaaaagtatcaaaaaggagatggcccagtacgcctcgaatattacctctgttctctgtcagtttcctagtcaacaaatagccaacatcttggatagccacgccgcaacgctgaaccggaagtcagagagggaagtattttttatgaatacccaatcaatcgttcaactggtgcagagatacaggtctggcatccgaggccacatgaaggctgtggtgatggatctcctgagacaatatctgcgagttgaaacacagttccagaatggacattacgataaatgcgtgttcgctctgcgagaggagaataagagtgatatgaacaccgtcctgaattacatcttttcacacgcgcaggtgacgaagaagaatttgctggtgaccatgttgatcgaccagttatgtggccgagatcctaccctcacggatgagctcctgaatattctgacagagttgactcagttgtcgaagactaccaatgcaaaggtggcattgcgggctcgccaggttttgatcgcctcccatctgccctcatatgagctgcggcataatcaagtggagagcatcttcctttctgctattgacatgtacggccatcagttctgtatagaaaacctccagaagctgatcctgtccgagactagcatctttgatgtcctgcccaactttttctaccactctaaccaggtggtcaggatggcagcattggaagtgtacgtgcgaagagcatatatagcctacgaactgaatagcgtgcagcataggcagctcaaggataacacctgcgtcgtggagttccagtttatgctgcccacctcacacccgaacagggggaacatccctacgctgaatcggatgtctttctcgagtaacctaaatcattatgggatgacgcatgttgccagtgtcagtgacgtcctcctggacaacagctttacgccaccatgtcaaagaatggggggaatggtctcgtttagaacctttgaggactttgtgcggatcttcgacgaggtgatgggctgcttctccgactcaccccctcagtctcctacattccccgaagctggccacaccagtctctacgatgaggacaaggtaccaagagatgagcctatccatatcctgaacgtcgccatcaagaccgattgcgacattgaggacgaccggctcgccgcaatgtttagagagtttacacagcagaataaggccaccctagttgatcatggtatccggaggctgacattcctggtcgcccagaaggatttccggaaacaggtcaactacgaagtggatcgacgattccaccgcgagttccctaaattctttacctttcgggctcgcgataaatttgaagaggatcgaatctacagacacctggaacccgcattggccttccagctggaactgaatcggatgagaaattttgatttgacggctataccctgtgccaatcacaaaatgcacctttacctcggcgcagcaaaggttgaagtgggcaccgaggtcactgactaccggttctttgttcgggctataatcagacattcagatctggtgacaaaagaggcttcgtttgaatatctgcagaatgagggggagcgcttactgctcgaggctatggacgaattagaagtcgccttcaataatacgaacgttagaacggactgcaatcacatctttttgaacttcgtgccaactgtaattatggacccgtctaagattgaggagtccgtacgatcaatggtgatgaggtatggtagccgcctgtggaaactccgggttctccaggcggaactgaagatcaacatacgccttactccgaccggtaaggcaatccccattaggctgtttttgactaacgagagcggctactatttggatattagcctgtataaagaagtgacagatagtcgcacggcccagatcatgttccaggcttacggcgacaaacaaggacccttgcatggtatgctgatcaatacaccttacgtaacgaaggacttgcttcaatctaagagattccaggcccagagtctgggcacaacctacatctatgatattcccgagatgttccgccagtctttgatcaagctctgggagagtatgtctacccaggctttcctcccctctccaccattgcctagcgacatgctgacctacacggagctggttctggacgatcaggggcaattggttcatatgaatagactaccaggtgggaacgaaataggcatggtggcctggaagatgacatttaaaagtcccgagtaccccgaaggcagggatataatcgtgataggcaacgatatcacctacagaattggctcatttggaccacaggaggatctcctgttcctaagggcatcagagctggctcgcgcagaaggaattccaagaatttatgtgagtgcaaatagcggggcacgtatcggtttggctgaagagatcaggcatatgtttcacgttgcctgggtggaccccgaggatccatataagggctaccggtacttgtacctcacacctcaggattataaacgcgtttctgcccttaattccgtccactgcgagcatgttgaggacgaaggagaaagtagatacaagattacggacattattggcaaggaagaaggtattggcccagaaaacctgcggggatctggcatgatcgccggagaaagctcacttgcctacaatgagatcatcacaatctcattggtaacctgtagggccatcgggatcggagcgtatcttgtccgacttggtcaacgcacaatccaggtggagaactcccacttgatcctgacgggggcaggcgctcttaacaaggtacttggacgggaggtgtacacctctaacaatcagctaggaggcattcaaataatgcacaacaatggcgttacccactgcaccgtatgcgatgactttgagggcgtcttcaccgtgctgcattggctgagttatatgcccaagtcagtgcattcttccgtgccacttctgaatagtaaggatcctatcgatcgcatcattgagttcgtacccaccaagacaccctacgatcccagatggatgctggcaggcagaccccaccccacgcagaaaggccagtggctttcaggttttttcgactatgggagcttctctgagatcatgcaaccatgggcacaaactgttgtggtaggaagagccagacttggcggaatcccagtcggtgtcgtggcggtggaaaccaggaccgtggaactgtccatccccgcagaccctgcgaacttagattccgaggctaagataatccagcaagccggtcaggtctggtttccggattcggctttcaaaacctatcaggctattaaagacttcaatagggagggactgcccctgatggtgttcgctaattggcggggatttagcggtggtatgaaggatatgtacgatcaggttcttaagtttggagcgtatattgttgatggcctgcgggaatgttgtcagccggttttggtgtatattcctccacaagcagagttgcgcggaggcagttgggtcgtgattgacagtagcatcaacccccgacacatggaaatgtacgccgatcgagagagtaggggttccgttctggagcccgaaggaacagtggaaatcaaattccggaggaaggacctcgttaaaacgatgcgcagagtagacccagtctacatacacttagcagaacgcttgggcactcctgaactgtccacggctgaacgaaaggagcttgagaacaagctaaaagaacgcgaagagtttctcatccctatctatcaccaggtggccgtgcagtttgcagacctccatgatacacctggcaggatgcaagagaaaggcgtaatttctgatatccttgattggaaaacaagcaggacatttttctactggaggctgcggagactgctgctcgaagaccttgtgaaaaaaaaaatacacaacgctaatcctgagctgaccgacggacaaatccaggccatgctgcgcaggtggtttgtggaagtagaaggaactgtaaaagcctacgtgtgggataataataaggacctggcggaatggctcgaaaagcagttgacagaggaggatggagtgcactcagtgatcgaggagaacattaaatgcatttcgcgggattatgttctgaagcaaatccgctccctcgtgcaggccaatcccgaggtggccatggactcgataatacatatgactcagcatatttcacccactcaacgggcagaagtaattcgcatcttatctacaatggacagtccttccaccta

SEQ ID NO: 260529 - DNA, 144 bp, Artificial Sequence
  derived and/or modified sequence
atggatgagccttcccccctcgctcagccgctggagctcaatcagcactccagatttatcataggttcggtgtccgaagacaactctgaagatgaaatttcaaatctagtgaagctagatctgcttgaagaaaaggagggctag

SEQ ID NO: 260530 - DNA, 7152 bp, Artificial Sequence
  derived and/or modified sequence
atgtggtggagcaccctgatgagcatcctgagagccagaagcttctggaagtggatcagcacccagaccgtgagaatcatcagagccgtgagagcccacttcggcggcatcatggacgagcccagccccctggcccagcccctggagctgaaccagcacagcagattcatcatcggcagcgtgagcgaggacaacagcgaggacgagatcagcaacctggtgaagctggacctgctggaggagaaggagggcagcctgagccccgccagcgtgggcagcgacaccctgagcgacctgggcatcagcagcctgcaggacggcctggccctgcacatcagaagcagcatgagcggcctgcacctggtgaagcagggcagagacagaaagaagatcgacagccagagagacttcaccgtggccagccccgccgagttcgtgaccagattcggcggcaacaaggtgatcgagaaggtgctgatcgccaacaacggcatcgccgccgtgaagtgcatgagaagcatcagaagatggagctacgagatgttcagaaacgagagagccatcagattcgtggtgatggtgacccccgaggacctgaaggccaacgccgagtacatcaagatggccgaccactacgtgcccgtgcccggcggccccaacaacaacaactacgccaacgtggagctgatcctggacatcgccaagagaatccccgtgcaggccgtgtgggccggctggggccacgccagcgagaaccccaagctgcccgagctgctgctgaagaacggcatcgccttcatgggcccccccagccaggccatgtgggccctgggcgacaagatcgccagcagcatcgtggcccagaccgccggcatccccaccctgccctggagcggcagcggcctgagagtggactggcaggagaacgacttcagcaagagaatcctgaacgtgccccaggagctgtacgagaagggctacgtgaaggacgtggacgacggcctgcaggccgccgaggaggtgggctaccccgtgatgatcaaggccagcgagggcggcggcggcaagggcatcagaaaggtgaacaacgccgacgacttccccaacctgttcagacaggtgcaggccgaggtgcccggcagccccatcttcgtgatgagactggccaagcagagcagacacctggaggtgcagatcctggccgaccagtacggcaacgccatcagcctgttcggcagagactgcagcgtgcagagaagacaccagaagatcatcgaggaggcccccgccaccatcgccacccccgccgtgttcgagcacatggagcagtgcgccgtgaagctggccaagatggtgggctacgtgagcgccggcaccgtggagtacctgtacagccaggacggcagcttctacttcctggagctgaaccccagactgcaggtggagcacccctgcaccgagatggtggccgacgtgaacctgcccgccgcccagctgcagatcgccatgggcatccccctgtacagaatcaaggacatcagaatgatgtacggcgtgagcccctggggcgacagccccatcgacttcgaggacagcgcccacgtgccctgccccagaggccacgtgatcgccgccagaatcaccagcgagaaccccgacgagggcttcaagcccagcagcggcaccgtgcaggagctgaacttcagaagcaacaagaacgtgtggggctacttcagcgtggccgccgccggcggcctgcacgagttcgccgacagccagttcggccactgcttcagctggggcgagaacagagaggaggccatcagcaacatggtggtggccctgaaggagctgagcatcagaggcgacttcagaaccaccgtggagtacctgatcaagctgctggagaccgagagcttccagatgaacagaatcgacaccggctggctggacagactgatcgccgagaaggtgcaggccgagagacccgacaccatgctgggcgtggtgtgcggcgccctgcacgtggccgacgtgagcctgagaaacagcgtgagcaacttcctgcacagcctggagagaggccaggtgctgcccgcccacaccctgctgaacaccgtggacgtggagctgatctacgagggcgtgaagtacgtgctgaaggtgaccagacagagccccaacagctacgtggtgatcatgaacggcagctgcgtggaggtggacgtgcacagactgagcgacggcggcctgctgctgagctacgacggcagcagctacaccacctacatgaaggaggaggtggacagatacagaatcaccatcggcaacaagacctgcgtgttcgagaaggagaacgaccccagcgtgatgagaagccccagcgccggcaagctgatccagtacatcgtggaggacggcggccacgtgttcgccggccagtgctacgccgagatcgaggtgatgaagatggtgatgaccctgaccgccgtggagagcggctgcatccactacgtgaagagacccggcgccgccctggaccccggctgcgtgctggccaagatgcagctggacaaccccagcaaggtgcagcaggccgagctgcacaccggcagcctgcccagaatccagagcaccgccctgagaggcgagaagctgcacagagtgttccactacgtgctggacaacctggtgaacgtgatgaacggctactgcctgcccgaccccttcttcagcagcaaggtgaaggactgggtggagagactgatgaagaccctgagagaccccagcctgcccctgctggagctgcaggacatcatgaccagcgtgagcggcagaatcccccccaacgtggagaagagcatcaagaaggagatggcccagtacgccagcaacatcaccagcgtgctgtgccagttccccagccagcagatcgccaacatcctggacagccacgccgccaccctgaacagaaagagcgagagagaggtgttcttcatgaacacccagagcatcgtgcagctggtgcagagatacagaagcggcatcagaggccacatgaaggccgtggtgatggacctgctgagacagtacctgagagtggagacccagttccagaacggccactacgacaagtgcgtgttcgccctgagagaggagaacaagagcgacatgaacaccgtgctgaactacatcttcagccacgcccaggtgaccaagaagaacctgctggtgaccatgctgatcgaccagctgtgcggcagagaccccaccctgaccgacgagctgctgaacatcctgaccgagctgacccagctgagcaagaccaccaacgccaaggtggccctgagagccagacaggtgctgatcgccagccacctgcccagctacgagctgagacacaaccaggtggagagcatcttcctgagcgccatcgacatgtacggccaccagttctgcatcgagaacctgcagaagctgatcctgagcgagaccagcatcttcgacgtgctgcccaacttcttctaccacagcaaccaggtggtgagaatggccgccctggaggtgtacgtgagaagagcctacatcgcctacgagctgaacagcgtgcagcacagacagctgaaggacaacacctgcgtggtggagttccagttcatgctgcccaccagccaccccaacagaggcaacatccccaccctgaacagaatgagcttcagcagcaacctgaaccactacggcatgacccacgtggccagcgtgagcgacgtgctgctggacaacagcttcacccccccctgccagagaatgggcggcatggtgagcttcagaaccttcgaggacttcgtgagaatcttcgacgaggtgatgggctgcttcagcgacagccccccccagagccccaccttccccgaggccggccacaccagcctgtacgacgaggacaaggtgcccagagacgagcccatccacatcctgaacgtggccatcaagaccgactgcgacatcgaggacgacagactggccgccatgttcagagagttcacccagcagaacaaggccaccctggtggaccacggcatcagaagactgaccttcctggtggcccagaaggacttcagaaagcaggtgaactacgaggtggacagaagattccacagagagttccccaagttcttcaccttcagagccagagacaagttcgaggaggacagaatctacagacacctggagcccgccctggccttccagctggagctgaacagaatgagaaacttcgacctgaccgccatcccctgcgccaaccacaagatgcacctgtacctgggcgccgccaaggtggaggtgggcaccgaggtgaccgactacagattcttcgtgagagccatcatcagacacagcgacctggtgaccaaggaggccagcttcgagtacctgcagaacgagggcgagagactgctgctggaggccatggacgagctggaggtggccttcaacaacaccaacgtgagaaccgactgcaaccacatcttcctgaacttcgtgcccaccgtgatcatggaccccagcaagatcgaggagagcgtgagaagcatggtgatgagatacggcagcagactgtggaagctgagagtgctgcaggccgagctgaagatcaacatcagactgacccccaccggcaaggccatccccatcagactgttcctgaccaacgagagcggctactacctggacatcagcctgtacaaggaggtgaccgacagcagaaccgcccagatcatgttccaggcctacggcgacaagcagggccccctgcacggcatgctgatcaacaccccctacgtgaccaaggacctgctgcagagcaagagattccaggcccagagcctgggcaccacctacatctacgacatccccgagatgttcagacagagcctgatcaagctgtgggagagcatgagcacccaggccttcctgcccagcccccccctgcccagcgacatgctgacctacaccgagctggtgctggacgaccagggccagctggtgcacatgaacagactgcccggcggcaacgagatcggcatggtggcctggaagatgaccttcaagagccccgagtaccccgagggcagagacatcatcgtgatcggcaacgacatcacctacagaatcggcagcttcggcccccaggaggacctgctgttcctgagagccagcgagctggccagagccgagggcatccccagaatctacgtgagcgccaacagcggcgccagaatcggcctggccgaggagatcagacacatgttccacgtggcctgggtggaccccgaggacccctacaagggctacagatacctgtacctgaccccccaggactacaagagagtgagcgccctgaacagcgtgcactgcgagcacgtggaggacgagggcgagagcagatacaagatcaccgacatcatcggcaaggaggagggcatcggccccgagaacctgagaggcagcggcatgatcgccggcgagagcagcctggcctacaacgagatcatcaccatcagcctggtgacctgcagagccatcggcatcggcgcctacctggtgagactgggccagagaaccatccaggtggagaacagccacctgatcctgaccggcgccggcgccctgaacaaggtgctgggcagagaggtgtacaccagcaacaaccagctgggcggcatccagatcatgcacaacaacggcgtgacccactgcaccgtgtgcgacgacttcgagggcgtgttcaccgtgctgcactggctgagctacatgcccaagagcgtgcacagcagcgtgcccctgctgaacagcaaggaccccatcgacagaatcatcgagttcgtgcccaccaagaccccctacgaccccagatggatgctggccggcagaccccaccccacccagaagggccagtggctgagcggcttcttcgactacggcagcttcagcgagatcatgcagccctgggcccagaccgtggtggtgggcagagccagactgggcggcatccccgtgggcgtggtggccgtggagaccagaaccgtggagctgagcatccccgccgaccccgccaacctggacagcgaggccaagatcatccagcaggccggccaggtgtggttccccgacagcgccttcaagacctaccaggccatcaaggacttcaacagagagggcctgcccctgatggtgttcgccaactggagaggcttcagcggcggcatgaaggacatgtacgaccaggtgctgaagttcggcgcctacatcgtggacggcctgagagagtgctgccagcccgtgctggtgtacatccccccccaggccgagctgagaggcggcagctgggtggtgatcgacagcagcatcaaccccagacacatggagatgtacgccgacagagagagcagaggcagcgtgctggagcccgagggcaccgtggagatcaagttcagaagaaaggacctggtgaagaccatgagaagagtggaccccgtgtacatccacctggccgagagactgggcacccccgagctgagcaccgccgagagaaaggagctggagaacaagctgaaggagagagaggagttcctgatccccatctaccaccaggtggccgtgcagttcgccgacctgcacgacacccccggcagaatgcaggagaagggcgtgatcagcgacatcctggactggaagaccagcagaaccttcttctactggagactgagaagactgctgctggaggacctggtgaagaagaagatccacaacgccaaccccgagctgaccgacggccagatccaggccatgctgagaagatggttcgtggaggtggagggcaccgtgaaggcctacgtgtgggacaacaacaaggacctggccgagtggctggagaagcagctgaccgaggaggacggcgtgcacagcgtgatcgaggagaacatcaagtgcatcagcagagactacgtgctgaagcagatcagaagcctggtgcaggccaaccccgaggtggccatggacagcatcatccacatgacccagcacatcagccccacccagagagccgaggtgatcagaatcctgagcaccatggacagccccagcacctag

SEQ ID NO: 260531 - DNA, 129 bp, Artificial Sequence
  derived and/or modified sequence
atgagcggcctgcacctggtgaagcagggcagagacagaaagaagatcgacagccagagagacttcaccgtggccagccccgccgagttcgtgaccagattcggcggcaacaaggtgatcgagaagtag

SEQ ID NO: 260532 - DNA, 234 bp, Artificial Sequence
  derived and/or modified sequence
atggacgagcccagccccctggcccagcccctggagctgaaccagcacagcagattcatcatcggcagcgtgagcgaggacaacagcgaggacgagatcagcaacctggtgaagctggacctgctggaggagaaggagggcagcctgagccccgccagcgtgggcagcgacaccctgagcgacctgggcatcagcagcctgcaggacggcctggccctgcacatcagactgtag

SEQ ID NO: 260533 - DNA, 363 bp, Artificial Sequence
  derived and/or modified sequence
atggacgagcccagccccctggcccagcccctggagctgaaccagcacagcagattcatcatcggcagcgtgagcgaggacaacagcgaggacgagatcagcaacctggtgaagctggacctgctggaggagaaggagggcagcctgagccccgccagcgtgggcagcgacaccctgagcgacctgggcatcagcagcctgcaggacggcctggccctgcacatcagaagcagcatgagcggcctgcacctggtgaagcagggcagagacagaaagaagatcgacagccagagagacttcaccgtggccagccccgccgagttcgtgaccagattcggcggcaacaaggtgatcgagaagtag

SEQ ID NO: 260534 - DNA, 7113 bp, Artificial Sequence
  derived and/or modified sequence
agcttctggaagtggatcagcacccagaccgtgagaatcatcagagccgtgagagcccacttcggcggcatcatggacgagcccagccccctggcccagcccctggagctgaaccagcacagcagattcatcatcggcagcgtgagcgaggacaacagcgaggacgagatcagcaacctggtgaagctggacctgctggaggagaaggagggcagcctgagccccgccagcgtgggcagcgacaccctgagcgacctgggcatcagcagcctgcaggacggcctggccctgcacatcagaagcagcatgagcggcctgcacctggtgaagcagggcagagacagaaagaagatcgacagccagagagacttcaccgtggccagccccgccgagttcgtgaccagattcggcggcaacaaggtgatcgagaaggtgctgatcgccaacaacggcatcgccgccgtgaagtgcatgagaagcatcagaagatggagctacgagatgttcagaaacgagagagccatcagattcgtggtgatggtgacccccgaggacctgaaggccaacgccgagtacatcaagatggccgaccactacgtgcccgtgcccggcggccccaacaacaacaactacgccaacgtggagctgatcctggacatcgccaagagaatccccgtgcaggccgtgtgggccggctggggccacgccagcgagaaccccaagctgcccgagctgctgctgaagaacggcatcgccttcatgggcccccccagccaggccatgtgggccctgggcgacaagatcgccagcagcatcgtggcccagaccgccggcatccccaccctgccctggagcggcagcggcctgagagtggactggcaggagaacgacttcagcaagagaatcctgaacgtgccccaggagctgtacgagaagggctacgtgaaggacgtggacgacggcctgcaggccgccgaggaggtgggctaccccgtgatgatcaaggccagcgagggcggcggcggcaagggcatcagaaaggtgaacaacgccgacgacttccccaacctgttcagacaggtgcaggccgaggtgcccggcagccccatcttcgtgatgagactggccaagcagagcagacacctggaggtgcagatcctggccgaccagtacggcaacgccatcagcctgttcggcagagactgcagcgtgcagagaagacaccagaagatcatcgaggaggcccccgccaccatcgccacccccgccgtgttcgagcacatggagcagtgcgccgtgaagctggccaagatggtgggctacgtgagcgccggcaccgtggagtacctgtacagccaggacggcagcttctacttcctggagctgaaccccagactgcaggtggagcacccctgcaccgagatggtggccgacgtgaacctgcccgccgcccagctgcagatcgccatgggcatccccctgtacagaatcaaggacatcagaatgatgtacggcgtgagcccctggggcgacagccccatcgacttcgaggacagcgcccacgtgccctgccccagaggccacgtgatcgccgccagaatcaccagcgagaaccccgacgagggcttcaagcccagcagcggcaccgtgcaggagctgaacttcagaagcaacaagaacgtgtggggctacttcagcgtggccgccgccggcggcctgcacgagttcgccgacagccagttcggccactgcttcagctggggcgagaacagagaggaggccatcagcaacatggtggtggccctgaaggagctgagcatcagaggcgacttcagaaccaccgtggagtacctgatcaagctgctggagaccgagagcttccagatgaacagaatcgacaccggctggctggacagactgatcgccgagaaggtgcaggccgagagacccgacaccatgctgggcgtggtgtgcggcgccctgcacgtggccgacgtgagcctgagaaacagcgtgagcaacttcctgcacagcctggagagaggccaggtgctgcccgcccacaccctgctgaacaccgtggacgtggagctgatctacgagggcgtgaagtacgtgctgaaggtgaccagacagagccccaacagctacgtggtgatcatgaacggcagctgcgtggaggtggacgtgcacagactgagcgacggcggcctgctgctgagctacgacggcagcagctacaccacctacatgaaggaggaggtggacagatacagaatcaccatcggcaacaagacctgcgtgttcgagaaggagaacgaccccagcgtgatgagaagccccagcgccggcaagctgatccagtacatcgtggaggacggcggccacgtgttcgccggccagtgctacgccgagatcgaggtgatgaagatggtgatgaccctgaccgccgtggagagcggctgcatccactacgtgaagagacccggcgccgccctggaccccggctgcgtgctggccaagatgcagctggacaaccccagcaaggtgcagcaggccgagctgcacaccggcagcctgcccagaatccagagcaccgccctgagaggcgagaagctgcacagagtgttccactacgtgctggacaacctggtgaacgtgatgaacggctactgcctgcccgaccccttcttcagcagcaaggtgaaggactgggtggagagactgatgaagaccctgagagaccccagcctgcccctgctggagctgcaggacatcatgaccagcgtgagcggcagaatcccccccaacgtggagaagagcatcaagaaggagatggcccagtacgccagcaacatcaccagcgtgctgtgccagttccccagccagcagatcgccaacatcctggacagccacgccgccaccctgaacagaaagagcgagagagaggtgttcttcatgaacacccagagcatcgtgcagctggtgcagagatacagaagcggcatcagaggccacatgaaggccgtggtgatggacctgctgagacagtacctgagagtggagacccagttccagaacggccactacgacaagtgcgtgttcgccctgagagaggagaacaagagcgacatgaacaccgtgctgaactacatcttcagccacgcccaggtgaccaagaagaacctgctggtgaccatgctgatcgaccagctgtgcggcagagaccccaccctgaccgacgagctgctgaacatcctgaccgagctgacccagctgagcaagaccaccaacgccaaggtggccctgagagccagacaggtgctgatcgccagccacctgcccagctacgagctgagacacaaccaggtggagagcatcttcctgagcgccatcgacatgtacggccaccagttctgcatcgagaacctgcagaagctgatcctgagcgagaccagcatcttcgacgtgctgcccaacttcttctaccacagcaaccaggtggtgagaatggccgccctggaggtgtacgtgagaagagcctacatcgcctacgagctgaacagcgtgcagcacagacagctgaaggacaacacctgcgtggtggagttccagttcatgctgcccaccagccaccccaacagaggcaacatccccaccctgaacagaatgagcttcagcagcaacctgaaccactacggcatgacccacgtggccagcgtgagcgacgtgctgctggacaacagcttcacccccccctgccagagaatgggcggcatggtgagcttcagaaccttcgaggacttcgtgagaatcttcgacgaggtgatgggctgcttcagcgacagccccccccagagccccaccttccccgaggccggccacaccagcctgtacgacgaggacaaggtgcccagagacgagcccatccacatcctgaacgtggccatcaagaccgactgcgacatcgaggacgacagactggccgccatgttcagagagttcacccagcagaacaaggccaccctggtggaccacggcatcagaagactgaccttcctggtggcccagaaggacttcagaaagcaggtgaactacgaggtggacagaagattccacagagagttccccaagttcttcaccttcagagccagagacaagttcgaggaggacagaatctacagacacctggagcccgccctggccttccagctggagctgaacagaatgagaaacttcgacctgaccgccatcccctgcgccaaccacaagatgcacctgtacctgggcgccgccaaggtggaggtgggcaccgaggtgaccgactacagattcttcgtgagagccatcatcagacacagcgacctggtgaccaaggaggccagcttcgagtacctgcagaacgagggcgagagactgctgctggaggccatggacgagctggaggtggccttcaacaacaccaacgtgagaaccgactgcaaccacatcttcctgaacttcgtgcccaccgtgatcatggaccccagcaagatcgaggagagcgtgagaagcatggtgatgagatacggcagcagactgtggaagctgagagtgctgcaggccgagctgaagatcaacatcagactgacccccaccggcaaggccatccccatcagactgttcctgaccaacgagagcggctactacctggacatcagcctgtacaaggaggtgaccgacagcagaaccgcccagatcatgttccaggcctacggcgacaagcagggccccctgcacggcatgctgatcaacaccccctacgtgaccaaggacctgctgcagagcaagagattccaggcccagagcctgggcaccacctacatctacgacatccccgagatgttcagacagagcctgatcaagctgtgggagagcatgagcacccaggccttcctgcccagcccccccctgcccagcgacatgctgacctacaccgagctggtgctggacgaccagggccagctggtgcacatgaacagactgcccggcggcaacgagatcggcatggtggcctggaagatgaccttcaagagccccgagtaccccgagggcagagacatcatcgtgatcggcaacgacatcacctacagaatcggcagcttcggcccccaggaggacctgctgttcctgagagccagcgagctggccagagccgagggcatccccagaatctacgtgagcgccaacagcggcgccagaatcggcctggccgaggagatcagacacatgttccacgtggcctgggtggaccccgaggacccctacaagggctacagatacctgtacctgaccccccaggactacaagagagtgagcgccctgaacagcgtgcactgcgagcacgtggaggacgagggcgagagcagatacaagatcaccgacatcatcggcaaggaggagggcatcggccccgagaacctgagaggcagcggcatgatcgccggcgagagcagcctggcctacaacgagatcatcaccatcagcctggtgacctgcagagccatcggcatcggcgcctacctggtgagactgggccagagaaccatccaggtggagaacagccacctgatcctgaccggcgccggcgccctgaacaaggtgctgggcagagaggtgtacaccagcaacaaccagctgggcggcatccagatcatgcacaacaacggcgtgacccactgcaccgtgtgcgacgacttcgagggcgtgttcaccgtgctgcactggctgagctacatgcccaagagcgtgcacagcagcgtgcccctgctgaacagcaaggaccccatcgacagaatcatcgagttcgtgcccaccaagaccccctacgaccccagatggatgctggccggcagaccccaccccacccagaagggccagtggctgagcggcttcttcgactacggcagcttcagcgagatcatgcagccctgggcccagaccgtggtggtgggcagagccagactgggcggcatccccgtgggcgtggtggccgtggagaccagaaccgtggagctgagcatccccgccgaccccgccaacctggacagcgaggccaagatcatccagcaggccggccaggtgtggttccccgacagcgccttcaagacctaccaggccatcaaggacttcaacagagagggcctgcccctgatggtgttcgccaactggagaggcttcagcggcggcatgaaggacatgtacgaccaggtgctgaagttcggcgcctacatcgtggacggcctgagagagtgctgccagcccgtgctggtgtacatccccccccaggccgagctgagaggcggcagctgggtggtgatcgacagcagcatcaaccccagacacatggagatgtacgccgacagagagagcagaggcagcgtgctggagcccgagggcaccgtggagatcaagttcagaagaaaggacctggtgaagaccatgagaagagtggaccccgtgtacatccacctggccgagagactgggcacccccgagctgagcaccgccgagagaaaggagctggagaacaagctgaaggagagagaggagttcctgatccccatctaccaccaggtggccgtgcagttcgccgacctgcacgacacccccggcagaatgcaggagaagggcgtgatcagcgacatcctggactggaagaccagcagaaccttcttctactggagactgagaagactgctgctggaggacctggtgaagaagaagatccacaacgccaaccccgagctgaccgacggccagatccaggccatgctgagaagatggttcgtggaggtggagggcaccgtgaaggcctacgtgtgggacaacaacaaggacctggccgagtggctggagaagcagctgaccgaggaggacggcgtgcacagcgtgatcgaggagaacatcaagtgcatcagcagagactacgtgctgaagcagatcagaagcctggtgcaggccaaccccgaggtggccatggacagcatcatccacatgacccagcacatcagccccacccagagagccgaggtgatcagaatcctgagcaccatggacagccccagcacctag

SEQ ID NO: 260535 - DNA, 144 bp, Artificial Sequence
  derived and/or modified sequence
atggacgagcccagccccctggcccagcccctggagctgaaccagcacagcagattcatcatcggcagcgtgagcgaggacaacagcgaggacgagatcagcaacctggtgaagctggacctgctggaggagaaggagggctag

SEQ ID NO: 260536 - protein, 2288 aa, Artificial Sequence
  derived and/or modified sequence
MEGSPEENKEMRYYMLQRSSMSGLHLVKQGRDRKKIDSQRDFTVASPAEFVTRFGGNKVIEKVLIANNGIAAVKCMRSIRRWSYEMFRNERAIRFVVMVTPEDLKANAEYIKMADHYVPVPGGPNNNNYANVELILDIAKRIPVQAVWAGWGHASENPKLPELLLKNGIAFMGPPSQAMWALGDKIASSIVAQTAGIPTLPWSGSGLRVDWQENDFSKRILNVPQELYEKGYVKDVDDGLQAAEEVGYPVMIKASEGGGGKGIRKVNNADDFPNLFRQVQAEVPGSPIFVMRLAKQSRHLEVQILADQYGNAISLFGRDCSVQRRHQKIIEEAPATIATPAVFEHMEQCAVKLAKMVGYVSAGTVEYLYSQDGSFYFLELNPRLQVEHPCTEMVADVNLPAAQLQIAMGIPLYRIKDIRMMYGVSPWGDSPIDFEDSAHVPCPRGHVIAARITSENPDEGFKPSSGTVQELNFRSNKNVWGYFSVAAAGGLHEFADSQFGHCFSWGENREEAISNMVVALKELSIRGDFRTTVEYLIKLLETESFQMNRIDTGWLDRLIAEKVQAERPDTMLGVVCGALHVADVSLRNSVSNFLHSLERGQVLPAHTLLNTVDVELIYEGVKYVLKVTRQSPNSYVVIMNGSCVEVDVHRLSDGGLLLSYDGSSYTTYMKEEVDRYRITIGNKTCVFEKENDPSVMRSPSAGKLIQYIVEDGGHVFAGQCYAEIEVMKMVMTLTAVESGCIHYVKRPGAALDPGCVLAKMQLDNPSKVQQAELHTGSLPRIQSTALRGEKLHRVFHYVLDNLVNVMNGYCLPDPFFSSKVKDWVERLMKTLRDPSLPLLELQDIMTSVSGRIPPNVEKSIKKEMAQYASNITSVLCQFPSQQIANILDSHAATLNRKSEREVFFMNTQSIVQLVQRYRSGIRGHMKAVVMDLLRQYLRVETQFQNGHYDKCVFALREENKSDMNTVLNYIFSHAQVTKKNLLVTMLIDQLCGRDPTLTDELLNILTELTQLSKTTNAKVALRARQVLIASHLPSYELRHNQVESIFLSAIDMYGHQFCIENLQKLILSETSIFDVLPNFFYHSNQVVRMAALEVYVRRAYIAYELNSVQHRQLKDNTCVVEFQFMLPTSHPNRGNIPTLNRMSFSSNLNHYGMTHVASVSDVLLDNSFTPPCQRMGGMVSFRTFEDFVRIFDEVMGCFSDSPPQSPTFPEAGHTSLYDEDKVPRDEPIHILNVAIKTDCDIEDDRLAAMFREFTQQNKATLVDHGIRRLTFLVAQKDFRKQVNYEVDRRFHREFPKFFTFRARDKFEEDRIYRHLEPALAFQLELNRMRNFDLTAIPCANHKMHLYLGAAKVEVGTEVTDYRFFVRAIIRHSDLVTKEASFEYLQNEGERLLLEAMDELEVAFNNTNVRTDCNHIFLNFVPTVIMDPSKIEESVRSMVMRYGSRLWKLRVLQAELKINIRLTPTGKAIPIRLFLTNESGYYLDISLYKEVTDSRTAQIMFQAYGDKQGPLHGMLINTPYVTKDLLQSKRFQAQSLGTTYIYDIPEMFRQSLIKLWESMSTQAFLPSPPLPSDMLTYTELVLDDQGQLVHMNRLPGGNEIGMVAWKMTFKSPEYPEGRDIIVIGNDITYRIGSFGPQEDLLFLRASELARAEGIPRIYVSANSGARIGLAEEIRHMFHVAWVDPEDPYKGYRYLYLTPQDYKRVSALNSVHCEHVEDEGESRYKITDIIGKEEGIGPENLRGSGMIAGESSLAYNEIITISLVTCRAIGIGAYLVRLGQRTIQVENSHLILTGAGALNKVLGREVYTSNNQLGGIQIMHNNGVTHCTVCDDFEGVFTVLHWLSYMPKSVHSSVPLLNSKDPIDRIIEFVPTKTPYDPRWMLAGRPHPTQKGQWLSGFFDYGSFSEIMQPWAQTVVVGRARLGGIPVGVVAVETRTVELSIPADPANLDSEAKIIQQAGQVWFPDSAFKTYQAIKDFNREGLPLMVFANWRGFSGGMKDMYDQVLKFGAYIVDGLRECCQPVLVYIPPQAELRGGSWVVIDSSINPRHMEMYADRESRGSVLEPEGTVEIKFRRKDLVKTMRRVDPVYIHLAERLGTPELSTAERKELENKLKEREEFLIPIYHQVAVQFADLHDTPGRMQEKGVISDILDWKTSRTFFYWRLRRLLLEDLVKKKIHNANPELTDGQIQAMLRRWFVEVEGTVKAYVWDNNKDLAEWLEKQLTEEDGVHSVIEENIKCISRDYVLKQIRSLVQANPEVAMDSIIHMTQHISPTQRAEVIRILSTMDSPST

SEQ ID NO: 260537 - DNA, 6867 bp, Artificial Sequence
  derived and/or modified sequence
atggagggctcacccgaagagaacaaggagatgaggtactacatgctacagaggtcttccatgagcggattgcacctcgttaagcaggggcgtgaccgcaagaaaattgatagtcagcgcgacttcaccgtggccagccctgcagagtttgtaacccgctttgggggaaataaggtgatcgagaaagttctcatcgcaaacaacggcatagccgctgtcaaatgcatgcgtagcattcggcgctggtcttacgagatgttccgcaacgagcgagctattcgttttgtagttatggtgacaccagaggatctgaaggcaaacgcagagtatatcaaaatggccgaccactatgttcctgtgccaggggggcccaacaacaacaactacgctaacgtggaactgatcctggacatcgctaaacgaattcctgtccaagccgtttgggcaggctggggccacgcatccgagaatcctaagctgccagagctgcttcttaaaaatggaatagccttcatggggccgccctcacaggccatgtgggccctgggggataagatcgcttcttcaattgtggcgcagaccgcagggattccaacgctgccttggtcaggaagtggactccgagttgattggcaggagaatgacttcagtaagcgaatacttaatgtgccccaagaattgtatgaaaaggggtacgtgaaagatgtcgacgacggactgcaggccgccgaggaagtcggataccctgtcatgattaaagcttctgaaggtggcgggggaaagggcatccgcaaagttaataacgccgatgacttccctaaccttttccgccaggtccaagccgaggtccctggttctcccatcttcgttatgcggctcgccaagcagtctcgacacctcgaagttcaaatcttagctgatcagtatggtaacgctatctccttattcggacgagattgctcagttcagagaaggcatcagaaaatcattgaggaagcaccggcgacaatagccactccggccgtattcgaacatatggagcagtgcgccgtgaagctggcaaagatggtcggctacgtctcagcaggcacagtagagtacctctacagccaagatggtagtttttacttcctcgagttaaacccacggctccaggtggaacacccatgcaccgaaatggttgccgacgtgaatcttccagccgcccaactccagattgccatggggattccactttacagaataaaggatatccgcatgatgtacggtgtctccccctggggggatagcccaatcgatttcgaggatagtgcccatgtgccctgcccgcgcggccacgtgatcgccgcacgcatcaccagcgaaaaccctgatgaagggtttaaacccagttccggcaccgtgcaagagcttaacttccgatcgaataagaacgtgtggggttatttctccgtggccgcagcaggtggcctgcacgagttcgccgatagtcaatttggccactgtttttcctggggggagaacagggaggaagcaatctcaaacatggtcgtggctttaaaagaactaagtattcgaggggattttcggacaactgtggagtacctgattaagcttctggaaaccgaaagtttccagatgaatcggattgacacaggctggctggacagactaatcgccgagaaggtgcaagccgaacggccagacactatgctcggtgtcgtctgcggtgcccttcacgtcgcggatgtcagtttgaggaattcagtatctaactttcttcacagccttgagcgaggtcaggtcttgcccgcgcatactctgctcaacaccgttgatgtggaactgatctacgaaggtgtcaaatacgtgctgaaagttactcgacaaagtccgaactcctatgttgtaattatgaacggctcttgtgtggaagtcgacgtccatcgactttcagatgggggcttactgctttcctacgacggtagcagctatacgacatacatgaaggaagaggttgaccggtatcggatcactatcgggaacaaaacatgcgtgttcgagaaggagaacgacccttcagtgatgcgcagtccaagcgccgggaaactaatccagtatattgtggaagatggtggccatgtgtttgccggtcagtgttatgctgagattgaagtcatgaagatggtgatgaccctgacggccgtggaaagcggatgtattcactatgttaagcgtcctggggcagctctggatccaggttgtgtactcgcgaagatgcagttggataacccctcgaaggtccagcaagctgaacttcacaccgggagtctacctcgcatacagtctaccgctttacgcggcgagaaattgcatagggtgttccactacgtgttggataatctggtcaacgtaatgaatggctactgcctgccagaccccttcttttcttctaaggtgaaggactgggtcgaacgtctgatgaaaaccctccgagatccttccttgccactgctggagcttcaggacataatgactagtgtatctgggcggatccctcccaacgtggagaagtcaattaagaaagagatggcgcagtacgcctccaatattacctccgttctatgtcaatttccaagtcagcaaatagcgaatattttggattcccacgccgcaacgcttaaccgcaaatctgaacgggaagtgtttttcatgaacacccagagcattgtgcagttggtccaacgatatcgcagtggcataagaggacacatgaaggccgttgtcatggatttgctgaggcagtaccttagggtcgaaacccagttccagaacgggcactatgacaagtgcgtgttcgccctgcgcgaagaaaataagtctgacatgaacaccgtgttaaactatatattcagccatgcccaagtgactaaaaaaaacctgctggtgacaatgttgattgaccagctgtgtggtcgtgatcccaccttaacggacgaactgctcaacatcttgacggaactgacccaactctccaagacaaccaacgccaaggtcgccttgagggcacgacaggtgttaatcgcatcacaccttccgagctacgaactgaggcacaatcaagtcgagtccatctttctgtctgccatcgacatgtacggccaccagttctgtattgagaaccttcagaagttaatcctatctgagacatctatttttgatgtgttaccaaacttcttttatcacagcaaccaggttgtgcgcatggccgccctggaggtctatgtccggagggcctacattgcctacgaactaaatagtgtccagcacaggcagctgaaggacaatacttgcgtcgttgagtttcagttcatgctgcccacgtcacatcctaatagagggaatatacctacattgaatcggatgagctttagctctaaccttaaccattacgggatgacacatgtggcttctgtatccgacgtgctcttggataatagttttacaccgccttgtcagagaatgggcgggatggtcagcttcagaaccttcgaggattttgtgaggatcttcgacgaagtaatgggatgcttctcagatagtcctccgcagtctcccacctttccagaggctgggcatacctctctttacgatgaggacaaagttcccagagatgagcccatccatatcctcaatgtggccatcaaaactgattgcgacattgaggatgacagactagccgcaatgttcagagagttcacacaacagaataaggccaccttggtcgaccacggcattcgacgactgacattcctcgtggcacagaaagacttccggaaacaggtcaattatgaggtggatagacgtttccatcgagagttcccgaaattttttacattcagggccagggacaaatttgaggaagataggatataccgccaccttgagcccgccctggcatttcaactagagctgaatagaatgcgcaactttgacctcaccgctattccctgtgctaaccacaagatgcatttgtacttaggagcagccaaggtcgaggtgggcacagaggtaacggactaccgtttcttcgtaagagctattataagacactccgacctcgtgacaaaggaagcttcctttgaatatctgcaaaatgagggagagagactgttgctggaagccatggatgaactggaagtcgcctttaataataccaacgtccgcaccgattgcaaccacatattcctcaattttgtgcctaccgtgattatggatccctctaaaattgaggaatctgtgcgatcaatggtaatgagatacgggtcccgcctgtggaaattgcgtgtgctgcaggcagagctcaaaatcaacattcgtctgacacccacaggcaaagcgatccccatcaggctgttcctcacaaatgagagcggatattacctagatattagcctctacaaggaggtgacagactccagaacggcccaaatcatgtttcaggcctacggcgacaaacagggtccactgcacggaatgctcattaacaccccttatgtcactaaggatctgctccagagcaagagatttcaggcccagtcgctcggcactacgtatatctatgacatccccgagatgttccgccagtccctgatcaaactgtgggagagtatgagcactcaggcctttttaccctccccgcccctgccaagcgatatgctcacgtacaccgagctggtgctcgatgatcaggggcagctggttcacatgaacagactccccggtggcaacgagattgggatggtggcttggaagatgacctttaaaagtccagaatacccagaggggcgagatatcatcgtaattggaaatgatatcacttacaggatcggatcctttggcccgcaggaggacctgctgttcctgcgtgcctccgagttggcacgagcggaggggatccctaggatctacgtgtcggcaaactctggcgcccgtattggattggcagaggaaatccggcacatgttccatgtggcctgggttgacccagaggatccctacaagggctatagatatctctatctgactccacaagattacaagcgagtgtccgcacttaactcagtgcattgtgaacacgtggaggatgagggcgagagtcggtacaagattacagatattataggtaaggaggagggcatcggcccagagaatttgagaggttccggcatgattgcgggcgagtctagccttgcctacaatgaaatcatcactatttccctggtgacatgccgggccattggtatcggagcctacttggtgaggctgggccagagaacaatacaggtggagaattctcaccttatcttaaccggggctggggcattgaacaaggtcttggggcgtgaagtatacacaagcaataaccaactaggcgggatccagataatgcacaataacggagtcacccactgtaccgtatgcgacgattttgaaggagtgtttacagtccttcactggttaagttacatgcccaagtccgttcattcgtcagtacctctcctgaattcgaaggacccgatagatcggatcatcgagttcgtgccaacaaagaccccatatgacccgcgctggatgcttgccggtcgccctcaccctacccaaaaaggtcaatggttgtccggtttctttgactacgggagcttttccgaaataatgcagccgtgggctcagacggtcgtcgtggggcgtgcacggttaggggggatccccgtgggagtagtggcagtcgagactcgaaccgtggaactgagtattcccgctgaccccgcgaatctcgattctgaggctaaaattatccagcaagccggtcaggtttggttccctgacagtgcatttaagacctatcaggcaatcaaagattttaaccgggagggcctgcccctaatggtttttgcgaattggcgggggttcagtggtgggatgaaggacatgtacgaccaggttttgaagttcggagcttatattgtcgacggtctcagagagtgttgtcagccggtcctggtatatatccctcctcaggccgagctgcggggtggcagttgggtagtcatcgattcctccatcaaccctcggcacatggaaatgtatgcagaccgcgagagtcggggttccgttctcgaacccgaaggaacagtggaaataaaattccggagaaaggaccttgtgaaaaccatgcgccgggtggatcctgtgtatatacatctagccgaaaggttgggcacgccggagctgagcactgcggagcgcaaggagctggagaataaactgaaggagcgagaggagtttttaattcccatctaccatcaggtcgctgtgcagtttgcagacctacacgatactccagggcggatgcaggagaagggagtgatcagcgatattctggactggaagacctcccgaaccttcttttattggagacttaggcgcctgttattagaggacctcgtcaagaaaaaaatccataatgctaatcccgagctgacagacggccagatccaagccatgctgagacgctggttcgtcgaggtggagggcacagtgaaagcctacgtgtgggataataataaagatcttgctgaatggcttgagaaacagctgacagaggaagacggggttcactctgtgattgaagaaaatatcaagtgcatttcccgggactacgtgctgaaacagattaggagcttagttcaagcaaatcccgaggtggcaatggactctataattcatatgacccagcatatctccccgacgcagagggcagaggtcatacggattctctcgaccatggacagtccttcgacatag

SEQ ID NO: 260538 - DNA, 9731 bp, Artificial Sequence
  derived and/or modified sequence
ggcagccaggagaggcagtggagcttttctccgttgactgtcagaagaaagtgactgttgttgaaaatgtttgctgcaactaaaggagagctgctaagatctactttctagttaaacaagcttttatatttctccccggctcctctcagttcccttgggaaatcaactaattgtgtgtgtaagctaagtgtgtggaggagagaagatgcaaaaaggaagagaaaggtggggaaagaaggaaattgggaacaattagacaaaaagactatagtttgaggccatcaggagtattctagtctgactgaagccaggcagaaggcacagtatctcttgtcctcctgggttttaagcagctgcaacaggaggaggaactgcggcttgtgtttacaaggccgaaatctgaagaaaaagcttccattcttttcccatcttgatatggagggttctccagaggaaaataaggaaatgagatattacatgcttcaaagactttgaaatactcgtgggatatgaagtggaggtgcctagagggttgaagataatgaggacagatgaagaaatgtttgattgtgccatacttacagttgctgattttcaaggtccagcatgtctggcttgcacctagtaaagcagggccgagacagaaagaaaatagattctcaacgagatttcactgtggcttctccagcagaatttgttactcgctttgggggaaataaagtgattgagaaggttcttattgctaacaatggcattgcagcagtgaaatgcatgcggtctatccgtaggtggtcttatgaaatgtttcgaaatgaacgtgcaattagattcgttgtcatggtcacacctgaagaccttaaagccaatgcagaatacattaagatggcagatcactatgtgccagtgcctggaggaccaaacaacaacaactatgcaaatgtggaattaattcttgatattgctaaaaggatcccagtacaagcagtgtgggctggctggggtcatgcttctgagaatcccaaactaccggaacttctcttgaaaaatggcattgccttcatgggtcctccaagccaggccatgtgggctttaggggataagattgcatcttccatagtggctcaaactgcaggtatcccaactcttccctggagcggcagtggtcttcgtgtggactggcaggaaaatgatttttcaaaacgtatcttaaatgttccccaggagctatatgaaaaaggttatgtgaaagatgtggatgatgggctacaggcagctgaggaagttggatatccagtaatgatcaaggcctcagagggaggaggagggaagggaattagaaaagtcaacaatgcagatgacttccctaatctcttcagacaggttcaagctgaagttcctggatctcccatatttgtgatgagactagccaaacaatctcgtcatctggaggtgcagatcttagcggaccaatatggcaatgctatctctttgtttggtcgtgattgctctgtacaacgcaggcatcagaagattattgaagaagcacctgctactattgctactccagcagtatttgaacacatggaacagtgtgcggtgaaacttgccaaaatggtgggttatgtgagtgctgggactgtggaatacctgtacagccaggatggcagcttctactttctggaattgaatcctcggctgcaggtagagcacccttgtacagagatggtggctgatgtcaatctccctgcagcacagctccagattgccatggggattcctctatatagaatcaaggatatccgtatgatgtatggggtatctccctggggtgattctcccattgattttgaagattctgcacacgttccttgtccaaggggccatgttattgctgctcggatcactagtgaaaatccagatgagggttttaagcccagctcaggaacagttcaggagctaaatttccgcagcaataagaatgtttggggatatttcagtgttgctgctgcagggggacttcatgaatttgctgattctcagtttggtcactgcttttcttggggagaaaacagagaagaggcaatttcaaacatggtggtggctttgaaggagctgtctattcggggtgactttcgaactacagttgaatacctgatcaaattgttagagactgaaagctttcagatgaacagaattgatactggctggctggacagactgatagcagaaaaagtacaggctgagcgacctgacaccatgttgggggttgtgtgtggtgccctccacgtggcagatgtgagcctgcggaatagcgtctctaacttccttcactccttagaaaggggtcaagtccttcctgctcatacacttctgaatacagtagatgttgaacttatctatgagggagtcaagtatgtacttaaggtgactcgacagtcccccaactcctatgtggtgatcatgaatggctcatgtgtagaagtagatgtacatcggctgagtgacggtggactgctcttgtcctatgatggcagcagttatactacgtatatgaaagaggaagtggatagatatcgcatcacaattggcaataaaacctgtgtgtttgagaaggaaaatgacccatcggtgatgcgctcaccttctgctgggaagttaatccagtacattgtagaagatggaggtcatgtgtttgccggccagtgctatgctgagattgaggtaatgaagatggtaatgaccttaacagctgtggagtctggctgtatccattacgtcaagcgacctggagcagctcttgaccctggctgtgtactagccaaaatgcaactggacaaccccagcaaggttcagcaggctgaacttcacacaggtagtctgccacggatccagagcacggcactcagaggcgagaaactccatcgagtgttccattatgtcctggataatctggtcaatgtaatgaatggatactgccttccagatcctttctttagcagcaaggtaaaagactgggtagagcgattgatgaaaaccctcagagatccctccctgcctctcctagaattgcaagatattatgaccagtgtgtctggccgcattccccccaatgtggagaagtctatcaagaaggaaatggctcagtatgctagcaacatcacatcagtcctctgtcagtttcccagccagcagattgcaaacatcctagatagccatgcagctacattgaaccggaaatctgaacgggaagtcttctttatgaatactcagagcattgttcagctggtacagaggtaccgaagtggcatccgaggccacatgaaggctgtggtgatggatctgctccggcagtacctgcgagtagagacacaattccagaatggtcactatgacaaatgtgtattcgccctccgagaagagaataaaagtgacatgaacactgtactgaactacatcttctctcacgctcaagtcaccaagaagaatcttctggtcacaatgcttattgatcagttgtgtggccgggaccctactctcactgatgagctgctgaatattctcacagagctaactcaactcagtaagaccaccaatgccaaagtagcacttcgagcacgccaggttcttattgcctcccatttgccatcatatgagcttcgccataaccaagtagagtctatcttcctatcagctattgacatgtatggacatcaattttgcattgagaacctgcagaaactcatcctatcagaaacatctatttttgatgtcctaccaaacttcttctatcacagcaaccaagtagtgaggatggcagctctggaggtgtatgttcgaagggcttatattgcctatgaacttaacagcgtacaacaccgccagcttaaggacaacacctgtgtggtggaattccagttcatgctgcccacatctcatccaaacagagggaacatccctacgctaaacagaatgtccttctcctccaacctcaaccactatggcatgacccatgtagctagtgtcagcgatgtactgttggacaactcattcactccaccttgtcagcggatgggcggaatggtctcttttcggacttttgaagattttgtcaggatctttgatgaagtgatgggctgcttctctgactccccaccccagagtcccacattccctgaggcaggtcacacgtctctttatgatgaggataaggttcccagggatgaaccaattcacattctcaatgtggctatcaagactgactgtgatattgaggatgacaggctggcagctatgttcagagaatttacccagcaaaataaagctaccctggttgaccatgggatccggcgccttactttcctggttgcacaaaaggatttcagaaagcaggtcaactatgaggtggatcggagatttcatagagaattccctaaattttttacattccgagcaagggataagtttgaggaggatcgtatctatcgtcatctggagcctgctctggctttccagttagagctgaaccggatgagaaattttgacctcactgccattccatgtgctaatcacaagatgcacctgtatctcggggcagccaaggtggaagtgggcacagaagtgacagactacaggttctttgttcgtgcaatcatcaggcattctgatctggtcaccaaggaagcttcttttgaatatctgcaaaatgaaggggagcggctactcctggaagccatggatgagttggaagttgcttttaacaatacaaatgtccgcactgactgtaaccacatcttcctcaactttgtgcccacggttatcatggacccatcaaagattgaggaatccgtgcggagcatggtaatgcggtatggaagtcgcctgtggaaattgcgcgtcctccaggcagaactgaaaatcaacattcgcctgacgccaactggaaaagcaattcccatccgcctcttcctgacaaacgagtctggctattacttggatatcagcctatacaaggaagtgactgactccaggacagcacagatcatgtttcaggcatatggagacaaacagggaccactgcatggaatgttaatcaatactccatatgtgaccaaagacctgctgcaatcaaagaggttccaggcacaatccttagggacaacatacatatatgatatcccagagatgtttcggcagtccctgatcaaactctgggagtctatgtccactcaagcatttcttccatctccccctctgccttctgacatgctgacttacactgaactggtactggatgatcaaggtcagctggtccacatgaacaggcttccaggaggaaatgagattggcatggtagcttggaaaatgacctttaaaagtcctgaatatccagaaggccgagatatcattgttattggcaatgacatcacataccgaattgggtcctttgggcctcaagaggatttgttatttctcagagcttccgaacttgctagggcagaaggtattccacgcatctatgtatcagccaacagtggagcaagaatcggactggcagaagaaattcgccatatgtttcatgtggcctgggtagatcctgaggatccttacaagggatacaggtatttatatctgactcctcaagattataagagagtcagtgctctcaactctgtccattgtgaacacgtggaagatgaaggagaatccaggtacaagataacagatattattgggaaagaagagggaattggacccgagaaccttcgaggttctggaatgattgctggagaatcctcattggcctataatgagatcattaccatcagcctggtgacgtgccgggccattgggattggggcttaccttgtccggctgggacagagaaccatccaggttgagaattctcacttaattctaacaggagctggagccctcaacaaagtcctcgggcgggaagtgtacacctccaataaccagctggggggcatccagattatgcacaacaatggggtgacccactgcactgtgtgtgatgactttgaaggggttttcactgtcctgcactggctgtcttacatgcccaagagcgtgcacagttcagttcctcttctgaactcaaaggatcctatagacagaatcatcgagtttgttcccacaaagaccccatacgatcctcgatggatgctagcaggccgtcctcacccaacccaaaaaggtcagtggttgagtggcttttttgactatggatctttctcagagattatgcagccctgggcacagactgtggtggttggtagagccaggctaggaggaatacctgtgggagttgttgctgtagaaacccgaacagtagaactaagtatcccagctgatccagcaaacctggattctgaagccaagataatccagcaggctggccaggtttggttcccagattctgcgtttaagacatatcaggccatcaaggacttcaaccgggaagggctgcctctgatggtctttgccaactggagaggcttctctggtggaatgaaagatatgtacgaccaagtgctgaagtttggtgcttacattgtggatggcttgagggagtgctgccagcctgtgctggtttacattcctccccaggctgagctgcggggtggctcctgggtggtgattgactcctccatcaacccccggcacatggagatgtatgctgaccgagaaagcaggggatctgttctggagccagaagggacagtagaaatcaaattccgcagaaaggatctggtgaaaaccatgcgtcgggtggacccagtctacatccacttggctgagcgattggggaccccagagctaagcacagctgagcggaaggagttggagaacaagttgaaggagcgggaggaattcctaattcccatttaccatcaggtagccgtgcagtttgctgacttgcacgacacaccaggccggatgcaggagaagggtgttattagcgatatcctggattggaaaacatcccgtaccttcttctactggcggctgaggcgtcttctgctggaggacctggtcaagaagaaaatccacaatgccaaccctgagctgactgatggccagattcaagccatgttaaggcgctggtttgtggaagtggaaggaacagtgaaggcttatgtttgggacaataataaggatctggcggagtggctagagaaacagctgacagaggaggatggtgttcactcggtaatagaggaaaacatcaaatgcatcagcagagactacgtcctcaagcaaatccgcagcttggtccaggccaatccagaggttgccatggattccatcatccatatgacgcagcacatatcacccactcagcgagcagaagtcatacggatcctctccacaatggattccccttccacgtaggaagagcttcctgcctgtccctgccctgtctctggagaaaagggctagagctgccttttacaactgtaaccactgtaatgagaaggcacaggagacccagcactggagtcaaatggcattttacttcctctcgtttcaggttatgcatgacatcctgggatgtaagatcacagaatccccctccagcccaccagtcacacctaccccattcagtatttattaccctggccaggcctagtcctccactccctgcacaggactgagaaggcaatgaaaggtacaaacatgtaccatgaggtcttactaaccaaagtagggctgcccctcctgtcctgacagccccttggcctcccagcatggggaagcgtgaggagttgcccagcagtgagcagcccccctcactcctggccccatgagccgcagccacaggcagcagaggagggctaaggagaggaggaagcctcaagtccattgtttattaccccgactcttagcccagcacacagtaggcactggagaggaatgattcccagtttaaccacactacggtaccttttatgaagaaaaattagagcataaaatctactacaagctccataggaactcaaagatgagggcaaaactgtgagccaagaagcagagaaagaaaatagaaccagttattcttgatttaggggacctcaaccttgggttcagtctctgaggacaaagggaaaggtagttgttggcctgcctctcgcctgcacgtcactgctggactagctgtcgcatgtggctgggagctgcaaggccagtgcttgaggggccccagcagttccacaggtggtgaagcctgagttggcagaggaggagccagaagagaactgccctttctgcactggtggaaactagttatttatgccatgtggagagccagtgagatagatagatagtctgtttgttttgaggacttggaaagttgttcctatgaagcctggagcttggatggttttgagaggttaatggtgcctccacactcactcttccctagttccaggattactgtcctagcagctaacggttctactctcttccccagagtgtagacaggcagcaggtctccccacagctctgaaaggaccctggtgacagctacaccctcagcaccaggagctggccttcctgatgagggaggcttccaggaaacacagaatccacatgaccttaagattatttacaactcagtcatggtgctgctgtcctccaggcttactggcccctcctgactggcatcaggggcttcctcaggtggtggagagagtttactttcaacaactagtttattcaagaaaagaacttactgattcctctgttcctaaagcaagagtggcaggtgatcagggctggtgtagcatccggttcctttagtgcagctaactgcatttgtcactgatgaccaaggaggaaatcactaagacatttgagaagcagtggtatgaacgttcttggacaagccacagttctgagccttaaccctgtagtttgcacacaagaacgagctccacctccccttcttcaggaggaatctgtgcggatagattggctggacttttcaatggttctgggttgcaggtgggcactgtatggctgggtatggagcggacagcccccaggagtcagagcctcagcccggctgccctggtggaaggtacaggtgttcagcaccttcagaaaagggcataaagtggtgggggacaattctcagtccaggaaaatgcattgaccattgctggctatttgcttacctagtaagaattggattcatttttgaccagattattcttctatgcttttttgcaataaatcaaatcccacatatctacaagtggtatgaagtcctgcaccccccaggaggcctgtccaggcatgtcttcagaggcagggtgggttacactcatttacctcccctctccccaccaaattatgacacaaacgagtatgtttcctctctagaaccctgtaatgcctcctcccccatccccagagctccttactgtaggtcttaccctggacaaggattttttcaagttggaggcacagaacatgagcaatctgacattcccacagcccctcaaacatgcaaggctactaaggcaggaggagtataaatgatggatattgaccaagacctgcttggacggagaccgccatattatctgttctcttcgttcacaaaacagccttcacttgtctcagaatttgatggacacatactgtgatgagcaggagcttcagatgcactctttacacattttgttgaaataaacctctacatttgt

SEQ ID NO: 260539 - DNA, 6867 bp, Artificial Sequence
  derived and/or modified sequence
atggagggcagccctgaggagaacaaggagatgagatactacatgctgcagaggagctccatgagcggcctgcacctggtgaagcagggccgggacaggaagaagattgacagccagagggacttcaccgtggccagccctgctgagtttgtgaccaggtttggaggcaacaaggtgattgagaaggtgctgattgccaacaacggcattgctgctgtgaagtgcatgaggagcatccgccgctggagctatgagatgttcagaaatgaaagagccatccgctttgtggtgatggtgaccccagaggacctgaaggccaatgctgagtacatcaagatggctgaccactacgtgcctgtgcctgggggccccaacaacaacaactatgccaacgtggagctgatcctggacatcgccaagagaattcctgtgcaggccgtgtgggccggctggggccacgccagcgagaaccccaagctgcctgagctgctgctgaagaatggaattgccttcatgggcccccccagccaggccatgtgggccctgggggacaagatcgccagcagcatcgtggcccagacagctggcatccccaccctgccctggagcggcagcggcctgcgggtggactggcaggagaatgacttcagcaagaggatcctgaatgtgccccaggagctgtatgagaagggctacgtgaaggatgtggatgatggcctgcaggccgctgaggaggtgggctaccctgtgatgatcaaggccagcgagggcggcggcggcaagggcatcaggaaggtgaacaatgctgatgacttccccaacctcttccggcaggtgcaggccgaggtgcccggcagccccatctttgtgatgaggctggccaagcagagccgccacctggaggtgcagatcctggccgaccagtatggaaatgccatcagcctgtttggccgggactgcagcgtgcagaggaggcaccagaagatcatcgaggaggccccagccaccatcgccaccccagctgtgtttgagcacatggagcagtgtgctgtgaagctggccaagatggtgggctacgtgtctgctggcaccgtggagtacctgtacagccaggacggcagcttctacttcctggagctgaacccccggctgcaggtggagcacccctgcacagagatggtggctgatgtgaacctgcctgctgcccagctgcagatcgccatgggcatccccctgtaccgcatcaaggacatccgcatgatgtatggagtgagcccctggggagacagccccatcgactttgaagattctgcccacgtgccctgcccccggggccacgtgattgctgcccgcatcaccagtgaaaatccagatgagggcttcaagcccagcagcggcaccgtgcaggagctgaacttccgcagcaacaagaatgtgtggggctacttctctgtggccgccgccggcggcctgcacgagtttgctgacagccagtttggccactgcttctcctggggagaaaatcgggaggaggccatcagcaacatggtggtggccctgaaggagctgagcatccggggggacttccgcaccaccgtggagtacctgatcaagctgctggagacagagagcttccagatgaacagaattgacaccggctggctggaccggctgattgctgagaaggtgcaggccgagaggccagacaccatgctgggcgtggtgtgtggggccctgcacgtggctgatgtgtccctgagaaattctgtgagcaacttcctgcacagcctggagcggggccaggtgctgcctgcccacaccctgctgaacacagtggatgtggagctgatctatgagggcgtgaagtatgtgctgaaggtgacccggcagagccccaacagctatgtggtgatcatgaatggcagctgtgtggaggtggatgtgcaccggctgagtgatggcggcctgctgctgtcctatgatggcagcagctacaccacctacatgaaggaggaggtggaccgctaccgcatcaccatcggcaacaagacctgtgtgtttgagaaggaaaatgaccccagcgtgatgaggagccccagcgctgggaagctgatccagtacatcgtggaggatggcggccacgtgtttgctggccagtgctacgccgagattgaggtgatgaagatggtgatgaccctgacagctgtggagagcggctgcatccactacgtgaagaggcctggagctgccctggaccccggctgtgtgctggccaagatgcagctggacaaccccagcaaggtgcagcaggccgagctgcacacaggcagcctgccccgcatccagagcacagccctgcggggggagaagctgcacagggtcttccactacgtgctggacaacctggtgaatgtgatgaatggctactgcctgcctgaccccttcttcagcagcaaggtgaaggactgggtggagcggctgatgaagaccctgcgggaccccagcctgcccctgctggagctgcaggacatcatgacctctgtgtctggccgcatccccccaaatgtggagaagagcatcaagaaggagatggcccagtatgccagcaacatcacctctgtgctgtgccagttccccagccagcagatcgccaacatcctggacagccatgctgccaccctgaacaggaagtctgagcgggaggtgttcttcatgaacacccagagcatcgtgcagctggtgcagcgctacagaagtggcatccggggccacatgaaggctgtggtgatggacctgctgcggcagtacctgcgggtggagacccagttccagaatggccactatgacaagtgtgtgtttgccctgcgggaggagaacaagagtgacatgaacacagtgctgaactacatcttcagccacgcccaggtgaccaagaagaacctgctggtgaccatgctgattgaccagctgtgtggccgggaccccaccctgacagatgagctgctgaacatcctgacagagctgacccagctgagcaagaccaccaatgccaaggtggccctgcgggcccggcaggtgctgattgccagccacctgcccagctatgagctgcggcacaaccaggtggagagcatcttcctgagcgccatcgacatgtatggccaccagttctgcatcgagaacctgcagaagctgatcctgtctgagaccagcatctttgatgtgctgcccaacttcttctaccacagcaaccaggtggtgaggatggccgccctggaggtgtatgtgagaagagcctacatcgcctatgagctgaacagcgtgcagcaccggcagctgaaggacaacacctgtgtggtggagttccagttcatgctgcccaccagccaccccaacagaggcaacatccccaccctgaacaggatgtccttcagcagcaacctgaaccactacggcatgacccacgtggcctctgtgtctgatgtgctgctggacaacagcttcaccccaccctgccagaggatgggcggcatggtgtccttccgcacctttgaagattttgtgcgcatctttgatgaggtgatgggctgcttcagtgacagccccccccagagccccaccttccctgaggccggccacaccagcctgtatgatgaggacaaggtgcccagagatgagcccatccacatcctgaatgtggccatcaagacagactgtgacattgaagatgaccggctggccgccatgttccgggagttcacccagcagaacaaggccaccctggtggaccacggcatccggcggctgaccttcctggtggcccagaaggacttcaggaagcaggtgaactatgaggtggaccggcgcttccaccgggagttccccaagttcttcaccttccgggcccgggacaagtttgaggaggaccgcatctaccgccacctggagcccgccctggccttccagctggagctgaacaggatgaggaactttgacctgacagccatcccctgtgccaaccacaagatgcacctgtacctgggcgccgccaaggtggaggtgggcacagaggtgacagactaccgcttctttgtgcgggccatcatccgccacagcgacctggtgaccaaggaggccagctttgagtacctgcagaatgaaggagagcggctgctgctggaggccatggatgagctggaggtggccttcaacaacaccaacgtgaggacagactgcaaccacatcttcctgaactttgtgcccaccgtcatcatggaccccagcaagattgaggagagcgtgcgctccatggtgatgagatatggcagccggctgtggaagctgcgggtgctgcaggccgagctgaagatcaacatccggctgacccccaccgggaaggccatccccatccgcctcttcctgaccaatgaaagtggctactacctggacatcagcctgtacaaggaggtgacagacagcaggacagcccagatcatgttccaggcctatggagacaagcagggccccctgcacggcatgctgatcaacaccccctacgtgaccaaggacctgctgcagagcaagcgcttccaggcccagagcctgggcaccacctacatctatgacatccctgagatgttccggcagagcctcatcaagctgtgggagagcatgagcacccaggccttcctgcccagcccccccctgcccagcgacatgctgacctacacagagctggtgctggatgaccagggccagctggtgcacatgaaccggctgcccggcggcaatgaaattggcatggtggcctggaagatgaccttcaagagccctgagtacccagagggccgggacatcatcgtgattggaaatgacatcacctaccgcatcggcagctttggcccccaggaggacctgctcttcctgcgggccagcgagctggcccgggcagagggcatcccccgcatctacgtgtctgccaacagcggggcccgcatcggcctggccgaggagatccgccacatgtttcatgtggcctgggtggaccctgaggacccctacaagggctaccgctacctgtacctgaccccccaggactacaagagggtgtctgccctgaacagcgtgcactgtgaacatgtggaggatgaaggagagagccgctacaagatcacagacatcatcggcaaggaggagggcatcggccctgagaacctgcggggcagcggcatgattgctggggagagcagcctggcctacaatgagatcatcaccatcagcctggtgacctgccgggccatcggcattggagcctacctggtgcggctgggccagaggaccatccaggtggagaacagccacctgatcctgactggagctggggccctgaacaaggtgctgggccgggaggtgtacaccagcaacaaccagctgggcggcatccagatcatgcacaacaacggggtgacccactgcaccgtgtgtgatgactttgaaggagtcttcaccgtgctgcactggctgagctacatgcccaagtctgtgcacagctctgtgcccctgctgaacagcaaggaccccatcgaccgcatcattgaatttgtgcccaccaagaccccctatgacccccgctggatgctggccggccggccccaccccacccagaagggccagtggctgagcggcttctttgattatggcagcttcagcgagatcatgcagccctgggcccagacagtggtggtgggccgggcccggctgggcggcatccctgtgggcgtggtggccgtggagaccaggacagtggagctgagcatcccagctgaccctgccaacctggacagcgaggccaagatcatccagcaggccggccaggtgtggttcccagacagcgccttcaagacctaccaggccatcaaggacttcaaccgggagggcctgcccctgatggtgtttgccaactggaggggcttcagcggcggcatgaaggacatgtatgaccaggtgctgaagtttggagcctacatcgtggatggcctgcgggagtgctgccagcctgtgctggtgtacatccccccccaggccgagctgcggggcggctcctgggtggtgattgacagcagcatcaaccccaggcacatggagatgtatgctgaccgggagagccggggctctgtgctggagcctgagggcaccgtggagatcaagttccggaggaaggacctggtgaagaccatgagaagagtggaccctgtgtacatccacctggccgagcggctgggcaccccagagctgagcacagctgagaggaaggagctggagaacaagctgaaggagcgggaggagttcctgatccccatctaccaccaggtggccgtgcagtttgctgacctgcatgacaccccaggccgcatgcaggagaagggcgtcatcagtgacatcctggactggaagaccagcaggaccttcttctactggaggctgcggcggctgctgctggaggacctggtgaagaagaagatccacaatgccaaccctgagctgacagatggccagatccaggccatgctgcggcgctggtttgtggaggtggagggcaccgtgaaggcctacgtgtgggacaacaacaaggacctggccgagtggctggagaagcagctgacagaagaagatggagtgcacagcgtcatcgaggagaacatcaagtgcatcagccgggactatgtgctgaagcagatccgcagcctggtgcaggccaaccctgaggtggccatggacagcatcatccacatgacccagcacatcagccccacccagagagctgaggtgatccgcatcctgagcaccatggacagccccagcacctag

SEQ ID NO: 260540 - DNA, 9624 bp, Artificial Sequence
  derived and/or modified sequence
ggcagccaggagaggcagtggagcttttctccgttgactgtcagaagaaagtgactgttgttgaaaatgtttgctgcaactaaaggagagctgctaagatctactttctagttaaacaagcttttatatttctccccggctcctctcagttcccttgggaaatcaactaattgtgtgtgtaagctaagtgtgtggaggagagaagatgcaaaaaggaagagaaaggtggggaaagaaggaaattgggaacaattagacaaaaagactatagtttgaggccatcaggagtattctagtctgactgaagccaggcagaaggcacagtatctcttgtcctcctgggttttaagcagctgcaacaggaggaggaactgcggcttgtgtttacaaggccgaaatctgaagaaaaagcttccattcttttcccatcttgatatggagggttctccagaggaaaataaggaaatgagatattacatgcttcaaaggtccagcatgtctggcttgcacctagtaaagcagggccgagacagaaagaaaatagattctcaacgagatttcactgtggcttctccagcagaatttgttactcgctttgggggaaataaagtgattgagaaggttcttattgctaacaatggcattgcagcagtgaaatgcatgcggtctatccgtaggtggtcttatgaaatgtttcgaaatgaacgtgcaattagattcgttgtcatggtcacacctgaagaccttaaagccaatgcagaatacattaagatggcagatcactatgtgccagtgcctggaggaccaaacaacaacaactatgcaaatgtggaattaattcttgatattgctaaaaggatcccagtacaagcagtgtgggctggctggggtcatgcttctgagaatcccaaactaccggaacttctcttgaaaaatggcattgccttcatgggtcctccaagccaggccatgtgggctttaggggataagattgcatcttccatagtggctcaaactgcaggtatcccaactcttccctggagcggcagtggtcttcgtgtggactggcaggaaaatgatttttcaaaacgtatcttaaatgttccccaggagctatatgaaaaaggttatgtgaaagatgtggatgatgggctacaggcagctgaggaagttggatatccagtaatgatcaaggcctcagagggaggaggagggaagggaattagaaaagtcaacaatgcagatgacttccctaatctcttcagacaggttcaagctgaagttcctggatctcccatatttgtgatgagactagccaaacaatctcgtcatctggaggtgcagatcttagcggaccaatatggcaatgctatctctttgtttggtcgtgattgctctgtacaacgcaggcatcagaagattattgaagaagcacctgctactattgctactccagcagtatttgaacacatggaacagtgtgcggtgaaacttgccaaaatggtgggttatgtgagtgctgggactgtggaatacctgtacagccaggatggcagcttctactttctggaattgaatcctcggctgcaggtagagcacccttgtacagagatggtggctgatgtcaatctccctgcagcacagctccagattgccatggggattcctctatatagaatcaaggatatccgtatgatgtatggggtatctccctggggtgattctcccattgattttgaagattctgcacacgttccttgtccaaggggccatgttattgctgctcggatcactagtgaaaatccagatgagggttttaagcccagctcaggaacagttcaggagctaaatttccgcagcaataagaatgtttggggatatttcagtgttgctgctgcagggggacttcatgaatttgctgattctcagtttggtcactgcttttcttggggagaaaacagagaagaggcaatttcaaacatggtggtggctttgaaggagctgtctattcggggtgactttcgaactacagttgaatacctgatcaaattgttagagactgaaagctttcagatgaacagaattgatactggctggctggacagactgatagcagaaaaagtacaggctgagcgacctgacaccatgttgggggttgtgtgtggtgccctccacgtggcagatgtgagcctgcggaatagcgtctctaacttccttcactccttagaaaggggtcaagtccttcctgctcatacacttctgaatacagtagatgttgaacttatctatgagggagtcaagtatgtacttaaggtgactcgacagtcccccaactcctatgtggtgatcatgaatggctcatgtgtagaagtagatgtacatcggctgagtgacggtggactgctcttgtcctatgatggcagcagttatactacgtatatgaaagaggaagtggatagatatcgcatcacaattggcaataaaacctgtgtgtttgagaaggaaaatgacccatcggtgatgcgctcaccttctgctgggaagttaatccagtacattgtagaagatggaggtcatgtgtttgccggccagtgctatgctgagattgaggtaatgaagatggtaatgaccttaacagctgtggagtctggctgtatccattacgtcaagcgacctggagcagctcttgaccctggctgtgtactagccaaaatgcaactggacaaccccagcaaggttcagcaggctgaacttcacacaggtagtctgccacggatccagagcacggcactcagaggcgagaaactccatcgagtgttccattatgtcctggataatctggtcaatgtaatgaatggatactgccttccagatcctttctttagcagcaaggtaaaagactgggtagagcgattgatgaaaaccctcagagatccctccctgcctctcctagaattgcaagatattatgaccagtgtgtctggccgcattccccccaatgtggagaagtctatcaagaaggaaatggctcagtatgctagcaacatcacatcagtcctctgtcagtttcccagccagcagattgcaaacatcctagatagccatgcagctacattgaaccggaaatctgaacgggaagtcttctttatgaatactcagagcattgttcagctggtacagaggtaccgaagtggcatccgaggccacatgaaggctgtggtgatggatctgctccggcagtacctgcgagtagagacacaattccagaatggtcactatgacaaatgtgtattcgccctccgagaagagaataaaagtgacatgaacactgtactgaactacatcttctctcacgctcaagtcaccaagaagaatcttctggtcacaatgcttattgatcagttgtgtggccgggaccctactctcactgatgagctgctgaatattctcacagagctaactcaactcagtaagaccaccaatgccaaagtagcacttcgagcacgccaggttcttattgcctcccatttgccatcatatgagcttcgccataaccaagtagagtctatcttcctatcagctattgacatgtatggacatcaattttgcattgagaacctgcagaaactcatcctatcagaaacatctatttttgatgtcctaccaaacttcttctatcacagcaaccaagtagtgaggatggcagctctggaggtgtatgttcgaagggcttatattgcctatgaacttaacagcgtacaacaccgccagcttaaggacaacacctgtgtggtggaattccagttcatgctgcccacatctcatccaaacagagggaacatccctacgctaaacagaatgtccttctcctccaacctcaaccactatggcatgacccatgtagctagtgtcagcgatgtactgttggacaactcattcactccaccttgtcagcggatgggcggaatggtctcttttcggacttttgaagattttgtcaggatctttgatgaagtgatgggctgcttctctgactccccaccccagagtcccacattccctgaggcaggtcacacgtctctttatgatgaggataaggttcccagggatgaaccaattcacattctcaatgtggctatcaagactgactgtgatattgaggatgacaggctggcagctatgttcagagaatttacccagcaaaataaagctaccctggttgaccatgggatccggcgccttactttcctggttgcacaaaaggatttcagaaagcaggtcaactatgaggtggatcggagatttcatagagaattccctaaattttttacattccgagcaagggataagtttgaggaggatcgtatctatcgtcatctggagcctgctctggctttccagttagagctgaaccggatgagaaattttgacctcactgccattccatgtgctaatcacaagatgcacctgtatctcggggcagccaaggtggaagtgggcacagaagtgacagactacaggttctttgttcgtgcaatcatcaggcattctgatctggtcaccaaggaagcttcttttgaatatctgcaaaatgaaggggagcggctactcctggaagccatggatgagttggaagttgcttttaacaatacaaatgtccgcactgactgtaaccacatcttcctcaactttgtgcccacggttatcatggacccatcaaagattgaggaatccgtgcggagcatggtaatgcggtatggaagtcgcctgtggaaattgcgcgtcctccaggcagaactgaaaatcaacattcgcctgacgccaactggaaaagcaattcccatccgcctcttcctgacaaacgagtctggctattacttggatatcagcctatacaaggaagtgactgactccaggacagcacagatcatgtttcaggcatatggagacaaacagggaccactgcatggaatgttaatcaatactccatatgtgaccaaagacctgctgcaatcaaagaggttccaggcacaatccttagggacaacatacatatatgatatcccagagatgtttcggcagtccctgatcaaactctgggagtctatgtccactcaagcatttcttccatctccccctctgccttctgacatgctgacttacactgaactggtactggatgatcaaggtcagctggtccacatgaacaggcttccaggaggaaatgagattggcatggtagcttggaaaatgacctttaaaagtcctgaatatccagaaggccgagatatcattgttattggcaatgacatcacataccgaattgggtcctttgggcctcaagaggatttgttatttctcagagcttccgaacttgctagggcagaaggtattccacgcatctatgtatcagccaacagtggagcaagaatcggactggcagaagaaattcgccatatgtttcatgtggcctgggtagatcctgaggatccttacaagggatacaggtatttatatctgactcctcaagattataagagagtcagtgctctcaactctgtccattgtgaacacgtggaagatgaaggagaatccaggtacaagataacagatattattgggaaagaagagggaattggacccgagaaccttcgaggttctggaatgattgctggagaatcctcattggcctataatgagatcattaccatcagcctggtgacgtgccgggccattgggattggggcttaccttgtccggctgggacagagaaccatccaggttgagaattctcacttaattctaacaggagctggagccctcaacaaagtcctcgggcgggaagtgtacacctccaataaccagctggggggcatccagattatgcacaacaatggggtgacccactgcactgtgtgtgatgactttgaaggggttttcactgtcctgcactggctgtcttacatgcccaagagcgtgcacagttcagttcctcttctgaactcaaaggatcctatagacagaatcatcgagtttgttcccacaaagaccccatacgatcctcgatggatgctagcaggccgtcctcacccaacccaaaaaggtcagtggttgagtggcttttttgactatggatctttctcagagattatgcagccctgggcacagactgtggtggttggtagagccaggctaggaggaatacctgtgggagttgttgctgtagaaacccgaacagtagaactaagtatcccagctgatccagcaaacctggattctgaagccaagataatccagcaggctggccaggtttggttcccagattctgcgtttaagacatatcaggccatcaaggacttcaaccgggaagggctgcctctgatggtctttgccaactggagaggcttctctggtggaatgaaagatatgtacgaccaagtgctgaagtttggtgcttacattgtggatggcttgagggagtgctgccagcctgtgctggtttacattcctccccaggctgagctgcggggtggctcctgggtggtgattgactcctccatcaacccccggcacatggagatgtatgctgaccgagaaagcaggggatctgttctggagccagaagggacagtagaaatcaaattccgcagaaaggatctggtgaaaaccatgcgtcgggtggacccagtctacatccacttggctgagcgattggggaccccagagctaagcacagctgagcggaaggagttggagaacaagttgaaggagcgggaggaattcctaattcccatttaccatcaggtagccgtgcagtttgctgacttgcacgacacaccaggccggatgcaggagaagggtgttattagcgatatcctggattggaaaacatcccgtaccttcttctactggcggctgaggcgtcttctgctggaggacctggtcaagaagaaaatccacaatgccaaccctgagctgactgatggccagattcaagccatgttaaggcgctggtttgtggaagtggaaggaacagtgaaggcttatgtttgggacaataataaggatctggcggagtggctagagaaacagctgacagaggaggatggtgttcactcggtaatagaggaaaacatcaaatgcatcagcagagactacgtcctcaagcaaatccgcagcttggtccaggccaatccagaggttgccatggattccatcatccatatgacgcagcacatatcacccactcagcgagcagaagtcatacggatcctctccacaatggattccccttccacgtaggaagagcttcctgcctgtccctgccctgtctctggagaaaagggctagagctgccttttacaactgtaaccactgtaatgagaaggcacaggagacccagcactggagtcaaatggcattttacttcctctcgtttcaggttatgcatgacatcctgggatgtaagatcacagaatccccctccagcccaccagtcacacctaccccattcagtatttattaccctggccaggcctagtcctccactccctgcacaggactgagaaggcaatgaaaggtacaaacatgtaccatgaggtcttactaaccaaagtagggctgcccctcctgtcctgacagccccttggcctcccagcatggggaagcgtgaggagttgcccagcagtgagcagcccccctcactcctggccccatgagccgcagccacaggcagcagaggagggctaaggagaggaggaagcctcaagtccattgtttattaccccgactcttagcccagcacacagtaggcactggagaggaatgattcccagtttaaccacactacggtaccttttatgaagaaaaattagagcataaaatctactacaagctccataggaactcaaagatgagggcaaaactgtgagccaagaagcagagaaagaaaatagaaccagttattcttgatttaggggacctcaaccttgggttcagtctctgaggacaaagggaaaggtagttgttggcctgcctctcgcctgcacgtcactgctggactagctgtcgcatgtggctgggagctgcaaggccagtgcttgaggggccccagcagttccacaggtggtgaagcctgagttggcagaggaggagccagaagagaactgccctttctgcactggtggaaactagttatttatgccatgtggagagccagtgagatagatagatagtctgtttgttttgaggacttggaaagttgttcctatgaagcctggagcttggatggttttgagaggttaatggtgcctccacactcactcttccctagttccaggattactgtcctagcagctaacggttctactctcttccccagagtgtagacaggcagcaggtctccccacagctctgaaaggaccctggtgacagctacaccctcagcaccaggagctggccttcctgatgagggaggcttccaggaaacacagaatccacatgaccttaagattatttacaactcagtcatggtgctgctgtcctccaggcttactggcccctcctgactggcatcaggggcttcctcaggtggtggagagagtttactttcaacaactagtttattcaagaaaagaacttactgattcctctgttcctaaagcaagagtggcaggtgatcagggctggtgtagcatccggttcctttagtgcagctaactgcatttgtcactgatgaccaaggaggaaatcactaagacatttgagaagcagtggtatgaacgttcttggacaagccacagttctgagccttaaccctgtagtttgcacacaagaacgagctccacctccccttcttcaggaggaatctgtgcggatagattggctggacttttcaatggttctgggttgcaggtgggcactgtatggctgggtatggagcggacagcccccaggagtcagagcctcagcccggctgccctggtggaaggtacaggtgttcagcaccttcagaaaagggcataaagtggtgggggacaattctcagtccaggaaaatgcattgaccattgctggctatttgcttacctagtaagaattggattcatttttgaccagattattcttctatgcttttttgcaataaatcaaatcccacatatctacaagtggtatgaagtcctgcaccccccaggaggcctgtccaggcatgtcttcagaggcagggtgggttacactcatttacctcccctctccccaccaaattatgacacaaacgagtatgtttcctctctagaaccctgtaatgcctcctcccccatccccagagctccttactgtaggtcttaccctggacaaggattttttcaagttggaggcacagaacatgagcaatctgacattcccacagcccctcaaacatgcaaggctactaaggcaggaggagtataaatgatggatattgaccaagacctgcttggacggagaccgccatattatctgttctcttcgttcacaaaacagccttcacttgtctcagaatttgatggacacatactgtgatgagcaggagcttcagatgcactctttacacattttgttgaaataaacctctacatttgtagaa

SEQ ID NO: 260541 - DNA, 1380 bp, Artificial Sequence
  derived and/or modified sequence
ggcagccaggagaggcagtggagcttttctccgttgactgtcagaagaaagtgactgttgttgaaaatgtttgctgcaactaaaggagagctgctaagatctactttctagttaaacaagcttttatatttctccccggctcctctcagttcccttgggaaatcaactaattgtgtgtgtaagctaagtgtgtggaggagagaagatgcaaaaaggaagagaaaggtggggaaagaaggaaattgggaacaattagacaaaaagactatagtttgaggccatcaggagtattctagtctgactgaagccaggcagaaggcacagtatctcttgtcctcctgggttttaagcagctgcaacaggaggaggaactgcggcttgtgtttacaaggccgaaatctgaagaaaaagcttccattcttttcccatcttgatatggagggttctccagaggaaaataaggaaatgagatattacatgcttcaaagactttgaaatactcgtgggatatgaagtggaggtgcctagagggttgaagataatgaggacagatgaagaaatgtttgattgtgccatacttacagttgctgattttcaaggtccagcatgtctggcttgcacctagtaaagcagggccgagacagaaagaaaatagattctcaacgagatttcactgtggcttctccagcagaatttgttactcgctttgggggaaataaagtgattgagaaggttcttattgctaacaatggcattgcagcagtgaaatgcatgcggtctatccgtaggtggtcttatgaaatgtttcgaaatgaacgtgcaattagattcgttgtcatggtcacacctgaagaccttaaagccaatgcagaatacattaagatggcagatcactatgtgccagtgcctggaggaccaaacaacaacaactatgcaaatgtggaattaattcttgatattgctaaaaggatcccagtacaagcagtgtgggctggctggggtcatgcttctgagaatcccaaactaccggaacttctcttgaaaaatggcattgccttcatgggtcctccaagccaggccatgtgggctttaggggataagattgcatcttccatagtggctcaaactgcaggtatcccaactcttccctggagcggcagtggtcttcgtgtggactggcaggaaaatgatttttcaaaacgtatcttaaatgttccccaggagctatatgaaaaaggttatgtgaaagatgtggatgatgggctacaggcagctgaggaagttggatatccagtaatgatcaaggcctcagagggaggaggagggaagggaattagaaaagtcaacaatgcagatgacttccctaatctcttcagacag

SEQ ID NO: 260542 - DNA, 6867 bp, Artificial Sequence
  derived and/or modified sequence
atggagggcagccccgaggagaacaaggagatgcggtactacatgttgcaacgaagctctatgagtggactacacctggtaaaacaaggccgcgatagaaaaaaaatcgactcccagagagatttcactgttgcttcgcccgcagaattcgtcactcggttcggaggcaacaaagttatcgagaaagtgctgatcgcaaataatggaatcgcagctgtgaaatgtatgaggagtattcgccgctggtcatatgaaatgtttcggaatgagagagccattcgcttcgtggtaatggtgacacctgaggacctcaaggcaaacgcagagtacatcaagatggcggaccactatgtacctgtgcctggtgggccaaataataacaattacgctaacgtggagctgatattggacatcgccaagcgcataccagtccaggctgtctgggctgggtggggccatgcttccgagaatccaaagctccctgagctccttctgaaaaacggcatcgcattcatgggcccaccatcacaggcaatgtgggccctgggagacaaaatcgctagctcgattgtagcgcagaccgccggtattccaacgctgccctggagtggatctggtttacgggtagattggcaggagaatgatttttccaagaggatcctgaatgtcccacaagaactgtacgaaaaagggtatgtaaaggacgttgatgatgggctgcaagcagctgaggaggtaggctacccggtcatgattaaagcctcagagggtggtggcggcaaggggattcgcaaggtcaacaatgcagacgactttcccaatctttttaggcaggtgcaggccgaggtacccggatcacctattttcgtgatgcgcctggcaaaacagtcccgccatcttgaagtgcaaatcttggccgaccagtacggtaatgcgataagcctgttcggccgggattgctccgttcagagacggcaccagaaaatcatcgaagaagcccccgctaccatcgcaacacccgctgtgttcgaacatatggagcagtgtgccgttaagcttgccaaaatggtaggctacgtgtctgccggcactgtcgaatatctttattctcaagatggcagcttttatttcctggagctcaaccctagactgcaggttgagcacccttgcacagagatggtggccgatgttaatttgcctgctgcccaacttcaaatcgccatgggcattcctctatatcggatcaaagacatccgcatgatgtatggcgtctccccatggggggactctccaattgatttcgaggactctgcgcacgtgccctgccccagagggcacgtgattgcagcaaggatcactagcgagaatcccgacgaagggttcaagcctagcagtggaacagtgcaggaactgaattttaggtcaaacaagaatgtttggggatatttctctgtggccgctgccggtggccttcacgagttcgcggattcacagtttggtcactgtttctcctggggcgaaaaccgtgaggaagcaattagcaacatggtagttgccctgaaggagctgagtattcgcggggactttaggactacagtggaatatttaattaagctgctggaaactgagtcttttcaaatgaaccggatagacaccgggtggcttgatcgccttatcgcagagaaggtgcaggccgaacggccggacacgatgcttggggtggtttgcggcgctttgcatgtcgccgacgtaagcctgagaaactctgtgtccaacttcctgcatagtctggagcgtggccaagtgctgcccgcccacaccttacttaatacagttgacgtcgagcttatctacgaaggggtgaagtacgttcttaaggtgacacgccagtctccaaattcctatgtcgtgatcatgaacggcagttgcgtggaagttgatgtacacaggcttagcgatggcggattgctcctttcctatgatggcagctcctatacgacatacatgaaagaagaagtggaccggtatcgtataaccattgggaataagacatgtgtgttcgaaaaagagaacgaccctagtgtgatgagatctccctcagcaggcaaactgatccagtatattgttgaagatggaggacatgtgttcgccggacagtgctatgctgagattgaggttatgaaaatggtgatgactctcaccgccgtggagtccggctgtatacactatgtgaagaggccaggagctgctcttgatcccggctgcgttctggcaaagatgcagctggataatccatccaaagttcagcaggcagagctccataccgggtccctgccccgcatacagagtacagccctccgcggtgagaaactgcatcgagtctttcattacgtgctggataatctggtcaatgtgatgaacggatattgcctgcccgatccattcttctcctccaaagtgaaggattgggtcgagcgcctcatgaagactctgagagaccccagcctgcccctgttggagctgcaagatatcatgacttctgtgtccggaagaatcccaccaaacgttgagaagtccattaagaaagaaatggcccagtacgcaagcaacatcacttccgtgttgtgtcagtttccgagccagcagatcgccaacattctggactctcatgcagccacactcaatcggaaaagtgagagggaggtgtttttcatgaatacccagtctatcgttcagctagttcagcgatatagaagcggaattagaggccatatgaaagctgtggtgatggatctcctccggcagtacctaagagtggaaacacagttccagaatggacactacgacaagtgcgtctttgccttgagagaggaaaacaaatccgacatgaacaccgttcttaattacatctttagtcatgcacaggtcactaaaaagaacctcctagtcaccatgctcatcgatcagctgtgtggtagggacccgacactgactgatgagctgttaaacatactcactgaactgacccaactgtctaagaccaccaatgccaaggtcgctttgcgcgcaaggcaggtgcttatcgcctcccacctgccaagttatgagctgaggcacaaccaggtggagagcatttttctctccgctatcgatatgtacggtcaccaattctgtattgaaaacctgcagaagctaatcctgagtgaaacatccatttttgatgttctgcccaatttcttttaccatagcaaccaagttgtgcgtatggccgctctcgaggtgtacgtgaggagagcatacatcgcatatgaattgaacagtgtccagcatagacagttgaaggataacacatgcgtcgttgaatttcaattcatgctgccaaccagtcatcctaaccgtgggaacatccccacactcaaccgcatgagcttctcgagtaatctgaaccattatggaatgacacacgtggcgtcagttagcgatgttctccttgataactcttttacacctccttgccagcgcatgggaggtatggtgagctttaggactttcgaagacttcgtgaggatctttgatgaggtcatgggatgcttttccgattcgccaccccagagtccaactttccccgaggcaggtcacacatccctgtatgacgaggataaagtccctagggacgagccaatccatattctgaatgtcgcaatcaaaaccgattgtgatattgaggatgacagactcgccgctatgttccgagagtttacgcaacagaacaaagccactctggtggaccacggcatccggcgcctgacctttttggtggcacagaaggactttcgtaaacaagttaattatgaagtggaccggcggttccaccgcgagttccctaagtttttcaccttccgggctcgtgataagttcgaagaggatcggatctatcggcacctggagcctgcactggccttccagctggagttaaatcggatgagaaattttgatctcaccgctataccatgcgctaatcacaaaatgcatctgtacctaggggccgcaaaagtggaggttgggactgaggtcaccgactacagattcttcgtacgagccatcatacgccattccgacctcgtcaccaaggaagcaagctttgagtatctgcagaatgagggtgaaaggctgcttctggaggccatggacgaacttgaggtggcattcaacaatacgaatgttcgaacagactgtaatcacatttttctgaattttgtgccgaccgtcattatggacccatcaaagattgaagagagtgttcgctctatggtgatgcgctacggcagccgtctgtggaaacttcgcgtcttgcaggcagaactaaagattaacattagactcacacctaccggaaaggctatccccattaggctgttcttgacaaacgaatcagggtactacctggacatttccctgtacaaagaagttacagattctaggaccgcgcagatcatgtttcaggcatatggcgataagcagggcccgctccatgggatgttgattaacacaccctatgtaaccaaggacctccttcaatccaagaggttccaagcccagtccctgggaaccacctacatctacgacatacccgagatgtttcgacagtcactgatcaaactgtgggaatcaatgtctacacaggccttcctgccgtccccgcccctcccctcggacatgctgacttacacggagctggtgctggacgaccagggccagctcgtgcacatgaatcgcctgccaggcggtaacgaaatcggcatggttgcttggaaaatgacatttaagtctccagagtacccagaggggcgtgatatcatcgtgatcggcaatgacattacttatcggataggctcgttcggtcctcaagaggatttgctctttctgagagcgtccgaactggccagagccgaggggattccacgcatatacgtgtctgccaatagtggagcaaggatcgggcttgcagaggagattagacacatgttccacgtcgcgtgggtggatcctgaagacccatacaagggataccggtacctttacttgacccctcaagattacaagcgtgtctcagcgcttaatagcgtacattgtgaacacgtcgaggacgagggcgagtcgcgttacaagatcaccgacatcattgggaaggaagaaggcataggccccgagaacctccgcgggagcgggatgatcgccggcgaatccagcctagcgtataacgagatcatcaccataagtctggtcacctgtcgagctataggaatcggagcgtatttggttcgcctaggacagcggaccatccaggtggaaaactctcacctgattctgactggggcgggggctctcaacaaggttctcggacgggaagtgtatactagtaataatcagctcggcggtatccagatcatgcacaataacggtgttacacactgcaccgtatgcgatgattttgagggggttttcaccgtcctgcactggctgagctacatgccaaagtctgtgcatagtagtgtgcccctgctaaattctaaggatccaatcgaccgcatcatcgaattcgtccccaccaaaaccccctacgacccccgatggatgcttgcagggagacctcacccaacccagaaggggcaatggctctccggcttcttcgattacggatcattcagcgaaatcatgcagccctgggcccagactgtagttgtgggaagagcacggctgggtggtatccccgtcggagttgtcgccgtagaaaccaggacagttgaactgtccatcccagctgacccagccaacctggacagtgaggctaaaatcatccagcaggcgggacaggtttggttccctgattctgcttttaagacctaccaggcaattaaggacttcaaccgggaggggctgccgctgatggtgttcgccaactggagggggttcagtgggggcatgaaggacatgtacgaccaggtgctcaagttcggagcctacatcgtcgatggtctgcgggaatgctgccagcctgtcctggtgtacattcccccccaggccgaactgaggggtggatcatgggtggtgattgactcttcgataaacccgcggcatatggaaatgtacgccgatcgggagtcaaggggcagcgtcctggaacccgaaggcacagtcgagataaagttccgacggaaggatttggtcaaaactatgcgccgcgtagatccagtctatattcacctcgccgagcggctcggaaccccagagctctccactgctgaaagaaaagaactggagaacaagcttaaggagcgcgaagagtttctcatcccaatctaccaccaggtcgctgtgcagttcgccgatcttcacgatacacccggacgcatgcaggaaaagggggtgatctctgatatactcgactggaaaacaagcaggacatttttttattggcggctgcgacgtctgctgctcgaggaccttgtgaagaagaagattcacaacgcaaacccggagcttacagatgggcagatccaagcgatgctgcggcggtggttcgtcgaagttgaagggactgtgaaagcttacgtctgggataataataaagacctagcggaatggctggagaagcagttaacggaggaagatggtgtccactctgttattgaggagaacattaaatgcatcagcagggactacgtgctgaaacaaataaggagcttggtgcaggccaatccagaagtggcgatggacagtatcatccacatgactcagcacatttctcccacgcagagggccgaggttatccggatcttgtcgactatggatagcccttctacatag

SEQ ID NO: 260543 - DNA, 6866 bp, Artificial Sequence
  derived and/or modified sequence
atggaggggtccccagaggagaacaaggagatgagatattatatgcttcagaggagctctatgtctggcctgcatctggtaaagcaggggcgagatcggaagaagattgactctcagagagatttcaccgtggccagcccagcagaattcgtgaccaggtttggcggtaacaaggtgattgagaaagtgctgattgcgaataatggtatcgcagcggtcaagtgcatgcgatctattagacgctggtcttatgagatgttccggaatgagcgcgctatacgattcgtggttatggtgacacctgaggatctgaaagcgaacgccgagtatattaagatggcagatcactacgtccctgttcctggaggtcccaataataacaactatgccaacgtagaattgatcctcgacatcgccaagagaattcccgtgcaagccgtttgggctggatggggtcacgcgtccgaaaatcctaaattgccagaactgcttctgaagaacggcattgccttcatgggaccaccatcccaggcaatgtgggctctgggagacaaaatcgccagcagtattgtggcccagaccgcgggaattcccaccctaccctggagcggatccggcttgagagtggattggcaggagaacgattttagcaaaagaatcctgaatgtgccgcaggaactttatgagaagggctacgtgaaggacgtcgatgacggtctgcaagcggctgaggaagtcggctatccagttatgattaaggcgtctgaaggtgggggagggaaggggatacgcaaggtcaacaacgcagacgactttcctaatttatttcggcaagtacaggctgaggtccccggaagccccatcttcgttatgcggttggctaagcagagccgtcacctcgaggtgcagatccttgcagatcaatatggcaacgctatcagcctgtttggaagggattgttccgtccaacgacgacatcaaaagattatcgaggaagctcctgcgaccattgcaaccccggcagtgttcgaacacatggaacagtgtgctgttaagctcgctaagatggtaggctacgtttcagctgggaccgtggaatatctgtactcacaggacgggagtttctatttccttgaacttaaccctcggctgcaggtggaacatccctgtactgagatggtggctgatgtcaatctgccggctgctcagctgcagatcgccatgggaattccactgtatcggataaaggatatccggatgatgtatggagtttcaccctggggggacagcccaatagatttcgaggactccgcccacgtcccctgtccgaggggccatgtcatcgccgctagaattactagcgagaacccagacgagggctttaaaccctcttcagggaccgtgcaggaactaaattttcgctctaacaaaaatgtctggggctatttttccgtggccgctgctggcggtcttcatgagtttgcagacagtcagtttggtcattgcttctcgtggggggagaacagagaagaggcaatttcaaacatggtggtggcgcttaaagaactcagcatcaggggtgactttcgaactaccgtcgaatacctaatcaagttgcttgaaacagagagtttccagatgaataggatcgacacgggatggctcgaccgcttgattgccgaaaaagtgcaggctgaacgacccgacacaatgctgggcgtggtgtgtggagccttacatgtcgcggacgtgtctttgagaaacagtgtgagcaactttttacacagcttggaaagggggcaggtcctgccagcccataccctgctgaacaccgtcgacgtggagctgatttatgagggcgtaaagtatgtcttaaaggtgacacggcagagccctaactcctatgtagtgatcatgaatggaagttgcgtggaggtcgatgtacatcgattgagcgacggcggactcctgctgtcctatgatggttcttcctacaccacatatatgaaggaagaagtcgaccgatatcggattactattggaaacaagacatgcgtgtttgagaaagaaaatgacccctccgtaatgagaagcccaagcgccggaaaattgattcagtatatagtcgaggacggcggacatgtgtttgcagggcagtgctatgcagagattgaggtaatgaaaatggtcatgactctcaccgcagtcgaatccggctgtattcactacgtgaaaaggccaggagctgctttagaccctggctgtgtactcgccaagatgcagctggataacccctctaaggtccaacaagctgaattgcacactggttccttgcctagaatacagagcaccgcgctacgaggggagaaactgcacagggtctttcactatgtcttggataatctagtgaacgtgatgaatggctattgtctgccagatccttttttctcctctaaagtaaaagattgggtggagagacttatgaagacactccgagatcctagcttacccttgctggagctgcaagatatcatgacttcagtgtctgggaggatacccccaaatgtggaaaaatctattaaaaaagagatggcacagtatgcatctaatattacatccgtactctgtcagttccccagtcagcagattgcaaatattctcgactcacacgccgcaaccttgaatcggaagtcagaacgcgaggtgttcttcatgaacacacaatccatcgtgcagcttgtgcagagatacagaagcgggattcgcggacacatgaaggccgtggttatggacctgctccggcagtaccttcgggtggaaacgcagttccaaaacggtcactatgataagtgtgtatttgcacttagagaggaaaataaatccgatatgaataccgtgctgaattatatcttctcccacgctcaggtcacaaagaaaaacctgcttgttaccatgctgatcgaccaattatgtggccgagatcctaccctcactgatgagctcctgaacatcctcacagagctgacacagttgagtaaaacaacgaacgcaaaagtagcattgcgagccaggcaggtcctaattgcatcgcatttgcccagctatgaactgcgccataatcaggtcgaaagtattttcctcagcgccatagacatgtacggacatcagttctgcatcgagaatctccagaaactgattttgtcagagacctctatctttgacgttctgccaaacttcttttaccactccaaccaggtagtgaggatggccgctcttgaggtgtacgtccgaagggcatatattgcatacgagttgaacagtgtgcaacaccggcagctcaaagataatacatgcgtcgtcgaatttcagttcatgctcccgactagccatccaaacagaggcaacatcccgactctcaatcgaatgagtttttcaagcaaccttaatcactacggaatgacacatgtggcaagcgtctccgacgtcttgctggacaattctttcaccccaccttgtcaacgaatgggcggaatggtgtctttccgcactttcgaagacttcgttcgcatctttgacgaggtcatggggtgtttctcagatagccccccacaaagcccgacgtttccggaagccggacatacctcactatacgacgaggacaaagtgcctagggacgaaccaattcacatcttgaacgtggctatcaaaaccgactgtgatatcgaggacgatcgtctcgcagccatgtttcgcgaatttacacaacagaataaggcgaccctcgtcgaccacgggatccggaggctgacctttctggtggcacagaaagatttcaggaagcaagtcaactatgaagtggaccgtaggtttcaccgggaatttccgaaattttttacatttcgagcaagggacaagtttgaagaagacaggatttaccgccaccttgaaccagctctcgcttttcaactggagctcaatagaatgcgcaattttgacctcacagctatcccctgtgctaatcacaagatgcacctttatctgggagccgctaaagtggaggtggggacagaagtcaccgattaccggttctttgtgcgggctatcattaggcactctgacctggtgaccaaggaagcctcttttgaatatctgcagaacgaaggagagaggctgctgctcgaggcaatggatgaactggaggtagctttcaataacaccaatgttcgcactgactgtaaccacatttttttgaacttcgtgcccactgtaatcatggaccctagcaaaattgaagaatctgtacgctcgatggtaatgcgctacgggagcaggctttggaagctgcgagtcctgcaggccgagttaaagattaatattcgcctcacaccaacaggtaaagcgatacctatccgactgtttctcacaaatgagtcaggatactacttggacatctccctttataaagaagtcactgacagccggaccgcccagataatgtttcaagcatacggcgacaagcaaggacctctccatggtatgcttatcaacaccccctacgtcactaaggatcttctgcagtctaagcgttttcaagctcagtctctagggacaacctacatttacgatatacctgaaatgtttaggcagagcctcatcaagctttgggaaagtatgtctactcaagccttcctgccctcccccccactgccttccgacatgcttacttacacagagctggtgctggatgaccaagggcagttggtgcacatgaaccgcttaccagggggtaatgaaatcggaatggtagcatggaagatgacattcaagagccctgaatacccggaggggagagacattatcgtcatcggcaacgacataacttatcggatagggtcttttggtccccaggaggacctgttattcctgcgcgcttctgaattggctcgtgcagaaggcattcccaggatttatgtgtccgccaattccggtgccaggatcggcttagcagaggagattcgccatatgttccatgtggcttgggtggaccccgaggatccctacaagggatatcgctatctgtacttaacacctcaggattataaacgggtgtcagcccttaactcggtacactgcgaacacgtcgaagacgagggtgagagccggtacaagattaccgacattatcggcaaggaagagggaatagggccagaaaacctccggggatccgggatgattgccggagagagttccctggcgtacaacgagataatcaccatcagtttggtgacatgtcgggcaattgggataggtgcgtacttagtgaggttaggccagagaactatccaggttgagaactctcacctaatcttgactggagctggcgctctgaataaagtgctgggtagggaggtttacacatccaacaatcaacttggaggtattcagatcatgcacaataacggagtgactcactgcacagtttgtgatgactttgaaggcgtttttactgtgcttcactggctgtcctacatgcccaaatccgtgcactcatctgtccctctacttaactccaaggatcctatcgaccgcattatagagtttgttccaactaaaaccccctacgaccctaggtggatgctggctggacggcctcaccctactcaaaaggggcagtggctgtcaggctttttcgattacgggagtttcagtgaaattatgcagccttgggcccagaccgtcgtcgtgggcagagcgaggttggggggtataccagtcggcgtggtggccgtggagacaaggactgtggagctctccatacccgcagatccagccaacctagactccgaagctaagattatccaacaagctggacaggtctggtttcctgactcggctttcaagacatatcaggcgattaaagattttaaccgagaagggctccccctgatggtctttgccaactggagggggttctcaggcggaatgaaggacatgtacgatcaagtgttgaaattcggggcttacattgtggacggcctgagggagtgctgtcagcccgtgttggtttatattccacctcaggccgaactccggggagggagctgggtggtcattgattcatctatcaaccccagacacatggagatgtacgcagatagagagagccgcggatcagtgctagaaccagaggggactgtcgagatcaagttcaggagaaaagacctggtcaaaactatgagacgcgttgaccccgtttatatccacttggccgaaagactggggacccccgaactgagcacggctgaacgtaaggagctggagaataagctgaaggagcgcgaggagtttctcattccaatctatcaccaggtcgccgtccagttcgcagatctgcacgacactcctggacgcatgcaggaaaagggggttattagtgatatcttggattggaaaacgagcagaaccttcttttattggcggctgcggcgactgctgttggaggacctcgtcaagaaaaagattcacaatgctaaccctgagctaaccgatgggcagattcaggccatgctgcgtcgctggttcgttgaggtagagggaactgtcaaggcttatgtctgggacaacaacaaggacctggcagaatggttggagaagcaactcacagaggaggatggagttcactcagtaatagaggaaaacatcaaatgtatctcaagagattacgtgttgaagcagatcaggtctttagtgcaggctaaccctgaggtcgccatggatagtatcatccatatgacacagcacatcagtcccacacagagagcagaggtcatcaggatactgtctacgatggattccccttccaccta

SEQ ID NO: 260544 - DNA, 6867 bp, Artificial Sequence
  derived and/or modified sequence
atggagggcagccccgaggagaacaaggagatgagatactacatgctgcagagaagcagcatgagcggcctgcacctggtgaagcagggcagagacagaaagaagatcgacagccagagagacttcaccgtggccagccccgccgagttcgtgaccagattcggcggcaacaaggtgatcgagaaggtgctgatcgccaacaacggcatcgccgccgtgaagtgcatgagaagcatcagaagatggagctacgagatgttcagaaacgagagagccatcagattcgtggtgatggtgacccccgaggacctgaaggccaacgccgagtacatcaagatggccgaccactacgtgcccgtgcccggcggccccaacaacaacaactacgccaacgtggagctgatcctggacatcgccaagagaatccccgtgcaggccgtgtgggccggctggggccacgccagcgagaaccccaagctgcccgagctgctgctgaagaacggcatcgccttcatgggcccccccagccaggccatgtgggccctgggcgacaagatcgccagcagcatcgtggcccagaccgccggcatccccaccctgccctggagcggcagcggcctgagagtggactggcaggagaacgacttcagcaagagaatcctgaacgtgccccaggagctgtacgagaagggctacgtgaaggacgtggacgacggcctgcaggccgccgaggaggtgggctaccccgtgatgatcaaggccagcgagggcggcggcggcaagggcatcagaaaggtgaacaacgccgacgacttccccaacctgttcagacaggtgcaggccgaggtgcccggcagccccatcttcgtgatgagactggccaagcagagcagacacctggaggtgcagatcctggccgaccagtacggcaacgccatcagcctgttcggcagagactgcagcgtgcagagaagacaccagaagatcatcgaggaggcccccgccaccatcgccacccccgccgtgttcgagcacatggagcagtgcgccgtgaagctggccaagatggtgggctacgtgagcgccggcaccgtggagtacctgtacagccaggacggcagcttctacttcctggagctgaaccccagactgcaggtggagcacccctgcaccgagatggtggccgacgtgaacctgcccgccgcccagctgcagatcgccatgggcatccccctgtacagaatcaaggacatcagaatgatgtacggcgtgagcccctggggcgacagccccatcgacttcgaggacagcgcccacgtgccctgccccagaggccacgtgatcgccgccagaatcaccagcgagaaccccgacgagggcttcaagcccagcagcggcaccgtgcaggagctgaacttcagaagcaacaagaacgtgtggggctacttcagcgtggccgccgccggcggcctgcacgagttcgccgacagccagttcggccactgcttcagctggggcgagaacagagaggaggccatcagcaacatggtggtggccctgaaggagctgagcatcagaggcgacttcagaaccaccgtggagtacctgatcaagctgctggagaccgagagcttccagatgaacagaatcgacaccggctggctggacagactgatcgccgagaaggtgcaggccgagagacccgacaccatgctgggcgtggtgtgcggcgccctgcacgtggccgacgtgagcctgagaaacagcgtgagcaacttcctgcacagcctggagagaggccaggtgctgcccgcccacaccctgctgaacaccgtggacgtggagctgatctacgagggcgtgaagtacgtgctgaaggtgaccagacagagccccaacagctacgtggtgatcatgaacggcagctgcgtggaggtggacgtgcacagactgagcgacggcggcctgctgctgagctacgacggcagcagctacaccacctacatgaaggaggaggtggacagatacagaatcaccatcggcaacaagacctgcgtgttcgagaaggagaacgaccccagcgtgatgagaagccccagcgccggcaagctgatccagtacatcgtggaggacggcggccacgtgttcgccggccagtgctacgccgagatcgaggtgatgaagatggtgatgaccctgaccgccgtggagagcggctgcatccactacgtgaagagacccggcgccgccctggaccccggctgcgtgctggccaagatgcagctggacaaccccagcaaggtgcagcaggccgagctgcacaccggcagcctgcccagaatccagagcaccgccctgagaggcgagaagctgcacagagtgttccactacgtgctggacaacctggtgaacgtgatgaacggctactgcctgcccgaccccttcttcagcagcaaggtgaaggactgggtggagagactgatgaagaccctgagagaccccagcctgcccctgctggagctgcaggacatcatgaccagcgtgagcggcagaatcccccccaacgtggagaagagcatcaagaaggagatggcccagtacgccagcaacatcaccagcgtgctgtgccagttccccagccagcagatcgccaacatcctggacagccacgccgccaccctgaacagaaagagcgagagagaggtgttcttcatgaacacccagagcatcgtgcagctggtgcagagatacagaagcggcatcagaggccacatgaaggccgtggtgatggacctgctgagacagtacctgagagtggagacccagttccagaacggccactacgacaagtgcgtgttcgccctgagagaggagaacaagagcgacatgaacaccgtgctgaactacatcttcagccacgcccaggtgaccaagaagaacctgctggtgaccatgctgatcgaccagctgtgcggcagagaccccaccctgaccgacgagctgctgaacatcctgaccgagctgacccagctgagcaagaccaccaacgccaaggtggccctgagagccagacaggtgctgatcgccagccacctgcccagctacgagctgagacacaaccaggtggagagcatcttcctgagcgccatcgacatgtacggccaccagttctgcatcgagaacctgcagaagctgatcctgagcgagaccagcatcttcgacgtgctgcccaacttcttctaccacagcaaccaggtggtgagaatggccgccctggaggtgtacgtgagaagagcctacatcgcctacgagctgaacagcgtgcagcacagacagctgaaggacaacacctgcgtggtggagttccagttcatgctgcccaccagccaccccaacagaggcaacatccccaccctgaacagaatgagcttcagcagcaacctgaaccactacggcatgacccacgtggccagcgtgagcgacgtgctgctggacaacagcttcacccccccctgccagagaatgggcggcatggtgagcttcagaaccttcgaggacttcgtgagaatcttcgacgaggtgatgggctgcttcagcgacagccccccccagagccccaccttccccgaggccggccacaccagcctgtacgacgaggacaaggtgcccagagacgagcccatccacatcctgaacgtggccatcaagaccgactgcgacatcgaggacgacagactggccgccatgttcagagagttcacccagcagaacaaggccaccctggtggaccacggcatcagaagactgaccttcctggtggcccagaaggacttcagaaagcaggtgaactacgaggtggacagaagattccacagagagttccccaagttcttcaccttcagagccagagacaagttcgaggaggacagaatctacagacacctggagcccgccctggccttccagctggagctgaacagaatgagaaacttcgacctgaccgccatcccctgcgccaaccacaagatgcacctgtacctgggcgccgccaaggtggaggtgggcaccgaggtgaccgactacagattcttcgtgagagccatcatcagacacagcgacctggtgaccaaggaggccagcttcgagtacctgcagaacgagggcgagagactgctgctggaggccatggacgagctggaggtggccttcaacaacaccaacgtgagaaccgactgcaaccacatcttcctgaacttcgtgcccaccgtgatcatggaccccagcaagatcgaggagagcgtgagaagcatggtgatgagatacggcagcagactgtggaagctgagagtgctgcaggccgagctgaagatcaacatcagactgacccccaccggcaaggccatccccatcagactgttcctgaccaacgagagcggctactacctggacatcagcctgtacaaggaggtgaccgacagcagaaccgcccagatcatgttccaggcctacggcgacaagcagggccccctgcacggcatgctgatcaacaccccctacgtgaccaaggacctgctgcagagcaagagattccaggcccagagcctgggcaccacctacatctacgacatccccgagatgttcagacagagcctgatcaagctgtgggagagcatgagcacccaggccttcctgcccagcccccccctgcccagcgacatgctgacctacaccgagctggtgctggacgaccagggccagctggtgcacatgaacagactgcccggcggcaacgagatcggcatggtggcctggaagatgaccttcaagagccccgagtaccccgagggcagagacatcatcgtgatcggcaacgacatcacctacagaatcggcagcttcggcccccaggaggacctgctgttcctgagagccagcgagctggccagagccgagggcatccccagaatctacgtgagcgccaacagcggcgccagaatcggcctggccgaggagatcagacacatgttccacgtggcctgggtggaccccgaggacccctacaagggctacagatacctgtacctgaccccccaggactacaagagagtgagcgccctgaacagcgtgcactgcgagcacgtggaggacgagggcgagagcagatacaagatcaccgacatcatcggcaaggaggagggcatcggccccgagaacctgagaggcagcggcatgatcgccggcgagagcagcctggcctacaacgagatcatcaccatcagcctggtgacctgcagagccatcggcatcggcgcctacctggtgagactgggccagagaaccatccaggtggagaacagccacctgatcctgaccggcgccggcgccctgaacaaggtgctgggcagagaggtgtacaccagcaacaaccagctgggcggcatccagatcatgcacaacaacggcgtgacccactgcaccgtgtgcgacgacttcgagggcgtgttcaccgtgctgcactggctgagctacatgcccaagagcgtgcacagcagcgtgcccctgctgaacagcaaggaccccatcgacagaatcatcgagttcgtgcccaccaagaccccctacgaccccagatggatgctggccggcagaccccaccccacccagaagggccagtggctgagcggcttcttcgactacggcagcttcagcgagatcatgcagccctgggcccagaccgtggtggtgggcagagccagactgggcggcatccccgtgggcgtggtggccgtggagaccagaaccgtggagctgagcatccccgccgaccccgccaacctggacagcgaggccaagatcatccagcaggccggccaggtgtggttccccgacagcgccttcaagacctaccaggccatcaaggacttcaacagagagggcctgcccctgatggtgttcgccaactggagaggcttcagcggcggcatgaaggacatgtacgaccaggtgctgaagttcggcgcctacatcgtggacggcctgagagagtgctgccagcccgtgctggtgtacatccccccccaggccgagctgagaggcggcagctgggtggtgatcgacagcagcatcaaccccagacacatggagatgtacgccgacagagagagcagaggcagcgtgctggagcccgagggcaccgtggagatcaagttcagaagaaaggacctggtgaagaccatgagaagagtggaccccgtgtacatccacctggccgagagactgggcacccccgagctgagcaccgccgagagaaaggagctggagaacaagctgaaggagagagaggagttcctgatccccatctaccaccaggtggccgtgcagttcgccgacctgcacgacacccccggcagaatgcaggagaagggcgtgatcagcgacatcctggactggaagaccagcagaaccttcttctactggagactgagaagactgctgctggaggacctggtgaagaagaagatccacaacgccaaccccgagctgaccgacggccagatccaggccatgctgagaagatggttcgtggaggtggagggcaccgtgaaggcctacgtgtgggacaacaacaaggacctggccgagtggctggagaagcagctgaccgaggaggacggcgtgcacagcgtgatcgaggagaacatcaagtgcatcagcagagactacgtgctgaagcagatcagaagcctggtgcaggccaaccccgaggtggccatggacagcatcatccacatgacccagcacatcagccccacccagagagccgaggtgatcagaatcctgagcaccatggacagccccagcacctag

SEQ ID NO: 260545 - protein, 316 aa, Artificial Sequence
  derived and/or modified sequence
MMRTCVLLSAVLWCLTGDKIYVELHQNSPVLICMDFKLSKKEIVDPTYLWIGPNEKTLTGNNRINITETGQLMVKDFLEPLSGLYTCTLSYKTVKAETQEEKTVKKRYDFMVFAYREPDYSYQMAVRFTTRSCIGRYNDVFFRVLKKILDSLISDLSCHVIEPSYKCHSVEIPEHGLIHELFIAFQVNPFAPGWKGACNGSVDCEDTTNHNILQARDRIEDFFRSQAYIFYHNFNKTLPAMHFVDHSLQVVRLDSCRPGFGKNERLHSNCASCCVVCSPATFSPDVNVTCQTCVSVLTYGAKSCPQTSNKNQQYED

SEQ ID NO: 260546 - DNA, 951 bp, Artificial Sequence
  derived and/or modified sequence
atgatgagaacctgcgtgctgctgagcgccgtgctgtggtgcctgaccggcgacaagatctacgtggagctgcaccagaacagccccgtgctgatctgcatggacttcaagctgagcaagaaggagatcgtggaccccacctacctgtggatcggccccaacgagaagaccctgaccggcaacaacagaatcaacatcaccgagaccggccagctgatggtgaaggacttcctggagcccctgagcggcctgtacacctgcaccctgagctacaagaccgtgaaggccgagacccaggaggagaagaccgtgaagaagagatacgacttcatggtgttcgcctacagagagcccgactacagctaccagatggccgtgagattcaccaccagaagctgcatcggcagatacaacgacgtgttcttcagagtgctgaagaagatcctggacagcctgatcagcgacctgagctgccacgtgatcgagcccagctacaagtgccacagcgtggagatccccgagcacggcctgatccacgagctgttcatcgccttccaggtgaaccccttcgcccccggctggaagggcgcctgcaacggcagcgtggactgcgaggacaccaccaaccacaacatcctgcaggccagagacagaatcgaggacttcttcagaagccaggcctacatcttctaccacaacttcaacaagaccctgcccgccatgcacttcgtggaccacagcctgcaggtggtgagactggacagctgcagacccggcttcggcaagaacgagagactgcacagcaactgcgccagctgctgcgtggtgtgcagccccgccaccttcagccccgacgtgaacgtgacctgccagacctgcgtgagcgtgctgacctacggcgccaagagctgcccccagaccagcaacaagaaccagcagtacgaggactag

SEQ ID NO: 260547 - DNA, 951 bp, Artificial Sequence
  derived and/or modified sequence
atgatgcgcacatgtgtgctcctctctgccgtcctctggtgtctgacgggggataagatatatgtggaactgcaccagaattcgcccgtgcttatctgtatggacttcaagttgagtaagaaggagatcgtggacccgacttatctatggatagggcccaacgaaaaaacactgaccgggaataacagaatcaacattactgagaccgggcagttgatggttaaagactttctcgagccactgtctgggctctacacgtgcacactgtcttacaaaacggtaaaggcggagacccaagaggaaaagaccgtcaagaaacggtatgatttcatggttttcgcgtatagggaacctgactatagctaccagatggcagtcaggttcaccacacggtcctgtatcggacgctacaacgacgttttttttcgcgtcctgaagaagattctggacagccttatttcggatctgagctgtcatgtgatcgagccttcatataagtgtcatagcgtggagattccagaacacgggctcatacacgagctattcattgcgttccaggtgaacccttttgctccaggctggaaaggagcctgtaatgggagcgtggactgtgaggacaccacaaatcacaatatccttcaggctcgcgaccggatagaagacttttttcgctctcaggcctatatattctaccacaatttcaataagactctacctgcgatgcacttcgttgatcattcgctgcaggttgtgagactggattcctgtcgccccgggttcgggaagaatgaacggctgcacagcaattgcgcaagctgttgtgtggtatgcagcccggctaccttcagccctgacgttaatgtcacctgccaaacctgtgtgtccgtcctcacctatggcgcaaaatcctgcccacagacatccaataagaaccagcagtacgaagactag

SEQ ID NO: 260548 - DNA, 951 bp, Artificial Sequence
  derived and/or modified sequence
atgatgaggacctgtgtgctgctgtctgctgtgctgtggtgcctgaccggggacaagatctacgtggagctgcaccagaacagccctgtgctgatctgcatggacttcaagctgagcaagaaggagatcgtggaccccacctacctgtggattggccccaatgagaagaccctgactggaaacaaccgcatcaacatcacagaaacaggccagctgatggtgaaggacttcctggagcccctgagcggcctgtacacctgcaccctgagctacaagacagtgaaggccgagacccaggaggagaagacagtgaagaagagatatgacttcatggtgtttgcctaccgggagccagactacagctaccagatggctgtgcgcttcaccaccaggagctgcatcggccgctacaatgatgtgttcttccgggtgctgaagaagatcctggacagcctcatcagtgacctgagctgccacgtgattgagcccagctacaagtgccacagcgtggagatccctgagcacggcctcatccacgagctgttcatcgccttccaggtgaacccctttgcccctggctggaagggggcctgcaatggatctgtggactgtgaggacaccaccaaccacaacatcctgcaggcccgggacagaattgaggacttcttccgcagccaggcctacatcttctaccacaacttcaacaagaccctgcctgccatgcactttgtggaccacagcctgcaggtggtgcggctggacagctgccggcccggctttgggaagaatgaaaggctgcacagcaactgtgccagctgctgcgtggtgtgcagccctgccaccttctccccagatgtgaatgtgacctgccagacctgtgtgtctgtgctgacctatggagccaagagctgcccccagaccagcaacaagaaccagcagtatgaagattag

SEQ ID NO: 260549 - DNA, 951 bp, Artificial Sequence
  derived and/or modified sequence
atgatgcggacctgcgtgctgctgagcgccgtgctgtggtgcctgaccggtgataaaatatatgtggagctccaccagaactctccagtcttgatttgtatggattttaagctctctaaaaaggaaattgtggatcccacctatctgtggatcggcccgaacgaaaagacactgacagggaataacagaatcaacataactgaaacaggacagctgatggtcaaagactttctcgagccactgtcgggtctctacacatgcaccctatcttataagactgtcaaggcggaaactcaggaggaaaaaactgtgaagaaaaggtacgactttatggttttcgcatatagagaacctgattattcgtaccagatggccgtaagattcaccacaaggagttgtattgggcgctataatgatgtgtttttccgtgttttaaagaaaatcttagattctttaattagcgatctttcatgtcacgtcatcgaaccgtcctacaagtgccactccgttgagattccagagcacggacttattcatgaattgtttatcgcttttcaagtgaacccattcgcccctggctggaaaggagcgtgtaacgggtccgtcgattgtgaggataccacaaaccacaatatccttcaggcccgtgatcgcatcgaggacttctttcgctctcaagcctacatcttctaccacaattttaataaaactcttcctgcaatgcacttcgtggatcacagtttgcaggtggtccggctggactcatgtcggccaggattcggcaaaaacgagcgccttcactcaaactgtgcaagttgttgcgttgtgtgctcacctgccacattctctcctgacgtgaacgtgacttgtcaaacctgcgtctcagttttaacctacggtgcaaagagctgcccgcagacgtctaacaaaaatcagcaatacgaggactag

SEQ ID NO: 260550 - DNA, 951 bp, Artificial Sequence
  derived and/or modified sequence
atgatgcggacctgcgtccttctgtccgctgtgctgtggtgtctgaccggggataaaatttatgtagagttgcaccagaattcgcctgtgctgatttgtatggatttcaagttaagtaagaaggagattgtagacccaacgtatttgtggattgggccaaacgagaagactctgactggaaataaccgcataaacatcacagaaacgggccagctgatggtcaaagactttctcgaacctttgtcagggctctacacttgtaccctttcctacaaaactgttaaggccgagactcaggaggaaaagaccgtcaagaagaggtatgactttatggtcttcgcctacagagaacccgactatagctatcagatggcagttaggttcacaaccaggtcttgcatcggcaggtataacgacgtcttttttcgggtgctgaaaaaaatccttgattcacttatctcggacctcagttgccacgtgatcgagccaagctacaaatgccattcagtggagattccagagcacggccttatccacgagcttttcatagcatttcaggttaacccgttcgccccaggatggaaaggtgcatgtaacggttccgtggattgtgaggataccactaaccacaatatcctgcaggcccgtgaccggatagaagatttctttcgaagccaagcgtatattttttaccacaatttcaataaaacactgcctgcgatgcattttgtcgaccactcgctccaggtagtaaggctcgactcttgcagacctgggtttggaaagaacgagaggttgcactctaattgcgcctcctgttgtgttgtatgcagccctgctacattctctcctgacgtaaacgtcacttgccaaacatgcgtgtcagtcctcacttatggggcaaagtcctgcccccaaacgtctaataaaaatcagcagtatgaagattag

SEQ ID NO: 260551 - DNA, 2177 bp, Artificial Sequence
  derived and/or modified sequence
gccgttgcgacggacgggtaggggaggcgaccccggcgttctgctccgcactgtggaggaggtggggaggtgttgggccagggctgaggtaggagggagtctgtccctcgacgcctcctgcgacgccagcccctgagcgatgatgcgaacgtgcgtcctactctccgcggtgctctggtgcctcacaggagacaaaatatatgtagagttacatcaaaatagtccagtccttatctgtatggattttaagctttctaaaaaagaaatagtggaccccacctacttatggattgggcctaatgaaaagacgttaacaggaaataatagaataaatataactgaaactggacagctgatggtgaaagattttttggagcctttgtctggactttacacatgtactctttcttataagactgttaaagcagaaactcaagaagaaaaaacagtcaaaaagagatatgactttatggtctttgcctatcgggaacctgattattcatatcagatggctgtacgttttaccacaaggtcttgtatagggagatacaatgatgtattctttagagtgctgaagaaaatcttggatagtctaatttctgatttgtcatgccatgtcatagagccatcatataaatgccattctgttgaaattccagaacatggcctcatacatgagctatttatagcatttcaagttaatccttttgcgccggggtggaaaggtgcttgcaatggatctgttgactgtgaagataccactaatcataatatcctccaggcaagagatcgaatagaagacttttttcggagccaagcatatattttctaccataactttaataaaactctaccagcaatgcattttgtggaccacagtttgcaagtagtacgtctggatagctgtcgaccaggctttggaaaaaatgaacgtctacacagtaattgcgctagctgttgtgtggtttgtagtcctgcgacttttagtcctgatgttaatgtaacttgtcagacctgcgtttccgtccttacctatggagctaaatcttgcccacaaacttcaaacaaaaatcagcaatatgaagattagaggtgaaagcattgttacttacttgtggaagtcggggacataagatgattttcacatcccagagcatcatagatagttccattaagtaaaatcagtaagaccaaaccactggaaaacatgcattttggaaactttaaaataaatggttaacatggcatttctaagaaggcatttaatccagtatctctagtgtacaaaggaaacttgaagttttaatggattatttttaatgaaatgttttattgtttacaaacggtatgttgctgtgtacctaagagtatagtaaggtcaagaagagtatcaaagtataataaaataaaaattgtatactctccatatatttatttgtttggaatcactcttgtgtgatataaaggcgtgtatattatctttgtattagaaccaaaaaagttatttattttggtccctatgattttattttttaagataaattaatatactgtattttttaaagtataggtttaggtttacagaataatagagcagataatatatagagttccatacacccactgcaccccataccctcattcctccttacacaatttctcctattattaagatggtgcattagtgtggcacatttgttacaaatgatgaaccaatattaatttattattaattatagcccatagttcacattaagattcattgtgttgtaaggttatgtgggttttgacaaattcataatggcatgtgtgcaccattgcagtctcatacagaatagtttcaccaccctcaaaatcctgtgcttcacttatttatccctcccgccgtgccctggcaaccactgatctttttactgtctctacagttttgccttttccaaaatgtcatgtagttggttggagttatgcagtatgtagactttttagactggcttctttcacttagcaatatgcatttaaggttcctccatgtctttttgtgacttgatagctcattttttattgctgaataatgttcattgtatggatatagcatagtatgtttatccattcgcccattaaaggaaatcttgattgcttccagttttcagtgattaaaaataaagccgctataaaca

SEQ ID NO: 260552 - protein, 844 aa, Artificial Sequence
  derived and/or modified sequence
MVTVMPLEMEKTISKLMFDFQRNSTSDDDSGCALEEYAWVPPGLKPEQVHQYYSCLPEEKVPYVNSPGEKLRIKQLLHQLPPHDNEVRYCNSLDEEEKRELKLFSSQRKRENLGRGNVRPFPVTMTGAICEQCGGQINGGDIAVFASRAGHGVCWHPPCFVCTVCNELLVDLIYFYQDGKIYCGRHHAECLKPRCAACDEIIFADECTEAEGRHWHMKHFCCFECETVLGGQRYIMKEGRPYCCHCFESLYAEYCDTCAQHIGIDQGQMTYDGQHWHATETCFCCAHCKKSLLGRPFLPKQGQIFCSRACSAGEDPNGSDSSDSAFQNARAKESRRSAKIGKNKGKTEEPMLNQHSQLQVSSNRLSADVDPLSLQMDMLSLSSQTPSLNRDPIWRSREEPYHYGNKMEQNQTQSPLQLLSQCNIRTSYSPGGQGAGAQPEMWGKHFSNPKRSSSLAMTGHAGSFIKECREDYYPGRLRSQESYSDMSSQSFSETRGSIQVPKYEEEEEEEGGLSTQQCRTRHPISSLKYTEDMTPTEQTPRGSMESLALSNATGLSADGGAKRQEHLSRFSMPDLSKDSGMNVSEKLSNMGTLNSSMQFRSAESVRSLLSAQQYQEMEGNLHQLSNPIGYRDLQSHGRMHQSFDFDGGMAGSKLPGQEGVRIQPMSERTRRRATSRDDNRRFRPHRSRRSRRSRSDNALHLASEREAISRLKDRPPLRAREDYDQFMRQRSFQESMGHGSRRDLYGQCPRTVSDLALQNAFGDRWGPYFAEYDWCSTCSSSSESDNEGYFLGEPIPQPARLRYVTSDELLHKYSSYGLPKSSTLGGRGQLHSRKRQKSKNCIIS

SEQ ID NO: 260553 - DNA, 2535 bp, Artificial Sequence
  derived and/or modified sequence
atggtgaccgtcatgccgctcgagatggaaaaaaccatctccaagctgatgttcgacttccaacgcaacagcacttcggacgatgactctggatgcgctctggaagagtatgcttgggtacctcccggcctcaaaccagagcaggttcaccagtattacagttgcctacccgaggagaaggtcccttatgtcaactctccaggtgagaagctgcgcatcaaacagttgctccaccagcttcctccacacgataacgaggtgcgttactgtaatagcctcgacgaggaggagaagagggagctcaaactgtttagttcacagcgcaagagggagaaccttggacgtggaaatgtccggccatttcccgttactatgacaggcgctatctgcgagcagtgcgggggccagataaatggcggcgatatcgccgtgttcgccagtcgcgccggacacggggtgtgctggcatcccccatgtttcgtctgtactgtttgcaatgagctgttagtagacctaatttatttctaccaggacggcaagatttactgcggacgacaccatgctgaatgtctgaagcctcgttgcgctgcttgcgacgaaattatatttgctgatgagtgtactgaagccgagggaaggcactggcatatgaaacatttctgctgtttcgaatgtgagacggtgctaggcggacaaagatacataatgaaagagggacgaccatactgctgtcactgcttcgaaagcctgtacgctgagtactgtgatacgtgcgcccagcacatcgggatcgatcagggacagatgacatacgatgggcaacactggcacgctactgaaacttgtttttgctgtgcccattgtaaaaagtcactcttgggccgaccgttcctgcccaagcagggccagatcttctgttcaagggcttgttccgctggcgaggaccccaacggaagtgatagcagcgattcggcattccagaacgctcgggccaaggaatcccgaagatcagccaagataggcaaaaacaaggggaagactgaggaacctatgcttaatcagcacagtcagctgcaagtgtcctctaatcgcctatctgcagacgtggatcctctgtctctgcaaatggatatgctgtcactgtcatctcagaccccttctctaaatagagaccccatttggaggagcagagaggagccctaccactacggcaacaaaatggagcaaaatcaaacccagtcaccactgcaacttttgtctcagtgcaacatcagaaccagctattcccccggaggtcaaggcgccggagcacagcctgagatgtgggggaagcacttttctaaccctaaaaggtcctcgagcctcgcaatgaccggacatgcggggtcctttatcaaggagtgtcgtgaagactactaccctggcaggttacgcagccaggaatcatattctgacatgagttctcagtctttcagcgagactagaggtagcattcaggtccccaagtatgaggaggaggaggaggaggagggaggcctgtcaacacagcagtgcagaacacggcaccccatctcttctcttaaatacacagaggacatgacgccaaccgagcagaccccaaggggcagcatggagagcctagccttaagtaatgctaccgggctgagcgccgacggcggggcgaaaaggcaagagcacttatccaggttttctatgccagatctgagcaaagacagtggtatgaatgtcagcgagaagctgagtaatatgggaacactaaacagtagtatgcaatttcgctcggctgaatccgttaggtcacttcttagcgctcaacagtatcaagagatggagggtaatctgcaccagctttcaaatcctatcggatacagagacctgcaatcccatggaagaatgcatcagtcattcgacttcgacggcggcatggccggaagcaagctgcccgggcaggaaggtgtgaggattcagcccatgtccgagaggacccgtaggagggccacttctagggacgacaacaggcggttccggccccaccgttcaagacggtcccgaagaagccgttcagacaatgcgttacatttagcatccgaaagagaggccatctcccgccttaaggatcgccctcctctgagagctcgcgaggattacgatcaatttatgcgacagcgttcctttcaggagtctatgggccacggatccagacgtgatttatatggccagtgtcctaggacagtttctgatctagccctgcaaaatgctttcggggatagatggggcccatacttcgctgagtacgattggtgttctacgtgctctagcagctccgaatcggataacgagggctattttctgggggagcctattccccagcctgccagattgaggtacgttacatccgacgagctattgcacaaatactcaagttatggcctcccaaagagcagtactctgggcgggcgcggacagttacacagcagaaagaggcagaaatcgaaaaattgtatcatatcctag

SEQ ID NO: 260554 - DNA, 2535 bp, Artificial Sequence
  derived and/or modified sequence
atggtgacagtgatgcccctggagatggagaagaccatcagcaagctgatgtttgacttccagaggaacagcaccagtgatgatgacagcggctgtgccctggaggagtatgcctgggtgcccccaggcctgaagccagagcaggtgcaccagtactacagctgcctgcctgaggagaaggtgccctacgtgaacagccctggagagaagctgcgcatcaagcagctgctgcaccagctgccccctcatgacaatgaggtgcgctactgcaacagcctggatgaggaggagaagcgggagctgaagctgttcagcagccagaggaagcgggagaacctgggcagaggaaatgtgcggcccttccctgtgaccatgaccggggccatctgtgagcagtgtggcggccagatcaatggaggagacattgctgtgtttgccagcagagctggccatggagtgtgctggcaccccccctgctttgtgtgcaccgtgtgcaatgagctgctggtggacctgatctacttctaccaggacggcaagatctactgcggccgccaccacgcagaatgtctgaagccccgctgtgccgcctgtgatgagatcatctttgctgatgagtgcacagaggccgagggccgccactggcacatgaagcacttctgctgctttgaatgtgaaacagtgctgggcggccagcgctacatcatgaaggagggccggccctactgctgccactgctttgagagcctgtatgcagagtactgtgacacctgtgcccagcacatcggcatcgaccagggccagatgacctatgatggccagcactggcacgccacagagacctgcttctgctgtgcccactgcaagaagagcctgctgggccggcccttcctgcccaagcagggccagatcttctgcagccgggcctgcagcgctggggaggaccccaatggaagtgacagcagtgacagcgccttccagaatgcccgggccaaggagagcagaagaagtgccaagattggcaagaacaagggcaagacagaggagcccatgctgaaccagcacagccagctgcaggtgagcagcaaccggctgtctgcagatgtggaccccctgagcctgcagatggacatgctgagcctgagcagccagacccccagcctgaacagagaccccatctggaggagccgggaggagccctaccactacggcaacaagatggagcagaaccagacccagagccccctgcagctgctgagccagtgcaacatccgcaccagctacagccctgggggccagggcgctggggcccagcctgagatgtggggcaagcacttcagcaaccccaagaggagcagcagcctggccatgacaggccatgctggcagcttcatcaaggaatgtcgggaggactactacccaggccgcctgcggagccaggagagctacagcgacatgagcagccagagcttcagcgagacccggggcagcatccaggtgcccaagtatgaggaggaggaggaggaggagggcggcctgagcacccagcagtgcaggaccaggcaccccatcagcagcctgaagtacacagaggacatgacccccacagagcagaccccccggggctccatggagagcctggccctgagcaatgccaccggcctgtctgcagatggaggagccaagaggcaggagcacctgagccgcttctccatgccagacctgagcaaggacagcggcatgaatgtgtctgagaagctgagcaacatgggcaccctgaacagctccatgcagttccgctctgctgagagcgtgcgcagcctgctgagcgcccagcagtaccaggagatggagggcaacctgcaccagctgagcaaccccatcggctacagagacctgcagagccacggccgcatgcaccagagctttgattttgatggcggcatggccggcagcaagctgcccggccaggagggcgtgcgcatccagcccatgtctgagaggaccaggagaagagccaccagcagagatgacaacagacgcttccggccccacaggagccgccgcagcagaagaagcagaagtgacaatgccctgcacctggccagcgagcgggaggccatcagccggctgaaggacaggcctcccctgcgggccagagaagattatgaccagttcatgaggcagaggagcttccaggagagcatgggccacggcagcagaagagacctgtatggccagtgccccaggacagtgtctgacctggccctgcagaatgcctttggagaccgctggggcccctactttgctgaatatgactggtgcagcacctgcagcagcagcagcgagagtgacaatgaaggctacttcctgggggagcccatcccccagcctgcccggctgcgctacgtgaccagtgatgagctgctgcacaagtacagcagctatggcctgcccaagagcagcaccctgggcggccggggccagctgcacagcaggaagaggcagaagagcaagaactgcatcatctcctag

SEQ ID NO: 260555 - DNA, 2535 bp, Artificial Sequence
  derived and/or modified sequence
atggtgaccgtgatgcccctggagatggagaagaccatcagcaagttgatgttcgactttcaacgcaactctaccagcgacgatgactctggatgcgctctggaagagtatgcctgggtgccgcctggactgaagccagagcaggttcaccagtattacagctgcctgcccgaggagaaagttccctatgtcaacagcccgggcgagaaactgcgaatcaagcagctgctgcatcagctgcctccccatgacaatgaggtcagatattgcaatagcctggatgaagaggagaagagagaactcaaattgttctctagccagaggaagcgagagaatttggggagagggaacgtaagaccgttccccgtgacaatgacgggtgccatctgtgagcagtgtggtggtcagatcaacggcggcgacatagctgtttttgcctcccgcgctggccacggcgtatgctggcatccaccttgttttgtatgtacagtgtgcaacgagctgctcgttgacctgatttacttctaccaggacggtaagatttattgcggacggcaccacgcagaatgcctaaagcctcggtgtgctgcctgtgacgagattatattcgctgatgaatgtaccgaggcagaaggcaggcactggcacatgaaacacttttgctgcttcgaatgtgagactgtactgggcggtcagaggtatatcatgaaagaagggaggccatattgttgccactgtttcgaatccctgtacgctgagtattgcgatacctgcgcccagcacatcgggatcgaccagggccagatgacctatgacggtcagcattggcacgcgaccgaaacttgcttctgttgtgcgcattgcaagaagtcactgctggggaggccgttcctgcccaagcaggggcagatcttttgctcccgcgcgtgcagcgctggcgaagatcccaacgggtctgatagttccgacagtgcttttcagaacgcccgagcaaaagagagtcgcagatctgccaaaattggaaagaacaagggcaagaccgaggagcctatgttaaaccagcacagtcagctacaggtgagctctaatcggctgtcagccgacgtggaccctctttcgctgcagatggatatgctgtcattgtcatcccagactccatctctcaatcgagaccccatctggcggagtcgcgaagagccataccattacggtaataaaatggagcagaaccagacacagtctcctctgcagctactttcacagtgcaacatccgcacaagttattctcctggtggacaaggtgcgggggctcagcccgaaatgtgggggaagcacttctccaaccctaagcggagcagctcccttgcgatgaccgggcatgcaggcagtttcattaaagagtgtagggaggactactatccgggccgccttcgcagtcaagagagctattcagacatgagttcccagtctttttcagaaacccggggtagcattcaagttcccaagtatgaagaagaggaagaagaagagggaggcctctcaactcaacaatgcagaactcgacaccctatctcctccctgaagtacactgaggatatgacacccacggaacagactccacgtggcagtatggaatcgttagccttgagcaatgcgaccggactctcagctgacgggggggctaaacgccaggagcatctttctaggttttccatgccagacttgtcaaaggattccgggatgaatgtgtctgaaaagctgtcaaacatgggcactctgaattcgtcaatgcagtttcggtctgctgaatccgtcaggtctctgttatcggcacagcaatatcaggagatggagggaaaccttcatcaactgtccaacccaataggatacagagacctgcagtctcatggccgcatgcaccagtcctttgattttgacggcggcatggcagggtcaaaactccctggtcaggagggcgtgcgcatccaacccatgagtgagcggacacggcgccgagcaacaagtagagatgataatagacgcttccgccctcaccggtcaagacgctcccgccggagtcggagcgacaatgcactccatttggccagcgaacgggaggccatatcacgcctgaaggatagaccgccgctgcgggctagggaggactacgaccagtttatgagacaacgctccttccaggaatcaatgggccacgggtcacgcagagatctgtacgggcagtgtcctagaacagtgtccgatctggcgctgcagaacgctttcggtgatcgatggggaccatacttcgctgagtatgattggtgtagcacctgttcttcctcaagcgagtcagacaacgagggttatttccttggtgaaccgatcccccagcccgcacgtctgagatacgtgacatcagacgagttactgcacaaatactcttcatacggcttacctaagtccagtactctgggtggcaggggacagttacacagccgcaagaggcagaaaagtaaaaactgtataatttcttag

SEQ ID NO: 260556 - DNA, 2535 bp, Artificial Sequence
  derived and/or modified sequence
atggttaccgtcatgcccctggagatggagaagacaataagtaaactgatgtttgactttcagcggaatagtactagtgatgacgatagcggttgcgctctcgaagaatacgcttgggtgccacccggtctgaagcctgaacaggtgcaccagtactactcgtgtctgcccgaagagaaggttccgtatgttaattcccctggggaaaaactgcggatcaagcagctgctgcaccagcttcctcctcacgataatgaagtcagatactgcaattctctcgacgaggaggaaaagcgcgagcttaaactgttttcctcacaaaggaagagggagaatttgggcaggggcaacgttcggccattccccgtcacgatgactggggctatttgtgagcaatgtggcggtcagattaacgggggtgacatagccgttttcgctagtcgtgccggacacggagtgtgttggcaccccccatgcttcgtctgtacagtgtgcaacgagctgctggtggatctgatctacttctaccaggacgggaagatttactgcggccgacatcacgccgagtgccttaagccccgatgcgcggcttgcgacgaaattattttcgcagatgagtgtacagaagcggagggcagacattggcacatgaagcacttttgctgcttcgagtgcgagactgtgctgggaggccagcgttatatcatgaaggagggaaggccatactgttgccactgcttcgaaagcttgtacgctgaatactgtgatacctgcgcacaacacataggtatagaccagggccagatgacgtatgacgggcagcattggcacgcaaccgagacctgcttttgttgtgctcactgtaaaaagagccttctgggtaggccatttctcccgaaacaagggcagatcttctgttctcgggcttgctccgccggagaggatcccaatggttccgacagttctgattcggcttttcagaacgcccgagcaaaggagtctaggcggtccgctaagatcggaaagaacaagggaaaaaccgaggaacctatgttaaatcagcactcccagttgcaagtgagttctaatcgcctgtcagctgatgtcgaccccctctccctccagatggacatgttgtctctctccagccagacgcctagcctcaatcgggatcccatttggcgtagcagagaggaaccatatcactacgggaataaaatggagcagaaccagacccagagccccctccaactgctgagccagtgtaatattaggacatcatacagtcccggaggacaaggtgctggtgcacagcccgaaatgtggggcaagcacttttccaatcccaaaagatcgagcagcctagcaatgacaggacatgccggttcattcatcaaggagtgcagagaagattactaccccggaaggctgcgatcccaggagagttattcagacatgtcctcccagagtttcagtgagaccagagggagcatccaggtacctaaatatgaagaggaagaggaggaagaagggggtctgtcaacccagcagtgccggactcgccacccaatctcttcactgaagtacaccgaggacatgactccaaccgagcagacaccaagaggctctatggagagcctcgctctgagtaatgcaacaggcttatccgcagatggaggtgctaaaaggcaggaacacctgtctagattcagtatgccggatctgtctaaggattccggaatgaacgtctccgaaaagctttcaaacatggggactttaaattccagtatgcagttcaggtccgccgaaagtgttcgcagcctcctttctgcacaacagtatcaggaaatggagggaaatctgcatcagctgtccaatccaattgggtaccgggacctccagtctcatgggaggatgcaccagagttttgactttgacggaggcatggcaggctccaagctgcccggacaggagggggtcagaatccaaccaatgagtgagcgcaccagaaggcgggctaccagcagggacgacaataggcggtttcggcctcaccgctctagaagatcacgaaggtctcggtccgacaatgccctgcacctggcatctgaaagagaggccattagccgccttaaggatcggccaccactgcgggctcgtgaggactacgatcagtttatgaggcaaaggagtttccaggagagcatgggccacggcagtcgcagggacctgtatggacaatgtcctcggactgtgtccgacctggccctacaaaatgcgttcggagacagatgggggccttattttgcagagtacgattggtgtagtacgtgttccagttcaagtgaaagcgacaacgaaggctacttccttggtgaacctattccgcaacctgcaaggctccggtacgtgacctcagacgagctgctccacaaatactcgagctatggactgcctaagtcatccaccctgggtggccgtggtcagcttcactctagaaagcgccagaagagtaaaaattgcattattagttag

SEQ ID NO: 260557 - DNA, 2535 bp, Artificial Sequence
  derived and/or modified sequence
atggtgaccgtgatgcccctggagatggagaagaccatcagcaagctgatgttcgacttccagagaaacagcaccagcgacgacgacagcggctgcgccctggaggagtacgcctgggtgccccccggcctgaagcccgagcaggtgcaccagtactacagctgcctgcccgaggagaaggtgccctacgtgaacagccccggcgagaagctgagaatcaagcagctgctgcaccagctgcccccccacgacaacgaggtgagatactgcaacagcctggacgaggaggagaagagagagctgaagctgttcagcagccagagaaagagagagaacctgggcagaggcaacgtgagacccttccccgtgaccatgaccggcgccatctgcgagcagtgcggcggccagatcaacggcggcgacatcgccgtgttcgccagcagagccggccacggcgtgtgctggcaccccccctgcttcgtgtgcaccgtgtgcaacgagctgctggtggacctgatctacttctaccaggacggcaagatctactgcggcagacaccacgccgagtgcctgaagcccagatgcgccgcctgcgacgagatcatcttcgccgacgagtgcaccgaggccgagggcagacactggcacatgaagcacttctgctgcttcgagtgcgagaccgtgctgggcggccagagatacatcatgaaggagggcagaccctactgctgccactgcttcgagagcctgtacgccgagtactgcgacacctgcgcccagcacatcggcatcgaccagggccagatgacctacgacggccagcactggcacgccaccgagacctgcttctgctgcgcccactgcaagaagagcctgctgggcagacccttcctgcccaagcagggccagatcttctgcagcagagcctgcagcgccggcgaggaccccaacggcagcgacagcagcgacagcgccttccagaacgccagagccaaggagagcagaagaagcgccaagatcggcaagaacaagggcaagaccgaggagcccatgctgaaccagcacagccagctgcaggtgagcagcaacagactgagcgccgacgtggaccccctgagcctgcagatggacatgctgagcctgagcagccagacccccagcctgaacagagaccccatctggagaagcagagaggagccctaccactacggcaacaagatggagcagaaccagacccagagccccctgcagctgctgagccagtgcaacatcagaaccagctacagccccggcggccagggcgccggcgcccagcccgagatgtggggcaagcacttcagcaaccccaagagaagcagcagcctggccatgaccggccacgccggcagcttcatcaaggagtgcagagaggactactaccccggcagactgagaagccaggagagctacagcgacatgagcagccagagcttcagcgagaccagaggcagcatccaggtgcccaagtacgaggaggaggaggaggaggagggcggcctgagcacccagcagtgcagaaccagacaccccatcagcagcctgaagtacaccgaggacatgacccccaccgagcagacccccagaggcagcatggagagcctggccctgagcaacgccaccggcctgagcgccgacggcggcgccaagagacaggagcacctgagcagattcagcatgcccgacctgagcaaggacagcggcatgaacgtgagcgagaagctgagcaacatgggcaccctgaacagcagcatgcagttcagaagcgccgagagcgtgagaagcctgctgagcgcccagcagtaccaggagatggagggcaacctgcaccagctgagcaaccccatcggctacagagacctgcagagccacggcagaatgcaccagagcttcgacttcgacggcggcatggccggcagcaagctgcccggccaggagggcgtgagaatccagcccatgagcgagagaaccagaagaagagccaccagcagagacgacaacagaagattcagaccccacagaagcagaagaagcagaagaagcagaagcgacaacgccctgcacctggccagcgagagagaggccatcagcagactgaaggacagaccccccctgagagccagagaggactacgaccagttcatgagacagagaagcttccaggagagcatgggccacggcagcagaagagacctgtacggccagtgccccagaaccgtgagcgacctggccctgcagaacgccttcggcgacagatggggcccctacttcgccgagtacgactggtgcagcacctgcagcagcagcagcgagagcgacaacgagggctacttcctgggcgagcccatcccccagcccgccagactgagatacgtgaccagcgacgagctgctgcacaagtacagcagctacggcctgcccaagagcagcaccctgggcggcagaggccagctgcacagcagaaagagacagaagagcaagaactgcatcatcagctag

SEQ ID NO: 260558 - protein, 435 aa, Artificial Sequence
  derived and/or modified sequence
MLLGGPPRSPRSGTSPKGPWSSTGHVQFGKSPQTWPRRTRPRSPEPAAPSGVRGSTWTRRRDTPRRAGPTALSRYVGHLWMGRRPPSPEARGPVPRSSAASRARRSLASPGISPGPLTATIGGAVAGGGPRQGRAEAHKEVFPGQRVGKMAAPMELFCWSGGWGLPSVDLDSLAVLTYARFTGAPLKVHKISNPWQSPSGTLPALRTSHGEVISVPHKIITHLRKEVHTFWIDTKNYVEVTRKWYAEAMPFPLNFFLPGRMQRQYMERLQLLTGEHRPEDEEELEKELYREARECLTLLSQRLGSQKFFFGDAPASLDAFVFSYLALLLQAKLPSGKLQVHLRGLHNLCAYCTHILSLYFPWDGAEVPPQRQTPAGPETEEEPYRRRNQILSVLAGLAAMVGYALLSGIVSIQRATPARAPGTRTLGMAEEDEEE

SEQ ID NO: 260559 - DNA, 1308 bp, Artificial Sequence
  derived and/or modified sequence
atgctgctcggcggaccaccccgatcgcctcgatccggaacaagtccaaaaggaccgtggtccagcacaggacacgttcagttcggaaagtctccccaaacatggcctcggaggacccgtccgcgcagcccagagccagctgccccgtctggcgtgaggggcagtacttggacccgccggcgtgatacaccccggcgggcgggtcccactgcactgagccgctatgttgggcacttatggatgggaaggcggccccctagtcccgaagcacggggtcctgtacctcggtcatctgccgcttctagagccaggagatcattggcttccccaggcatcagcccaggtcctctgactgcaacgattggcggcgccgttgctggcggggggcctcgacagggacgcgccgaagcccataaggaagtgttccccgggcagagggtgggtaagatggctgctcccatggaactgttctgctggtccggcggatggggattaccaagtgtagaccttgatagtctggctgttctcacctacgctcggtttactggtgcaccactgaaggtgcataagattagcaacccgtggcagtccccatccggcacactccccgcactgagaacatctcacggagaagtgattagcgtccctcacaagattataacacacttaagaaaggaggtgcacaccttctggattgacactaaaaactacgtggaggtgacaagaaaatggtatgccgaggccatgcccttccctctgaacttcttcctgccaggccgtatgcaaaggcagtacatggaacgtctccagctcttgacaggggagcaccgcccagaagatgaggaggagcttgagaaagaactctatagggaggctcgtgagtgtctgaccctgttgtctcaacgactgggctcacagaagttttttttcggcgacgcacccgccagtctcgacgcatttgtgttcagctacctcgcgctcctgctccaggctaaactgccatcgggcaagctgcaggtccatctgagaggattgcataacttgtgtgcgtactgcacacatatcttaagcctctactttccttgggacggcgccgaggtcccacctcagcggcagactcctgctggtccggagacagaggaagaaccctatcgccgcagaaatcagattctatcagtgctggccggactcgccgccatggtaggttacgccctcttgtccgggatcgtgagcatccagcgcgccactcctgctcgggcaccagggactcgcactctggggatggcagaagaggacgaggaggaatag

SEQ ID NO: 260560 - DNA, 1308 bp, Artificial Sequence
  derived and/or modified sequence
atgctgctgggcggcccccccaggagccccaggagcggcaccagccccaagggcccctggagcagcactggacatgtgcagtttgggaagagcccccagacctggcccaggaggacccggcccaggagccctgagcctgctgcccccagcggcgtgcggggcagcacctggacccggcggcgggacaccccaagaagagctggccccacagccctgagccgctacgtgggccacctgtggatgggcagaagaccacccagccctgaggcccggggccctgtgcccaggagcagcgctgccagccgggcccggcgcagcctggccagccctggcatcagccctggccccctgacagccaccatcggcggcgctgtggccggcggcggcccccggcagggccgggcagaggcccacaaggaggtgtttcctggccagagggtgggcaagatggccgcccccatggagctgttctgctggagcggcggctggggcctgcccagcgtggacctggacagcctggccgtgctgacctacgcccgcttcaccggggcccccctgaaggtgcacaagatcagcaacccctggcagagccccagcggcaccctgcctgccctgcggaccagccatggagaggtgatctctgtgccccacaagatcatcacccacctgaggaaggaggtgcacaccttctggattgacaccaagaactacgtggaggtgaccaggaagtggtacgccgaggccatgcccttccccctgaacttcttcctgcccggccgcatgcagaggcagtacatggagcggctgcagctgctgactggagagcacaggccagaagatgaggaggagctggagaaggagctgtaccgggaggcccgggagtgcctgaccctgctgagccagaggctgggcagccagaagttcttctttggagatgccccagccagcctggatgcctttgtgttctcctacctggccctgctgctgcaggccaagctgcccagcggcaagctgcaggtgcacctgcggggcctgcacaacctgtgtgcctactgcacccacatcctgagcctgtacttcccctgggatggagctgaggtgcccccccagaggcagaccccagctggccctgagacagaggaggagccctacagaagaagaaaccagatcctgtctgtgctggccggcctggccgccatggtgggctacgccctgctgtctggaattgtgtccatccagagggccaccccagcccgggcccctggcaccaggaccctgggcatggccgaggaggatgaggaggagtag

SEQ ID NO: 260561 - DNA, 1441 bp, Artificial Sequence
  derived and/or modified sequence
tggaaaacatgctgctcgggggacccccccgcagtccccgctcggggacgagccccaaggggccctggagcagtacaggccacgtgcagtttggcaagagcccccagacctggcccaggcgcacaagaccccgctctccagagcctgccgcgccttcaggggttcggggctccacttggacgaggcgccgtgacactccgaggcgcgccgggccgacagcgctgtcccgctacgtgggccacctctggatgggccggcggccgccctcccccgaggcccgcggcccagtcccccgcagttcagctgccagtcgggccagaagaagcctcgcctccccggggatctccccaggccccctgaccgcaacgatcggaggggcggtggcggggggcgggcccaggcaggggagggcagaagcacacaaggaagtgtttccgggacagagggtgggcaagatggcggcgcccatggagctgttctgctggtcagggggctgggggctgccgtcagtggacctggacagcctggccgtgctgacctatgccagatttactggtgctccactgaaggtacacaagatcagcaacccctggcagagcccttcaggaactctgcctgcccttcggaccagtcatggagaggtcatctcagttccacacaagatcatcacccaccttcgaaaagaggtacatactttttggatagacaccaagaactacgtggaagtgacccggaagtggtatgcagaggctatgccctttcccctcaacttcttcctgcctggccgcatgcagcggcagtacatggaacggctacagctgctgactggggagcacaggcctgaggacgaggaagagctggagaaggagctgtaccgagaggctcgggagtgtctgaccctgctctctcagcgcctgggctctcaaaagttcttctttggagatgcccctgcctccttggacgccttcgtcttcagctacttggccctgctgctgcaggcaaagctgcccagtgggaagctgcaggtccacctgcgtgggctgcacaacctctgtgcctattgtacccacattctcagtctctacttcccctgggatggagctgaggtaccaccgcaacgccagacaccagcaggcccagagactgaggaggagccataccggcgccggaaccagatcctatctgtgctggcaggactggcagccatggtgggctacgccttgctcagcggcattgtctccatccagcgggcaacgcctgctcgggccccaggcacccggaccctgggcatggctgaggaggatgaagaggaatgatttgtcctcacgctcccaagactggtttttctactctcatgcattccagaggcccccgtgcctcctcgttgttggtacagccggacacggggtgctgccacccagaataaagccactcacactga

SEQ ID NO: 260562 - DNA, 1308 bp, Artificial Sequence
  derived and/or modified sequence
atgctgctgggcggccccccccggagcccccggagcggcaccagcccaaaaggaccatggtcatccacaggacatgtacaattcggcaagtcccctcagacctggcctagaagaactcgccctaggtcaccagaacccgctgcaccatcgggggttcggggttcaacgtggaccaggcgccgggacacgcctcggcgcgccggcccaactgctctgtccagatacgtgggacatctgtggatgggcagacgacccccgtctccagaagctcgcggcccggtaccccgctcctctgccgccagtagggccaggagatctctagcttccccagggatctccccaggcccccttacggccacaatcggcggtgccgtggctggggggggccccagacagggaagggctgaagcacacaaggaggtgttcccgggccagagggtcggaaaaatggctgcacccatggagctgttttgttggagtggagggtggggccttcccagtgtcgatctcgactctctggcagtgctcacatacgcccggtttactggtgcacctctaaaggttcataaaatctcgaacccctggcaatccccatccggcaccctgccggcacttcgtacttcccacggagaagtgatctctgtgccacacaaaatcatcactcatcttagaaaggaagtccacacattttggatcgacaccaaaaattacgtggaggtaacgaggaagtggtacgcagaagccatgcctttccctctgaactttttcctgccgggaagaatgcaacggcagtatatggagaggttgcagcttctcactggagagcaccgaccagaggacgaggaggagttggaaaaggaactttacagggaggcgagggagtgccttacgctgctgagccagcggctgggaagtcaaaaatttttctttggcgacgccccggcaagcttggacgcgttcgtgttcagttacctcgcgctcctccttcaagcaaaactcccatctggaaagctgcaggtacacctgagaggacttcacaatttatgcgcttactgcacccatatcctctctctgtatttcccttgggatggcgccgaggtgccccctcagcgccaaacaccggcaggaccagagacagaggaagaaccttatagaagacgtaatcagattcttagcgtgcttgctggactcgccgcaatggtgggttatgcactgctgagtggcatcgtttccattcagagagcaacaccagccagagcacctggaaccagaaccctggggatggctgaggaagatgaggaggagtag

SEQ ID NO: 260563 - DNA, 1308 bp, Artificial Sequence
  derived and/or modified sequence
atgctgctcggcggacctccacggtctcccagatctggcacctcccccaagggtccctggagtagcacgggccatgtccagtttggtaaatcacctcagacctggcccagaagaactcgccctaggagtcccgagcccgctgcccctagcggcgtacggggaagcacatggacccgcaggcgggatacaccacgacgtgcgggaccgactgctctgtcccggtacgtcggtcacctgtggatgggccgaaggcctccgagtcctgaagccagaggacccgtgcccaggtcaagtgccgcttcacgggcaagaagaagcctggctagccccggtatctcgcccggaccactgacagcaaccatcggcggagccgtggcgggagggggtccgagacaaggtcgagccgaggcacacaaagaagtgtttccgggtcagagagtggggaaaatggccgctcccatggaactcttctgctggtctggtggttggggtttaccctctgtcgacctggacagcctggccgtcctcacatatgcaagatttaccggagcaccacttaaagtacataaaatctcaaatccgtggcagtcaccatccgggacactcccggctctcagaacctctcacggagaagttatctctgtgcctcacaaaatcattacccatctcaggaaggaagtacacaccttttggatagatactaaaaattacgttgaagtgacacgtaaatggtacgctgaggcgatgccctttccacttaacttctttctcccaggacgcatgcaacgccagtacatggagcgtttgcaactgttgaccggcgaacacagaccagaagacgaggaggaactcgaaaaagagttatatcgggaggcgagagagtgtttgacccttctttcccagagactggggtcacagaaattcttcttcggggacgcaccggcatctctggacgcattcgtgtttagctatcttgcactgctgctgcaggccaagctcccttctggcaaactacaggtgcacctccgcggtctgcataacctctgtgcctattgcactcacattctcagcctttacttcccttgggatggcgcagaggtgccaccccagagacaaacaccagccggacctgagaccgaggaggagccctaccgcagaaggaatcagattctgagcgtgctggcaggcctcgccgctatggtgggatacgcgttgttgagcggaatcgtgtctattcaacgagctacaccggctcgggctccaggtaccaggactttagggatggcggaggaggatgaggaggaatag

SEQ ID NO: 260564 - DNA, 1308 bp, Artificial Sequence
  derived and/or modified sequence
atgctgctgggcggcccccccagaagccccagaagcggcaccagccccaagggcccctggagcagcaccggccacgtgcagttcggcaagagcccccagacctggcccagaagaaccagacccagaagccccgagcccgccgcccccagcggcgtgagaggcagcacctggaccagaagaagagacacccccagaagagccggccccaccgccctgagcagatacgtgggccacctgtggatgggcagaagaccccccagccccgaggccagaggccccgtgcccagaagcagcgccgccagcagagccagaagaagcctggccagccccggcatcagccccggccccctgaccgccaccatcggcggcgccgtggccggcggcggccccagacagggcagagccgaggcccacaaggaggtgttccccggccagagagtgggcaagatggccgcccccatggagctgttctgctggagcggcggctggggcctgcccagcgtggacctggacagcctggccgtgctgacctacgccagattcaccggcgcccccctgaaggtgcacaagatcagcaacccctggcagagccccagcggcaccctgcccgccctgagaaccagccacggcgaggtgatcagcgtgccccacaagatcatcacccacctgagaaaggaggtgcacaccttctggatcgacaccaagaactacgtggaggtgaccagaaagtggtacgccgaggccatgcccttccccctgaacttcttcctgcccggcagaatgcagagacagtacatggagagactgcagctgctgaccggcgagcacagacccgaggacgaggaggagctggagaaggagctgtacagagaggccagagagtgcctgaccctgctgagccagagactgggcagccagaagttcttcttcggcgacgcccccgccagcctggacgccttcgtgttcagctacctggccctgctgctgcaggccaagctgcccagcggcaagctgcaggtgcacctgagaggcctgcacaacctgtgcgcctactgcacccacatcctgagcctgtacttcccctgggacggcgccgaggtgcccccccagagacagacccccgccggccccgagaccgaggaggagccctacagaagaagaaaccagatcctgagcgtgctggccggcctggccgccatggtgggctacgccctgctgagcggcatcgtgagcatccagagagccacccccgccagagcccccggcaccagaaccctgggcatggccgaggaggacgaggaggagtag

SEQ ID NO: 260565 - protein, 380 aa, Artificial Sequence
  derived and/or modified sequence
MEEIYAKFVSQKISKTRWRPLPPGSLQTAETFATGSWDNEENYISLWSIGDFGNLDSDGGFEGDHQLLCDIRHHGDVMDLQFFDQERIVAASSTGCVTVFLHHPNNQTLSVNQQWTTAHYHTGPGSPSYSSAPCTGVVCNNPEIVTVGEDGRINLFRADHKEAVRTIDNADSSTLHAVTFLRTPEILTVNSIGQLKIWDFRQQGNEPSQILSLTGDRVPLHCVDRHPNQQHVVATGGQDGMLSIWDVRQGTMPVSLLKAHEAEMWEVHFHPSNPEHLFTCSEDGSLWHWDASTDVPEKSSLFHQGGRSSTFLSHSISNQANVHQSVISSWLSTDPAKDRIEITSLLPSRSLSVNTLDVLGPCLVCGTDAEAIYVTRHLFS

SEQ ID NO: 260566 - DNA, 1143 bp, Artificial Sequence
  derived and/or modified sequence
atggaggagatctatgccaaatttgtgtcccagaagattagcaaaacccgctggcgccctctgccaccggggagccttcagacagctgaaactttcgctacagggagttgggacaatgaagagaattacatctctctgtggtccatcggcgactttggcaacctcgacagtgatggtggattcgaaggagatcatcagttgctgtgcgatatacgtcatcacggcgatgttatggatttgcagttcttcgaccaggagcgaatcgtcgccgcctctagtaccggatgtgtgactgtgttcctccatcaccccaacaaccagaccctgagcgtgaatcagcaatggactacagcacactatcacacaggccccgggtcccctagctactcgtccgcaccgtgtaccggagtggtatgtaacaatccagagatcgtgacggtgggggaagacggacgcatcaaccttttcagggccgaccataaagaagcagtcaggacgatcgacaacgctgactcatcaacactgcacgctgtaaccttcttgcgcactccggaaattctgacagtgaactctataggacagctgaagatttgggactttcgccagcaaggtaatgaaccgtcccagattctctccctgaccggggatagggttccactgcactgcgtggacagacaccctaatcaacagcacgtcgtggccacaggcgggcaggatggaatgttgtcaatttgggatgtgaggcaggggacgatgcctgtgtctctgctgaaagcccatgaggcggagatgtgggaagtgcatttccatccaagcaatcccgaacacctgtttacatgtagtgaagacgggagcctgtggcattgggacgcgagtaccgacgtacccgagaagtcttctctattccatcagggcggtcgtagctctactttcctgtcacacagcatttccaatcaggccaacgtacatcagagtgttatctcctcttggctttccacggacccagctaaagatcggatagagattaccagcttactccctagccggtctctcagtgtcaacactctcgacgtgctgggaccttgcctggtttgcggtactgacgcagaagccatctacgtaacgaggcaccttttttcatag

SEQ ID NO: 260567 - DNA, 1143 bp, Artificial Sequence
  derived and/or modified sequence
atggaagagatttacgccaagttcgtgtcccagaaaatctcaaagactagatggaggccactccctcccgggtccctccagacagcagagacttttgccacaggctcctgggacaatgaggaaaattatatcagcctgtggtctatcggcgattttggcaacctcgatagcgatggaggcttcgagggcgatcaccagctcctctgtgacataagacaccacggagatgtcatggacctccagttctttgaccaggaacgcatcgtggccgccagttctactggctgcgtgacggtcttccttcaccaccctaataaccaaactttgtccgtgaaccagcagtggacgaccgcacattatcacaccggcccaggaagccccagttactcctcagcaccatgtacaggggttgtgtgcaacaatcccgaaatcgtgactgtgggggaggacggaagaattaatctgttcagagccgaccataaagaagcagtgaggactatcgacaatgccgacagctccacactgcacgccgtcacttttttgaggacaccggagatcctgaccgtgaatagtatcggccaattgaagatttgggacttccgtcagcagggcaacgagccaagccagatcctctctctgaccggggatagggtacccttacactgtgtcgaccgccatccaaaccaacaacatgtggtagcaacaggaggccaggatgggatgctgtctatatgggacgttaggcagggaaccatgcctgttagcctgttgaaggcacatgaagccgagatgtgggaggtgcattttcatccatcgaaccccgaacatctgtttacttgctccgaggatggctccctctggcattgggacgcctcaacagatgtcccggaaaaatcttcgctgttccaccagggagggcggagcagcacctttctgtcgcacagcatctcgaaccaagccaatgtgcaccagtcggtgatcagttcttggctttccactgacccagctaaagatagaatcgagatcactagccttctcccaagtcgcagtttgagcgtcaacactcttgacgttctgggcccctgtctagtgtgcggaacggacgcagaagccatatacgtaacaaggcatttgttcagctag

SEQ ID NO: 260568 - DNA, 1143 bp, Artificial Sequence
  derived and/or modified sequence
atggaggagatctatgccaagtttgtgtcccagaagatcagcaagacccgctggaggcccctgcccccaggcagcctgcagacagctgagacctttgccaccggctcctgggacaatgaggagaactacatcagcctgtggagcattggagactttggaaacctggacagtgatggcggctttgaaggagaccaccagctgctgtgtgacatccgccaccacggagatgtgatggacctgcagttctttgaccaggagcgcatcgtggccgccagcagcacaggctgtgtgaccgtcttcctgcaccaccccaacaaccagaccctgtctgtgaaccagcagtggaccacagcccactaccacacaggccctggcagccccagctacagcagcgccccctgcacaggagtggtgtgcaacaaccctgagatcgtgacagtgggagaagatggccgcatcaacctcttccgggctgaccacaaggaggccgtgaggaccatcgacaatgctgacagcagcaccctgcatgctgtgaccttcctgcggaccccagagatcctgactgtgaacagcatcggccagctgaagatctgggacttccggcagcagggcaatgagcccagccagatcctgagcctgaccggggacagagtgcccctgcactgtgtggacagacaccccaaccagcagcacgtggtggccactggaggccaggacggcatgctgagcatctgggatgtgcggcagggcaccatgcctgtgtccctgctgaaggcccacgaggccgagatgtgggaggtgcacttccaccccagcaaccctgagcacctgttcacctgcagtgaagatggcagcctgtggcactgggatgccagcacagatgtgcctgagaagagcagcctcttccaccagggcggccgcagcagcaccttcctgagccacagcatcagcaaccaggccaacgtgcaccagagcgtcatcagctcctggctgagcacagatcctgccaaggaccgcatcgagatcaccagcctgctgcccagccgcagcctgtctgtgaacaccctggatgtgctgggcccctgcctggtgtgtggcacagatgctgaggccatctacgtgaccaggcacctgttctcctag

SEQ ID NO: 260569 - DNA, 1143 bp, Artificial Sequence
  derived and/or modified sequence
atggaggagatctacgccaagttcgtgagccagaagatcagcaagacccgatggagaccacttcctcccgggtccctccaaaccgccgagacattcgccacaggcagttgggataacgaggagaactacatttccctttggagtatcggagattttggcaatctggactccgatgggggctttgaaggcgatcaccagctgctctgcgacattcgccaccatggtgatgtcatggacctgcaatttttcgaccaagaacgcatcgtcgccgcgagctcaactggatgcgtgacggtgtttctgcaccatcctaacaatcagaccctgtcagttaatcagcaatggactacggcacattatcataccggacccggtagcccatcttacagttccgccccatgcacaggcgtggtctgtaacaacccagaaattgttaccgtgggcgaggacggcaggatcaacctgtttagggcagaccataaggaggccgttaggaccattgataatgctgatagttcaacgttgcacgccgtgacgttccttcggacgccagaaatcctgaccgtcaacagtattggccagctgaaaatctgggattttcgacaacagggcaatgaaccctcccaaattctcagcctgaccggggaccgcgtacctctgcactgtgtggaccgtcaccctaaccagcaacacgtggttgcaaccggcgggcaggatgggatgttatccatctgggacgtccgtcaagggactatgccagtgagcctcctgaaagcccacgaggcggagatgtgggaagtacattttcatccatccaatcccgagcacctattcacctgttccgaggacggcagcctctggcattgggatgcatccaccgatgttcctgagaaatctagcttgtttcaccagggggggcgttcctccacctttctgtcacattccatcagcaatcaggccaatgtgcaccagtctgtgatttcttcatggctgtccacagacccagctaaggaccgcattgaaatcacctcgctgctgcccagccggagtttgtctgtgaacactctggacgtgctggggccctgcctagtgtgcggtactgacgccgaggcaatatacgttactcgacacctcttttcctag

SEQ ID NO: 260570 - DNA, 1143 bp, Artificial Sequence
  derived and/or modified sequence
atggaggagatctacgccaagttcgtgagccagaagatcagcaagacaagatggagacccttgccacccggcagtcttcaaaccgccgaaacgttcgcaaccggaagctgggataacgaggagaactacattagcctgtggagcatcggcgactttggcaacctggacagcgacggagggttcgagggagaccaccagttgctctgtgacattcgccatcacggcgacgtgatggacctgcagttcttcgaccaagaaagaattgtagccgccagctctacagggtgtgtcacggtgtttttacaccaccccaataaccagaccttgagcgtgaaccagcagtggaccactgctcactatcacacgggacccggctcgccctcttactcctccgccccttgtacaggggtggtctgcaacaaccccgaaatcgtcacagtcggtgaagatggacgcattaatctatttagggcagaccacaaggaggccgttagaaccatcgacaacgccgactctagcactttgcatgctgtgaccttccttcgtacgcctgagatactgaccgtgaatagcattgggcaactcaagatatgggactttcggcagcagggaaatgaaccatcccagattctgtccctcaccggtgatcgggtcccactgcactgtgtggataggcaccctaatcagcaacacgtggtggcaacggggggccaggacggtatgctatctatatgggatgtcagacagggtactatgccagtgtccctgctaaaggcccacgaagccgagatgtgggaagtgcatttccacccaagtaaccccgaacacctgtttacttgttcagaggacggttcattatggcattgggatgcctccacagatgtgccagaaaagagtagcctgtttcatcagggcggcaggtcctccacattcctgagtcattccatctccaaccaggcaaatgtgcatcagagtgtgatctcaagttggctgagtacagatccagctaaagatcgcattgagattacaagcctgctgcccagcagatcgctgagtgttaacacactcgacgtgctgggcccctgcctggtctgtggtacagatgctgaagctatctacgtcacccgacatctgttttcatag

SEQ ID NO: 260571 - DNA, 3874 bp, Artificial Sequence
  derived and/or modified sequence
gttccgcgggaagaggcggtgctgagaggcgcgtactgtgcttgctttttgcagtacctgctgcggccgctttcggcatggaggaaatttatgcgaagtttgtgtcccagaaaatcagcaaaacccgctggcgaccgctgcctccgggaagtttacagaccgcggagacgttcgctacaggatcttgggacaatgaggaaaattatatttcactgtggtctattggagattttggaaacttggactctgatggagggtttgaaggagaccatcagttattgtgtgatatcagacaccatggtgatgtaatggatttacagttttttgaccaggaaagaattgtcgctgcttcatcaacaggatgtgtaacagttttccttcaccatccaaataaccagactctgtcagtcaaccagcagtggactacagctcactaccacacaggccctggcagtccttcctatagcagtgcaccatgtacaggtgttgtgtgcaacaacccagaaatcgttacagttggagaggatggtcgaataaatctcttcagagctgatcacaaggaagctgtaagaaccatagacaatgcagatagtagtacactccatgctgtaacctttcttcgaactcctgagattcttactgtaaattcaattggacagttgaaaatatgggatttcagacaacaaggaaatgagccttctcagatattgtcactgactggtgaccgagtgccactccactgtgttgatagacatcccaaccaacagcatgttgtagctactggtggccaagatggaatgttgagtatttgggatgttagacaaggtactatgcctgtatctctgctgaaggctcatgaagctgaaatgtgggaagttcactttcacccatccaacccagaacatctttttacctgctctgaagatggatccctctggcactgggatgcttccacagatgtacctgaaaagtcgtcactctttcaccaaggaggaagaagcagtacttttttgtctcatagcattagtaaccaagctaatgttcaccagtctgtcattagctcctggctcagcactgatcctgcaaaagaccgaattgaaatcacaagcttacttcccagtaggtctctgtctgtgaacactttggatgttttaggtccttgtcttgtttgtggaaccgatgcagaagcaatttatgttactagacatcttttttcgtagaagtactataattataagatttcagatagaacatgcaattagccttttgaaatccaacttctgtgcaaaattttagtatcagaaaatacgagatttgcaggggaaacatcagtaaactaccattaatgtcaatgcccagttttgacttttgttagcctgacactcccaaacagttgtagaatccgatagatgactgatggcaaaagattgtgaacatgtggaagaaaatcagtgggattctggtgctgatgaataggttgccttcagagtattattgacagacagcttgtggaactaattctttatttttgatgttgtgggaattaacacatcaatggtggttatgggaactaccaatgggttcctacaatttttatcagtagtatgtggcatatacaccttcctagtggcagttgccaatgttaatgattattctttttattgcaagtatttcctatgatccttccacactttatttccttaataataataaactttttcagaaagaattgagtagagcaaaaatgacaaagatgtgtagctgtgttcaatttttttttttttttttttttgaggcagagtcttgctctgctggagtgcggtggtgcaatctcggctcactgcaacctccacctcccaggttcaagcaattctcctgcctcagtctcctgagtagctggaactacaggtgtgcgccaccacgcccagctaatttttgtaattttagtagagacagagtttcaccatgttggccaggatggtctcgatctcttgacctcatgatccacccgcctcgacctcccaaagtgctgtgattacaggtgtgagccactgcacccggcctgaaatttttttaaggtgaaaatgttttgacaagttcctttttcagaataggtttttgagcagaactctttcagcttgttagacccaactttgcttttgtttagcttcacagcatagctgaaagttgccaaactggacattgtgcaataaagtagaattctatattgataagcaaactatttccaaactaaaaatgtgatagataaaagtgtgattaatcaaatgatatgatcagagtaaagaattttgccattttgatccttttactttgttttagccacctatagtgttaccaaccatctttatccttgtctgcagggataataatgaactaatgtagtgttttaagataatttaatgatactatctttccaaactttgttagattttaaatgtattattgacctgagaccttaatgacaaatcactgctattagacaattgaagtgttcatttactttgtaattccaataatcatagttatggaattatggtaaggttttgcttttctgtcctaataaatatatatattttttgagatggagttttgctcttgttgctgaggctggagtgaaatggcatgatctcagctcactgcaacctccgtctcttaggttcaagcaattctcctgcctcagcctcccgagtagctgggattacaggtgctcaccaccacacccagctaatttttgtatttttagtagagatggggtttcactgtgttggccaggctggtcttgaactgacctcatgatccacctgcctcagcctcccaaaatgctgggattacaggcttgagccactgctcccggctgatttttgtattagtagagacgacagggtttcaccatgttggccagggctggtctcgaactcctgaccacaggtaatcagcccgcctcggcctcccaaagtgctgggattacaggcgtgagccacttagtatttgtaaccataagagaaagtatattttaacagcattacatttcatgccaattgacaagttttgccaattttaataagaaactaagctttatgtaatgtaacaccgtaatttatgaatttgttcattgtcactgcctttattcatgaaactgtcaaatagagtgtctttcaagggttgcaggatcttagagatagaaagtaccttggtgatcatctccagcctaaatttcatcatcccttctatggtattcccaacaaattatcatccaacctatacttaaaaacatatggtggccaggcatggtggctcacgcctgtaatgctagcactttgggaggccgaggtgggtgaagcacctgaggtcaagagttcgagatcagcctggccaacatggcgaaaccccgtctccactaaaaatgcaaaaaaaaaattaaccgggcgtggtggcaggcatctataatcccagctacttgggaggctgaggcaggagaattgctcaaacccgggaggcagaggttgcagtgacccaagatcgtgccacttcactccagcctgggcaaaagagcaaaacgccatctcaaaaaatatacatatataaggagataaagtttcccattttccaatacagtttcacatttgaacagccctaattgatacaactttatggcagggttttagtgtgtgagtgggatccaaaacactcaatcctgtaaaagggtacagtcctattgtatgttaacacactgatgatgtgagcctgtgagatgagccaatcaccagttgttatgttcgaatctgctttgtgttgggacgctttaatgtcagggtttcactaaataaatgaattttcatatactgaactgaaa

SEQ ID NO: 260572 - DNA, 2186 bp, Artificial Sequence
  derived and/or modified sequence
gcagtacctgctgcggccgctttcggcatggaggaaatttatgcgaagtttgtgtcccagaaaatcagcaaaacccgctggcgaccgctgcctccgggaagtttacagaccgcggagacgttcgctacaggatcttgggacaatgaggaaaattatatttcactgtggtctattggagattttggaaacttggactctgatggagggtttgaaggagaccatcagttattgtgtgatatcagacaccatggtgatgtaatggatttacagttttttgaccaggaaagaattgtcgctgcttcatcaacaggatgtgtaacagttttccttcaccatccaaataaccagactctgtcagtcaaccagcagtggactacagctcactaccacacaggccctggcagtccttcctatagcagtgcaccatgtacaggtgttgtgtgcaacaacccagaaatcgttacagttggagaggatggtcgaataaatctcttcagagctgatcacaaggaagctgtaagaaccatagacaatgcagatagtagtacactccatgctgtaacctttcttcgaactcctgagattcttactgtaaattcaattggacagttgaaaatatgggatttcagacaacaaggaaatgagccttctcagatattgtcactgactggtgaccgagtgccactccactgtgttgatagacatcccaaccaacagcatgttgtagctactggtggccaagatggaatgttgagtatttgggatgttagacaaggtactatgcctgtatctctgctgaaggctcatgaagctgaaatgtgggaagttcactttcacccatccaacccagaacatctttttacctgctctgaagatggatccctctggcactgggatgcttccacagatgtacctgaaaagtcgtcactctttcaccaaggaggaagaagcagtacttttttgtctcatagcattagtaaccaagctaatgttcaccagtctgtcattagctcctggctcagcactgatcctgcaaaagaccgaattgaaatcacaagcttacttcccagtaggtctctgtctgtgaacactttggatgttttaggtccttgtcttgtttgtggaaccgatgcagaagcaatttatgttactagacatcttttttcgtagaagtactataattataagatttcagatagaacatgcaattagccttttgaaatccaacttctgtgcaaaattttagtatcagaaaatacgagatttgcaggggaaacatcagtaaactaccattaatgtcaatgcccagttttgacttttgttagcctgacactcccaaacagttgtagaatccgatagatgactgatggcaaaagattgtgaacatgtggaagaaaatcagtgggattctggtgctgatgaataggttgccttcagagtattattgacagacagcttgtggaactaattctttatttttgatgttgtgggaattaacacatcaatggtggttatgggaactaccaatgggttcctacaatttttatcagtagtatgtggcatatacaccttcctagtggcagttgccaatgttaatgattattctttttattgcaagtatttcctatgatccttccacactttatttccttaataataataaactttttcagaaagaattgagtagagcaaaaatgacaaagatgtgtagctgtgttcaatttttttttttttttttttttgaggcagagtcttgctctgctggagtgcggtggtgcaatctcggctcactgcaacctccacctcccaggagaattgctcaaacccgggaggcagaggttgcagtgacccaagatcgtgccacttcactccagcctgggcaaaagagcaaaacgccatctcaaaaaatatacatatataaggagataaagtttcccattttccaatacagtttcacatttgaacagccctaattgatacaactttatggcagggttttagtgtgtgagtgggatccaaaacactcaatcctgtaaaagggtacagtcctattgtatgttaacacactgatgatgtgagcctgtgagatgagccaatcaccagttgttatgttcgaatctgctttgtgttgggacgctttaatgtcagggtttcactaaataaatgaattttcatatactgaactg

SEQ ID NO: 260573 - DNA, 1143 bp, Artificial Sequence
  derived and/or modified sequence
atggaagagatctacgccaaattcgtgagccagaagatctccaagactcgttggcggcctttacccccagggtcacttcaaacagccgagacttttgccacagggtcctgggataatgaagagaattatatatctttatggtcaataggcgactttggaaatctggacagcgacggtggattcgagggagaccatcagctgctgtgcgatattcgccaccacggagacgtgatggaccttcagtttttcgaccaggagagaattgttgccgctagttcaacaggttgcgtgacagtgtttctgcaccatcctaataaccaaaccctgtccgtgaaccagcagtggaccacagctcactaccacaccggccctggcagcccctcctattccagcgctccatgtactggggtggtctgcaacaacccagagattgtcaccgtgggagaggacggtcgtattaatctgtttagggctgaccacaaggaagccgtgagaactatcgacaatgccgatagcagtaccctccacgccgttacatttctcaggactccagaaatcttgacggtcaactctataggtcaattgaaaatctgggacttcagacagcaggggaatgagccatcccagattctgagcctgaccggggaccgggtgccactccactgtgtggacaggcacccaaatcagcagcacgtggtagcaacaggtggccaagatgggatgttaagtatctgggatgttaggcagggcaccatgcccgtttcccttttaaaagcccatgaggccgagatgtgggaggtgcattttcacccgtccaatccagagcaccttttcacatgctccgaggatggctctttgtggcactgggacgcaagtacggatgtgcctgagaagtcaagcctatttcaccaggggggacgatccagcacttttctgtcacactctatcagcaatcaggctaatgtacatcagtccgtcattagctcttggctgtctaccgatccggctaaagaccgtattgagatcacctctttactcccgagccggtctctgtcagtgaataccctggatgtattgggcccttgtcttgtttgcgggactgacgccgaggctatttacgttactcgccacctgttcagttag

SEQ ID NO: 260574 - DNA, 1143 bp, Artificial Sequence
  derived and/or modified sequence
atggaggagatttacgcgaagttcgtgtcccagaagataagcaagactcggtggcgtcctctcccgcctggctccctgcagacagcagaaacctttgccacaggatcctgggataatgaagagaactatatatccttatggtcaattggggattttgggaacctagactcagacgggggatttgaaggggatcatcagctcctgtgcgatattcggcatcacggtgacgtaatggatttgcagttcttcgaccaggaacggatcgttgccgcatcatctacaggttgtgtgaccgtgttcctccaccatccgaacaatcaaaccttgtctgtcaaccagcagtggacgactgcccactaccataccgggcctggctccccgtcttattccagtgcaccatgtacaggtgtcgtgtgcaacaatcccgaaatagtgactgttggggaagacggtaggataaacctatttagggcggaccataaagaagcggttcgcaccatcgataatgcggactcctccactttgcatgctgtgacgtttcttcggactccggagatccttacagtgaatagtatcggccagctgaagatctgggacttcagacagcaagggaacgaaccatcccagatcctgtctctgactggcgaccgagtccctctgcactgcgtagatcgacaccccaaccagcagcacgtcgtggctactggcggacaggatggaatgttatccatttgggatgtcagacaggggactatgcccgtttctctgttgaaggcccatgaggcagagatgtgggaggtccattttcacccgtcaaaccctgagcacctctttacatgctccgaggatgggagtttgtggcattgggatgcctccacggatgtacccgagaaaagcagcctgttccaccagggaggtcggtcaagtacttttctgtctcacagcattagcaatcaagcaaacgttcatcagagcgtgatctcctcttggctctcaacagatcctgcgaaggatagaattgagattacatcgctgctgcctagccggtccttgtctgtaaataccttggacgtgttggggccttgccttgtctgcggaaccgatgcggaagccatctacgtcactcgacatctgttcagctag

SEQ ID NO: 260575 - DNA, 1143 bp, Artificial Sequence
  derived and/or modified sequence
atggaggagatctacgccaagttcgtgagccagaagatcagcaagaccagatggagacccctgccccccggcagcctgcagaccgccgagaccttcgccaccggcagctgggacaacgaggagaactacatcagcctgtggagcatcggcgacttcggcaacctggacagcgacggcggcttcgagggcgaccaccagctgctgtgcgacatcagacaccacggcgacgtgatggacctgcagttcttcgaccaggagagaatcgtggccgccagcagcaccggctgcgtgaccgtgttcctgcaccaccccaacaaccagaccctgagcgtgaaccagcagtggaccaccgcccactaccacaccggccccggcagccccagctacagcagcgccccctgcaccggcgtggtgtgcaacaaccccgagatcgtgaccgtgggcgaggacggcagaatcaacctgttcagagccgaccacaaggaggccgtgagaaccatcgacaacgccgacagcagcaccctgcacgccgtgaccttcctgagaacccccgagatcctgaccgtgaacagcatcggccagctgaagatctgggacttcagacagcagggcaacgagcccagccagatcctgagcctgaccggcgacagagtgcccctgcactgcgtggacagacaccccaaccagcagcacgtggtggccaccggcggccaggacggcatgctgagcatctgggacgtgagacagggcaccatgcccgtgagcctgctgaaggcccacgaggccgagatgtgggaggtgcacttccaccccagcaaccccgagcacctgttcacctgcagcgaggacggcagcctgtggcactgggacgccagcaccgacgtgcccgagaagagcagcctgttccaccagggcggcagaagcagcaccttcctgagccacagcatcagcaaccaggccaacgtgcaccagagcgtgatcagcagctggctgagcaccgaccccgccaaggacagaatcgagatcaccagcctgctgcccagcagaagcctgagcgtgaacaccctggacgtgctgggcccctgcctggtgtgcggcaccgacgccgaggccatctacgtgaccagacacctgttcagctag

SEQ ID NO: 260576 - protein, 444 aa, Artificial Sequence
  derived and/or modified sequence
MSSGLRAADFPRWKRHISEQLRRRDRLQRQAFEEIILQYNKLLEKSDLHSVLAQKLQAEKHDVPNRHEIRRRQARLQKELAEAAKEPLPVEQDDDIEVIVDETSDHTEETSPVRAISRAATRRSVSSFPVPQDNVDTHPGSGKEVRVPATALCVFDAHDGEVNAVQFSPGSRLLATGGMDRRVKLWEVFGEKCEFKGSLSGSNAGITSIEFDSAGSYLLAASNDFASRIWTVDDYRLRHTLTGHSGKVLSAKFLLDNARIVSGSHDRTLKLWDLRSKVCIKTVFAGSSCNDIVCTEQCVMSGHFDKKIRFWDIRSESIVREMELLGKITALDLNPERTELLSCSRDDLLKVIDLRTNAIKQTFSAPGFKCGSDWTRVVFSPDGSYVAAGSAEGSLYIWSVLTGKVEKVLSKQHSSSINAVAWSPSGSHVVSVDKGCKAVLWAQY

SEQ ID NO: 260577 - DNA, 882 bp, Artificial Sequence
  derived and/or modified sequence
atggaccggagagtcaagctttgggaggtgtttggtgagaagtgcgaattcaagggtagcctcagcggctcaaacgccgggatcacatcgatagaattcgatagtgctggtagctatttgctcgccgcttccaatgactttgcgagtaggatttggactgtagatgattaccgtttgcggcataccctgacaggccacagtggcaaagtactcagcgctaagtttctactggataacgccaggattgtaagcggatcacacgaccggactcttaagctttgggatctcaggtccaaagtgtgcatcaagactgtcttcgccggctctagttgtaatgatattgtctgcaccgaacagtgcgtcatgtctgggcacttcgataagaagattcgtttctgggacatcagatccgagtctatcgtgcgcgaaatggagctgctgggaaagataacagccctggatttgaaccctgagcgtaccgagctgttgagctgttcaagagacgacctgcttaaggtcatcgatctccggaccaatgccattaagcagacatttagcgcacccggcttcaagtgtgggtcagactggacccgggtcgtattttccccagatggaagttatgtcgcagcggggagtgccgagggctcactgtacatctggtcagtcctcactggtaaagtggagaaggtgctttccagcagcacagcccaccccagcatgcggtggagggggcgcccactcgcgcgcactctctctgtctggactaaggatgcaaaattatgctgtggccactcaacggacggggccttgcgtgctgggcgaaccccggttccaagctcagaagaggcacacggcctcctgcagccatgcccaggacgatag

SEQ ID NO: 260578 - DNA, 1335 bp, Artificial Sequence
  derived and/or modified sequence
atgagcagcgggctgcgcgctgccgattttcccaggtggaagcggcatatctctgagcagctgagacgcagggacaggctccaaagacaggcctttgaggagattatcctccagtataacaagttgctcgagaagagcgacctccatagtgttctggcccagaagcttcaagcagaaaaacacgatgttcccaacagacacgaaataaggcggcggcaggctagattgcagaaggagcttgctgaggccgccaaggaacctctacctgtcgagcaggatgatgacatcgaggtcatagtggatgagactagcgaccatacggaagaaacctctcccgttcgtgcaatctccagagccgccactagacgttctgtttcctctttccctgtgccccaagacaatgtggacacccatcctgggagcggcaaagaagtgcgggtgcctgcgacggcactatgcgtgtttgatgcgcacgacggggaggtcaacgccgtgcagttttcacccgggtctcgattactcgcaacagggggtatggaccgccgcgtgaagttgtgggaagtgttcggagagaagtgcgaatttaaaggctccctctctggaagtaacgctgggatcaccagcatcgaatttgattcggccgggagttatctactggctgcaagtaacgattttgcttcccggatttggactgtcgacgattatcggctgaggcatactctgaccgggcactctggtaaagtgctttccgcaaagttcctgctggacaacgcccgcatcgtgtctgggtcgcatgataggaccttgaagctctgggatctgaggtcaaaggtctgtattaaaaccgtgtttgcaggcagcagttgcaacgacattgtttgcactgagcagtgcgttatgagcggacactttgataagaagatcagattttgggacatcaggagtgaaagtatagtgagggagatggaactactgggtaaaatcacagccctagacctcaacccggagcggaccgagttactatcctgctcacgcgatgatttactcaaggtgatcgacctgcgcacgaatgctatcaaacaaacattttctgcccctgggttcaagtgtggatccgattggacacgagtggttttcagcccagacggctcgtacgtagctgccgggagtgcagagggctccctgtatatatggagcgtgctgacggggaaggtggagaaggtcctctctaaacagcattcttccagtattaacgccgttgcgtggtcaccctctggttcccacgtggtgtcggtggacaaaggttgcaaagcagttctctgggcacagtattag

SEQ ID NO: 260579 - DNA, 882 bp, Artificial Sequence
  derived and/or modified sequence
atggacagaagagtgaagctgtgggaggtgtttggagagaagtgtgagttcaagggcagcctgagcggcagcaatgccggcatcaccagcattgaatttgattctgctggcagctacctgctggccgccagcaatgactttgccagccgcatctggacagtggatgactaccgcctgcggcacaccctgaccggccacagcggcaaggtgctgagcgccaagttcctgctggacaatgcccgcatcgtgtctggcagccatgacaggaccctgaagctgtgggacctgcggagcaaggtgtgcatcaagacagtgtttgctggcagcagctgcaatgacatcgtgtgcacagagcagtgtgtgatgagcggccactttgacaagaagatccgcttctgggacatccgctctgagagcatcgtgcgggagatggagctgctgggcaagatcacagccctggacctgaaccctgagaggacagagctgctgagctgcagcagagatgacctgctgaaggtgattgacctgcggaccaatgccatcaagcagaccttcagcgcccctggcttcaagtgtggcagtgactggaccagggtggtgttctccccagatggcagctatgtggccgccggcagcgctgagggcagcctgtacatctggagcgtgctgaccgggaaggtggagaaggtgctgagcagcagcacagcccaccccagcatgcgctggaggggccggcccctggcccggaccctgtctgtgtggaccaaggatgccaagctgtgctgcggccacagcacagatggagccctgcgggccggccgcacccctgtgcccagcagcgaggaggcccacggcctgctgcagccctgccctggaagatag

SEQ ID NO: 260580 - DNA, 1335 bp, Artificial Sequence
  derived and/or modified sequence
atgagcagcggcctgcgggctgctgacttcccccgctggaagaggcacatcagcgagcagctgcggcggcgggaccggctgcagaggcaggcctttgaggagatcatcctgcagtacaacaagctgctggagaagagtgacctgcacagcgtgctggcccagaagctgcaggccgagaagcatgatgtgcccaacagacatgagatcagaagacggcaggcccggctgcagaaggagctggccgaggccgccaaggagcccctgcctgtggagcaggatgatgacatcgaggtgattgtggatgagaccagtgaccacacagaggagaccagccctgtgcgggccatcagcagagctgccacccggcgctctgtgtcctccttccctgtgccccaggacaacgtggacacccaccctggcagcggcaaggaggtgcgggtgcctgccacagccctgtgtgtgtttgatgcccatgatggagaggtgaatgctgtgcagttcagccctggcagccggctgctggccaccggcggcatggacagaagagtgaagctgtgggaggtgtttggagagaagtgtgagttcaagggcagcctgagcggcagcaatgccggcatcaccagcattgaatttgattctgctggcagctacctgctggccgccagcaatgactttgccagccgcatctggacagtggatgactaccgcctgcggcacaccctgaccggccacagcggcaaggtgctgagcgccaagttcctgctggacaatgcccgcatcgtgtctggcagccatgacaggaccctgaagctgtgggacctgcggagcaaggtgtgcatcaagacagtgtttgctggcagcagctgcaatgacatcgtgtgcacagagcagtgtgtgatgagcggccactttgacaagaagatccgcttctgggacatccgctctgagagcatcgtgcgggagatggagctgctgggcaagatcacagccctggacctgaaccctgagaggacagagctgctgagctgcagcagagatgacctgctgaaggtgattgacctgcggaccaatgccatcaagcagaccttcagcgcccctggcttcaagtgtggcagtgactggaccagggtggtgttctccccagatggcagctatgtggccgccggcagcgctgagggcagcctgtacatctggagcgtgctgaccgggaaggtggagaaggtgctgagcaagcagcacagcagcagcatcaatgctgtggcctggagccccagcggcagccacgtggtgtctgtggacaagggctgcaaggctgtgctgtgggcccagtactag

SEQ ID NO: 260581 - DNA, 882 bp, Artificial Sequence
  derived and/or modified sequence
atggaccggcgggtgaagctgtgggaggtgttcggcgagaagtgcgaattcaagggcagcttaagcggctctaatgcgggaatcacaagtatcgaattcgacagcgccggatcctatttgctcgccgcatctaatgactttgcttccagaatctggaccgtggacgactaccgactgcggcatacactcactggccacagcggaaaggtactgtccgccaaatttctgctggacaacgctaggattgtgtctgggtcccacgaccgcacactgaagctatgggatctaaggagtaaggtgtgcataaagaccgtgtttgccggcagttcctgcaatgatatcgtgtgcactgaacagtgtgttatgagcggacattttgacaagaagatacgtttttgggatatcaggtcggagtcgattgtgagagaaatggagttgctgggcaagataaccgccctcgatctgaatcccgagaggaccgaactgctatcgtgctctcgcgatgacctgcttaaagttattgacctccgcacaaacgctattaagcagacatttagcgctccagggtttaagtgtggcagcgactggacccgcgtggtttttagcccggatgggtcctatgtcgccgcaggtagtgccgagggatccctgtacatctggtccgtcctgacagggaaagtggagaaggtattatcgagttcgacagctcatcctagcatgaggtggcggggtaggcccttggcaagaacgttgtccgtgtggaccaaagacgcaaaactttgctgcggtcattccacagatggagcgctcagggctggaaggaccccagtgccctctagcgaggaagcccatggtttattgcagccatgccccgggcgctag

SEQ ID NO: 260582 - DNA, 1335 bp, Artificial Sequence
  derived and/or modified sequence
atgagcagcggcctgcgggccgccgacttcccccggtggaagcggcacatcagtgaacaactgcggaggagagaccgtttgcagaggcaagccttcgaggagatcattctccagtacaataaactgcttgaaaagagcgatctacactccgtgcttgcgcagaaacttcaggctgagaagcatgacgtgcccaacaggcatgagattcgcaggagacaagccaggctgcagaaggagctggccgaagccgctaaagaacctcttcccgttgaacaggatgacgacattgaagtcatcgtcgacgaaaccagcgatcacaccgaagagacttcaccggtcagagcaatctcacgtgcagccactaggaggtcagtctcatccttcccagtaccccaggacaatgtcgatacccaccctggcagtggtaaagaagttcgggttccagcgaccgccctgtgcgtgtttgatgcgcacgacggcgaggtgaatgcagtccagttcagcccgggatcccgtctactagctaccggaggcatggaccggcgggtaaaactgtgggaagtgtttggcgagaagtgcgaatttaaagggtcgctttcaggaagcaatgccggtattactagcatcgagtttgacagcgccggcagctatcttttagccgcctcaaacgactttgcctcaagaatatggacagtggatgattataggcttcggcacacgctaactgggcacagcggaaaggtactgagtgcaaaatttctcctagataacgccaggatcgtgtctggaagtcacgacaggactcttaaattgtgggacctcaggagcaaggtatgcattaaaacagtcttcgcaggttcatcatgcaatgacattgtgtgtacggaacagtgtgtgatgtcaggacatttcgacaaaaaaatccgattttgggacatccgctctgaaagcattgtgagagagatggaactgttgggtaaaattaccgccctggatttaaaccctgagcgaactgagctattgtcatgttctcgagatgatctcctgaaggtaattgatttaaggactaatgccataaagcaaactttcagtgcccctgggtttaagtgtggcagtgattggacaagggtggtgttttcaccggatgggtcttacgtagccgctggatctgctgaaggcagtttatatatctggtccgtgcttaccgggaaagtggagaaagttctatcaaagcagcactcttccagcatcaacgcagtggcgtggagtccctccggatcccacgtggtctccgtcgacaagggttgtaaggcagtgctgtgggcccagtactag

SEQ ID NO: 260583 - DNA, 882 bp, Artificial Sequence
  derived and/or modified sequence
atggacaggcgagtgaaactctgggaagtgtttggcgagaagtgcgagttcaaggggtctctaagtggatcaaacgccggaattacctctatcgagtttgacagcgctggcagctaccttctggcggcaagtaatgatttcgcatctcgaatttggaccgtagacgactatagactgcggcacaccctaactgggcacagcggtaaggtcctgagcgccaagtttctccttgataacgcgagaatcgtatccggctctcacgatcggactctcaaactgtgggacctgcgcagtaaggtctgcataaaaaccgtgttcgcgggttccagctgtaatgacatcgtgtgcacagagcagtgcgttatgtccggccactttgacaagaagattagattctgggatattcgaagtgaaagcattgtgcgagaaatggagttacttgggaaaattaccgccttggatttgaatccagaaaggaccgagctcctttcgtgttccagagacgacttactgaaagtcattgacctgagaacaaacgctatcaagcaaacattcagtgcgcctggattcaagtgcggctctgactggactcgcgtggtgtttagccctgacgggtcttatgtagctgcgggttctgctgagggctcactgtatatttggagtgtgctgaccggtaaggtggagaaagtgttgtccagctcaaccgcacaccccagtatgcgctggcgagggcgtccactggcccgaacactaagcgtgtggaccaaggacgcaaagctgtgttgtgggcatagcacagacggggctttacgagccggaaggacgccggtgccttcctcagaagaggcccatggcctcttgcagccgtgtccagggagatag

SEQ ID NO: 260584 - DNA, 1335 bp, Artificial Sequence
  derived and/or modified sequence
atgtcaagtggcctgcgggcagctgatttccccaggtggaagcggcacatatcggagcagctgagacggagagatcgcctccagagacaggcctttgaagagattatactgcagtacaacaagcttctagaaaagtcagacctacacagcgtgttagctcaaaagttgcaggccgaaaaacacgacgtaccaaataggcacgaaatcagacggcgtcaagcgcgtctgcaaaaggagctggcagaggccgcaaaagaaccattaccagtagaacaggacgacgacatcgaggtgatagtggatgagaccagtgatcatactgaagaaacttcacctgtcagggccattagcagagccgcaacacgtcggagcgtcagctcatttccagtacctcaagataatgttgatacacaccccggttccggcaaagaggtgagggtcccagcgactgcactgtgcgtatttgatgctcacgatggggaagtgaacgctgtacaatttagccccggtagtaggctcctagcgacaggaggaatggacagacgggtcaaattgtgggaagtctttggcgagaagtgcgaattcaaggggagtctctcaggctctaacgccggaatcacctccatagagtttgactctgccggatcatacctgttagcagcctccaatgacttcgcctcacgcatatggaccgtggacgattaccgtctaaggcacaccttaactgggcactcgggtaaagtgctgagtgctaagttcctgctggacaacgccaggatagtcagcggttcccatgatcgtacactgaagctgtgggacttgcggtctaaagtgtgcattaagactgtgtttgccggaagttcatgtaacgatatcgtctgcacagaacagtgcgttatgtcaggccacttcgataaaaagattcgcttctgggatatcagatcggagagcattgtaagggagatggaactcctggggaaaatcacagcgctagatcttaacccggaacgcaccgagctcctatcctgttcgcgtgatgacctactcaaggtaatcgatctaaggacgaatgccatcaaacaaactttttctgctccaggattcaagtgcggctctgactggacaagggttgttttctcgcctgatggtagctacgtagctgcaggttccgcagaaggttcactgtacatttggtccgtgctgacagggaaggtcgaaaaagtcctctccaagcaacattcatcaagcattaatgccgtagcctggtccccatccggtagtcacgtcgtgtcagtggacaaagggtgtaaggccgtgctgtgggcacagtattag

SEQ ID NO: 260585 - DNA, 2915 bp, Artificial Sequence
  derived and/or modified sequence
actagcgagcgccctgcgtaggcaccggctcctgagcccgtgcttcgggtgagggggcgggtcttccggccctctcgaaaatcatttccggcatgagccggaagaccgtcccggatggcctcggggactgccagtgtgtggaggtgagctccgggattgccggcattcccgcttctgctggttgcttcatgctgcaggctgcggccgtcagccctcgctcgcattggtggcgctgaggtgccggggcagcaagtgacatgtcgtcgggcctccgcgccgctgacttcccccgctggaagcgccacatctcggagcaactgaggcgccgggaccggctgcagagacaggcgttcgaggagatcatcctgcagtataacaaattgctggaaaagtcagatcttcattcagtgttggcccagaaactacaggctgaaaagcatgacgtaccaaacaggcacgagataaggaggcggcaagcccggctgcagaaagagcttgcagaagcagcaaaggaacctctaccagtcgaacaggatgatgacattgaggtcattgtggatgaaacttctgatcacacagaagagacctctcctgtgcgagccatcagcagagcagccacgagacgctctgtctcttccttcccagtcccccaggacaatgtggatactcatcctggttctggtaaagaagtgagggtaccagctactgccttgtgtgtcttcgatgcacatgatggggaagtcaacgctgtgcagttcagtccaggttcccggttactggccactggaggcatggaccgcagggttaagctttgggaagtatttggagaaaaatgtgagttcaagggttccctatctggcagtaatgcaggaattacaagcattgaatttgatagtgctggatcttacctcttagcagcttcaaatgattttgcaagccgaatctggactgtggatgattatcgattacggcacacactcacgggacacagtgggaaagtgctgtctgctaagttcctgctggacaatgcgcggattgtctcaggaagtcacgaccggactctcaaactctgggatctacgcagcaaagtctgcataaagacagtgtttgcaggatccagttgcaatgatattgtctgcacagagcaatgtgtaatgagtggacattttgacaagaaaattcgtttctgggacattcgatcagagagcatagttcgagagatggagctgttgggaaagattactgccctggacttaaacccagaaaggactgagctcctgagctgctcccgtgatgacttgctaaaagttattgatctccgaacaaatgctatcaagcagacattcagtgcacctgggttcaagtgcggctctgactggaccagagttgtcttcagccctgatggcagttacgtggcggcaggctctgctgagggctctctgtatatctggagtgtgctcacagggaaagtggaaaaggttctttcaaagcagcacagctcatccatcaatgcggtggcgtggtcgccctctggctcgcacgttgtcagtgtggacaaaggatgcaaagctgtgctgtgggcacagtactgacggggctctcagggctgggaggaccccagtgccctcctcagaagaagcacatgggctcctgcagccctgtcctggcaggtgatgtgctgggtatagcatggacctcccagagaagctcaagctatgtggcactgtagctttgccgtgaatgggatttctgaagatttgactgaggtctctcttggcctggaagaataacactgaaaaaacctgacgctgcggtcacttagcagaggctcaggttcttgccttgggaaacactactagctctgaccttccatacctcacttgggggagcacagggccccgctgggcctcctcaccaacggcagtgccaaaatcagcccccacatcaaggtggtgttctctgtgctttctctcgtccttccaaagtcggttctggcctaacgcatgtcccaacaccttgggttcatttgcccggtgaactcactttaagcattggattaacggaaactcccgaactacagacccctccctggtgggttgcatgaatgtgtctcattactgctgaaatgtcctcacatctctttcactgttcttcagagctttctggctctctttcccccacaaaattcgacatatttaaaaatctccgtgtggctttaaaaaatggttttttgtttttttgtttttttgaggtgggagaggatgtgtgaaaatcttttccagggaaatgggttcgctgcagaggtaaggatgtgttcctgtatcgatctgcagacacccagaaggtgggtgcacactgcatgcttgggggtgccaagggattcgagacctccaacatacttgtctgaaggtggtgattctggccatggcccctctgccaagcctgtgtgcgatgcccttggtgctttagtgcaagaagcctaggctcagaagcacagcagcgccatctttccgtttcaggggttgtgatgaaggccaaggaaaaacatttatctttactattttacctacgtataaagttttagttcattgggtgtgcgaaacaccctttttatcacttttaaatttgcactttattttttttcttccatgcttgttctctggacatttggggatgtgagtgttagagctggtgagagaggagtcaggtggccttcccaccgatggtcctggcctccacctgccctctcttccctgcctgatcaccgctttccaatttgcccttcagagaacttaagtcaaggagagttgaaattcacaggccagggcacatcttttatttatttcattatgttggccaacagaacttgattgtaaataataataaagaaatctgttatatacttttcaaactcc

SEQ ID NO: 260586 - DNA, 882 bp, Artificial Sequence
  derived and/or modified sequence
atggacagaagagtgaagctgtgggaggtgttcggcgagaagtgcgagttcaagggcagcctgagcggcagcaacgccggcatcaccagcatcgagttcgacagcgccggcagctacctgctggccgccagcaacgacttcgccagcagaatctggaccgtggacgactacagactgagacacaccctgaccggccacagcggcaaggtgctgagcgccaagttcctgctggacaacgccagaatcgtgagcggcagccacgacagaaccctgaagctgtgggacctgagaagcaaggtgtgcatcaagaccgtgttcgccggcagcagctgcaacgacatcgtgtgcaccgagcagtgcgtgatgagcggccacttcgacaagaagatcagattctgggacatcagaagcgagagcatcgtgagagagatggagctgctgggcaagatcaccgccctggacctgaaccccgagagaaccgagctgctgagctgcagcagagacgacctgctgaaggtgatcgacctgagaaccaacgccatcaagcagaccttcagcgcccccggcttcaagtgcggcagcgactggaccagagtggtgttcagccccgacggcagctacgtggccgccggcagcgccgagggcagcctgtacatctggagcgtgctgaccggcaaggtggagaaggtgctgagcagcagcaccgcccaccccagcatgagatggagaggcagacccctggccagaaccctgagcgtgtggaccaaggacgccaagctgtgctgcggccacagcaccgacggcgccctgagagccggcagaacccccgtgcccagcagcgaggaggcccacggcctgctgcagccctgccccggcagatag

SEQ ID NO: 260587 - DNA, 1335 bp, Artificial Sequence
  derived and/or modified sequence
atgagcagcggcctgagagccgccgacttccccagatggaagagacacatcagcgagcagctgagaagaagagacagactgcagagacaggccttcgaggagatcatcctgcagtacaacaagctgctggagaagagcgacctgcacagcgtgctggcccagaagctgcaggccgagaagcacgacgtgcccaacagacacgagatcagaagaagacaggccagactgcagaaggagctggccgaggccgccaaggagcccctgcccgtggagcaggacgacgacatcgaggtgatcgtggacgagaccagcgaccacaccgaggagaccagccccgtgagagccatcagcagagccgccaccagaagaagcgtgagcagcttccccgtgccccaggacaacgtggacacccaccccggcagcggcaaggaggtgagagtgcccgccaccgccctgtgcgtgttcgacgcccacgacggcgaggtgaacgccgtgcagttcagccccggcagcagactgctggccaccggcggcatggacagaagagtgaagctgtgggaggtgttcggcgagaagtgcgagttcaagggcagcctgagcggcagcaacgccggcatcaccagcatcgagttcgacagcgccggcagctacctgctggccgccagcaacgacttcgccagcagaatctggaccgtggacgactacagactgagacacaccctgaccggccacagcggcaaggtgctgagcgccaagttcctgctggacaacgccagaatcgtgagcggcagccacgacagaaccctgaagctgtgggacctgagaagcaaggtgtgcatcaagaccgtgttcgccggcagcagctgcaacgacatcgtgtgcaccgagcagtgcgtgatgagcggccacttcgacaagaagatcagattctgggacatcagaagcgagagcatcgtgagagagatggagctgctgggcaagatcaccgccctggacctgaaccccgagagaaccgagctgctgagctgcagcagagacgacctgctgaaggtgatcgacctgagaaccaacgccatcaagcagaccttcagcgcccccggcttcaagtgcggcagcgactggaccagagtggtgttcagccccgacggcagctacgtggccgccggcagcgccgagggcagcctgtacatctggagcgtgctgaccggcaaggtggagaaggtgctgagcaagcagcacagcagcagcatcaacgccgtggcctggagccccagcggcagccacgtggtgagcgtggacaagggctgcaaggccgtgctgtgggcccagtactag

SEQ ID NO: 260588 - protein, 1161 aa, Artificial Sequence
  derived and/or modified sequence
MKKFSRMPKSEGGSGGGAAGGGAGGAGAGAGCGSGGSSVGVRVFAVGRHQVTLEESLAEGGFSTVFLVRTHGGIRCALKRMYVNNMPDLNVCKREITIMKELSGHKNIVGYLDCAVNSISDNVWEVLILMEYCRAGQVVNQMNKKLQTGFTEPEVLQIFCDTCEAVARLHQCKTPIIHRDLKVENILLNDGGNYVLCDFGSATNKFLNPQKDGVNVVEEEIKKYTTLSYRAPEMINLYGGKPITTKADIWALGCLLYKLCFFTLPFGESQVAICDGNFTIPDNSRYSRNIHCLIRFMLEPDPEHRPDIFQVSYFAFKFAKKDCPVSNINNSSIPSALPEPMTASEAAARKSQIKARITDTIGPTETSIAPRQRPKANSATTATPSVLTIQSSATPVKVLAPGEFGNHRPKGALRPGNGPEILLGQGPPQQPPQQHRVLQQLQQGDWRLQQLHLQHRHPHQQQQQQQQQQQQQQQQQQQQQQQQQQQHHHHHHHHLLQDAYMQQYQHATQQQQMLQQQFLMHSVYQPQPSASQYPTMMPQYQQAFFQQQMLAQHQPSQQQASPEYLTSPQEFSPALVSYTSSLPAQVGTIMDSSYSANRSVADKEAIANFTNQKNISNPPDMSGWNPFGEDNFSKLTEEELLDREFDLLRSNRLEERASSDKNVDSLSAPHNHPPEDPFGSVPFISHSGSPEKKAEHSSINQENGTANPIKNGKTSPASKDQRTGKKTSVQGQVQKGNDESESDFESDPPSPKSSEEEEQDDEEVLQGEQGDFNDDDTEPENLGHRPLLMDSEDEEEEEKHSSDSDYEQAKAKYSDMSSVYRDRSGSGPTQDLNTILLTSAQLSSDVAVETPKQEFDVFGAVPFFAVRAQQPQQEKNEKNLPQHRFPAAGLEQEEFDVFTKAPFSKKVNVQECHAVGPEAHTIPGYPKSVDVFGSTPFQPFLTSTSKSESNEDLFGLVPFDEITGSQQQKVKQRSLQKLSSRQRRTKQDMSKSNGKRHHGTPTSTKKTLKPTYRTPERARRHKKVGRRDSQSSNEFLTISDSKENISVALTDGKDRGNVLQPEESLLDPFGAKPFHSPDLSWHPPHQGLSDIRADHNTVLPGRPRQNSLHGSFHSADVLKMDDFGAVPFTELVVQSITPHQSQQSQPVELDPFGAAPFPSKQ

SEQ ID NO: 260589 - protein, 208 aa, Artificial Sequence
  derived and/or modified sequence
MSTGGDFGNPLRKFKLVFLGEQSVGKTSLITRFMYDSFDNTYQATIGIDFLSKTMYLEDRTVRLQLWDTAGQERFRSLIPSYIRDSTVAVVVYDITNVNSFQQTTKWIDDVRTERGSDVIIMLVGNKTDLADKRQVSIEEGERKAKELNVMFIETSAKAGYNVKQLFRRVAAALPGMESTQDRSREDMIDIKLEKPQEQPVSEGGCSC

SEQ ID NO: 260590 - protein, 174 aa, Artificial Sequence
  derived and/or modified sequence
  misc_feature (1)..(1): Xaa can be any naturally occurring amino acid
XPLRKFKLVFLGEQSVGKTSLITRFMYDSFDNTYQATIGIDFLSKTMYLEDRTVRLQLWDTAGQERFRSLIPSYIRDSTVAVVVYDITNVNSFQQTTKWIDDVRTERGSDVIIMLVGNKTDLADKRQVSIEEGERKAKELNVMFIETSAKAGYNVKQRIGSCHVAQASLELLDS

SEQ ID NO: 260591 - protein, 74 aa, Artificial Sequence
  derived and/or modified sequence
MSTGGDFGNPLRKFKLVFLGEQSVGKTSLITRFMYDSFDNTYQATIGIDFLSKTMYLEDRTVRLQLWDTAGQER

SEQ ID NO: 260592 - DNA, 627 bp, Artificial Sequence
  derived and/or modified sequence
atgagcacggggggcgactttgggaatcctttgagaaagttcaaacttgttttcctcggcgaacagagtgtagggaagactagcttgatcactagatttatgtatgactcatttgacaacacgtaccaagcaacgatcggaatagatttcttatcaaagactatgtacctagaggatcgcacagtgcgccttcaactgtgggacaccgctggccaggagaggttcagatctctgatcccttcctatatccgagactctacagtggcagtggttgtgtacgacatcactaacgtaaattccttccaacagacgaccaagtggatcgatgatgtccgaaccgaaaggggaagcgacgtgattattatgctagttggcaacaagacagacctggccgataaaaggcaggtgagtattgaggaaggcgaaagaaaggctaaggaactgaacgtgatgtttattgaaacaagtgcaaaagctggatacaatgtgaaacaacttttccgaagggtggccgcagccctgccggggatggagtcaacgcaggatcgctctagagaggacatgatcgatataaagttggaaaagccccaggagcagccagtgagcgaaggaggttgtagttgctag

SEQ ID NO: 260593 - DNA, 525 bp, Artificial Sequence
  derived and/or modified sequence
tgaccactgagaaagttcaagcttgtcttcctgggggagcagagtgtgggtaagacatccctcatcactcgttttatgtacgattcgttcgacaatacgtaccaggccaccataggtatcgattttctgtcaaaaaccatgtacctggaggacaggacggtcagactgcagctgtgggacaccgccgggcaggagcggttccgatcactcatcccgtcatacattcgggatagtacggttgccgtggtggtgtatgatataacaaatgttaatagtttccagcaaaccacgaaatggattgacgacgttcggactgagcgaggcagcgacgtcattatcatgctcgttggcaacaagacagaccttgcagataaaagacaggtgagtatcgaagaaggtgaacggaaggccaaagaactgaacgtaatgtttattgagacctccgctaaagcgggctataacgtgaaacagcggatcggctcctgtcacgttgcacaggcttctctcgagctgcttgactcatag

SEQ ID NO: 260594 - DNA, 225 bp, Artificial Sequence
  derived and/or modified sequence
atgagcacagggggtgactttggcaatccgttgagaaaattcaagttggtatttctaggggagcaatccgttggcaagaccagccttataacccgttttatgtacgattccttcgataacacatatcaggcgaccatcggcattgacttcctgtcgaagacaatgtaccttgaggatagaacggtccgactccagctgtgggatacagcaggacaggaacgctag

SEQ ID NO: 260595 - DNA, 627 bp, Artificial Sequence
  derived and/or modified sequence
atgagcactggaggagactttggaaaccccctgaggaagttcaagctggtgttcctgggggagcagagcgtgggcaagaccagcctcatcacccgcttcatgtatgacagctttgacaacacctaccaggccaccatcggcatcgacttcctgagcaagaccatgtacctggaggacagaacagtgcggctgcagctgtgggacacagctggccaggagcgcttccgcagcctcatccccagctacatccgggacagcacagtggccgtggtggtgtatgacatcaccaacgtgaacagcttccagcagaccaccaagtggattgatgatgtgaggacagagcggggcagtgatgtgatcatcatgctggtgggcaacaagacagacctggccgacaagaggcaggtgtccattgaggagggggagaggaaggccaaggagctgaatgtgatgtttattgagaccagcgccaaggccggctacaacgtgaagcagctgttccggcgggtggccgccgccctgcccggcatggagagcacccaggacaggagccgggaggacatgattgacatcaagctggagaagccccaggagcagcctgtgtctgagggcggctgcagctgctag

SEQ ID NO: 260596 - DNA, 525 bp, Artificial Sequence
  derived and/or modified sequence
tgacccctgaggaagttcaagctggtgttcctgggggagcagagcgtgggcaagaccagcctcatcacccgcttcatgtatgacagctttgacaacacctaccaggccaccatcggcatcgacttcctgagcaagaccatgtacctggaggacagaacagtgcggctgcagctgtgggacacagctggccaggagcgcttccgcagcctcatccccagctacatccgggacagcacagtggccgtggtggtgtatgacatcaccaacgtgaacagcttccagcagaccaccaagtggattgatgatgtgaggacagagcggggcagtgatgtgatcatcatgctggtgggcaacaagacagacctggccgacaagaggcaggtgtccattgaggagggggagaggaaggccaaggagctgaatgtgatgtttattgagaccagcgccaaggccggctacaacgtgaagcagagaattggcagctgccacgtggcccaggccagcctggagctgctggacagctag

SEQ ID NO: 260597 - DNA, 225 bp, Artificial Sequence
  derived and/or modified sequence
atgagcactggaggagactttggaaaccccctgaggaagttcaagctggtgttcctgggggagcagagcgtgggcaagaccagcctcatcacccgcttcatgtatgacagctttgacaacacctaccaggccaccatcggcatcgacttcctgagcaagaccatgtacctggaggacagaacagtgcggctgcagctgtgggacacagctggccaggagaggtag

SEQ ID NO: 260598 - DNA, 627 bp, Artificial Sequence
  derived and/or modified sequence
atgagcaccggcggcgacttcggcaaccccctgcggaagttcaagctggtcttcctgggcgaacagagtgtcgggaaaacttcgctaatcactcgattcatgtacgactccttcgataacacataccaggcgaccattggtatcgattttttgagcaaaacaatgtatcttgaagatcgaacagtgcgactccagctgtgggatacagcagggcaggaacggtttcgtagtctgattccatcttacatccgcgattccaccgtagctgtcgttgtgtatgacattactaacgtgaattcgtttcagcaaaccacaaagtggatcgacgacgtgaggactgagcggggtagcgacgtcatcataatgctggtgggcaataaaaccgatcttgccgacaagagacaggtgtctattgaggagggcgaacggaaagcaaaggagttgaatgtgatgtttattgagacctcagcaaaagccggttataacgtcaagcagctgtttcgaagagtagctgcagcactgccgggaatggagtccacccaggaccggtcccgggaagacatgatagacattaagcttgagaagcctcaggagcaacctgtcagtgagggcggatgttcttgttag

SEQ ID NO: 260599 - DNA, 525 bp, Artificial Sequence
  derived and/or modified sequence
tgacccctgcggaagttcaagctggtgttcctgggcgagcagagcgtcggcaagacttcattgataacaagattcatgtacgattccttcgacaatacgtatcaggctactattggaattgatttccttagcaagaccatgtaccttgaggaccgaaccgtacgactccagctttgggacacggcaggccaggagcggtttcgaagtcttatccctagctatatcagggactccaccgtcgcagtagtggtgtacgacataactaatgtcaactcttttcagcagaccacgaagtggattgacgatgtgcgaaccgaaagggggtctgatgtgatcattatgttggtcggaaataagactgatttggccgataagaggcaagtatctatcgaggagggagagagaaaggccaaagaactgaatgtgatgttcattgagacttccgcaaaagccggatacaacgtgaagcaaaggataggttcatgccatgtggcccaggccagcttggagctgctcgattcatag

SEQ ID NO: 260600 - DNA, 225 bp, Artificial Sequence
  derived and/or modified sequence
atgagcaccggcggcgacttcggcaaccccctgcggaagttcaagctggtctttctgggcgagcagagtgtcggtaagacatcgctcataaccagatttatgtacgatagcttcgacaatacatatcaagccacaatagggatcgactttctcagtaaaaccatgtatttggaagaccggacagtgaggctgcagttatgggacaccgctggacaggaaaggtag

SEQ ID NO: 260601 - DNA, 627 bp, Artificial Sequence
  derived and/or modified sequence
atgtccaccggtggcgattttgggaatcccctgcgcaaatttaaactggtgtttctcggagagcagtcggtggggaaaacgtctttgattacccgattcatgtatgactccttcgacaacacttatcaggctacaattggcatcgactttttgagtaaaaccatgtacctggaggacagaacagtgagactgcaactgtgggatacagcgggacaggagagatttaggtccttaataccaagttatatcagggatagtactgtcgctgttgtcgtttacgacattaccaacgtgaattcgttccagcagactacaaagtggatcgacgacgtgcgcaccgaaaggggatctgatgttataataatgcttgttgggaataaaactgacctggctgataagagacaggtctcaatcgaggagggcgaacgcaaggctaaagagctgaacgtcatgttcatagaaacttccgccaaagcaggatataacgtgaaacaactcttcaggagggtggccgcagcactgcccggtatggaatcaacacaggacaggagccgggaggacatgatcgatattaaactggaaaagccccaggagcagccagtgtctgaaggcggatgctcctgttag

SEQ ID NO: 260602 - DNA, 525 bp, Artificial Sequence
  derived and/or modified sequence
tgacccctcagaaagttcaaactggtgttcctcggggaacagagcgtaggaaaaactagtcttataacccgctttatgtacgacagcttcgacaacacatatcaggccactatcgggattgacttcctgagtaaaaccatgtatctcgaggaccggaccgtaagactgcagctgtgggacactgccggacaggagaggttccgctcattaatacccagctatatacgggattcaacggtcgctgtggtggtgtacgatatcaccaatgttaatagctttcagcagaccaccaagtggatcgatgacgttcgcactgaaagaggaagtgacgtgataataatgctggtcggcaataagacggatcttgcggataagcgtcaggtgtccatcgaggaaggggagcgtaaggccaaggaacttaatgtgatgtttattgaaacttcagcaaaggccggttataacgtcaagcagaggataggatcttgccacgtcgcccaggcgtctctcgagctactagatagttag

SEQ ID NO: 260603 - DNA, 225 bp, Artificial Sequence
  derived and/or modified sequence
atgtctaccggaggggattttggtaacccgctcagaaaatttaagttagtctttcttggcgaacagtccgtggggaagacttctctcatcacacgctttatgtatgactccttcgacaacacataccaggctactatcgggatcgactttctgagcaagaccatgtatctcgaagacaggaccgtgcggctgcagctgtgggacacagccggacaggagagatag

SEQ ID NO: 260604 - DNA, 522 bp, Artificial Sequence
  derived and/or modified sequence
atccgctgaggaaattcaagctggtgttcctgggggagcaaagcgttggaaagacatctttgatcaccagattcatgtatgacagttttgacaacacctatcaggcaacaattggcattgactttttatcaaaaactatgtacttggaggatcgaacagtacgattgcaattatgggacacagcaggtcaagagcggttcaggagcttgattcctagctacattcgtgactccactgtggcagttgttgtttatgatatcacaaatgttaactcattccagcaaactacaaagtggattgatgatgtcagaacagaaagaggaagtgatgttatcatcatgctagtaggaaataaaacagatcttgctgacaagaggcaagtgtcaattgaggagggagagaggaaagccaaagagctgaatgttatgtttattgaaactagtgcaaaagctggatacaatgtaaagcagagaataggttcttgccatgttgcccaggctagtcttgaactcctagactcag

SEQ ID NO: 260605 - DNA, 627 bp, Artificial Sequence
  derived and/or modified sequence
atgagcaccggcggcgacttcggcaaccccctgagaaagttcaagctggtgttcctgggcgagcagagcgtgggcaagaccagcctgatcaccagattcatgtacgacagcttcgacaacacctaccaggccaccatcggcatcgacttcctgagcaagaccatgtacctggaggacagaaccgtgagactgcagctgtgggacaccgccggccaggagagattcagaagcctgatccccagctacatcagagacagcaccgtggccgtggtggtgtacgacatcaccaacgtgaacagcttccagcagaccaccaagtggatcgacgacgtgagaaccgagagaggcagcgacgtgatcatcatgctggtgggcaacaagaccgacctggccgacaagagacaggtgagcatcgaggagggcgagagaaaggccaaggagctgaacgtgatgttcatcgagaccagcgccaaggccggctacaacgtgaagcagctgttcagaagagtggccgccgccctgcccggcatggagagcacccaggacagaagcagagaggacatgatcgacatcaagctggagaagccccaggagcagcccgtgagcgagggcggctgcagctgctag

SEQ ID NO: 260606 - DNA, 525 bp, Artificial Sequence
  derived and/or modified sequence
tgacccctgagaaagttcaagctggtgttcctgggcgagcagagcgtgggcaagaccagcctgatcaccagattcatgtacgacagcttcgacaacacctaccaggccaccatcggcatcgacttcctgagcaagaccatgtacctggaggacagaaccgtgagactgcagctgtgggacaccgccggccaggagagattcagaagcctgatccccagctacatcagagacagcaccgtggccgtggtggtgtacgacatcaccaacgtgaacagcttccagcagaccaccaagtggatcgacgacgtgagaaccgagagaggcagcgacgtgatcatcatgctggtgggcaacaagaccgacctggccgacaagagacaggtgagcatcgaggagggcgagagaaaggccaaggagctgaacgtgatgttcatcgagaccagcgccaaggccggctacaacgtgaagcagagaatcggcagctgccacgtggcccaggccagcctggagctgctggacagctag

SEQ ID NO: 260607 - DNA, 225 bp, Artificial Sequence
  derived and/or modified sequence
atgagcaccggcggcgacttcggcaaccccctgagaaagttcaagctggtgttcctgggcgagcagagcgtgggcaagaccagcctgatcaccagattcatgtacgacagcttcgacaacacctaccaggccaccatcggcatcgacttcctgagcaagaccatgtacctggaggacagaaccgtgagactgcagctgtgggacaccgccggccaggagagatag

SEQ ID NO: 260608 - protein, 364 aa, Artificial Sequence
  derived and/or modified sequence
MTSELDIFVGNTTLIDEDVYRLWLDGYSVTDAVALRVRSGILEQTGATAAVLQSDTMDHYRTFHMLERLLHAPPKLLHQLIFQIPPSRQALLIERYYAFDEAFVREVLGKKLSKGTKKDLDDISTKTGITLKSCRRQFDNFKRVFKVVEEMRGSLVDNIQQHFLLSDRLARDYAAIVFFANNRFETGKKKLQYLSFGDFAFCAELMIQNWTLGAVGEAPTDPDSQMDDMDMDLDKEFLQDLKELKVLVADKDLLDLHKSLVCTALRGKLGVFSEMEANFKNLSRGLVNVAAKLTHNKDVRDLFVDLVEKFVEPCRSDHWPLSDVRFFLNQYSASVHSLDGFRHQALWDRYMGTLRGCLLRLYHD

SEQ ID NO: 260609 - DNA, 1261 bp, Artificial Sequence
  derived and/or modified sequence
ggtcccgatgccgcgagcggaatctcggcgctcccggaagtggcctgaaggcggcgcgccagtcccgagcagtgctcgctcctgctcggggcgctgcggccccgggcgtcgccatgaccagtgagctggacatcttcgtggggaacacgacccttatcgacgaggacgtgtatcgcctctggctcgatggttactcggtgaccgacgcggtggccctgcgggtgcgctcgggaatcctggagcagactggcgccacggcagcggtgctgcagagcgacaccatggaccattaccgcaccttccacatgctcgagcggctgctgcatgcgccgcccaagctactgcaccagctcatcttccagattccgccctcccggcaggcactactcatcgagaggtactatgcctttgatgaggcctttgttcgggaggtgctgggcaagaagctgtccaaaggcaccaagaaagacctggatgacatcagcaccaaaacaggcatcaccctcaagagctgccggagacagtttgacaactttaaacgggtcttcaaggtggtagaggaaatgcggggctccctggtggacaatattcagcaacacttcctcctctctgaccggttggccagggactatgcagccatcgtcttctttgctaacaaccgctttgagacagggaagaaaaaactgcagtatctgagcttcggtgactttgccttctgcgctgagctcatgatccaaaactggacccttggagccgtcggtgaggcccccactgacccagactcacagatggatgacatggacatggacttagacaaggaatttctccaggacttgaaggagctcaaggtgctagtggctgacaaggaccttctggacctgcacaagagcctggtgtgcactgctctccggggaaagctgggcgtcttctctgagatggaagccaacttcaagaacctgtcccgggggctggtgaacgtggccgccaagctgacccacaataaagatgtcagagacctgtttgtggacctcgtggagaagtttgtggaaccctgccgctccgaccactggccactcagcgacgtgcggttcttcctgaatcagtattcagcgtctgtccactccctcgatggcttccgacaccaggccctctgggaccgctacatgggcaccctccgcggctgcctcctgcgcctgtatcatgactgaggtgcctcccaacgctccgcccacgctgacaataaagttgctctgagtttgga

SEQ ID NO: 260610 - DNA, 1095 bp, Artificial Sequence
  derived and/or modified sequence
atgacttccgaactggatatctttgtggggaatacgaccttaatcgacgaggacgtctacagattatggttggatggctactctgtgacagacgctgtggcactgagggtccggtccggtatacttgagcagaccggagcaacagctgctgtgctgcagtcggacacaatggatcattacaggacctttcacatgctagagaggttgttgcacgcacctccaaaactcctccatcagttaatcttccagatcccaccctcacggcaggcgttattgattgagaggtactatgcctttgacgaagcttttgtgagggaggttttgggaaagaaactttctaagggaacgaagaaagacctggatgatatttctacaaaaaccggcattacactgaagagctgcaggaggcagttcgacaattttaaacgcgtattcaaggtcgtggaggaaatgagagggtcattggtggataacattcagcagcactttctactgtccgacaggctagcccgcgactacgctgcaattgtgttttttgccaacaatcgctttgaaaccggcaaaaagaaacttcagtacctgagttttggggacttcgcattctgtgccgaactgatgatccagaactggacactcggagcggttggcgaagcccctaccgaccccgactctcagatggacgacatggacatggacctcgacaaggaattcctgcaggatctcaaggagctgaaagttcttgttgccgacaaagacctgctagatttacacaaatctttggtatgtacagcgctccggggcaagctcggagtgtttagtgagatggaggcgaacttcaagaatctgtctagaggcctggtcaacgttgccgctaagcttacccataataaagacgtcagagacctattcgtcgacctcgtggagaagttcgtggagccctgccggagcgatcactggcccttgagcgacgttagatttttcttgaaccagtattccgcaagtgtgcattcactcgacggattccgccaccaggctctgtgggatcgttacatgggcactttacgaggctgtcttctgaggctctaccacgactag

SEQ ID NO: 260611 - DNA, 1095 bp, Artificial Sequence
  derived and/or modified sequence
atgaccagcgagctggacatctttgtgggcaacaccaccctgattgatgaagatgtgtaccgcctgtggctggatggctacagcgtgacagatgctgtggccctgcgggtgcgcagcggcatcctggagcagacaggagccacagctgctgtgctgcagagcgacaccatggaccactaccgcaccttccacatgctggagcggctgctgcacgccccacccaagctgctgcaccagctgatcttccagatcccccccagccggcaggccctgctgattgagcgctactatgcctttgatgaggcctttgtgcgggaggtgctgggcaagaagctgagcaagggcaccaagaaggacctggatgacatcagcaccaagacaggcatcaccctgaagagctgccggcggcagtttgacaacttcaagagggtcttcaaggtggtggaggagatgaggggcagcctggtggacaacatccagcagcacttcctgctgagtgaccggctggcccgggactatgctgccatcgtgttctttgccaacaacagatttgagaccgggaagaagaagctgcagtacctgagctttggagactttgccttctgtgccgagctgatgatccagaactggaccctgggcgctgtgggggaggcccccacagatcctgacagccagatggatgacatggacatggacctggacaaggagttcctgcaggacctgaaggagctgaaggtgctggtggccgacaaggacctgctggacctgcacaagagcctggtgtgcacagccctgcggggcaagctgggcgtcttcagcgagatggaggccaacttcaagaacctgagccggggcctggtgaatgtggccgccaagctgacccacaacaaggatgtgcgggacctgtttgtggacctggtggagaagtttgtggagccctgccgcagtgaccactggcccctgagtgatgtgcgcttcttcctgaaccagtacagcgcctctgtgcacagcctggatggcttccgccaccaggccctgtgggaccgctacatgggcaccctgcggggctgcctgctgcggctgtaccatgactag

SEQ ID NO: 260612 - DNA, 1095 bp, Artificial Sequence
  derived and/or modified sequence
atgaccagcgagctggacatcttcgtgggcaacaccaccctgatcgacgaagacgtgtatcgattatggttagacgggtattccgtcacggacgccgtcgccttgcgcgtgcgcagtggcatcctcgagcagactggcgcaaccgccgcagtgttgcagtccgataccatggaccattacagaactttccatatgttggagcggttactgcacgcaccgccaaaattacttcatcaactgatttttcagatccctcccagccgtcaggccctgctgattgagcggtattacgccttcgacgaagcgtttgtgcgagaggtcctggggaagaaacttagcaaaggaacaaaaaaagatcttgacgacatcagtactaaaaccggcattacactgaaatcttgccgccgccagttcgacaatttcaagcgggttttcaaggtggtcgaggaaatgcgcggttccttggtcgataatattcagcagcactttcttctatcggaccgattggcccgtgactacgctgctatcgtgttctttgcaaataatagatttgagacagggaagaaaaagcttcagtatctgagctttggagattttgcattctgcgcggagctcatgatccaaaactggacactgggagcagtcggcgaggccccaactgatcctgacagtcagatggacgacatggacatggatctcgataaggaatttcttcaggaccttaaagagctgaaagttttggttgccgataaggaccttctggacttgcacaagtccctcgtgtgtacagcgctgcgcgggaaactgggagtcttctcagagatggaggcgaacttcaagaatctgtcccgcgggctggtgaacgtcgcggctaagctcactcacaataaagacgtccgggatctgttcgtcgatctggtcgagaaattcgttgaaccttgcaggagtgatcactggccactgagcgatgttcgattcttcctgaaccagtactcagcgtccgtacattctttagacgggttccgccaccaggcactgtgggaccgttacatgggcacactaagggggtgcctcttacgattgtaccacgattag

SEQ ID NO: 260613 - DNA, 1095 bp, Artificial Sequence
  derived and/or modified sequence
atgacctctgaacttgacatttttgtgggcaacactaccctcatcgacgaggacgtctataggctatggctggatggctattctgtcacggacgcagtggcgcttcgcgtccggtctggtatcttggaacagaccggcgcaaccgctgcagtgctccagagcgacactatggatcactatcgcacgtttcatatgctcgagagactcctccacgccccaccgaagctgctgcaccaacttatctttcagatcccaccatcccgacaggccctgctgatagagcgctactacgcgttcgatgaggcgtttgtcagagaggttctcgggaaaaagctctctaagggaaccaaaaaagatcttgatgacattagtaccaagacagggattacattaaaatcatgccggagacagtttgataattttaagcgggtattcaaagtggttgaggagatgagaggaagtttagtcgataacatccaacagcacttcctgctttctgataggctcgccagggactatgccgcaattgtgttttttgccaacaatcgatttgaaacgggaaaaaagaaattgcagtacctaagcttcggcgattttgccttttgcgcagaactcatgattcagaactggactttaggagccgtgggggaagctcccacggaccctgattcacagatggacgacatggacatggacctggacaaggagttcctgcaagatctcaaggagctaaaagtgttggtggccgataaggatttgcttgatttgcataagagcttggtgtgtacagctctcagaggtaagttgggggtattcagtgaaatggaggccaatttcaaaaatctatccaggggactcgtgaacgtcgccgctaaacttacccacaacaaggatgtacgtgatctgttcgttgatctggtggagaaattcgttgaaccctgccggagcgaccactggcccctaagtgacgtcaggttttttctgaatcagtactcggcctcagtgcactctctggatggattcaggcaccaggccttgtgggacaggtacatgggcacccttagaggatgtctgctcaggctttaccacgactag

SEQ ID NO: 260614 - DNA, 1095 bp, Artificial Sequence
  derived and/or modified sequence
atgaccagcgagctggacatcttcgtgggcaacaccaccctgatcgacgaggacgtgtacagactgtggctggacggctacagcgtgaccgacgccgtggccctgagagtgagaagcggcatcctggagcagaccggcgccaccgccgccgtgctgcagagcgacaccatggaccactacagaaccttccacatgctggagagactgctgcacgccccccccaagctgctgcaccagctgatcttccagatcccccccagcagacaggccctgctgatcgagagatactacgccttcgacgaggccttcgtgagagaggtgctgggcaagaagctgagcaagggcaccaagaaggacctggacgacatcagcaccaagaccggcatcaccctgaagagctgcagaagacagttcgacaacttcaagagagtgttcaaggtggtggaggagatgagaggcagcctggtggacaacatccagcagcacttcctgctgagcgacagactggccagagactacgccgccatcgtgttcttcgccaacaacagattcgagaccggcaagaagaagctgcagtacctgagcttcggcgacttcgccttctgcgccgagctgatgatccagaactggaccctgggcgccgtgggcgaggcccccaccgaccccgacagccagatggacgacatggacatggacctggacaaggagttcctgcaggacctgaaggagctgaaggtgctggtggccgacaaggacctgctggacctgcacaagagcctggtgtgcaccgccctgagaggcaagctgggcgtgttcagcgagatggaggccaacttcaagaacctgagcagaggcctggtgaacgtggccgccaagctgacccacaacaaggacgtgagagacctgttcgtggacctggtggagaagttcgtggagccctgcagaagcgaccactggcccctgagcgacgtgagattcttcctgaaccagtacagcgccagcgtgcacagcctggacggcttcagacaccaggccctgtgggacagatacatgggcaccctgagaggctgcctgctgagactgtaccacgactag

SEQ ID NO: 260615 - protein, 976 aa, Artificial Sequence
  derived and/or modified sequence
MGNLESAEGVPGEPPSVPLLLPPGKMPMPEPCELEERFALVLSSMNLPPDKARLLRQYDNEKKWDLICDQERFQVKNPPHTYIQKLQSFLDPSVTRKKFRRRVQESTKVLRELEISLRTNHIGWVREFLNDENKGLDVLVDYLSFAQCSVMYSTLPGRRALKNSRLVSQKDDVHVCILCLRAIMNYQYGFNLVMSHPHAVNEIALSLNNKNPRTKALVLELLAAVCLVRGGHEIILAAFDNFKEVCKELHRFEKLMEYFRNEDSNIDFMVACMQFINIVVHSVEDMNFRVHLQYEFTKLGLEEFLQKSRHTESEKLQVQIQAYLDNVFDVGGLLEDAETKNVALEKVEELEEHVSHLTEKLLDLENENMMRVAELEKQLLQREKELESIKETYENTSHQVHTLRRLIKEKEEAFQRRCHLEPNVRGLESVDSEALARVGPAELSEGMPPSDLDLLAPAPPPEEVLPLPPPPAPPLPPPPPPLPDKCPPAPPLPGAAPSVVLTVGLSAIRIKKPIKTKFRLPVFNWTALKPNQISGTVFSELDDEKILEDLDLDKFEELFKTKAQGPALDLICSKNKTAQKAASKVTLLEANRAKNLAITLRKAGRSAEEICRAIHTFDLQTLPVDFVECLMRFLPTEAEVKLLRQYERERQPLEELAAEDRFMLLFSKVERLTQRMAGMAFLGNFQDNLQMLTPQLNAIIAASASVKSSQKLKQMLEIILALGNYMNSSKRGAVYGFKLQSLDLLLDTKSTDRKMTLLHFIALTVKEKYPDLANFWHELHFVEKAAAVSLENVLLDVKELGRGMELIRRECSIHDNSVLRNFLSTNEGKLDKLQRDAKTAEEAYNAVVRYFGESPKTTPPSVFFPVFVRFIRSYKEAEQENEARKKQEEVMREKQLAQEAKKLDAKTPSQRNKWQQQELIAELRRRQAKEHRPVYEGKDGTIEDIITGLHCQPMVVRHQARSAAPPSGPPRAPGPH

SEQ ID NO: 260616 - DNA, 2931 bp, Artificial Sequence
  derived and/or modified sequence
atgggcaacctggagagcgccgagggcgtgcccggcgagccccccagcgtgcccctgctgctgccccccggcaagatgcccatgcccgagccctgcgagctggaggagagattcgccctggtgctgagcagcatgaacctgccccccgacaaggccagactgctgagacagtacgacaacgagaagaagtgggacctgatctgcgaccaggagagattccaggtgaagaaccccccccacacctacatccagaagctgcagagcttcctggaccccagcgtgaccagaaagaagttcagaagaagagtgcaggagagcaccaaggtgctgagagagctggagatcagcctgagaaccaaccacatcggctgggtgagagagttcctgaacgacgagaacaagggcctggacgtgctggtggactacctgagcttcgcccagtgcagcgtgatgtacagcaccctgcccggcagaagagccctgaagaacagcagactggtgagccagaaggacgacgtgcacgtgtgcatcctgtgcctgagagccatcatgaactaccagtacggcttcaacctggtgatgagccacccccacgccgtgaacgagatcgccctgagcctgaacaacaagaaccccagaaccaaggccctggtgctggagctgctggccgccgtgtgcctggtgagaggcggccacgagatcatcctggccgccttcgacaacttcaaggaggtgtgcaaggagctgcacagattcgagaagctgatggagtacttcagaaacgaggacagcaacatcgacttcatggtggcctgcatgcagttcatcaacatcgtggtgcacagcgtggaggacatgaacttcagagtgcacctgcagtacgagttcaccaagctgggcctggaggagttcctgcagaagagcagacacaccgagagcgagaagctgcaggtgcagatccaggcctacctggacaacgtgttcgacgtgggcggcctgctggaggacgccgagaccaagaacgtggccctggagaaggtggaggagctggaggagcacgtgagccacctgaccgagaagctgctggacctggagaacgagaacatgatgagagtggccgagctggagaagcagctgctgcagagagagaaggagctggagagcatcaaggagacctacgagaacaccagccaccaggtgcacaccctgagaagactgatcaaggagaaggaggaggccttccagagaagatgccacctggagcccaacgtgagaggcctggagagcgtggacagcgaggccctggccagagtgggccccgccgagctgagcgagggcatgccccccagcgacctggacctgctggcccccgcccccccccccgaggaggtgctgcccctgccccccccccccgccccccccctgccccccccccccccccccctgcccgacaagtgcccccccgccccccccctgcccggcgccgcccccagcgtggtgctgaccgtgggcctgagcgccatcagaatcaagaagcccatcaagaccaagttcagactgcccgtgttcaactggaccgccctgaagcccaaccagatcagcggcaccgtgttcagcgagctggacgacgagaagatcctggaggacctggacctggacaagttcgaggagctgttcaagaccaaggcccagggccccgccctggacctgatctgcagcaagaacaagaccgcccagaaggccgccagcaaggtgaccctgctggaggccaacagagccaagaacctggccatcaccctgagaaaggccggcagaagcgccgaggagatctgcagagccatccacaccttcgacctgcagaccctgcccgtggacttcgtggagtgcctgatgagattcctgcccaccgaggccgaggtgaagctgctgagacagtacgagagagagagacagcccctggaggagctggccgccgaggacagattcatgctgctgttcagcaaggtggagagactgacccagagaatggccggcatggccttcctgggcaacttccaggacaacctgcagatgctgaccccccagctgaacgccatcatcgccgccagcgccagcgtgaagagcagccagaagctgaagcagatgctggagatcatcctggccctgggcaactacatgaacagcagcaagagaggcgccgtgtacggcttcaagctgcagagcctggacctgctgctggacaccaagagcaccgacagaaagatgaccctgctgcacttcatcgccctgaccgtgaaggagaagtaccccgacctggccaacttctggcacgagctgcacttcgtggagaaggccgccgccgtgagcctggagaacgtgctgctggacgtgaaggagctgggcagaggcatggagctgatcagaagagagtgcagcatccacgacaacagcgtgctgagaaacttcctgagcaccaacgagggcaagctggacaagctgcagagagacgccaagaccgccgaggaggcctacaacgccgtggtgagatacttcggcgagagccccaagaccaccccccccagcgtgttcttccccgtgttcgtgagattcatcagaagctacaaggaggccgagcaggagaacgaggccagaaagaagcaggaggaggtgatgagagagaagcagctggcccaggaggccaagaagctggacgccaagacccccagccagagaaacaagtggcagcagcaggagctgatcgccgagctgagaagaagacaggccaaggagcacagacccgtgtacgagggcaaggacggcaccatcgaggacatcatcaccggcctgcactgccagcccatggtggtgagacaccaggccagaagcgccgccccccccagcggcccccccagagcccccggcccccactag

SEQ ID NO: 260617 - DNA, 2931 bp, Artificial Sequence
  derived and/or modified sequence
atgggtaaccttgaatctgccgaaggcgtcccgggggagccaccctctgtgccactcttacttcctcctggtaaaatgcctatgcctgagccctgcgagctagaggaacgattcgccttggtgttgagtagtatgaacctcccccctgataaggctcgtctgctgcgccagtatgataacgagaagaagtgggacctgatatgcgatcaagagaggttccaggtcaaaaaccctccgcatacttatattcagaagttgcaatcctttctcgaccctagcgtgaccaggaagaaatttagacggagggtccaggagtccacaaaagtattgcgagaattagaaatcagcctaaggacaaatcacatcggatgggtgcgcgagtttctaaacgatgagaataaaggactcgacgtgttagttgactacctgagctttgcacagtgtagcgtcatgtattcaacactgcctggacgccgtgctctcaaaaactcacgcctggtgtctcagaaggacgatgttcatgtctgcattttatgtttacgggcgatcatgaactaccagtatggctttaatctcgtcatgtcgcatccccatgcagtgaacgagatcgccctgagtctgaataataagaatcctcgcactaaggctctggttctagaactcctggccgccgtgtgcttggtacgcggaggtcatgagatcattcttgccgcattcgacaacttcaaggaagtatgcaaggaattacatcgtttcgaaaagctaatggagtatttcaggaatgaagacagcaatattgatttcatggtggcgtgcatgcaatttataaacatcgtcgttcatagcgtcgaggatatgaactttagagtccatctgcagtacgagttcacgaaactcggattggaagagtttttgcaaaaatcccgccatactgagtccgaaaagctgcaagtccagatccaggcttacttagacaacgtcttcgacgtggggggattgcttgaagatgccgaaacaaagaacgtggccctcgaaaaggttgaggaactggaggagcatgtttctcacttaacagaaaagctattggatctcgaaaatgagaatatgatgcgggtagccgaattggaaaagcagttactgcagagggagaaggaactcgagtcaatcaaggagacgtacgaaaacactagtcaccaggtacacacattgcggaggctcataaaagaaaaggaggaggcctttcagcgccggtgccatcttgagccaaatgtgcgcggactggaaagtgtggacagcgaggccctggctcgagtgggacctgccgagctgtcggaaggcatgccaccttccgacctggatttgttagcccccgcacctcctcccgaagaggtgctgccactgccccccccccctgccccccctttgccaccccctccgccaccactccctgataagtgtcctcccgcacctcccttaccgggggccgctccctctgtggtccttacagtgggcctcagcgctataaggatcaagaaacccatcaaaaccaagtttcgccttccggtcttcaactggacggcgttgaagcctaatcaaatctccggcaccgttttttctgagcttgatgacgaaaaaatcctagaagacctagatctcgacaagtttgaagagctctttaaaactaaggctcaggggcctgcactcgacttaatctgctccaaaaataagaccgctcagaaagccgcttccaaagtgacgctattagaggccaacagagccaagaatctggcaataactctccggaaagccggtagatctgcagaggaaatttgccgcgccatccatacctttgatctgcagactctaccagtcgactttgtggagtgtcttatgcgtttcctaccgaccgaagctgaggtcaagctgctcagacaatacgagagggagcgccagcctttggaagagctggctgccgaagatcgattcatgctcttgttcagcaaggtggagaggctcacacagaggatggcggggatggcttttctgggaaactttcaggacaatctccagatgctaacacctcaattaaatgcaattattgccgcgtccgcctcggtgaagtcttcacagaagctgaagcaaatgttggagatcatactcgccctcggcaattatatgaacagtagcaaaaggggcgccgtctacggcttcaaactgcagagtctggatctgcttctggatacaaagagcaccgacagaaagatgacacttctccatttcatagcactgacggtgaaagagaagtaccctgacctggccaacttttggcacgagctccatttcgttgagaaagcagcggctgtcagtctggaaaacgttcttctggacgtgaaggagctgggtcggggaatggagttaattcgccgagaatgctcaatacacgataatagcgtgctgcgcaacttcctgtccacaaacgagggcaaactggacaagctgcaacgcgacgctaaaactgccgaggaagcttataacgctgtggtgagatactttggcgagtccccgaaaactacaccgccttcagtgtttttccccgtctttgtcaggtttatcagaagctacaaggaagccgagcaggagaacgaggctaggaaaaaacaggaagaggtaatgcgcgaaaagcagctagcccaggaggctaagaagttggacgctaaaaccccatctcagaggaataagtggcagcagcaggaattaatagccgagttacgccggcgtcaggccaaggaacatcgacccgtgtatgagggaaaagatggcacgatagaagacatcatcacaggacttcactgccaacccatggtggtccgtcatcaggcccgctccgcggcgcctccttccggccctccccgcgcaccaggaccgcactag

SEQ ID NO: 260618 - DNA, 4006 bp, Artificial Sequence
  derived and/or modified sequence
cttgcttcggtgcggctgtccgctacgctgcctccgccctcgccgcgcgcccccgccagcgggactccagggaacccccggcgccctcgacggggccgaggagtcgggactcggggagccggcgctgagggaggagcctggtcggagccgcggagccgaaagctccggagcgtggaggtggggggccgaggcccctgagggggccccgccgcgatgggcaacctggagagcgccgagggggtcccgggagagcccccctctgtcccgttgttgctgccgcccggcaagatgccgatgcctgagccctgtgagctggaggaaaggttcgccctggtgctgagctccatgaacctgcctccagacaaggcccggctcctgcggcagtatgacaatgagaagaaatgggatctgatctgtgaccaggaacgattccaggtgaagaatcctccccacacttacattcagaaactccagagcttcttggaccccagtgtaactcggaagaagttcaggaggagggtgcaggagtcaaccaaagtactaagggagctggagatctctcttcgcaccaaccacattgggtgggtgcgggaatttctgaatgatgaaaacaaaggcctggatgtactggtggattacctgtcctttgcccagtgttctgtcatgtatagcactctccctgggcgcagggccctgaagaactcccgcctagtgagccagaaggatgacgtccacgtctgtatcctttgtctcagagccatcatgaactatcagtacggattcaacctggtcatgtcccacccccatgctgtcaatgagattgcacttagcctcaataacaagaatccaaggaccaaagcccttgtcttagagcttctggcagctgtgtgtttggtgcgaggaggtcacgaaatcatccttgctgcctttgacaatttcaaagaggtatgcaaggagctgcaccgctttgagaagctgatggagtatttccggaatgaggacagcaatattgacttcatggtggcctgcatgcagttcatcaacatcgtggtgcactcggtggaggacatgaacttccgggtccacctgcagtatgagtttaccaagctggggctagaggagttcctgcagaagtcaaggcacacagagagcgagaagctgcaggtgcagattcaggcatatctggacaacgtgtttgatgtcgggggtttgttggaggatgctgagaccaagaatgtagccctggagaaggtggaggagttggaggagcatgtgtcccatctcacagagaagcttctggacctagagaatgaaaacatgatgcgggtggcagaactagagaagcagctgctacagcgggagaaggaactagagagcatcaaggagacatatgagaacacaagccaccaggtgcacaccctgcggaggctcattaaagagaaggaggaggcctttcagcgtcgatgtcatttggagccaaatgtccggggcctggagtctgtggacagtgaggccctggccagagtaggccctgcagagctgagtgagggcatgccaccctccgacctggaccttctggctccagccccaccccctgaggaggtcctgcctcttcctccaccaccagctccgcccttgccccctccacctcccccattaccagacaagtgtcccccagccccacctctccctggtgctgcaccctctgtggtgttgacagtgggcctgtcagccattcgaattaagaaacctatcaagaccaagttccggctgcctgtcttcaactggacagcactgaaacccaaccagatcagtggcactgtcttcagcgaacttgatgatgagaagatcttggaggacctggatcttgataagtttgaagaattattcaagacaaaagcgcagggccctgcccttgacctcatctgctccaaaaacaagacagcgcaaaaagctgccagcaaggtgactctgttggaagccaatcgtgccaagaacctggccatcaccctacgcaaggctggccgctcggctgaggagatctgcagggccattcatacgtttgacttgcagacactacctgtggacttcgtggagtgcctgatgcgcttcctgcccacagaggctgaggtaaagctgctgcggcaatatgagcgggagcggcagcccctggaggagttggcagctgaggaccgcttcatgctgctcttcagcaaggtggaacggttgacccagcgaatggctggcatggccttcctggggaacttccaggataacctgcagatgctcacaccgcaactcaatgccatcattgcggcgtccgcttccgtcaagtcttcacagaagctgaagcagatgttggagatcatacttgcactggggaactacatgaacagcagcaagcggggagctgtgtatggcttcaagctccagagcctggatctgctgctggataccaagtccactgaccggaagatgacactgcttcatttcatcgccttgacagtgaaggagaaatacccagacctggctaacttctggcatgagctgcactttgttgagaaggctgcagcagtgtccctggagaacgtgctgctggacgtgaaggagctgggccggggcatggagctgattcggcgtgagtgcagcatccatgacaacagcgtcctccggaacttcctcagtaccaatgaaggcaaactagacaagctccagcgggacgccaagacggctgaggaggcctacaatgcagttgtgcgctactttggcgagagtcccaagactacacctccttctgtattcttcccagtatttgtccgattcattcgttcttacaaggaagcagaacaagagaatgaagcccgcaagaagcaggaggaggtaatgcgggagaagcagctggctcaggaagccaagaaactggatgccaagaccccatcccagcggaacaagtggcaacagcaggagttaatagcagagttgaggcggcgccaggccaaggaacaccggcctgtttatgaggggaaggatggtaccatcgaggacatcatcacaggcctccactgccagcctatggttgttcgccaccaagccaggagtgctgcaccgcccagtggtccccctcgggctccaggcccccactgagaccctctcggaggcagaagcacttcacccctcagagtcctacaagtccaaccagtggacctggaattggccaagggctcaggagagggctgtgttgctctctcaaccatgtccgccccagctcttgaggctggatctttctacttgtgccactatgggcactaggtctgtaggtccctggtgcttccagtactgcactttgcccccaaggtctttgacttcatttcctgaagggtcaccaagggtcagctcagggctaggaaaaaccatttccagccttagcctaaacagggcacatagatctctcccactagagcccagagggatgagaggagagagcaactgttctttctttttttttcccttcctttttgcaggcccatggtcagctctggtctagatgtatctaggcttagggagccctgggaccctgccagtctcagttcatctcttaccaggagcaaggccctctgaagcatgggccgtgccagctgtgccctagtgataagggtaagaggagagatgtcaggctcactgcccttatttctctgcccatttcattctaggctcacactgtccttgtcaaggtgggcagaagagcagaggtcttctctgcaccaaccactctctgcagatggctggagaaagggtgtgccaactcttcaccttctttcctcagctacggtttttttttttttttttttttttttggcaggggacaaggagcatggtggtcttggctatttgcttaccttcccgtttctcctctgcccctggaagggaatgtgggggcccacttttttgtacatgtaccacctccctttcctcttactgtacataaacctcagactctccccctctc

SEQ ID NO: 260619 - DNA, 2931 bp, Artificial Sequence
  derived and/or modified sequence
atgggcaacctggagagcgctgagggcgtgcctggagagccccccagcgtgcccctgctgctgcccccaggcaagatgcccatgcctgagccctgtgagctggaggagagatttgccctggtgctgagctccatgaacctgcccccagacaaggcccggctgctgcggcagtatgacaatgagaagaagtgggacctgatctgtgaccaggagcgcttccaggtgaagaaccccccccacacctacatccagaagctgcagagcttcctggaccccagcgtgaccaggaagaagttcagaagaagagtgcaggagagcaccaaggtgctgcgggagctggagatcagcctgcggaccaaccacatcggctgggtgcgggagttcctgaatgatgagaacaagggcctggatgtgctggtggactacctgagctttgcccagtgcagcgtgatgtacagcaccctgcccggccggcgggccctgaagaacagccggctggtgtcccagaaggatgatgtgcacgtgtgcatcctgtgcctgcgggccatcatgaactaccagtatggcttcaacctggtgatgagccacccccatgctgtgaatgaaattgccctgagcctgaacaacaagaaccccaggaccaaggccctggtgctggagctgctggccgctgtgtgcctggtgcggggcggccacgagatcatcctggccgcctttgacaacttcaaggaggtgtgcaaggagctgcacagatttgagaagctgatggagtacttcagaaatgaagacagcaacatcgacttcatggtggcctgcatgcagttcatcaacatcgtggtgcacagcgtggaggacatgaacttccgggtgcacctgcagtatgagttcaccaagctgggcctggaggagttcctgcagaagagccgccacacagaaagtgagaagctgcaggtgcagatccaggcctacctggacaacgtgtttgatgtgggcggcctgctggaggatgctgagaccaagaatgtggccctggagaaggtggaggagctggaggagcacgtgagccacctgacagagaagctgctggacctggagaatgaaaacatgatgagggtggccgagctggagaagcagctgctgcagcgggagaaggagctggagagcatcaaggagacctatgagaacaccagccaccaggtgcacaccctgcggcggctcatcaaggagaaggaggaggccttccagaggcgctgccacctggagcccaacgtgcggggcctggagagcgtggacagcgaggccctggcccgggtgggccctgctgagctgtctgagggcatgccacccagcgacctggacctgctggccccagcccctcctcctgaggaggtgctgcccctgcccccacctccagccccacccctgcccccacctcctccacccctgcctgacaagtgccccccagccccacccctgcctggagctgcccccagcgtggtgctgactgtgggcctgagcgccatccgcatcaagaagcccatcaagaccaagttccggctgcctgtgttcaactggacagccctgaagcccaaccagatcagcggcaccgtcttcagcgagctggatgatgagaagatcctggaggacctggacctggacaagtttgaggagctgttcaagaccaaggcccagggccctgccctggacctgatctgcagcaagaacaagacagcccagaaggccgccagcaaggtgaccctgctggaggccaacagagccaagaacctggccatcaccctgaggaaggccggccgctctgctgaggagatctgccgggccatccacacctttgacctgcagaccctgcctgtggactttgtggagtgcctgatgaggttcctgcccacagaggccgaggtgaagctgctgcggcagtatgaaagagagcggcagcccctggaggagctggccgcagaagatcgcttcatgctgctcttcagcaaggtggagcggctgacccagaggatggccggcatggccttcctgggcaacttccaggacaacctgcagatgctgaccccccagctgaatgccatcatcgccgccagcgcctctgtgaagagcagccagaagctgaagcagatgctggagatcatcctggccctgggcaactacatgaacagcagcaagagaggagctgtgtatggcttcaagctgcagagcctggacctgctgctggacaccaagagcacagacaggaagatgaccctgctgcacttcatcgccctgactgtgaaggagaagtacccagacctggccaacttctggcatgagctgcactttgtggagaaggctgctgctgtgtccctggagaatgtgctgctggatgtgaaggagctgggccggggcatggagctgatccggcgggagtgcagcatccatgacaacagcgtgctgaggaacttcctgagcaccaatgaaggcaagctggacaagctgcagagagatgccaagacagctgaggaggcctacaatgctgtggtgcgctactttggagagagccccaagaccaccccaccttctgtgttcttccctgtgtttgtgcgcttcatccgcagctacaaggaggccgagcaggagaatgaggccaggaagaagcaggaggaggtgatgagggagaagcagctggcccaggaggccaagaagctggatgccaagacccccagccagaggaacaagtggcagcagcaggagctgattgctgagctgcggcggcggcaggccaaggagcacaggcctgtgtatgagggcaaggatggcaccatcgaggacatcatcaccggcctgcactgccagcccatggtggtgcgccaccaggcccggtctgctgcccctccttctggccccccccgggcccctggcccccactag

SEQ ID NO: 260620 - DNA, 2931 bp, Artificial Sequence
  derived and/or modified sequence
atgggcaacctggagagcgccgagggcgtgcccggcgagccccccagtgtgccccttctgctgcctcctgggaagatgcctatgcctgaaccttgtgagcttgaagaacgatttgcgcttgtgctgagtagtatgaatctgcctccagacaaagccaggctgctccggcaatacgacaatgagaaaaaatgggatctgatctgcgaccaagagcgctttcaagtgaaaaacccaccccacacatacattcaaaagcttcagagcttcttggacccaagcgtgactagaaagaagttccggcggagggtgcaggagagcactaaggtgctgagggaactggagataagtctgagaacaaaccatatcggatgggtccgtgagttcttaaacgacgaaaacaagggattggatgtgctggtcgattacctgagctttgcacagtgttctgttatgtattcaacccttcctggccggagggctctcaaaaactcccgtctggtttcccaaaaagacgatgtccacgtctgtattttatgcctgcgcgcaatcatgaactaccagtacggctttaacttagtgatgagtcaccctcatgctgtgaacgagattgcactaagtcttaataataagaatccccgcactaaggctttggtgcttgaacttctggccgcagtgtgcttagtcaggggcggccacgaaatcatcttggctgctttcgacaacttcaaagaggtctgcaaggagctgcaccggttcgagaaactgatggaatacttccgtaacgaggattctaatatagattttatggtggcctgtatgcagtttattaacattgtggtgcacagcgtggaggacatgaactttagggtacacctgcagtacgagttcactaagttaggccttgaggagtttctgcagaaatcccggcacacagaatctgagaagctgcaggtgcagatccaagcgtatttagataatgtctttgatgtaggagggctgctggaggatgcagagacgaaaaatgtggcgctcgaaaaagtagaagagctggaggagcatgtctctcacctgactgaaaagctcctagacttggaaaacgaaaatatgatgagagtggctgagttggaaaaacagttactgcaacgtgagaaggaattggaaagcattaaagagacttatgagaacacgagtcaccaagtgcacactttacgcagactgatcaaggagaaggaggaggccttccaaaggaggtgtcatctagaacctaacgtgcgaggcctggaatccgtggacagcgaggcccttgcccgcgttggccctgcagagctgagcgaaggtatgcctcctagtgacctcgacctgctggcgccagctccaccgcctgaggaagtgcttcccctgccaccaccacccgccccccccctcccaccaccccccccacccctcccagataagtgtccccctgccccccccctgcccggtgctgctccatctgtggtacttacagtgggcctgtcagctataagaatcaaaaaacccataaaaactaaatttcggttacccgtatttaactggaccgccctcaaacccaatcagatctctggcaccgtgttcagtgagctcgatgatgagaaaattcttgaagatctggatctagataaattcgaggagctgttcaagacaaaggcacagggccctgctctggacctcatatgtagcaaaaataaaactgcccagaaggccgccagcaaggtgacactccttgaagctaatcgggcaaaaaacctggcaataactctgaggaaggctggccgaagcgcagaggaaatctgcagagctattcatacttttgatctgcaaaccttgcccgtagatttcgtggaatgccttatgaggttcttgcccactgaagctgaggtgaagctgcttaggcagtatgaaagagaacggcagcctcttgaagaactcgcagcggaagacagatttatgctgctgttctcaaaggtggagagattgactcaacgaatggccggcatggcttttcttggaaattttcaagacaaccttcagatgctcaccccacagctgaatgccatcatagcagcctccgctagcgttaagagtagtcagaaattgaagcaaatgctggagataatcctcgcccttggaaactacatgaattcctccaagcggggagctgtctatgggttcaagctgcagtcactagatcttctgttggacacgaagtccacggaccgcaaaatgacgctcctgcacttcatcgcactcacagtcaaggagaagtatccggatttggccaacttctggcacgaattgcactttgtggaaaaagccgccgctgtgtctctggagaatgtcctgttggacgtcaaggagctgggtcgcgggatggagttgattaggcgagagtgtagcatccatgacaatagcgtgcttagaaacttcctctctactaacgaagggaagctcgataagctccaacgcgatgccaagacggctgaggaagcctataacgctgttgtgagatatttcggagagtctcctaaaacaactcccccatccgtcttcttcccagtgtttgtaaggtttattaggtcctacaaggaggccgagcaggagaatgaggccagaaaaaaacaagaggaagtcatgcgtgagaaacagctggcccaagaagctaagaaactagacgccaaaacgcccagtcaacggaacaaatggcagcagcaggaactcattgccgaactgcggagacggcaagcaaaggagcaccgccctgtgtacgagggaaaagatggtacaatagaagatattataaccggcctccactgtcaaccaatggtggtgagacaccaagcacggagcgccgcacccccctccgggccacctcgggccccaggcccccattag

SEQ ID NO: 260621 - DNA, 2931 bp, Artificial Sequence
  derived and/or modified sequence
atggggaatctggagagtgccgagggggtacctggtgaacctcctagcgtgcctctccttctgcctccgggaaagatgcccatgccagaaccgtgtgaactggaagaacgatttgctctggtgttgtcctccatgaatctacctccggacaaggctaggcttcttagacagtacgacaacgagaaaaagtgggacttgatttgcgaccaggaacggttccaggttaagaacccaccacacacttatatccagaagctccagtctttcctggacccgtccgtgactaggaaaaaatttaggaggagagtgcaggaatcgaccaaggtgctccgggaattggagatctcactcagaactaaccatatcggatgggtgagggagtttctcaacgacgagaataaaggcctggatgtcttagtggattatctgtcctttgcccagtgctctgtcatgtatagcactctgcccggaaggagagcactcaagaacagccgcttggtgtctcaaaaggatgatgtacacgtttgtatcctgtgtctcagggcaattatgaattaccagtacggcttcaacctggtgatgagtcatccgcatgcagtaaatgagattgccctgtcgctgaacaataaaaacccccgtactaaagcattggtgttagagctgttagccgcagtgtgtctggtacgaggcggacacgaaatcatcctggcggctttcgataattttaaggaagtttgcaaagagctacatcgttttgagaagctcatggagtatttccgcaatgaagactccaatatcgattttatggtggcttgcatgcagttcattaacattgtcgtccactcggttgaggacatgaattttcgggtgcacctgcaatatgagttcacaaagttaggacttgaagaattcttgcagaaaagccggcacactgagtctgagaagttacaggtgcagattcaagcctacctggataacgtttttgacgtcggaggcttgttagaagacgccgagacaaagaacgtggccctggagaaggtggaagagctcgaggaacatgtgagccatctgacagagaagctgcttgaccttgagaatgaaaacatgatgcgagtagctgaactcgaaaaacagctattgcagagagaaaaggagttggagtccattaaggagacgtatgagaacacctcccaccaggtgcacaccctaaggaggctaataaaggaaaaggaggaggccttccagcgcaggtgccatcttgagcccaatgttcgaggcctcgagtctgtcgacagcgaagcactcgctcgagtgggtcccgctgagctgtccgagggtatgccgccaagtgaccttgacttgctcgctcccgctcccccaccagaagaggtcttgccactcccaccgcctcctgcacccccactgcctccccctccccctcccctccctgacaaatgtcctccagcacctcccctgccaggagcggctccctctgtggtgctcacggtgggactctctgcaatacgcatcaagaagccaatcaaaactaaatttaggttgcctgtcttcaattggaccgccttaaagcccaaccagattagcggtactgtcttttccgaacttgatgatgagaagatcctggaggacctggatctcgataaatttgaagaactgttcaaaacaaaggcgcaaggccctgcgctcgacttgatttgctccaagaataagactgcgcaaaaagctgcttcaaaggtgactctgctggaggcaaatcgcgctaaaaatctggccataactttacgcaaagcaggccgaagtgccgaggagatatgccgtgcgatccacacattcgacttgcagactctcccagtggatttcgtcgagtgtctcatgagatttctgccaacggaagccgaggttaagcttcttcgccaatatgaacgggagcgccaaccactggaagagctggcggctgaggatagattcatgctgcttttttcgaaggttgagcgcctaactcagaggatggctggcatggcctttctgggtaatttccaggataacctgcagatgctaacgccacaactgaatgccatcatagctgcgagtgcaagtgttaaatcaagtcaaaagttgaagcagatgctggaaattatacttgccctcggaaattatatgaactccagtaagcggggagcggtgtatggtttcaaactgcagagcttggacctgctgctggatacaaagagcacagaccgcaagatgaccctcctgcatttcatcgccctgaccgtcaaggaaaagtatccggacctggcgaatttttggcacgagcttcattttgtggagaaagcagccgctgtctcattagagaacgtcctgctcgatgtcaaggagctggggagggggatggagcttattcgcagagagtgtagtatacatgacaatagcgtactgagaaacttcctttctacaaacgaaggaaagcttgacaagctgcagcgagacgcaaaaacagcggaagaggcttacaacgccgtggtgaggtactttggcgagtctcccaagaccacaccaccatccgtgttcttccctgtgttcgtgagatttatacgctcctacaaagaagcagaacaggagaatgaagcccgtaagaagcaggaggaagtaatgcgggagaagcaactcgctcaggaggcgaaaaaactggatgcgaaaactcctagtcaacgcaataagtggcagcagcaagagctgatcgccgaactccggaggcgacaagcgaaagaacacagaccagtatacgaaggtaaggatggcacgatcgaagacatcatcacaggcctacactgtcaaccaatggttgtccgccaccaagccagatcagcagccccaccaagtggaccacctcgagccccaggcccacactag

SEQ ID NO: 260622 - protein, 183 aa, Artificial Sequence
  derived and/or modified sequence
MQYGGAPGGPAFPGQTQDPLYGYFAAVAGQDGQIDADELQRCLTQSGIAGGYKPFNLETCRLMVSMLDRDMSGTMGFNEFKELWAVLNGWRQHFISFDTDRSGTVDPQELQKALTTMGFRLSPQAVNSIAKRYSTNGKITFDDYIACCVKLRALTDSFRRRDTAQQGVVNFPYDDFIQCVMSV

SEQ ID NO: 260623 - DNA, 597 bp, Artificial Sequence
  derived and/or modified sequence
atggcctaccccggccaccccggcgccggcggcggctactaccccggcggctacggcggcgcccccggcggccccgccttccccggccagacccaggaccccctgtacggctacttcgccgccgtggccggccaggacggccagatcgacgccgacgagctgcagagatgcctgacccagagcggcatcgccggcggctacaagcccttcaacctggagacctgcagactgatggtgagcatgctggacagagacatgagcggcaccatgggcttcaacgagttcaaggagctgtgggccgtgctgaacggctggagacagcacttcatcagcttcgacaccgacagaagcggcaccgtggacccccaggagctgcagaaggccctgaccaccatgggcttcagactgagcccccaggccgtgaacagcatcgccaagagatacagcaccaacggcaagatcaccttcgacgactacatcgcctgctgcgtgaagctgagagccctgaccgacagcttcagaagaagagacaccgcccagcagggcgtggtgaacttcccctacgacgacttcatccagtgcgtgatgagcgtgtag

SEQ ID NO: 260624 - DNA, 552 bp, Artificial Sequence
  derived and/or modified sequence
atgcagtacggcggcgcccccggcggccccgccttccccggccagacccaggaccccctgtacggctacttcgccgccgtggccggccaggacggccagatcgacgccgacgagctgcagagatgcctgacccagagcggcatcgccggcggctacaagcccttcaacctggagacctgcagactgatggtgagcatgctggacagagacatgagcggcaccatgggcttcaacgagttcaaggagctgtgggccgtgctgaacggctggagacagcacttcatcagcttcgacaccgacagaagcggcaccgtggacccccaggagctgcagaaggccctgaccaccatgggcttcagactgagcccccaggccgtgaacagcatcgccaagagatacagcaccaacggcaagatcaccttcgacgactacatcgcctgctgcgtgaagctgagagccctgaccgacagcttcagaagaagagacaccgcccagcagggcgtggtgaacttcccctacgacgacttcatccagtgcgtgatgagcgtgtag

SEQ ID NO: 260625 - DNA, 597 bp, Artificial Sequence
  derived and/or modified sequence
atggcctacccagggcatcctggggcgggcggcgggtactaccccggaggctatgggggcgcgcccgggggccctgccttccctgggcaaacccaagacccgctttacggttactttgctgctgtcgccggccaggacggccaaattgacgcggatgagttgcagaggtgcctcacccaaagcggtattgccggtgggtataaaccattcaatctggaaacttgccggcttatggtctcaatgctagatcgggacatgagtggcactatgggcttcaatgagttcaaagagctctgggctgtcctgaacggctggcgacaacactttatctcctttgacactgatcggtccggtacggtcgatccccaggagctccaaaaggctttgacaaccatgggctttaggctgtcccctcaggccgtgaacagcattgcgaagcgctatagtacgaatggaaagataacctttgacgattacattgcctgctgcgtgaagctccgcgccctgactgactcatttcgcagacgcgataccgctcagcagggcgtggtaaacttcccatatgacgatttcattcagtgcgtaatgtctgtttag

SEQ ID NO: 260626 - DNA, 552 bp, Artificial Sequence
  derived and/or modified sequence
atgcagtacgggggcgccccgggagggcctgccttccctggccagacccaggaccccctctacggctactttgccgcagtagctggccaggacggccagatcgacgccgatgaattacaaagatgcttaacacaatctggtattgcaggggggtacaaaccctttaatttagaaacatgccgcctgatggtctcaatgttggacagggatatgtcaggcactatgggtttcaacgagttcaaggagttatgggccgtcctgaacggttggaggcagcactttatttcctttgacacagatcggtcagggacagtcgatccccaggagctacagaaggctctgactaccatgggttttcgcttatcacctcaagccgtgaacagtattgccaaaaggtattccaccaacgggaaaatcacctttgacgattatatagcctgttgcgtgaagctgcgcgcgctcactgattctttcagaagacgggacaccgcccaacagggcgtggtgaacttcccttatgatgattttatccagtgtgtgatgtctgtttag

SEQ ID NO: 260627 - DNA, 597 bp, Artificial Sequence
  derived and/or modified sequence
atggcctacccaggccaccctggagctgggggcggctactacccaggcggctacggcggggcccctgggggccctgccttccctggccagacccaggaccccctgtatggctactttgctgctgtggccggccaggacggccagattgatgctgatgagctgcagcgctgcctgacccagagcggcattgctgggggctacaagcccttcaacctggagacctgccgcctgatggtgtccatgctggaccgggacatgagcggcaccatgggcttcaatgagttcaaggagctgtgggccgtgctgaatggctggaggcagcacttcatcagctttgacacagacagaagtggcaccgtggacccccaggagctgcagaaggccctgaccaccatgggcttccggctgagcccccaggccgtgaacagcatcgccaagcgctacagcaccaacgggaagatcacctttgatgactacatcgcctgctgcgtgaagctgcgggccctgacagacagcttcagaagaagagacacagcccagcagggcgtggtgaacttcccctatgatgacttcatccagtgtgtgatgtctgtgtag

SEQ ID NO: 260628 - DNA, 552 bp, Artificial Sequence
  derived and/or modified sequence
atgcagtatggaggagcccctgggggccctgccttccctggccagacccaggaccccctgtatggctactttgctgctgtggccggccaggacggccagattgatgctgatgagctgcagcgctgcctgacccagagcggcattgctgggggctacaagcccttcaacctggagacctgccgcctgatggtgtccatgctggaccgggacatgagcggcaccatgggcttcaatgagttcaaggagctgtgggccgtgctgaatggctggaggcagcacttcatcagctttgacacagacaggagcggcaccgtggacccccaggagctgcagaaggccctgaccaccatgggcttccggctgagcccccaggccgtgaacagcatcgccaagcgctacagcaccaacgggaagatcacctttgatgactacatcgcctgctgcgtgaagctgcgggccctgacagacagcttcagaagaagagacacagcccagcagggcgtggtgaacttcccctatgatgacttcatccagtgtgtgatgtctgtgtag

SEQ ID NO: 260629 - DNA, 597 bp, Artificial Sequence
  derived and/or modified sequence
atggcctaccccggccaccccggcgccggcggcggctactaccccggtggctatggcggagcgccgggaggccccgcctttcccggtcaaacgcaggaccccctttacgggtacttcgctgccgttgcaggccaagacgggcagatcgacgccgatgagcttcaacgatgccttactcagtccggcatagcaggcggttataaaccattcaatcttgagacctgcagacttatggtgagtatgttagaccgggacatgtctggcacaatggggttcaatgaattcaaagagctttgggccgttctcaatggctggcgacagcacttcatcagctttgatactgataggtctggcacagtggacccccaggaactgcagaaggcacttaccactatgggttttagattatccccacaagctgtgaatagtatcgcgaagcgttactctacaaatggtaaaatcacctttgatgactatatcgcatgttgcgtaaaactgcgcgctctcaccgatagcttcaggcggcgggatacagcccagcagggggtagtgaactttccctatgacgacttcatacagtgcgtgatgtcggtctag

SEQ ID NO: 260630 - DNA, 552 bp, Artificial Sequence
  derived and/or modified sequence
atgcagtacggcggcgcccccggcggccccgccttccccggccagactcaggaccccttgtacggctatttcgctgccgttgcgggccaggatggtcagatcgacgccgatgagctccaacgctgcctgacccaatccggtattgccgggggctacaaacctttcaacctggagacatgcaggctgatggtcagcatgctagatcgtgatatgagtggaaccatgggctttaacgaatttaaagagctgtgggcagttctaaatggttggcgccaacatttcatttcctttgatacagaccggtcagggacagtcgaccctcaggaactgcaaaaggcactgaccacaatgggttttagactctccccacaagcagtgaacagcattgctaagagatacagcaccaatggaaaaattactttcgacgactacattgcgtgctgcgtcaagttgagggcactaacagacagctttcgacgccgggatacggcacagcagggcgtggtgaactttccttacgatgactttatccaatgcgtgatgagtgtctag

SEQ ID NO: 260631 - DNA, 597 bp, Artificial Sequence
  derived and/or modified sequence
atggcttatcctggccatcccggtgctggagggggttactatccaggaggatacgggggtgcccctgggggaccagcctttcccggacagacccaggacccactctacggctatttcgcagcagtggctggccaggatgggcagatagatgccgacgaactgcagagatgcctgactcagtcgggtattgccggagggtacaagccttttaatcttgagacatgtagattgatggtgtccatgctggaccgagatatgagtggaaccatggggtttaacgagttcaaggaactctgggccgtgctgaacggctggcggcagcacttcattagtttcgatactgaccggagtggcaccgtggacccgcaggagctacagaaagctctgactacaatgggttttaggctgtctccccaggcggtaaattcgattgcaaagcgatacagcaccaacggaaaaatcacgttcgacgattatatcgcctgttgtgttaaactgcgcgctctaacagatagctttcggcgacgcgatactgcacagcagggtgtcgtgaacttcccatacgacgatttcattcaatgcgttatgagcgtgtag

SEQ ID NO: 260632 - DNA, 552 bp, Artificial Sequence
  derived and/or modified sequence
atgcagtatggcggtgcccctggtggtcctgccttccctggtcagacacaggatcctctgtacggatatttcgcagctgtggccggacaggatggccagatagacgccgacgagctgcagaggtgcttgactcagagcggcatcgcgggaggctataaacctttcaatttagagacttgtcgtttgatggtgtctatgctggatcgcgatatgagcggcaccatgggcttcaatgagtttaaggaactgtgggcagttctaaatgggtggcggcagcacttcataagctttgataccgataggtcaggcaccgttgatcctcaggagctgcagaaagccctgaccacgatggggttccgtctctctccccaagcagtgaactccatcgccaaaaggtattccacgaatggcaaaattaccttcgatgactacatcgcatgttgcgtcaagctacgagccctgaccgatagtttcaggcgacgcgatactgctcaacagggtgtagtgaatttcccatacgatgactttatacaatgtgtgatgtccgtgtag

SEQ ID NO: 260633 - DNA, 2010 bp, Artificial Sequence
  derived and/or modified sequence
gggcggagaggcctggcgcacagggcgagggcggctgcggcgcagtctgcagcatggcgtacccggggcatcctggcgccggcggcgggtactacccaggcgggtatggaggggctcccggagggcctgcgtttcccggacaaactcaggatccgctgtatggttactttgctgctgtagctggacaggatgggcagatagatgctgatgaattgcagagatgtctgacacagtctggcattgctggaggatacaaaccttttaacctggagacttgccggcttatggtttcaatgctggatagagatatgtctggcacaatgggtttcaatgaatttaaagaactctgggctgtactgaatggctggagacaacactttatcagttttgacactgacaggagtggaacagtagacccacaagaattgcagaaggccctgacaacaatgggatttaggttgagtccccaggctgtgaattcaattgcaaaacgatacagcaccaatggaaagatcaccttcgacgactacatcgcctgctgcgtcaaactgagggctcttacagacagctttcgaagacgggatactgctcagcaaggtgttgtgaatttcccatatgatgatttcattcaatgtgtcatgagtgtttaaatcaagaggaagctgcatgaatgtaatcaacattccaactggagctctcctttgcttgtcctctttgccttcggtaatatgtataaacttacatcacgactttctcttaacagctgttgtaaagtttattactttatgtacaactgaagttttgttttagttttgataataaattctttggaactttaataagatctagtctgttacaccatttagaactttcctgagccattatcagtcatgccttattttcttgctaaaactctatgtaaatttaagtatgcaaaatgtttaagtcacattatttatttttcattgtgagacactaaaaactgttaatcagactacagctgttatctttcctctcctacaaagaatactccacacataaaaacttaggtaaatgacatagacgcacttgggtgaaataaaacaacaaaaaaggtaatccagtaatccacgtcaggattcaccttagaagtttagcacacgcccttcaaaacctgttgaataatttgattggcaaatactatctgtcaccaagtccctttttgtcatctatttaaacctttgttaactctccttaaaaatcttgtacattataagcttaactatataaaaagaaaattgatagaaaaagactaagggaatatatggaaatattaacaatgtttattttggatgaatggaattctagatgactttaattttctttatatcagtatttttcagattttctatatgctttccttttaaaatcagattttagtttttaaaatactgatacatccattttgatataccatgtattcacactttaaaaaatacacatagcagagtatcggaaagtatgtaccaaaacattgatctggctaccactgggagtcaggatcatgagttcatcttcttccttcttactgcttttccaaacattctccagtaagcaggtactacatttataatggaaggaattttttaaaaaattttaagctgtacactttcaagtaagatctgaattctaatgctggcttgtgcctcttactatgtggtttggtcattatagataatgcccagtttcagtttccccatctttgaaaaggagataatatgttatctcttgggagtagttctgaatatgaagtgtgttgatacaagaagcactgacaatgtttctgtttcttaaatttaaaactggcctggtttgccttttttatcaagagagcttaacagataaaaaatgaaattagtctattttctacttgccagcagagtatctgtcttattttaggatgcagtgtgaaacttaccattcaactgaacaactagttgtcaactaatgaaaataaaacattttctctaa

SEQ ID NO: 260634 - DNA, 653 bp, Artificial Sequence
  derived and/or modified sequence
gattcttctatttggccactctgcaagaaggcaatcctctaaggatcaccagcttctacctataagacttcaactcaagatgcagtatggaggggctcccggagggcctgcgtttcccggacaaactcaggatccgctgtatggttactttgctgctgtagctggacaggatgggcagatagatgctgatgaattgcagagatgtctgacacagtctggcattgctggaggatacaaaccttttaacctggagacttgccggcttatggtttcaatgctggatagagatatgtctggcacaatgggtttcaatgaatttaaagaactctgggctgtactgaatggctggagacaacactttatcagttttgacactgacaggagtggaacagtagacccacaagaattgcagaaggccctgacaacaatgggatttaggttgagtccccaggctgtgaattcaattgcaaaacgatacagcaccaatggaaagatcaccttcgacgactacatcgcctgctgcgtcaaactgagggctcttacagacagctttcgaagacgggatactgctcagcaaggtgttgtgaatttcccatatgatgatttcattcaatgtgtcatgagtgtttaaatcaagaggaagctgcatgaat

SEQ ID NO: 260635 - protein, 515 aa, Artificial Sequence
  derived and/or modified sequence
MSSPNIWSTGSSVYSTPVFSQKMTVWILLLLSLYPGFTSQKSDDDYEDYASNKTWVLTPKVPEGDVTVILNNLLEGYDNKLRPDIGVKPTLIHTDMYVNSIGPVNAINMEYTIDIFFAQTWYDRRLKFNSTIKVLRLNSNMVGKIWIPDTFFRNSKKADAHWITTPNRMLRIWNDGRVLYTLRLTIDAECQLQLHNFPMDEHSCPLEFSSWSRSIAQAGMCSGVISAHYSLRFWGSTDPPTLASRVAGISDGYPREEIVYQWKRSSVEVGDTRSWRLYQFSFVGLRNTTEVVKTTSGDYVVMSVYFDLSRRMGYFTIQTYIPCTLIVVLSWVSFWINKDAVPARTSLGITTVLTMTTLSTIARKSLPKVSYVTAMDLFVSVCFIFVFSALVEYGTLHYFVSNRKPSKDKDKKKKNPLLRMFSFKAPTIDIRPRSATIQMNNATHLQERDEEYGYECLDGKDCASFFCCFEDCRTGAWRHGRIHIRIAKMDSYARIFFPTAFCLFNLVYWVSYLYL

SEQ ID NO: 260636 - DNA, 3927 bp, Artificial Sequence
  derived and/or modified sequence
cagagtgacgctttgatggtatctgcaagcgtttttgctgatcttatctctgccccctgaatattaattccctaatctggtagcaatccatctccccagtgaaggacctactagaggcaggtggggggagccaccatcagatcataagcataagaataatacaaaggggagggattcttctgcaaccaagaggcaagaggcgagagaaggaaaaaaaaaaaagcgatgagttcgccaaatatatggagcacaggaagctcagtctactcgactcctgtattttcacagaaaatgacggtgtggattctgctcctgctgtcgctctaccctggcttcactagccagaaatctgatgatgactatgaagattatgcttctaacaaaacatgggtcttgactccaaaagttcctgagggtgatgtcactgtcatcttaaacaacctgctggaaggatatgacaataaacttcggcctgatataggagtgaagccaacgttaattcacacagacatgtatgtgaatagcattggtccagtgaacgctatcaatatggaatacactattgatatattttttgcgcaaacgtggtatgacagacgtttgaaatttaacagcaccattaaagtcctccgattgaacagcaacatggtggggaaaatctggattccagacactttcttcagaaattccaaaaaagctgatgcacactggatcaccacccccaacaggatgctgagaatttggaatgatggtcgagtgctctacaccctaaggttgacaattgatgctgagtgccaattacaattgcacaactttccaatggatgaacactcctgccccttggagttctccagttggtctcgttctattgcccaggctggaatgtgcagtggtgtgatctcggctcactacagccttcgcttctggggctcaactgatcctcccaccttggcctccagagtagctgggatttcagatggctatccacgtgaagaaattgtttatcaatggaagcgaagttctgttgaagtgggcgacacaagatcctggaggctttatcaattctcatttgttggtctaagaaataccaccgaagtagtgaagacaacttccggagattatgtggtcatgtctgtctactttgatctgagcagaagaatgggatactttaccatccagacctatatcccctgcacactcattgtcgtcctatcctgggtgtctttctggatcaataaggatgctgttccagccagaacatctttaggtatcaccactgtcctgacaatgaccaccctcagcaccattgcccggaaatcgctccccaaggtctcctatgtcacagcgatggatctctttgtatctgtttgtttcatctttgtcttctctgctctggtggagtatggcaccttgcattattttgtcagcaaccggaaaccaagcaaggacaaagataaaaagaagaaaaaccctcttcttcggatgttttccttcaaggcccctaccattgatatccgcccaagatcagcaaccattcaaatgaataatgctacacaccttcaagagagagatgaagagtacggctatgagtgtctggacggcaaggactgtgccagttttttctgctgttttgaagattgtcgaacaggagcttggagacatgggaggatacatatccgcattgccaaaatggactcctatgctcggatcttcttccccactgccttctgcctgtttaatctggtctattgggtctcctacctctacctgtgaggaggtatgggttttactgatatggttcttattcactgagtctcatggagagatgtctgttctaagtccacttaaataatcctctatgtggttgataatgatctgaatctgtttctatgtccaaacctggtaaattttataatgtcatattgtttgtgcccagccctcctttggttagtgtactttgaacttcgatgtttgctgtgtttcaaacctgcaaggcaaagtaaaattagagcaagaacattcaaaccaaataagatatttttcagctacagcaaataaaacagtgaaagccctgactatttacagtagtggtatccttactagattcataatgcaattagatagaaaaggtccaaaactgtaccctatgttcactccgggtcaagttgtgataaatttgatcccaatagaatacctccctcatttaagaaaaatcataactcactttaaatatgaaagcctagtccagaaatctattacacctttatctcaagataggaagaaaatttcctccacattcatgtacaatgatgtaaatatttcaataacttagaatgcttcaagtttagtgcatgcatctctttagatccaaaataaatggactgaagttatcatcctattgtcttttattttgtgtccttgggctataaaagattcctgaatgtaattataaggatttgggtttggaaatggagggaggaattttcattgccttctccctcatgcatgaagattcgaacagcttattttttccttgtatgacatattacaacactttaagtaaaatatagactggataatcaacatttgccacctctaaatatgcccaatttcataactagagtataaagtaattgtatgtgcttgccgctatttttttcttccttttaggatgatagatcataacagaacttattctccatctcaagatctgcttctagtgattgtgagtgccttgtgggcagaatccttgtcatttcctctttgggtctgtagcaccttgcatagtgcctggcatatagttggtgctcaataaatatggtttgaagtgaattgccctcacatgcttctggcaaatctctgtgctggcctgaaaccagtgactcatcttctcacataggtgttgtcaagtgatatttgattttgtaaaaataaccagtaggatccaaagaactttagctatttatgttcatcttcaaaaaattattttaggcaaagtccatactccttttaaaacaatatttatgtcctatgtttgtgtatagacatgactctactagggcataattagagtttgtgtattatttttccaggtttggggatgagtcagtccttgcccatccacaattttgtttgtgaacttataacaggaataagcaaaattcatacctgactagtgttcagaatgtagcattctgtgcgaaaaagtattgaagattagcttttaaaaactgaaaaaaaaaaatgaatgactcacatagaggttgagccaatgactgtggcctcattagattacattgtagttaaacaaagcaatttctccagacttaaaacatgatgagttgagctctatcttcatgtactcatcctgaatccttatttttctaaaatagcaccctttgttaattatttttatggaaattattactctgtcataattaaatcatagctagtataactttacagataacctaaaaagaatagaaaagaagagagagtggctttgtcagtataaaaccatgtaaagtcatcatcaagtcatctggatgaatcttgaaacacatttagctgccagttttacaaacctttaatatatcagtgctccagtatataacctcaaacaaatgtaaatagaacgaattattttcttgttttgaattgtcaatatattaaatgttgactctttgggagagttgttggcaagtttcaatggtgagaaacattattgtcaacttgaaatgtgttctgtaatggggacactacaaaaagctagctttccaatgtgtgcatagtattggcaatatgaatatatattatatataatctaatacttattataagctgctccctgtctatgtatttggaaaccttttcacaaagggaattgcctaacatgtggacttttacaataaaaatgctgcattctaa

SEQ ID NO: 260637 - DNA, 1548 bp, Artificial Sequence
  derived and/or modified sequence
atgtcatctccaaacatttggtcgacaggatcttcagtgtactctacccctgtgttcagccagaagatgaccgtgtggatccttctcctgctctctctatatcctggcttcacttctcagaaatccgacgatgattacgaagactacgcgtcgaataaaacctgggtactcacacccaaagtcccagaaggagacgtcactgtgatcttaaataacctgcttgagggatatgataacaaactgcgtccagatatcggagtgaagcccaccctcatacataccgatatgtatgtcaactccatcggcccagtcaatgcaataaacatggagtatactattgatatattttttgcgcagacctggtatgaccgtcgattgaaattcaatagcacaatcaaggttcttcgcttaaactcgaatatggttggaaaaatctggataccagacaccttcttccggaactctaaaaaggctgacgcgcattggatcacaactcctaacaggatgcttaggatttggaatgacggaagggttctgtatacactcaggctgacgattgatgccgagtgccaattgcaactgcacaattttccaatggacgagcactcttgccctttggaattctccagttggtctcggagtattgcccaggccggcatgtgttctggagtcatttcagcccactactcgcttcgcttttggggttcaacggatcctcctacactcgcatcccgtgtggccggcataagcgacggatacccccgggaagaaattgtttatcagtggaaacgttcatcagttgaggtgggcgatactagatcctggcgcctgtaccagttctcgtttgtcggtttaaggaacacgactgaagtcgtgaagacgacatccggagactatgtcgtgatgtctgtatattttgacctcagccggcgcatgggatacttcaccattcaaacctacataccatgtaccttaatcgtcgtgcttagctgggtctcattttggataaataaagatgcggtgcccgcgcgcaccagccttgggatcaccacagttcttactatgactaccttgtccaccatcgctcgcaagtctttgccaaaggtttcctacgtgacggcaatggacctcttcgtgagcgtgtgttttatttttgtgttttcagccctggtggagtatggtactctgcactatttcgtgtcaaataggaaaccaagtaaggacaaggataagaagaagaagaaccctcttctccggatgttctcctttaaagccccaaccatcgatattagaccccggtcagccacaatacaaatgaataatgccacacacctacaggagagggacgaggagtatggttatgagtgcctggacggaaaggactgcgcgtcctttttctgctgtttcgaggactgtagaactggtgcctggcgtcacggacggatccatatccggatcgctaaaatggactcttacgctaggatattctttccgacagcattctgtttattcaatttagtatattgggttagttacttatatctgtag

SEQ ID NO: 260638 - DNA, 1548 bp, Artificial Sequence
  derived and/or modified sequence
atgagcagccccaacatctggagcacaggcagctctgtgtacagcacccctgtgttcagccagaagatgacagtgtggatcctgctgctgctgagcctgtacccaggcttcaccagccagaagagtgatgatgattatgaagattatgccagcaacaagacctgggtgctgacccccaaggtgcctgaaggagatgtgaccgtcatcctgaacaacctgctggagggctatgacaacaagctgcggccagacattggagtgaagcccaccctcatccacacagacatgtatgtgaacagcatcggccctgtgaatgccatcaacatggagtacaccatcgacatcttctttgcccagacctggtatgaccggcggctgaagttcaacagcaccatcaaggtgctgcggctgaacagcaacatggtgggcaagatctggatcccagacaccttcttcaggaacagcaagaaggcagatgcccactggatcaccacccccaacaggatgctgcgcatctggaatgatggccgggtgctgtacaccctgcggctgaccattgatgctgagtgccagctgcagctgcacaacttccccatggatgagcacagctgccccctggagttcagctcctggagccgcagcatcgcccaggccggcatgtgcagcggggtcatcagcgcccactacagcctgcgcttctggggcagcacagatcctcccaccctggccagccgggtggccggcatcagtgatggctacccccgggaggagatcgtgtaccagtggaagaggagctctgtggaggtgggggacaccaggtcctggaggctgtaccagttctcctttgtgggcctgaggaacaccacagaggtggtgaagaccaccagcggggactatgtggtgatgtctgtgtactttgacctgagcaggaggatgggctacttcaccatccagacctacatcccctgcaccctcatcgtggtgctgtcctgggtgtccttctggatcaacaaggatgctgtgcctgcccggaccagcctgggcatcaccaccgtgctgaccatgaccaccctgagcaccatcgccaggaagagcctgcccaaggtgtcctatgtgacagccatggacctgtttgtgtctgtgtgcttcatctttgtgttcagcgccctggtggagtatggcaccctgcactactttgtgagcaacaggaagcccagcaaggacaaggacaagaagaagaagaaccccctgctgaggatgttctccttcaaggcccccaccatcgacatccggcccaggtctgccaccatccagatgaacaatgccacccacctgcaggagagagatgaggagtatggctatgaatgtctggatggcaaggactgtgccagcttcttctgctgctttgaggactgcaggactggagcctggaggcatggccgcatccacatccgcatcgccaagatggacagctatgcccgcatcttcttccccacagccttctgcctcttcaacctggtgtactgggtgtcctacctgtacctgtag

SEQ ID NO: 260639 - DNA, 1548 bp, Artificial Sequence
  derived and/or modified sequence
atgagcagccccaacatctggagcaccggcagcagcgtgtacagcactccagtttttagccagaagatgacagtatggattttactccttttgtccctgtacccaggatttacttcacagaaatctgacgatgattatgaggattacgcgtctaacaagacatgggtgctgacacccaaagttccggagggcgatgtgaccgtgatccttaataacctgttagaggggtatgacaataaattaagacctgacatcggggttaaacctacactcatccacacagacatgtacgtcaacagtattggcccggtgaacgccatcaatatggagtacacaattgacatcttcttcgcccaaacctggtacgatagaaggctaaagttcaatagcaccatcaaagtattgcgccttaattctaatatggttggtaagatttggattcccgacaccttcttccgcaattcaaagaaggccgatgcacattggatcaccaccccgaatcgtatgctccgtatctggaacgacgggagggttctatatacgctgcgactcacgatcgacgcggaatgtcagctccagttgcataacttccccatggatgagcactcctgtccgctggagttctcatcatggtcccggtcaatcgcccaggcaggaatgtgtagcggcgtaatcagtgctcactacagtctgcgcttttggggctcgaccgatccacccactctggctagccgtgtggccggcatatccgacggctatccacgcgaggaaatcgtgtaccaatggaaacgttccagcgttgaggtcggcgacaccagatcttggaggctgtaccaattcagtttcgtggggctaagaaatacaaccgaagttgtcaagactacgtcaggtgattacgtagtgatgtctgtgtatttcgatctctcaagaaggatgggttacttcacaattcaaacttatattccctgcaccctgatagtcgtcctatcttgggtgtccttttggataaacaaagacgccgtccccgcccgtacctctttggggattactaccgttctcaccatgaccacgctgtctacgattgccagaaaatctcttcctaaggtgtcttacgtgaccgcaatggacctctttgtctccgtctgcttcatctttgttttctctgccttggtggagtacggaaccctacattatttcgtgtctaataggaagccctctaaggataaagacaaaaaaaaaaagaatccactccttcggatgttctcattcaaggctccaacaatcgacatcaggcctcgctccgccaccattcaaatgaacaatgcaacgcatctccaggaacgggacgaggagtatggatatgagtgccttgacggaaaagactgtgcctcgtttttttgttgcttcgaagattgccggacgggcgcatggcggcacggaaggatccatatcaggatcgctaagatggactcctatgcaagaattttttttccgactgcgttttgtttgtttaacttagtctattgggtgagttacctgtatctatag

SEQ ID NO: 260640 - DNA, 1548 bp, Artificial Sequence
  derived and/or modified sequence
atgtcatcgccaaatatatggagtaccggaagtagtgtgtattccacgcctgtcttcagccagaagatgacagtttggattctcctgttattgtccctgtaccccggatttacatcacagaagtcagacgacgactacgaggactacgcctcaaacaaaacctgggtcctcacccccaaagttccagaaggggacgttaccgtaattttgaacaatcttctggaggggtatgacaacaagctgaggcccgacatcggagtgaagcccaccctgatacataccgatatgtacgtcaattccatcggccctgttaatgcaattaacatggagtacacaattgacatcttttttgctcagacctggtacgacagacgcctcaagttcaactcgactattaaagtcctgaggctgaattccaacatggtcggcaagatttggattccagatacttttttcagaaattcgaagaaggctgatgctcactggattacaacacccaacaggatgttgcggatctggaatgacggccgtgtgctgtacacgctgcggctcacaattgacgctgagtgtcagctgcagctgcataatttccctatggacgaacattcatgtcccttggagttttcaagttggtcgcgttctattgcacaggcaggaatgtgttccggggtgatttcagcccactactcgctgcgattctgggggtccactgaccctcccacattggcctctcgtgtggcaggaatctccgacggatacccaagagaagagattgtctaccaatggaagcgctcgtctgtcgaggtgggggatacacgttcctggaggctgtaccagttttccttcgtcggactaagaaacaccaccgaggtggtgaaaacaacctctggcgattatgtggtcatgtccgtgtatttcgacctgtcacgccgtatggggtacttcacgattcagacctatattccttgcacgctcatagtggtcctgagctgggtgagtttctggatcaacaaggacgccgtgcccgctcgcactagcctgggcattactaccgtattgacaatgaccacactctctaccattgcacggaaatcactgcctaaggtcagttatgtgaccgccatggacttgttcgtaagtgtgtgttttatttttgtgttctctgcattggtcgaatacggaaccttgcattacttcgtctctaatcgtaagcccagcaaggataaagataagaaaaagaagaaccctttgttacggatgttttcctttaaagctcctactatagacatcaggccgcgaagcgcgacgatccagatgaacaatgccactcacctccaggagcgagatgaagaatacgggtatgaatgtctggacggaaaggattgtgcaagcttcttctgttgtttcgaggactgcaggaccggcgcttggagacacgggagaatccacatccgaatagcaaaaatggattcgtacgctaggatctttttcccaaccgccttttgcctgttcaatctggtgtattgggtgtcttatctctacttatag

SEQ ID NO: 260641 - DNA, 1548 bp, Artificial Sequence
  derived and/or modified sequence
atgagcagccccaacatctggagcaccggcagcagcgtgtacagcacccccgtgttcagccagaagatgaccgtgtggatcctgctgctgctgagcctgtaccccggcttcaccagccagaagagcgacgacgactacgaggactacgccagcaacaagacctgggtgctgacccccaaggtgcccgagggcgacgtgaccgtgatcctgaacaacctgctggagggctacgacaacaagctgagacccgacatcggcgtgaagcccaccctgatccacaccgacatgtacgtgaacagcatcggccccgtgaacgccatcaacatggagtacaccatcgacatcttcttcgcccagacctggtacgacagaagactgaagttcaacagcaccatcaaggtgctgagactgaacagcaacatggtgggcaagatctggatccccgacaccttcttcagaaacagcaagaaggccgacgcccactggatcaccacccccaacagaatgctgagaatctggaacgacggcagagtgctgtacaccctgagactgaccatcgacgccgagtgccagctgcagctgcacaacttccccatggacgagcacagctgccccctggagttcagcagctggagcagaagcatcgcccaggccggcatgtgcagcggcgtgatcagcgcccactacagcctgagattctggggcagcaccgacccccccaccctggccagcagagtggccggcatcagcgacggctaccccagagaggagatcgtgtaccagtggaagagaagcagcgtggaggtgggcgacaccagaagctggagactgtaccagttcagcttcgtgggcctgagaaacaccaccgaggtggtgaagaccaccagcggcgactacgtggtgatgagcgtgtacttcgacctgagcagaagaatgggctacttcaccatccagacctacatcccctgcaccctgatcgtggtgctgagctgggtgagcttctggatcaacaaggacgccgtgcccgccagaaccagcctgggcatcaccaccgtgctgaccatgaccaccctgagcaccatcgccagaaagagcctgcccaaggtgagctacgtgaccgccatggacctgttcgtgagcgtgtgcttcatcttcgtgttcagcgccctggtggagtacggcaccctgcactacttcgtgagcaacagaaagcccagcaaggacaaggacaagaagaagaagaaccccctgctgagaatgttcagcttcaaggcccccaccatcgacatcagacccagaagcgccaccatccagatgaacaacgccacccacctgcaggagagagacgaggagtacggctacgagtgcctggacggcaaggactgcgccagcttcttctgctgcttcgaggactgcagaaccggcgcctggagacacggcagaatccacatcagaatcgccaagatggacagctacgccagaatcttcttccccaccgccttctgcctgttcaacctggtgtactgggtgagctacctgtacctgtag

SEQ ID NO: 260642 - protein, 475 aa, Artificial Sequence
  derived and/or modified sequence
MSSPNIWSTGSSVYSTPVFSQKMTVWILLLLSLYPGFTSQKSDDDYEDYASNKTWVLTPKVPEGDVTVILNNLLEGYDNKLRPDIGVKPTLIHTDMYVNSIGPVNAINMEYTIDIFFAQTWYDRRLKFNSTIKVLRLNSNMVGKIWIPDTFFRNSKKADAHWITTPNRMLRIWNDGRVLYTLRLTIDAECQLQLHNFPMDEHSCPLEFSSYGYPREEIVYQWKRSSVEVGDTRSWRLYQFSFVGLRNTTEVVKTTSGDYVVMSVYFDLSRRMGYFTIQTYIPCTLIVVLSWVSFWINKDAVPARTSLGITTVLTMTTLSTIARKSLPKVSYVTAMDLFVSVCFIFVFSALVEYGTLHYFVSNRKPSKDKDKKKKNPLLRMFSFKAPTIDIRPRSATIQMNNATHLQERDEEYGYECLDGKDCASFFCCFEDCRTGAWRHGRIHIRIAKMDSYARIFFPTAFCLFNLVYWVSYLYL

SEQ ID NO: 260643 - DNA, 1428 bp, Artificial Sequence
  derived and/or modified sequence
atgtctagtccgaacatctggtcgaccgggagttctgtttattctacccccgtgttttctcagaagatgaccgtgtggatcctcttgttgctgagcctgtaccctggtttcacctctcaaaaatccgacgatgattacgaggactatgcatcaaacaaaacttgggtgctaacacccaaagtgccagagggggatgtcaccgtgatactgaacaatctgctggagggttatgataataagctgcggcctgatataggggtgaagccgacactaatacatacggacatgtacgtcaactccatcggcccagtgaacgccatcaacatggagtacaccatcgacatcttttttgcccagacctggtatgatcgccgccttaaatttaattctacaatcaaggtactcaggttgaacagcaatatggtgggcaaaatatggatcccggacacattcttcaggaatagcaagaaggcagacgcccactggattaccacccccaataggatgctacgcatttggaatgacggccgcgtcctctatacactgcggctgactatagatgctgagtgccaactgcaattgcacaattttcccatggatgagcatagctgcccactcgaatttagcagttacgggtaccctagggaagagatcgtctatcaatggaaaagaagcagtgtcgaagtcggcgacacaagatcttggaggctgtatcaattttcatttgtgggcctgcgaaatactaccgaggttgtcaagactaccagtggcgactacgttgtgatgtccgtgtacttcgacctgagccgacgcatgggatatttcacaattcagacctatataccttgcacactgatcgtggtcttgagctgggtcagtttctggatcaataaggacgccgtgcctgcccggaccagtctgggcataacaaccgtccttaccatgacaaccctatctacaattgccaggaaatccttaccaaaggtgtcctacgtgacagcaatggatttgtttgttagcgtgtgtttcatcttcgtgtttagcgcactagttgagtatgggactttgcactatttcgtctccaatagaaagccttctaaagataaagacaagaaaaagaagaatcctctgctacgcatgttcagtttcaaggcccctactatcgacatccgccccaggtctgctaccatccaaatgaataacgctacccacctgcaggagcgagatgaagaatatggctacgaatgtctggacgggaaggactgtgcttcttttttttgctgcttcgaagactgtcgcaccggagcctggagacacggtcgaatccatatcaggatagccaaaatggatagctacgcgaggatcttctttccaaccgcgttctgcctgtttaacctggtgtactgggtgagctacttgtatctgtag

SEQ ID NO: 260644 - DNA, 4056 bp, Artificial Sequence
  derived and/or modified sequence
attttaaatacacacacccacagggctctgccccctgtaaaagaaaaaaaatcaaaacaaacaaataaataaccccaaagagatggacccaggggagaacgcgtaagtgtgaggggcatgagtatacacgagtgtgcgtgtctttccctctcccttatttgtctccgtatgagtctctccttgtaccctccccctgcctcgatgatattactcccccagacttggaagccgctgccagagtgacgctttgatggtatctgcaagcgtttttgctgatcttatctctgccccctgaatattaattccctaatctggtagcaatccatctccccagtgaaggacctactagaggcaggtggggggagccaccatcagatcataagcataagaataatacaaaggggagggattcttctgcaaccaagaggcaagaggcgagagaaggaaaaaaaaaaaagcgatgagttcgccaaatatatggagcacaggaagctcagtctactcgactcctgtattttcacagaaaatgacggtgtggattctgctcctgctgtcgctctaccctggcttcactagccagaaatctgatgatgactatgaagattatgcttctaacaaaacatgggtcttgactccaaaagttcctgagggtgatgtcactgtcatcttaaacaacctgctggaaggatatgacaataaacttcggcctgatataggagtgaagccaacgttaattcacacagacatgtatgtgaatagcattggtccagtgaacgctatcaatatggaatacactattgatatattttttgcgcaaacgtggtatgacagacgtttgaaatttaacagcaccattaaagtcctccgattgaacagcaacatggtggggaaaatctggattccagacactttcttcagaaattccaaaaaagctgatgcacactggatcaccacccccaacaggatgctgagaatttggaatgatggtcgagtgctctacaccctaaggttgacaattgatgctgagtgccaattacaattgcacaactttccaatggatgaacactcctgccccttggagttctccagttatggctatccacgtgaagaaattgtttatcaatggaagcgaagttctgttgaagtgggcgacacaagatcctggaggctttatcaattctcatttgttggtctaagaaataccaccgaagtagtgaagacaacttccggagattatgtggtcatgtctgtctactttgatctgagcagaagaatgggatactttaccatccagacctatatcccctgcacactcattgtcgtcctatcctgggtgtctttctggatcaataaggatgctgttccagccagaacatctttaggtatcaccactgtcctgacaatgaccaccctcagcaccattgcccggaaatcgctccccaaggtctcctatgtcacagcgatggatctctttgtatctgtttgtttcatctttgtcttctctgctctggtggagtatggcaccttgcattattttgtcagcaaccggaaaccaagcaaggacaaagataaaaagaagaaaaaccctcttcttcggatgttttccttcaaggcccctaccattgatatccgcccaagatcagcaaccattcaaatgaataatgctacacaccttcaagagagagatgaagagtacggctatgagtgtctggacggcaaggactgtgccagttttttctgctgttttgaagattgtcgaacaggagcttggagacatgggaggatacatatccgcattgccaaaatggactcctatgctcggatcttcttccccactgccttctgcctgtttaatctggtctattgggtctcctacctctacctgtgaggaggtatgggttttactgatatggttcttattcactgagtctcatggagagatgtctgttctaagtccacttaaataatcctctatgtggttgataatgatctgaatctgtttctatgtccaaacctggtaaattttataatgtcatattgtttgtgcccagccctcctttggttagtgtactttgaacttcgatgtttgctgtgtttcaaacctgcaaggcaaagtaaaattagagcaagaacattcaaaccaaataagatatttttcagctacagcaaataaaacagtgaaagccctgactatttacagtagtggtatccttactagattcataatgcaattagatagaaaaggtccaaaactgtaccctatgttcactccgggtcaagttgtgataaatttgatcccaatagaatacctccctcatttaagaaaaatcataactcactttaaatatgaaagcctagtccagaaatctattacacctttatctcaagataggaagaaaatttcctccacattcatgtacaatgatgtaaatatttcaataacttagaatgcttcaagtttagtgcatgcatctctttagatccaaaataaatggactgaagttatcatcctattgtcttttattttgtgtccttgggctataaaagattcctgaatgtaattataaggatttgggtttggaaatggagggaggaattttcattgccttctccctcatgcatgaagattcgaacagcttattttttccttgtatgacatattacaacactttaagtaaaatatagactggataatcaacatttgccacctctaaatatgcccaatttcataactagagtataaagtaattgtatgtgcttgccgctatttttttcttccttttaggatgatagatcataacagaacttattctccatctcaagatctgcttctagtgattgtgagtgccttgtgggcagaatccttgtcatttcctctttgggtctgtagcaccttgcatagtgcctggcatatagttggtgctcaataaatatggtttgaagtgaattgccctcacatgcttctggcaaatctctgtgctggcctgaaaccagtgactcatcttctcacataggtgttgtcaagtgatatttgattttgtaaaaataaccagtaggatccaaagaactttagctatttatgttcatcttcaaaaaattattttaggcaaagtccatactccttttaaaacaatatttatgtcctatgtttgtgtatagacatgactctactagggcataattagagtttgtgtattatttttccaggtttggggatgagtcagtccttgcccatccacaattttgtttgtgaacttataacaggaataagcaaaattcatacctgactagtgttcagaatgtagcattctgtgcgaaaaagtattgaagattagcttttaaaaactgaaaaaaaaaaatgaatgactcacatagaggttgagccaatgactgtggcctcattagattacattgtagttaaacaaagcaatttctccagacttaaaacatgatgagttgagctctatcttcatgtactcatcctgaatccttatttttctaaaatagcaccctttgttaattatttttatggaaattattactctgtcataattaaatcatagctagtataactttacagataacctaaaaagaatagaaaagaagagagagtggctttgtcagtataaaaccatgtaaagtcatcatcaagtcatctggatgaatcttgaaacacatttagctgccagttttacaaacctttaatatatcagtgctccagtatataacctcaaacaaatgtaaatagaacgaattattttcttgttttgaattgtcaatatattaaatgttgactctttgggagagttgttggcaagtttcaatggtgagaaacattattgtcaacttgaaatgtgttctgtaatggggacactacaaaaagctagctttccaatgtgtgcatagtattggcaatatgaatatatattatatataatctaatacttattataagctgctccctgtctatgtatttggaaaccttttcacaaagggaattgcctaacatgtggacttttacaataaaaatgctgcattctaatccatggtggcatc

SEQ ID NO: 260645 - DNA, 1428 bp, Artificial Sequence
  derived and/or modified sequence
atgagcagccccaacatctggagcacaggcagctctgtgtacagcacccctgtgttcagccagaagatgacagtgtggatcctgctgctgctgagcctgtacccaggcttcaccagccagaagagtgatgatgattatgaagattatgccagcaacaagacctgggtgctgacccccaaggtgcctgaaggagatgtgaccgtcatcctgaacaacctgctggagggctatgacaacaagctgcggccagacattggagtgaagcccaccctcatccacacagacatgtatgtgaacagcatcggccctgtgaatgccatcaacatggagtacaccatcgacatcttctttgcccagacctggtatgaccggcggctgaagttcaacagcaccatcaaggtgctgcggctgaacagcaacatggtgggcaagatctggatcccagacaccttcttcaggaacagcaagaaggcagatgcccactggatcaccacccccaacaggatgctgcgcatctggaatgatggccgggtgctgtacaccctgcggctgaccattgatgctgagtgccagctgcagctgcacaacttccccatggatgagcacagctgccccctggagttcagcagctatggctacccccgggaggagatcgtgtaccagtggaagaggagctctgtggaggtgggggacaccaggtcctggaggctgtaccagttctcctttgtgggcctgaggaacaccacagaggtggtgaagaccaccagcggggactatgtggtgatgtctgtgtactttgacctgagcaggaggatgggctacttcaccatccagacctacatcccctgcaccctcatcgtggtgctgtcctgggtgtccttctggatcaacaaggatgctgtgcctgcccggaccagcctgggcatcaccaccgtgctgaccatgaccaccctgagcaccatcgccaggaagagcctgcccaaggtgtcctatgtgacagccatggacctgtttgtgtctgtgtgcttcatctttgtgttcagcgccctggtggagtatggcaccctgcactactttgtgagcaacaggaagcccagcaaggacaaggacaagaagaagaagaaccccctgctgaggatgttctccttcaaggcccccaccatcgacatccggcccaggtctgccaccatccagatgaacaatgccacccacctgcaggagagagatgaggagtatggctatgaatgtctggatggcaaggactgtgccagcttcttctgctgctttgaggactgcaggactggagcctggaggcatggccgcatccacatccgcatcgccaagatggacagctatgcccgcatcttcttccccacagccttctgcctcttcaacctggtgtactgggtgtcctacctgtacctgtag

SEQ ID NO: 260646 - DNA, 1428 bp, Artificial Sequence
  derived and/or modified sequence
atgagcagccccaacatctggagcaccggcagcagcgtgtacagcacaccggtgttttcccagaaaatgactgtatggattctattattactgagcctctatccaggttttacctctcagaagagtgacgatgactacgaagactatgccagtaataaaacttgggttttgactccaaaggtcccagaaggcgacgtcaccgtgattctgaataatctgttggagggctacgataacaaactgaggccagatatcggagtgaaacccacccttattcatacggacatgtatgttaatagcattggacctgttaatgcaatcaatatggaatacactatagacatcttcttcgctcagacatggtatgatcgccgtctcaaatttaacagtactattaaagtgctgcggcttaactcaaatatggttggaaaaatttggatacctgatactttcttccgcaacagcaaaaaagcagatgctcactggatcaccacgccaaatcgcatgctgcgcatatggaacgatggcagggttttgtacacccttcgtctgactattgatgccgaatgtcagctgcaattacacaattttcccatggatgaacattcttgcccgcttgaattcagctcctacgggtatccccgcgaggaaatagtttaccagtggaagcggtcttccgtggaggttggcgatacaaggagctggaggctttatcaattttcgttcgtgggcctccgtaacacaactgaggtggtgaaaacaacatctggcgactacgtcgtcatgtcagtgtactttgaccttagtcgccgaatgggatacttcactattcagacttacattccctgcacccttatcgtggtgctgtcatgggtgtcattttggatcaacaaagacgctgtgcctgccaggacctcactgggcataacaacagtacttaccatgacgactcttagtacaattgcccgcaagtctctgccaaaggtctcttacgtcacggccatggacctctttgtttcagtctgtttcattttcgtgttctcagccctggtggagtacggaacactccattactttgtgtccaataggaagccctcaaaggataaagacaaaaagaagaaaaatcctctcctccgcatgttttcttttaaggccccaaccatcgacatcagaccgaggagcgccacgattcagatgaataacgcaacacaccttcaggaaagagacgaggagtacgggtacgagtgtctggacggtaaggactgtgcctctttcttttgttgtttcgaggattgccgtaccggcgcatggaggcatggtaggattcatatccgcatcgcaaagatggacagctatgcccggattttttttcccaccgcgttttgtctctttaatctggtgtactgggttagctatttatacctgtag

SEQ ID NO: 260647 - DNA, 1428 bp, Artificial Sequence
  derived and/or modified sequence
atgtcatccccgaacatctggagcacgggaagctcagtgtacagtacgccggtgttcagccaaaaaatgactgtatggattctactgcttctgtcgttatacccgggattcacctcccagaaatcagacgacgattatgaggactacgctagcaacaagacctgggtgcttacgccaaaggtgccagaaggagacgttaccgtgatcctgaacaatctgctggagggatatgataacaaactgcgcccagacattggtgtcaaacccaccctaatccataccgacatgtacgtgaacagtataggccctgtaaatgccataaatatggaatacactatcgatatctttttcgcacaaacctggtacgatcgccgtttgaagttcaactccacaatcaaggttctccgcctgaattccaatatggtgggtaagatttggatccccgataccttctttcgaaacagcaagaaggccgacgctcactggatcacaaccccaaacaggatgctacggatttggaatgacggacgggtgttatatacactgagactcaccatcgacgccgagtgtcagctgcagctccacaactttcccatggatgagcacagctgcccactcgaatttagctcttacggctatcccagggaggaaattgtataccagtggaagagaagctcagtcgaggtcggcgatacgcggagttggcggttgtatcagttttctttcgttggccttaggaataccaccgaggtggtgaaaactacatccggtgactacgtggttatgagtgtgtattttgaccttagtagaagaatgggatacttcacaatccagacgtacattccctgtaccctgatagttgtcctgtcatgggtgtcgttttggatcaacaaggacgcagtccctgctcggacttccctgggaatcaccacagtgctaacaatgacaacgctcagcactattgctcggaaatcactgcccaaggtctcatacgtgactgcgatggacctgttcgttagcgtgtgctttatattcgtgttcagcgccctcgtggagtatggcacattacactatttcgtttctaacaggaagccttccaaagacaaggacaagaagaaaaaaaacccgctcttgagaatgttctcctttaaagcccctacaattgacatccgccctagatccgccactatacagatgaataacgcgacacatttgcaagaaagagacgaggaatacgggtacgagtgccttgacggtaaagactgcgcaagcttcttttgttgctttgaagattgcagaactggtgcttggaggcacggacggatccacattcgcatcgccaagatggactcatatgccagaatcttcttcccaaccgctttttgtctgtttaatctagtgtactgggtgagctacctgtacctgtag

SEQ ID NO: 260648 - DNA, 1428 bp, Artificial Sequence
  derived and/or modified sequence
atgagcagccccaacatctggagcaccggcagcagcgtgtacagcacccccgtgttcagccagaagatgaccgtgtggatcctgctgctgctgagcctgtaccccggcttcaccagccagaagagcgacgacgactacgaggactacgccagcaacaagacctgggtgctgacccccaaggtgcccgagggcgacgtgaccgtgatcctgaacaacctgctggagggctacgacaacaagctgagacccgacatcggcgtgaagcccaccctgatccacaccgacatgtacgtgaacagcatcggccccgtgaacgccatcaacatggagtacaccatcgacatcttcttcgcccagacctggtacgacagaagactgaagttcaacagcaccatcaaggtgctgagactgaacagcaacatggtgggcaagatctggatccccgacaccttcttcagaaacagcaagaaggccgacgcccactggatcaccacccccaacagaatgctgagaatctggaacgacggcagagtgctgtacaccctgagactgaccatcgacgccgagtgccagctgcagctgcacaacttccccatggacgagcacagctgccccctggagttcagcagctacggctaccccagagaggagatcgtgtaccagtggaagagaagcagcgtggaggtgggcgacaccagaagctggagactgtaccagttcagcttcgtgggcctgagaaacaccaccgaggtggtgaagaccaccagcggcgactacgtggtgatgagcgtgtacttcgacctgagcagaagaatgggctacttcaccatccagacctacatcccctgcaccctgatcgtggtgctgagctgggtgagcttctggatcaacaaggacgccgtgcccgccagaaccagcctgggcatcaccaccgtgctgaccatgaccaccctgagcaccatcgccagaaagagcctgcccaaggtgagctacgtgaccgccatggacctgttcgtgagcgtgtgcttcatcttcgtgttcagcgccctggtggagtacggcaccctgcactacttcgtgagcaacagaaagcccagcaaggacaaggacaagaagaagaagaaccccctgctgagaatgttcagcttcaaggcccccaccatcgacatcagacccagaagcgccaccatccagatgaacaacgccacccacctgcaggagagagacgaggagtacggctacgagtgcctggacggcaaggactgcgccagcttcttctgctgcttcgaggactgcagaaccggcgcctggagacacggcagaatccacatcagaatcgccaagatggacagctacgccagaatcttcttccccaccgccttctgcctgttcaacctggtgtactgggtgagctacctgtacctgtag

SEQ ID NO: 260649 - protein, 250 aa, Artificial Sequence
  derived and/or modified sequence
MAWQVSLLELEDRLQCPICLEVFKESLMLQCGHSYCKGCLVSLSYHLDTKVRCPMCWQVVDGSSSLPNVSLAWVIEALRLPGDPEPKVCVHHRNPLSLFCEKDQELICGLCGLLGSHQHHPVTPVSTVCSRMKEELAALFSELKQEQKKVDELIAKLVKNRTRIVNESDVFSWVIRREFQELRHPVDEEKARCLEGIGGHTRGLVASLDMQLEQAQGTRERLAQAECVLEQFGNEDHHEFIWKFHSMASR

SEQ ID NO: 260650 - protein, 282 aa, Artificial Sequence
  derived and/or modified sequence
MAWQVSLLELEDRLQCPICLEVFKESLMLQCGHSYCKGCLVSLSYHLDTKVRCPMCWQVVDGSSSLPNVSLAWVIEALRLPGDPEPKVCVHHRNPLSLFCEKDQELICGLCGLLGSHQHHPVTPVSTVCSRMKEELAALFSELKQEQKKVDELIAKLVKNRTRIVNESDVFSWVIRREFQELRHPVDEEKARCLEGIGGHTRGLVASLDMQLEQAQGTRERLAQAECVLEQFGNEDHHEFIWKFHSMASRLTKTEELEKKWRNGLAASHSLPQQVRPQRRTP

SEQ ID NO: 260651 - DNA, 753 bp, Artificial Sequence
  derived and/or modified sequence
atggcctggcaggtgagcctgctggagctggaggacagactgcagtgccccatctgcctggaggtgttcaaggagagcctgatgctgcagtgcggccacagctactgcaagggctgcctggtgagcctgagctaccacctggacaccaaggtgagatgccccatgtgctggcaggtggtggacggcagcagcagcctgcccaacgtgagcctggcctgggtgatcgaggccctgagactgcccggcgaccccgagcccaaggtgtgcgtgcaccacagaaaccccctgagcctgttctgcgagaaggaccaggagctgatctgcggcctgtgcggcctgctgggcagccaccagcaccaccccgtgacccccgtgagcaccgtgtgcagcagaatgaaggaggagctggccgccctgttcagcgagctgaagcaggagcagaagaaggtggacgagctgatcgccaagctggtgaagaacagaaccagaatcgtgaacgagagcgacgtgttcagctgggtgatcagaagagagttccaggagctgagacaccccgtggacgaggagaaggccagatgcctggagggcatcggcggccacaccagaggcctggtggccagcctggacatgcagctggagcaggcccagggcaccagagagagactggcccaggccgagtgcgtgctggagcagttcggcaacgaggaccaccacgagttcatctggaagttccacagcatggccagcagatag

SEQ ID NO: 260652 - DNA, 849 bp, Artificial Sequence
  derived and/or modified sequence
atggcctggcaggtgagcctgctggagctggaggacagactgcagtgccccatctgcctggaggtgttcaaggagagcctgatgctgcagtgcggccacagctactgcaagggctgcctggtgagcctgagctaccacctggacaccaaggtgagatgccccatgtgctggcaggtggtggacggcagcagcagcctgcccaacgtgagcctggcctgggtgatcgaggccctgagactgcccggcgaccccgagcccaaggtgtgcgtgcaccacagaaaccccctgagcctgttctgcgagaaggaccaggagctgatctgcggcctgtgcggcctgctgggcagccaccagcaccaccccgtgacccccgtgagcaccgtgtgcagcagaatgaaggaggagctggccgccctgttcagcgagctgaagcaggagcagaagaaggtggacgagctgatcgccaagctggtgaagaacagaaccagaatcgtgaacgagagcgacgtgttcagctgggtgatcagaagagagttccaggagctgagacaccccgtggacgaggagaaggccagatgcctggagggcatcggcggccacaccagaggcctggtggccagcctggacatgcagctggagcaggcccagggcaccagagagagactggcccaggccgagtgcgtgctggagcagttcggcaacgaggaccaccacgagttcatctggaagttccacagcatggccagcagactgaccaagaccgaggagctggagaagaagtggagaaacggcctggccgccagccacagcctgccccagcaggtgagaccccagagaagaaccccctag

SEQ ID NO: 260653 - DNA, 753 bp, Artificial Sequence
  derived and/or modified sequence
atggcctggcaggtcagcctacttgaacttgaggaccggttacaatgccctatatgtctagaggtttttaaggaaagcttaatgctgcagtgcggacactcttactgcaaggggtgcctggtgtccctctcttaccacctggataccaaagtcagatgtcccatgtgctggcaggttgtcgacggctccagttcgctaccgaacgtatccctggcgtgggttatcgaggccctgaggctccctggtgaccccgagccaaaggtttgcgttcaccatcgcaaccccttgagcctgttttgcgagaaggatcaggaattaatatgcggattgtgcgggttgctgggctcgcatcaacaccatcctgtcacccccgtgtccaccgtgtgttccagaatgaaggaggagctcgccgcattgttctctgagttgaagcaggagcaaaagaaagttgacgagcttatcgcgaaactggtgaaaaataggactcggattgttaacgagtcggatgtgttctcgtgggttatccgaagggaattccaagaacttcgacatcctgtggatgaagagaaggcaaggtgcctggaaggaatcggaggccatactcgagggttggtcgcaagcctcgatatgcagcttgaacaagcacaggggacaagggaaagacttgcacaggcagaatgtgtcctcgagcaattcggaaacgaagatcaccatgaattcatatggaaattccacagcatggcgtctcgttag

SEQ ID NO: 260654 - DNA, 849 bp, Artificial Sequence
  derived and/or modified sequence
atggcttggcaggtcagtctgctggagctcgaagaccggctacaatgtccaatctgtctggaagtgttcaaagagtctctgatgctacagtgtgggcattcttactgtaagggctgcttggtgtccctcagctaccaccttgataccaaggtgcgatgtccgatgtgttggcaagtagtggatggttcaagcagtttaccaaacgtgagtctggcttgggtgatcgaagcgctgcggctccccggcgatcccgagcctaaggtttgcgtgcaccaccgcaacccactgtccctgttttgcgagaaggatcaggagctcatctgcggcctctgtgggctgctgggctcccaccagcaccacccagtgaccccagtctccaccgtctgttccaggatgaaggaggaattagccgcgttattctccgaacttaagcaggaacaaaagaaggtcgacgagctgatcgctaagctggtcaagaataggacccgaatcgtcaatgagagcgacgttttctcgtgggttattcgtagggagttccaggaacttaggcatcccgtcgatgaagagaaagcaagatgccttgagggcattgggggccatactcgtggcctcgtggcctctctggatatgcagttggaacaggctcaggggactcgtgagagactggcacaggccgagtgcgtcttggagcagttcggtaatgaagaccaccatgaattcatctggaagtttcactctatggcaagcagattaaccaaaaccgaagaacttgagaaaaagtggcggaacggcctggctgcctcccattctctcccacaacaggtccgcccccagaggcgcacaccatag

SEQ ID NO: 260655 - DNA, 753 bp, Artificial Sequence
  derived and/or modified sequence
atggcatggcaggttagcctgcttgagcttgaagaccggttgcagtgtccgatctgcttagaggtgtttaaggaatccctgatgcttcaatgtgggcactcttactgtaagggttgtctcgtcagtctgagctaccacctggatactaaggttagatgcccaatgtgctggcaagtggtagatgggtctagctctttgcccaacgtgagtctggcctgggtaattgaggccctacgcctgcctggggaccccgagcccaaagtttgtgtgcaccatagaaatccgctttcgctgttctgtgagaaggaccaggaactgatctgcggcctatgcggcctcctgggttcccaccagcatcaccccgttacaccagtctccacagtgtgttcccgcatgaaagaggagttagccgcactgttcagcgagctcaagcaagaacagaagaaggttgacgagttgattgccaagcttgttaaaaaccgcaccagaattgtgaatgagtctgacgtttttagctgggtgatacgtagagaatttcaagagctgaggcacccggtggacgaagaaaaggctagatgcttagaaggcatcggcgggcacacccgtggcttagtggcttctctcgatatgcagctggaacaggcacagggaactagggagcgactggctcaggcagagtgcgtgttggagcagttcggcaacgaggaccaccacgaatttatctggaaatttcatagcatggctagcagatag

SEQ ID NO: 260656 - DNA, 753 bp, Artificial Sequence
  derived and/or modified sequence
atggcctggcaggtgtccctgctggagctggaggaccggctgcagtgccccatctgcctggaggtgttcaaggagagcctgatgctgcagtgtggccacagctactgcaagggctgcctggtgtccctgagctaccacctggacaccaaggtgcgctgccccatgtgctggcaggtggtggatggcagcagcagcctgcccaacgtgtccctggcctgggtgattgaggccctgcggctgcccggggaccctgagcccaaggtgtgtgtgcaccacaggaaccccctgagcctcttctgtgagaaggaccaggagctgatctgtggcctgtgtggcctgctgggcagccaccagcaccaccctgtgacccctgtgtccacagtgtgcagcaggatgaaggaggagctggccgccctcttcagcgagctgaagcaggagcagaagaaggtggatgagctgattgccaagctggtgaagaacagaacccgcatcgtgaatgaaagtgatgtgttctcctgggtgatccggcgggagttccaggagctgcggcaccctgtggatgaggagaaggcccgctgcctggagggcattggaggccacacccggggcctggtggccagcctggacatgcagctggagcaggcccagggcacccgggagcggctggcccaggccgagtgtgtgctggagcagtttggaaatgaagaccaccacgagttcatctggaagttccacagcatggccagcaggtag

SEQ ID NO: 260657 - DNA, 849 bp, Artificial Sequence
  derived and/or modified sequence
atggcctggcaggtgtccctgctggagctggaggaccggctgcagtgccccatctgcctggaggtgttcaaggagagcctgatgctgcagtgtggccacagctactgcaagggctgcctggtgtccctgagctaccacctggacaccaaggtgcgctgccccatgtgctggcaggtggtggatggcagcagcagcctgcccaacgtgtccctggcctgggtgattgaggccctgcggctgcccggggaccctgagcccaaggtgtgtgtgcaccacaggaaccccctgagcctcttctgtgagaaggaccaggagctgatctgtggcctgtgtggcctgctgggcagccaccagcaccaccctgtgacccctgtgtccacagtgtgcagcaggatgaaggaggagctggccgccctcttcagcgagctgaagcaggagcagaagaaggtggatgagctgattgccaagctggtgaagaacagaacccgcatcgtgaatgaaagtgatgtgttctcctgggtgatccggcgggagttccaggagctgcggcaccctgtggatgaggagaaggcccgctgcctggagggcattggaggccacacccggggcctggtggccagcctggacatgcagctggagcaggcccagggcacccgggagcggctggcccaggccgagtgtgtgctggagcagtttggaaatgaagaccaccacgagttcatctggaagttccacagcatggccagccggctgaccaagacagaggagctggagaagaagtggagaaatggcctggccgccagccacagcctgccccagcaggtgcggccccagaggaggaccccctag

SEQ ID NO: 260658 - DNA, 753 bp, Artificial Sequence
  derived and/or modified sequence
atggcctggcaggtgagcctgctggagctggaggaccggctgcagtgcccaatttgcttggaagtcttcaaggagtctctaatgctgcagtgcggacactcctactgtaagggatgcctcgtcagcctcagctatcatttagacacaaaggtgagatgtccaatgtgctggcaggttgtcgatggcagcagctcccttcccaatgtgagcctcgcctgggtgattgaagcactaagactgcccggagatcccgaaccaaaggtatgtgtccatcacaggaatccattgagcctattttgcgaaaaggaccaagagttgatatgtggtctgtgtggcttgttaggctctcatcagcaccatcctgttaccccggtgtctaccgtgtgctcacgcatgaaggaagagcttgcagcgctgttctctgaactcaagcaggaacagaaaaaggtggacgagctgatcgccaaactcgtgaaaaaccgcacccgcattgtcaacgagtccgatgtgttttcctgggtgatcaggagggagtttcaggagctgcggcatcccgttgacgaagaaaaggcaaggtgcctcgaaggcattgggggccataccagggggttggtggcctctctggatatgcagctggaacaggcccaagggaccagagagcgcttggctcaggctgagtgcgtgttggaacaattcggaaacgaggaccatcatgaatttatctggaagtttcattctatggcctcccgctag

SEQ ID NO: 260659 - DNA, 849 bp, Artificial Sequence
  derived and/or modified sequence
atggcctggcaggtgagcctgctggagctggaggaccggctgcagtgcccaatctgcctcgaggtttttaaagaatccctcatgcttcaatgcgggcacagctactgcaaaggctgcctagtgtccctctcctaccacctggataccaaagtgagatgcccaatgtgctggcaggtcgtggatggctcctcctcactaccaaacgtgtccctggcctgggtgattgaggcactgaggttgcccggcgatcctgaacccaaggtttgtgtgcaccataggaacccattgagcctgttttgtgagaaagaccaggagctgatctgcggactatgtgggctgcttggatcacaccaacatcaccccgtcacgccggtgtctaccgtctgctcccgcatgaaggaggagctagctgccctgttcagcgagctgaaacaagagcagaagaaagtggatgagctaatcgccaagcttgttaagaacaggactcgcattgttaatgaaagcgatgtcttcagctgggtcataaggagggaattccaagaacttcgacacccagtggacgaagaaaaggccagatgcttggaagggatcggcggtcacacaagaggtctcgtggcttcactggatatgcagctggagcaggcacaaggaactagagagaggctggcccaggctgagtgtgtgctcgagcagttcgggaacgaggaccaccacgaatttatttggaaatttcatagtatggcgtctaggctgactaagactgaggagcttgagaaaaagtggagaaatggattggccgcttctcactctctgcctcagcaggtgcgccctcaaagaagaaccccttag

SEQ ID NO: 260660 - DNA, 753 bp, Artificial Sequence
  derived and/or modified sequence
atggcctggcaggtgagcctgctggagctggaggaccggctgcagtgccctatttgcctagaagtgttcaaagaatccctgatgctccagtgtggccactcgtactgcaagggctgtctcgtgtctctctcctaccatctggatacaaaggtcagatgtccaatgtgttggcaagtagtggatggatcatccagcctccctaatgtgagtctggcgtgggtgattgaagctttgcggctccctggtgatcccgagcccaaagtatgtgtgcaccatagaaatcccttgtcactgttttgtgaaaaggatcaggagctgatttgtgggttgtgcggcctgttgggcagccatcaacatcatcctgttacgcccgtgagtaccgtttgctctaggatgaaagaagaactggctgcacttttctcagagctcaaacaggagcagaagaaagttgatgaactcatagccaaattggtgaaaaaccgaacacgcatagtgaatgagagtgacgtattctcctgggttatccgccgtgagttccaggagctgcgtcatcccgtcgatgaggagaaggctagatgcctggagggaatcggcggacatacacgcggcctcgttgcttccctggatatgcagttagagcaagctcagggcactagggagcgattagctcaggccgaatgtgtcctagagcagttcggcaatgaggaccaccatgaattcatatggaaattccactccatggcttctagatag

SEQ ID NO: 260661 - DNA, 753 bp, Artificial Sequence
  derived and/or modified sequence
atggcatggcaggtgagcctgcttgaactcgaagatagactccaatgccccatatgtctggaagtcttcaaggaatctttgatgctgcagtgcggacacagttactgtaaagggtgcctggtatcactatcctaccatcttgacacgaaggtccgctgcccaatgtgttggcaggttgttgatgggagttcgtctctgccgaatgtcagtctagcttgggttattgaggcacttcggctccctggagaccctgagcccaaagtgtgcgtgcaccacagaaatccactgagtctgttctgtgaaaaggatcaggaactcatttgcgggctgtgtgggctgctagggtctcatcagcatcaccctgttacacccgtaagcactgtttgtagtcgcatgaaggaggagctagcagcgctgttttctgagttaaaacaagagcagaagaaggtcgacgagctaatcgcaaaactagtcaaaaatagaacacgaattgttaacgagtcagacgtgttttcttgggttatccggagggaatttcaagagctgcgtcaccctgtggacgaagagaaggcacgatgtctggaaggtatcggaggtcacactagggggctggtggccagcttagatatgcagctagagcaggctcaaggaacacgggagcgtttggctcaagcagagtgtgtgcttgagcagttcgggaatgaggatcaccacgagttcatttggaagtttcacagtatggctagccgctag

SEQ ID NO: 260662 - DNA, 849 bp, Artificial Sequence
  derived and/or modified sequence
atggcatggcaggtaagtctcctggaacttgaagatcggctgcaatgccccatctgcctggaggtcttcaaggaatcgttgatgctgcaatgtggccactcttattgtaaaggatgcctggtcagcttatcctatcacctcgacactaaggttcgttgcccgatgtgctggcaggtagtggatgggtcctcatccctccccaacgtgtcccttgcttgggttatcgaggccctgcgcctgcccggagatcctgaaccaaaagtctgcgtccatcacagaaatcccctatcactgttttgcgagaaggaccaggagctgatttgcgggctgtgtgggctgctgggctctcatcaacaccatccagtgacacccgtaagcaccgtttgttccaggatgaaggaggaactggcagcgttgtttagcgagttaaagcaggagcagaagaaggtcgatgaactgatcgcgaaacttgtgaaaaaccgcactcggattgttaacgagtccgatgtcttcagctgggtgattagacgagagtttcaggagctgagacaccccgttgacgaagaaaaggctaggtgtttagagggtattggaggccatacgagaggtctggtggccagtcttgatatgcagcttgaacaggctcaaggaactcgagagcgcctggcccaggctgagtgcgtgctggaacaattcggaaatgaagaccaccatgagtttatctggaaatttcattcaatggcctcccgtctgactaagacggaagaacttgagaaaaagtggcggaatggactagcagcaagtcactccttgccacagcaggttagaccgcagaggcgcaccccttag

SEQ ID NO: 260663 - DNA, 753 bp, Artificial Sequence
  derived and/or modified sequence
atggcttggcaggtatctctcctcgaacttgaggaccgactgcagtgtcctatctgtcttgaggtatttaaggaatccttaatgctacaatgcggtcactcttactgtaaaggttgtctggtgtcgctgtcttaccacctggacacgaaggtccggtgccctatgtgttggcaggtagtcgacggatcatcgagccttcctaatgttagcctagcttgggtgattgaggcgttgaggctgccaggggatccagaaccgaaggtctgtgtgcaccatagaaatcccttgagcttattctgcgagaaggatcaggagttaatctgcggcctgtgtgggctcttaggctctcaccagcatcaccctgtaacccccgtgagcacagtgtgttcaagaatgaaggaggaactcgctgccctgtttagcgagctgaaacaagaacaaaaaaaggtggatgagctcatcgccaaactcgtgaagaatcgcacacggattgtcaacgaatctgatgttttctcgtgggtaatccggagggaattccaggaactgcgccacccagttgacgaggagaaggccagatgccttgagggcatcggcggacatacaagagggctggtggcctcactggacatgcaactggagcaggcacaagggactcgagaacggctagcccaagcagagtgtgtcttagagcaatttggaaatgaggaccatcacgagtttatttggaaattccactcaatggcttcccggtag

SEQ ID NO: 260664 - DNA, 1350 bp, Artificial Sequence
  derived and/or modified sequence
gagcatgatggggcatgtgcgggagcgccaggcggggcatgtaaccagagcgtgcggggcatgatggggcacggacatggggggttaggtggggcacgtaattggagctcgcggggcaggatggggcatctaactggagcgacagagagcacgatggggcacttacaggggccggaggctggcccgggcagtgagtgtggatggcttggcaggtgagcctgctggagctggaggaccggcttcagtgtcccatctgcctggaggtcttcaaggagtccctaatgctacagtgcggccactcctactgcaagggctgcctggtttccctgtcctaccacctggacaccaaggtgcgctgccccatgtgctggcaggtggtggacggcagcagctccttgcccaacgtctccctggcctgggtgatcgaagccctgaggctccctggggacccagagcccaaggtctgcgtgcaccaccggaacccgctcagccttttctgcgagaaggaccaggagctcatctgtggcctctgcggtctgctgggctcccaccaacaccacccggtcacgcccgtctccaccgtctgcagccgcatgaaggaggagctcgcagccctcttctctgagctgaagcaggagcagaagaaggtggatgagctcatcgccaaactggtgaaaaaccggacccgaatcgtcaatgagtcggatgtcttcagctgggtgatccgccgcgagttccaggagctgcgccacccggtggacgaggagaaggcccgctgcctggaggggatagggggtcacacccgtggcctggtggcctccctggacatgcagctggagcaggcccagggaacccgggagcggctggcccaagccgagtgtgtgctggaacagttcggcaatgaggaccaccatgagttcatctggaagttccactccatggcctccaggtaataaccttggagagagctcagccagggtctggtggctgcgggcacgggcatctcagctccactggttcctccattcagcttaaccagcgcctcccaagcagctgcctatagctggctctataactgagcctggggaagatagaggaaagtcacatccctgccttcaagggtctcgcagacaggtggggaggcagatggtgaactgtgggtacctagaacagcagaagttcactcaagctacagaaatactagaggagggtagctcatgcctgcaatcccagtactttgggaggccaaggcaggagtattgctggaggccgggagttcgagaccagcctggccaatgtagtaacacccccgtctctacaaaaaatacaaaaataaaaaaattagttggg

SEQ ID NO: 260665 - DNA, 1321 bp, Artificial Sequence
  derived and/or modified sequence
atctaactggagcgacagagagcacgatggggcacttacaggggccggaggctggcccgggcagtgagtgtggatggcttggcaggtgagcctgctggagctggaggaccggcttcagtgtcccatctgcctggaggtcttcaaggagtccctaatgctacagtgcggccactcctactgcaagggctgcctggtttccctgtcctaccacctggacaccaaggtgcgctgccccatgtgctggcaggtggtggacggcagcagctccttgcccaacgtctccctggcctgggtgatcgaagccctgaggctccctggggacccagagcccaaggtctgcgtgcaccaccggaacccgctcagccttttctgcgagaaggaccaggagctcatctgtggcctctgcggtctgctgggctcccaccaacaccacccggtcacgcccgtctccaccgtctgcagccgcatgaaggaggagctcgcagccctcttctctgagctgaagcaggagcagaagaaggtggatgagctcatcgccaaactggtgaaaaaccggacccgaatcgtcaatgagtcggatgtcttcagctgggtgatccgccgcgagttccaggagctgcgccacccggtggacgaggagaaggcccgctgcctggaggggatagggggtcacacccgtggcctggtggcctccctggacatgcagctggagcaggcccagggaacccgggagcggctggcccaagccgagtgtgtgctggaacagttcggcaatgaggaccaccatgagttcatctggaagttccactccatggcctccagattgacaaagactgaagaactggagaagaagtggcgaaacgggctcgcagcgtcgcattccctaccccagcaggtgcgcccgcagcgtcgcactccctagcccggcagaacgtgaagcagctgtacgcgctggtgtgcgaaacgcagcgctactccgccgtgctggatgccgtgatctccagcgccggcctcctcagtgcgaagaagctgcagccgcacctggccaagggtaggggcggggcggggaagtgaaccccgacggtcagcgctttgtcatctggtttcagccccgctgccgtgcacggcgggactggagcaagtcgctcacctgaaatgagtatgagcagaccttccctgggttacgaattgagatgggatgaaaatgctttaacttcgagtgttttgaaggattaaataaccgaagtacaaagtagtagtagcggagacagtaaggaagtcgggcgtggcggcgcgcacctgtggtcccagctactcggaa

SEQ ID NO: 260666 - DNA, 1169 bp, Artificial Sequence
  derived and/or modified sequence
gcccgggcagtgagtgtggatggcttggcaggtgagcctgctggagctggaggaccggcttcagtgtcccatctgcctggaggtcttcaaggagtccctaatgctacagtgcggccactcctactgcaagggctgcctggtttccctgtcctaccacctggacaccaaggtgcgctgccccatgtgctggcaggtggtggacggcagcagctccttgcccaacgtctccctggcctgggtgatcgaagccctgaggctccctggggacccagagcccaaggtctgcgtgcaccaccggaacccgctcagccttttctgcgagaaggaccaggagctcatctgtggcctctgcggtctgctgggctcccaccaacaccacccggtcacgcccgtctccaccgtctgcagccgcatgaaggaggagctcgcagccctcttctctgagctgaagcaggagcagaagaaggtggatgagctcatcgccaaactggtgaaaaaccggacccgaatcgtcaatgagtcggatgtcttcagctgggtgatccgccgcgagttccaggagctgcgccacccggtggacgaggagaaggcccgctgcctggaggggatagggggtcacacccgtggcctggtggcctccctggacatgcagctggagcaggcccagggaacccgggagcggctggcccaagccgagtgtgtgctggaacagttcggcaatgaggaccaccatgagttcatctggaagttccactccatggcctccaggtaataaccttggagagagctcagccagggtctggtggctgcgggcacgggcatctcagctccactggttcctccattcagcttaaccagcgcctcccaagcagctgcctatagctggctctataactgagcctggggaagatagaggaaagtcacatccctgccttcaagggtctcgcagacaggtggggaggcagatggtgaactgtgggtacctagaacagcagaagttcactcaagctacagaaatactagaggagggtagctcatgcctgcaatcccagtactttgggaggccaaggcaggagtattgctggaggccgggagttcgagaccagcctggccaatgtagtaacacccccgtctctacaaaaaatacaaaaataaaaaaattagttggg

SEQ ID NO: 260667 - protein, 483 aa, Artificial Sequence
  derived and/or modified sequence
MANNYKKIVLLKGLEVINDYHFRIVKSLLSNDLKLNPKMKEEYDKIQIADLMEEKFPGDAGLGKLIEFFKEIPTLGDLAETLKREKLKVKGIIPSKKTKQKEVYPATPACTPSNRLTAKGAEETLGPQKRKKPSEEETGTKRSKMSKEQTRPSCSAGASTSTAMGRSPPPQTSSSAPPNTSSTESLKPLANRHATASKNIFREDPIIAMVLNATKVFKYESSENEQRRMFHATVATQTQFFHVKVLNINLKRKFIKKRIIIISNYSKRNSLLEVNEASSVSEAGPDQTFEVPKDIIRRAKKIPKINILHKQTSGYIVYGLFMLHTKIVNRKTTIYEIQDKTGSMAVVGKGECHNIPCEKGDKLRLFCFRLRKRENMSKLMSEMHSFIQIQKNTNQRSHDSRSMALPQEQSQHPKPSEASTTLPESHLKTPQMPPTTPSSSSFTKKDETHPGAQSSPANFRITSPTVAPPLSSDTSTNRHPAVP

SEQ ID NO: 260668 - DNA, 1452 bp, Artificial Sequence
  derived and/or modified sequence
atggccaacaactacaaaaagattgtgttgctaaaggggctcgaagtcatcaatgactatcacttcaggatcgttaaatcgctgctttcaaacgatcttaaactcaaccctaaaatgaaggaggagtacgacaagattcagattgcagatcttatggaagagaaatttcccggggacgctggactcgggaagctaatagagtttttcaaggagatcccaactcttggagaccttgctgagacgctcaagagggagaagctcaaagtgaagggcattatcccatctaaaaagacaaaacaaaaggaggtgtaccccgctacacctgcctgtacaccctccaaccgtcttacggcaaagggggcggaggagaccctgggaccacagaagcgtaaaaagccatctgaggaggagacaggcaccaagcgtagcaagatgagtaaagagcaaacgcggccctcctgcagcgcaggagcttctacttccacggctatgggcaggtcaccaccaccccagacctcatcctccgctccacctaatacctcctccacagagtcactgaaaccccttgcgaatcgtcatgcaacagctagcaagaatatttttcgtgaggatcccattattgctatggtcttaaacgcaaccaaagtgttcaagtatgagagcagtgagaacgaacaacggcgcatgtttcacgctaccgtggccacacagacgcagttcttccatgtgaaggttctcaacatcaacctgaaaaggaaatttatcaagaagcggatcataatcatatccaactactccaagcgcaactctctgctagaagtcaacgaggcctcatcagtatctgaggccggtcccgaccagacttttgaggtcccaaaagatataattagaagggctaaaaaaataccaaaaatcaacatactccacaaacagacatcaggatatatcgtatatggcctctttatgctccacacaaaaattgtaaatagaaagacaactatttatgaaattcaggacaagaccggatccatggccgtcgtgggaaaaggcgaatgccataatataccctgcgaaaagggcgacaaactccggctgttctgcttccgcttaagaaaacgcgagaacatgtccaaacttatgagcgagatgcacagtttcattcagatacagaaaaacacaaaccagaggtcccatgactcacgcagtatggctctccctcaagagcaaagtcagcaccctaagccatctgaggccagcacaacactgccagagtctcacctcaagactccccagatgccacccacgactccgagttctagttcatttacgaaaaaggacgaaacacacccgggcgctcagagttctcccgcaaattttaggattacatcacccaccgtggccccccctctatcaagtgatacttctactaatcggcaccccgcagtcccgtag

SEQ ID NO: 260669 - DNA, 1452 bp, Artificial Sequence
  derived and/or modified sequence
atggccaacaactacaagaagatcgtgctgctgaagggcctggaggtgatcaatgactaccacttccgcatcgtgaagagcctgctgagcaatgacctgaagctgaaccccaagatgaaggaggagtatgacaagatccagattgctgacctgatggaggagaagtttcctggagatgctggcctgggcaagctgattgagttcttcaaggagatccccaccctgggggacctggccgagaccctgaagcgggagaagctgaaggtgaagggcatcatccccagcaagaagaccaagcagaaggaggtgtacccagccaccccagcctgcacccccagcaaccggctgacagccaagggagctgaggagaccctgggcccccagaagaggaagaagcccagcgaggaggagaccggcaccaagaggagcaagatgagcaaggagcagacccggcccagctgcagcgctggggccagcaccagcacagccatgggccgcagccccccaccccagaccagcagcagcgccccacccaacaccagcagcacagagagcctgaagcccctggccaacagacatgccacagccagcaagaacatcttccgggaggaccccatcatcgccatggtgctgaatgccaccaaggtgttcaagtatgagagcagtgaaaatgagcagaggaggatgtttcatgccaccgtggccacccagacccagttcttccacgtgaaggtgctgaacatcaacctgaagaggaagttcatcaagaagaggatcatcatcatcagcaactacagcaagaggaacagcctgctggaggtgaatgaggccagctctgtgtctgaggccggccctgaccagacctttgaggtgcccaaggacatcatcagaagagccaagaagatccccaagatcaacatcctgcacaagcagaccagcggctacatcgtgtatggcctcttcatgctgcacaccaagatcgtgaacaggaagaccaccatctatgagatccaggacaagacaggctccatggctgtggtgggcaaaggagagtgccacaacatcccctgtgagaagggggacaagctgcggctcttctgcttccggctgaggaagcgggagaacatgagcaagctgatgtctgagatgcacagcttcatccagatccagaagaacaccaaccagaggagccatgacagccgctccatggccctgccccaggagcagagccagcaccccaagcccagcgaggccagcaccaccctgcctgagagccacctgaagaccccccagatgccacccaccacccccagcagcagcagcttcaccaagaaggatgagacccaccctggggcccagagcagccctgccaacttccgcatcaccagccccaccgtggccccacccctgagcagtgacaccagcaccaacagacaccctgctgtgccctag

SEQ ID NO: 260670 - DNA, 1452 bp, Artificial Sequence
  derived and/or modified sequence
atggccaacaactacaagaagatcgtgctgctgaagggcctggaggtcatcaacgattatcacttcaggattgtgaagtctctgctgtctaacgacctgaaactgaatcccaagatgaaggaggaatacgataagattcagatagccgacctgatggaagagaagttcccaggtgatgctgggctggggaagcttatcgagttcttcaaagaaatccctaccttgggtgatctggccgagactttgaaacgggaaaagctcaaagtaaaggggatcattccctcaaaaaagacaaaacagaaagaagtgtatccagccacacctgcctgcacaccttctaaccgtttgacagccaaaggagccgaggaaaccttggggcctcagaagcggaagaagccaagcgaagaggaaaccggaaccaagcgtagtaaaatgtccaaagaacagacgagaccgtcatgtagtgccggtgcttcaactagcacagccatggggagaagccccccacctcagacaagctcctctgcgcctccgaatacaagctccaccgaaagcttgaagccactcgccaatcgtcatgccactgccagtaaaaacatatttagagaggatccaatcattgcaatggtcctcaacgctacaaaagtgttcaagtacgaaagctctgaaaacgaacaacggcggatgtttcacgccacagtggcgacacagacacagttctttcacgttaaggtgctaaacataaacctgaagcgcaagtttatcaaaaaaaggatcataattatcagcaactatagtaagcgtaacagccttctcgaggtgaatgaggcctctagcgtcagcgaagccggtccggatcaaaccttcgaagtccccaaagacatcatccggcgcgcgaaaaaaatccctaagatcaatattctccataagcagacgagcgggtacattgtgtacggattgtttatgttacataccaaaatcgtgaatcggaagactacaatttatgaaatacaagacaaaactggatctatggctgttgtggggaagggcgagtgccacaacatcccttgtgagaagggggacaagctgcggctgttctgctttcgcctgcggaagagggaaaacatgtccaagctcatgtctgagatgcactccttcattcagattcagaaaaatacgaaccaacgtagtcatgattcccgttctatggccctgccacaggaacagagtcagcacccaaagcctagtgaagcaagcaccactctaccagaatcccatctgaagacgccccaaatgccccctaccaccccctctagttcctccttcaccaaaaaggatgaaactcaccccggagcccagagcagccctgcaaattttcgaattacctcgcccacggtcgcccctccactttcatcggacacaagtacaaataggcacccagcagttccatag

SEQ ID NO: 260671 - DNA, 1452 bp, Artificial Sequence
  derived and/or modified sequence
atggctaataactacaagaagatagtcctgctgaaggggctcgaggttatcaacgattaccacttccgcatcgttaaatccttgctgagcaacgatctgaagctgaaccctaagatgaaagaggaatatgataagatccagatcgcggacctgatggaggagaaatttccaggagatgccggtctggggaagctcatagagttcttcaaagagatcccaaccttgggcgacctggccgaaacactgaagcgcgagaagctgaaggtcaaaggtattataccgagtaagaagactaaacagaaagaggtatatcccgcaacccctgcctgtacccctagtaatcggctcaccgccaaaggagccgaggaaactttggggccacaaaaaaggaagaaaccctccgaggaagaaactggcacaaagcggagcaaaatgagtaaagaacaaaccagaccaagctgttccgcaggagcttcaacttctaccgcaatgggcagatcccctccgcctcagaccagttccagcgcaccccctaacacgtcttccaccgagtcccttaaaccactggccaatcgccacgccaccgccagtaaaaacatttttcgtgaagaccctattattgcaatggttctcaatgcgaccaaagtcttcaagtacgagtccagtgagaacgagcagcgacgcatgttccatgccacagtcgccacacagactcagtttttccatgtgaaggtcctcaacatcaatctgaagcgaaaattcattaagaaacgcataattattatcagcaactactcgaagcggaatagtttgctcgaagttaacgaggccagttccgtctcggaagccggacccgaccagaccttcgaggtgcctaaagacattatccgaagagctaagaagatcccgaagataaatattttgcataagcagaccagcgggtatatcgtgtatggcttatttatgctgcatacgaagatcgtcaatcgcaagaccacaatatatgaaatacaggacaaaactgggtctatggccgtggtgggaaagggcgagtgccacaatatcccatgcgagaagggcgataagcttcgcctgttttgttttaggctgcggaagagagagaatatgtctaagcttatgtcggagatgcattcttttatccagatccagaaaaataccaaccaacgatctcatgatagtagatctatggcccttccacaggagcagtcccagcatccaaagccctccgaagccagcacgacactgcccgaaagtcaccttaagaccccacaaatgcccccaactactccctccagttctagctttaccaagaaagatgagacccatccaggcgcacagagctcccctgctaatttccgcattacatcacccactgtggcgccaccattgtcctctgacacctcaaccaatagacaccccgctgtgccatag

SEQ ID NO: 260672 - DNA, 1723 bp, Artificial Sequence
  derived and/or modified sequence
gaggaagccagcactagtcaagtgactctaagaagggccattttcccttgttgtctttgaaaatacttcattttcttagcatttcaggagattataacatcctgtatttcagtttctgagagctttactgactgatttccctattcaaaacaatcctcatttcctacatttctgaagatctcaagatctggactactgttgaagaaattcccagtaaggctcacttatatctttagagatggcaaataactacaagaaaattgttctactgaaaggattagaggtcatcaatgattatcattttagaattgttaagtccttactgagtaacgatttaaaacttaatccaaaaatgaaagaagagtatgacaaaattcagattgctgacttgatggaggaaaagttcccaggtgatgccggtttgggcaaactaatagaattcttcaaagaaataccaacactgggagaccttgctgaaactcttaaaagagaaaagttaaaagtcaaaggaataatcccatctaaaaagacgaaacagaaagaagtgtatcctgctacacctgcatgcaccccaagcaaccgtctcacagctaaaggagcagaggagactcttggacctcagaaaagaaaaaaaccatctgaagaagagactggaaccaaaaggagtaagatgtccaaagagcagactcggccttcctgctctgcaggagccagcacgtccacagccatgggccgttccccacctccccagacctcatcatcagctccacccaacacttcctcaactgagagcctaaaaccattggccaaccgtcacgcaactgccagtaaaaatattttccgagaagacccaataatcgcgatggtactaaatgcaacaaaagtatttaaatatgaatcctcagaaaatgagcaaagaagaatgtttcatgctacagtggctacgcagacacagttctttcatgtgaaggttttaaacatcaacttgaagaggaaattcattaaaaagagaatcatcattatatcaaattattccaaacgtaatagtctcctagaggtgaatgaagcctcttctgtatctgaagctggtcctgaccaaacgtttgaggttccaaaggacatcatcagaagagcaaagaaaattccgaagatcaatattcttcacaaacaaacttcaggatatattgtatatggattatttatgctacatacgaaaattgtaaataggaagacgacaatctatgaaattcaggataaaacaggaagtatggctgtagtaggaaaaggagaatgccacaatatcccctgtgaaaaaggagataagcttcgactcttctgctttcgactgagaaagagggaaaatatgtcaaaactgatgtcagaaatgcatagtttcatccagatacagaaaaatacaaaccagagaagccatgactccaggagcatggcactaccccaggaacagagtcagcatccaaaaccttcagaggccagcacaaccctacctgaaagccatctcaagactcctcagatgccaccaacaaccccatccagcagttccttcaccaagaaggatgaaacccacccaggagcacagtcatcgcctgcaaactttagaatcacctcaccaactgtggcccctcctctttcttctgacacttccaccaaccgccatccagcagttccttaaataaggtcaccaaggacaaggatatcaaataac

SEQ ID NO: 260673 - DNA, 1452 bp, Artificial Sequence
  derived and/or modified sequence
atggccaacaactacaagaagatcgtgctgctgaagggcctggaggtgatcaacgactaccacttcagaatcgtgaagagcctgctgagcaacgacctgaagctgaaccccaagatgaaggaggagtacgacaagatccagatcgccgacctgatggaggagaagttccccggcgacgccggcctgggcaagctgatcgagttcttcaaggagatccccaccctgggcgacctggccgagaccctgaagagagagaagctgaaggtgaagggcatcatccccagcaagaagaccaagcagaaggaggtgtaccccgccacccccgcctgcacccccagcaacagactgaccgccaagggcgccgaggagaccctgggcccccagaagagaaagaagcccagcgaggaggagaccggcaccaagagaagcaagatgagcaaggagcagaccagacccagctgcagcgccggcgccagcaccagcaccgccatgggcagaagcccccccccccagaccagcagcagcgccccccccaacaccagcagcaccgagagcctgaagcccctggccaacagacacgccaccgccagcaagaacatcttcagagaggaccccatcatcgccatggtgctgaacgccaccaaggtgttcaagtacgagagcagcgagaacgagcagagaagaatgttccacgccaccgtggccacccagacccagttcttccacgtgaaggtgctgaacatcaacctgaagagaaagttcatcaagaagagaatcatcatcatcagcaactacagcaagagaaacagcctgctggaggtgaacgaggccagcagcgtgagcgaggccggccccgaccagaccttcgaggtgcccaaggacatcatcagaagagccaagaagatccccaagatcaacatcctgcacaagcagaccagcggctacatcgtgtacggcctgttcatgctgcacaccaagatcgtgaacagaaagaccaccatctacgagatccaggacaagaccggcagcatggccgtggtgggcaagggcgagtgccacaacatcccctgcgagaagggcgacaagctgagactgttctgcttcagactgagaaagagagagaacatgagcaagctgatgagcgagatgcacagcttcatccagatccagaagaacaccaaccagagaagccacgacagcagaagcatggccctgccccaggagcagagccagcaccccaagcccagcgaggccagcaccaccctgcccgagagccacctgaagaccccccagatgccccccaccacccccagcagcagcagcttcaccaagaaggacgagacccaccccggcgcccagagcagccccgccaacttcagaatcaccagccccaccgtggccccccccctgagcagcgacaccagcaccaacagacaccccgccgtgccctag

SEQ ID NO: 260674 - protein, 461 aa, Artificial Sequence
  derived and/or modified sequence
MANNYKKIVLLKGLEVINDYHFRIVKSLLSNDLKLNPKMKEEYDKIQIADLMEEKFPGDAGLGKLIEFFKEIPTLGDLAETLKREKLKVANKIESIPVKGIIPSKKTKQKEVYPATPACTPSNRLTAKGAEETLGPQKRKKPSEEETGTKRSKMSKEQTRPSCSAGASTSTAMGRSPPPQTSSSAPPNTSSTESLKPLANRHATASKNIFREDPIIAMVLNATKVFKYESSENEQRRMFHATVATQTQFFHVKVLNINLKRKFIKKRIIIISNYSKRNSLLEVNEASSVSEAGPDQTFEVPKDIIRRAKKIPKINILHKQTSGYIVYGLFMLHTKIVNRKTTIYEIQDKTGSMAVVGKGECHNIPCEKGDKLRLFCFRLRKRENMSKLMSEMHSFIQIQKNTNQRSHDSRSMALPQEQSQHPKPSEASTTLPESHLKTPQMPPTTPSSSSFTKVTKDKDIK

SEQ ID NO: 260675 - DNA, 1386 bp, Artificial Sequence
  derived and/or modified sequence
atggcaaataactacaagaaaatcgtcttgctaaaaggactggaagtcatcaacgactatcatttccggatcgtcaagtcactgttgtcaaacgacttgaagctcaaccccaagatgaaagaggaatatgacaagatccagatagcagacctgatggaggaaaagtttccaggcgacgcgggattggggaaactgattgagttcttcaaagaaatcccgacacttggggatctcgccgaaaccctgaagcgtgaaaagctgaaggtggccaacaaaatcgaatccattcctgttaagggtattatcccatctaagaagaccaagcaaaaagaagtgtaccctgccactcccgcatgcaccccatcaaaccgactgacggcaaagggagcagaggagaccctggggccacagaagaggaagaaaccttctgaagaggagaccggaaccaagcgatccaagatgtcaaaggagcagactagaccatcatgttccgcaggcgcctccacaagcacggcaatgggacgatcgcctcctcctcagacctcatctagcgcccctccaaacacctccagcacagaatccttgaaacccttggccaaccgacacgccaccgctagcaagaacatatttcgcgaagaccccattatagcaatggtgctgaatgcaactaaagttttcaaatacgaaagttctgaaaacgagcagcgcaggatgtttcatgctactgtggccacgcagactcagttcttccacgttaaggtgctgaacatcaacttaaagcgcaagttcataaagaagcgcatcataataatttctaactattccaagcgcaactcccttttagaggttaatgaggccagctcagtgagcgaggcaggccctgaccaaacttttgaggtacctaaggacattatacggagggccaaaaaaattcctaagattaatatcttacataaacagaccagcggctatatcgtctacggcctgttcatgcttcacactaaaattgtgaataggaaaactaccatttatgagatccaggacaagactggctctatggcagtagtcgggaagggcgagtgccacaatataccttgcgagaagggggacaaactgcgacttttttgtttccggctgagaaaacgggagaacatgagtaagctgatgtctgaaatgcacagttttatacagatacaaaagaacacaaaccagaggtcgcatgactctcgaagtatggcactgccacaggagcagtctcaacatccgaaaccatctgaggcctccaccacactccccgaaagtcacctgaagactccccaaatgccgccaactacgccgtctagctccagttttacgaaggtgaccaaagacaaggacatcaaatag

SEQ ID NO: 260676 - DNA, 1386 bp, Artificial Sequence
  derived and/or modified sequence
atggccaacaactacaagaagatcgtgctgctgaagggcctggaggtgatcaatgactaccacttccgcatcgtgaagagcctgctgagcaatgacctgaagctgaaccccaagatgaaggaggagtatgacaagatccagattgctgacctgatggaggagaagtttcctggagatgctggcctgggcaagctgattgagttcttcaaggagatccccaccctgggggacctggccgagaccctgaagcgggagaagctgaaggtggccaacaagattgagagcatccctgtgaagggcatcatccccagcaagaagaccaagcagaaggaggtgtacccagccaccccagcctgcacccccagcaaccggctgacagccaagggagctgaggagaccctgggcccccagaagaggaagaagcccagcgaggaggagaccggcaccaagaggagcaagatgagcaaggagcagacccggcccagctgcagcgctggggccagcaccagcacagccatgggccgcagccccccaccccagaccagcagcagcgccccacccaacaccagcagcacagagagcctgaagcccctggccaacagacatgccacagccagcaagaacatcttccgggaggaccccatcatcgccatggtgctgaatgccaccaaggtgttcaagtatgagagcagtgaaaatgagcagaggaggatgttccacgccaccgtggccacccagacccagttcttccacgtgaaggtgctgaacatcaacctgaagaggaagttcatcaagaagaggatcatcatcatcagcaactacagcaagaggaacagcctgctggaggtgaatgaggccagctctgtgtctgaggccggccctgaccagacctttgaggtgcccaaggacatcatccggcgggccaagaagatccccaagatcaacatcctgcacaagcagaccagcggctacatcgtgtatggcctcttcatgctgcacaccaagatcgtgaacaggaagaccaccatctatgagatccaggacaagacaggctccatggctgtggtgggcaagggggagtgccacaacatcccctgtgagaagggggacaagctgcggctcttctgcttccggctgaggaagcgggagaacatgagcaagctgatgtctgagatgcacagcttcatccagatccagaagaacaccaaccagaggagccatgacagccgctccatggccctgccccaggagcagagccagcaccccaagcccagcgaggccagcaccaccctgcctgagagccacctgaagaccccccagatgccacccaccacccccagcagcagcagcttcaccaaggtgaccaaggacaaggacatcaagtag

SEQ ID NO: 260677 - DNA, 1386 bp, Artificial Sequence
  derived and/or modified sequence
atggccaacaactacaagaagatcgtgctgctgaagggcctggaggttataaatgactatcacttccggatcgtgaagagcctgttgtcgaacgatctgaagttaaaccctaaaatgaaggaggaatatgataaaattcaaatcgcagatctcatggaggaaaagtttcctggagatgccgggctgggtaaattaatagagttttttaaagagattcctacactgggcgatcttgccgaaacattgaaaagagaaaagctgaaggttgcaaacaaaatcgagtcaatccctgtgaaagggattattcctagtaagaaaacaaaacagaaggaggtataccctgctacacccgcttgcacaccaagtaacaggctcaccgccaagggggcggaggagactctcggaccacagaaacggaagaagccgtccgaggaggagacaggcaccaaacgttccaagatgtccaaagagcagacccggccttcatgctccgctggagcctctacttcaaccgccatgggccgatcccctcctcctcagacaagctctagtgccccccccaatacttcaagcacagagtctctgaaaccactcgcaaacagacacgctaccgcttctaaaaatatttttagagaggacccaattattgctatggttcttaacgcgaccaaagtgtttaagtatgagtcaagcgaaaacgaacagaggcgcatgttccatgctacagtcgccacgcagacgcagttttttcatgtcaaggttctcaatatcaatcttaaacgaaaattcatcaagaagcgcatcattattatatccaattactcaaagcgcaactctctgcttgaggtgaatgaggcatcttcggtgtctgaagcaggacctgatcaaacctttgaggtgccgaaggacattatccggagggccaagaagattcctaagataaacattcttcataagcagacctctgggtacattgtatacggcctcttcatgttgcacactaaaattgtgaacaggaagaccaccatttacgaaattcaggataaaactggatctatggctgtggtcgggaagggagagtgtcataacattccgtgcgaaaagggcgataaactgcgcctcttttgcttccgcctgaggaagagagagaatatgtccaagctcatgagcgaaatgcattccttcatacagatccagaagaacaccaatcagcgaagtcacgactcacgttctatggcccttccccaggagcagagccaacaccctaagcccagtgaagcatcaaccaccctgcccgagtctcacctgaaaactcctcagatgccccctactactcctagcagcagctcctttaccaaagtgaccaaggataaggacattaagtag

SEQ ID NO: 260678 - DNA, 1386 bp, Artificial Sequence
  derived and/or modified sequence
atggccaacaattataaaaagattgtgctgctgaaaggactcgaggtaatcaatgactaccattttcggatagtgaagagtttactctctaacgatttgaagctgaacccgaagatgaaagaggagtacgacaaaatacaaatcgccgacttaatggaagagaaatttcctggagacgccggtctgggcaagcttatcgagttttttaaggagatccccacactcggagaccttgctgagaccctgaagagggaaaagttgaaggtggcaaataagatcgagtcgattcccgtcaagggtatcatcccgagtaagaagacgaaacagaaggaggtgtacccagccacaccagcctgcaccccttcaaaccgcctcaccgcaaagggcgctgaggaaacactgggaccccagaagcggaagaagccttcagaggaggagactggcacgaagaggagtaaaatgagcaaagaacagacgcgcccaagctgttctgccggagcctccacctccactgccatgggaaggtctccccctccacagacttccagttcagctcccccaaacacctcctccacagaatcactgaagccactcgctaacaggcacgctacagcatccaagaacatttttcgggaggaccccattatcgctatggtgcttaacgccaccaaggtgttcaaatacgaaagttccgagaacgagcaaagacgcatgtttcacgcgacggtagctactcaaacacagtttttccatgtgaaggtactgaatatcaatctcaaacgcaaatttattaagaagagaattatcatcatttcaaattactcaaaacggaactctttattagaggtgaatgaggcctcaagcgtctctgaggctggacctgaccaaaccttcgaagtgcctaaggatattatccggagagccaagaaaatccccaaaattaacatcctccataaacagacatccgggtatattgtgtatggtttattcatgctgcacaccaagatcgtcaaccgaaagacgactatatatgagatacaggacaagaccggaagcatggctgtagtggggaaaggggagtgtcacaacataccgtgcgaaaaaggagacaagctccgattattttgttttcggctgcgtaaacgtgagaacatgagtaaattgatgagcgagatgcacagcttcattcaaattcagaagaatactaatcaacggtcccacgatagccgcagtatggccctcccacaggagcagagccagcatcctaaacctagtgaggcttcgaccacgctccccgaatcacaccttaaaacacctcaaatgccaccaactactccctcttctagctcgtttacaaaggtaaccaaggataaggacattaaatag

SEQ ID NO: 260679 - DNA, 1624 bp, Artificial Sequence
  derived and/or modified sequence
aggaagccagcactagtcaagtgactctaagaagggccattttcccttgttgtctttgaaaatacttcattttcttagcatttcaggagattataacatcctgtatttcagtttctgagagctttactgactgatttccctattcaaaacaatcctcatttcctacatttctgaagatctcaagatctggactactgttgaagaaattcccagtaaggctcacttatatctttagagatggcaaataactacaagaaaattgttctactgaaaggattagaggtcatcaatgattatcattttagaattgttaagtccttactgagtaacgatttaaaacttaatccaaaaatgaaagaagagtatgacaaaattcagattgctgacttgatggaggaaaagttcccaggtgatgccggtttgggcaaactaatagaattcttcaaagaaataccaacactgggagaccttgctgaaactcttaaaagagaaaagttaaaagttgcaaataaaattgaatccattccagtcaaaggaataatcccatctaaaaagacgaaacagaaagaagtgtatcctgctacacctgcatgcaccccaagcaaccgtctcacagctaaaggagcagaggagactcttggacctcagaaaagaaaaaaaccatctgaagaagagactggaaccaaaaggagtaagatgtccaaagagcagactcggccttcctgctctgcaggagccagcacgtccacagccatgggccgttccccacctccccagacctcatcatcagctccacccaacacttcctcaactgagagcctaaaaccattggccaaccgtcacgcaactgccagtaaaaatattttccgagaagacccaataatcgcgatggtactaaatgcaacaaaagtatttaaatatgaatcctcagaaaatgagcaaagaagaatgtttcatgctacagtggctacgcagacacagttctttcatgtgaaggttttaaacatcaacttgaagaggaaattcattaaaaagagaatcatcattatatcaaattattccaaacgtaatagtctcctagaggtgaatgaagcctcttctgtatctgaagctggtcctgaccaaacgtttgaggttccaaaggacatcatcagaagagcaaagaaaattccgaagatcaatattcttcacaaacaaacttcaggatatattgtatatggattatttatgctacatacgaaaattgtaaataggaagacgacaatctatgaaattcaggataaaacaggaagtatggctgtagtaggaaaaggagaatgccacaatatcccctgtgaaaaaggagataagcttcgactcttctgctttcgactgagaaagagggaaaatatgtcaaaactgatgtcagaaatgcatagtttcatccagatacagaaaaatacaaaccagagaagccatgactccaggagcatggcactaccccaggaacagagtcagcatccaaaaccttcagaggccagcacaaccctacctgaaagccatctcaagactcctcagatgccaccaacaaccccatccagcagttccttcaccaaggtcaccaaggacaaggatatcaaataac

SEQ ID NO: 260680 - DNA, 1386 bp, Artificial Sequence
  derived and/or modified sequence
atggccaacaactacaagaagatcgtgctgctgaagggcctggaggtgatcaacgactaccacttcagaatcgtgaagagcctgctgagcaacgacctgaagctgaaccccaagatgaaggaggagtacgacaagatccagatcgccgacctgatggaggagaagttccccggcgacgccggcctgggcaagctgatcgagttcttcaaggagatccccaccctgggcgacctggccgagaccctgaagagagagaagctgaaggtggccaacaagatcgagagcatccccgtgaagggcatcatccccagcaagaagaccaagcagaaggaggtgtaccccgccacccccgcctgcacccccagcaacagactgaccgccaagggcgccgaggagaccctgggcccccagaagagaaagaagcccagcgaggaggagaccggcaccaagagaagcaagatgagcaaggagcagaccagacccagctgcagcgccggcgccagcaccagcaccgccatgggcagaagcccccccccccagaccagcagcagcgccccccccaacaccagcagcaccgagagcctgaagcccctggccaacagacacgccaccgccagcaagaacatcttcagagaggaccccatcatcgccatggtgctgaacgccaccaaggtgttcaagtacgagagcagcgagaacgagcagagaagaatgttccacgccaccgtggccacccagacccagttcttccacgtgaaggtgctgaacatcaacctgaagagaaagttcatcaagaagagaatcatcatcatcagcaactacagcaagagaaacagcctgctggaggtgaacgaggccagcagcgtgagcgaggccggccccgaccagaccttcgaggtgcccaaggacatcatcagaagagccaagaagatccccaagatcaacatcctgcacaagcagaccagcggctacatcgtgtacggcctgttcatgctgcacaccaagatcgtgaacagaaagaccaccatctacgagatccaggacaagaccggcagcatggccgtggtgggcaagggcgagtgccacaacatcccctgcgagaagggcgacaagctgagactgttctgcttcagactgagaaagagagagaacatgagcaagctgatgagcgagatgcacagcttcatccagatccagaagaacaccaaccagagaagccacgacagcagaagcatggccctgccccaggagcagagccagcaccccaagcccagcgaggccagcaccaccctgcccgagagccacctgaagaccccccagatgccccccaccacccccagcagcagcagcttcaccaaggtgaccaaggacaaggacatcaagtag

SEQ ID NO: 260681 - protein, 452 aa, Artificial Sequence
  derived and/or modified sequence
MANNYKKIVLLKGLEVINDYHFRIVKSLLSNDLKLNPKMKEEYDKIQIADLMEEKFPGDAGLGKLIEFFKEIPTLGDLAETLKREKLKVKGIIPSKKTKQKEVYPATPACTPSNRLTAKGAEETLGPQKRKKPSEEETGTKRSKMSKEQTRPSCSAGASTSTAMGRSPPPQTSSSAPPNTSSTESLKPLANRHATASKNIFREDPIIAMVLNATKVFKYESSENEQRRMFHATVATQTQFFHVKVLNINLKRKFIKKRIIIISNYSKRNSLLEVNEASSVSEAGPDQTFEVPKDIIRRAKKIPKINILHKQTSGYIVYGLFMLHTKIVNRKTTIYEIQDKTGSMAVVGKGECHNIPCEKGDKLRLFCFRLRKRENMSKLMSEMHSFIQIQKNTNQRSHDSRSMALPQEQSQHPKPSEASTTLPESHLKTPQMPPTTPSSSSFTKVTKDKDIK

SEQ ID NO: 260682 - DNA, 1359 bp, Artificial Sequence
  derived and/or modified sequence
atggccaataattataaaaagatagtactgcttaagggcctggaggttattaatgactatcacttccggattgtgaaatcgttattgtccaacgatctcaagttgaatcccaaaatgaaggaagaatacgataaaatccagattgcggatttaatggaggagaaattccccggcgacgccgggttgggcaagttgattgagttttttaaggagatcccgaccttaggagatctggcagagaccctcaagcgagagaagctaaaggtaaagggcattataccttcaaaaaagactaagcagaaagaggtgtaccctgcaacacccgcctgcactccttctaatcggctgacagctaagggtgctgaggagacactggggccacagaaacgaaagaaacctagtgaggaggaaacggggacaaagagatcaaaaatgtcaaaggaacaaactcgccctagttgttcagccggcgcttccacaagtactgccatggggagaagtccacctccccagacatcctcttctgcaccccccaatacaagctcgaccgagtccctgaagcctctagctaatcggcacgccactgcatccaaaaacatctttagagaagatcccattatcgctatggtgctgaacgccacgaaggtgttcaaatatgaaagtagcgagaatgaacaacgcaggatgtttcatgccaccgtcgccacccagacccaattttttcatgtgaaggttctcaatattaaccttaagaggaaattcattaaaaaaagaattatcatcatctctaattacagcaaaaggaattcgttgctcgaggttaatgaggccagttctgttagtgaggccggtcccgatcaaacattcgaagtgccgaaggatattataagaagggccaagaaaatccctaagatcaacattctccacaagcagacatctggatatattgtttacggtcttttcatgcttcacacaaaaattgtcaataggaagaccactatttacgagattcaggacaagacggggtctatggcggtggttggcaaaggcgagtgccacaatattccctgtgagaaaggcgacaagctgaggctcttttgttttcgcctcaggaaacgcgaaaatatgtccaaattaatgagcgaaatgcatagcttcattcagatccaaaaaaacacgaatcagagatcccacgatagccggagtatggccttgccccaggagcagagccagcacccgaagcccagcgaggctagcaccaccttgcctgagtcccaccttaaaacaccacagatgccgcccactacccccagctcaagctcctttacgaaggttacaaaggacaaggatatcaagtag

SEQ ID NO: 260683 - DNA, 1359 bp, Artificial Sequence
  derived and/or modified sequence
atggccaacaactacaagaagatcgtgctgctgaagggcctggaggtgatcaatgactaccacttccgcatcgtgaagagcctgctgagcaatgacctgaagctgaaccccaagatgaaggaggagtatgacaagatccagattgctgacctgatggaggagaagtttcctggagatgctggcctgggcaagctgattgagttcttcaaggagatccccaccctgggggacctggccgagaccctgaagcgggagaagctgaaggtgaagggcatcatccccagcaagaagaccaagcagaaggaggtgtacccagccaccccagcctgcacccccagcaaccggctgacagccaagggagctgaggagaccctgggcccccagaagaggaagaagcccagcgaggaggagaccggcaccaagaggagcaagatgagcaaggagcagacccggcccagctgcagcgctggggccagcaccagcacagccatgggccgcagccccccaccccagaccagcagcagcgccccacccaacaccagcagcacagagagcctgaagcccctggccaacagacatgccacagccagcaagaacatcttccgggaggaccccatcatcgccatggtgctgaatgccaccaaggtgttcaagtatgagagcagtgaaaatgagcagaggaggatgtttcatgccaccgtggccacccagacccagttcttccacgtgaaggtgctgaacatcaacctgaagaggaagttcatcaagaagaggatcatcatcatcagcaactacagcaagaggaacagcctgctggaggtgaatgaggccagctctgtgtctgaggccggccctgaccagacctttgaggtgcccaaggacatcatcagaagagccaagaagatccccaagatcaacatcctgcacaagcagaccagcggctacatcgtgtatggcctcttcatgctgcacaccaagatcgtgaacaggaagaccaccatctatgagatccaggacaagacaggctccatggctgtggtgggcaaaggagagtgccacaacatcccctgtgagaagggggacaagctgcggctcttctgcttccggctgaggaagcgggagaacatgagcaagctgatgtctgagatgcacagcttcatccagatccagaagaacaccaaccagaggagccatgacagccgctccatggccctgccccaggagcagagccagcaccccaagcccagcgaggccagcaccaccctgcctgagagccacctgaagaccccccagatgccacccaccacccccagcagcagcagcttcaccaaggtgaccaaggacaaggacatcaagtag

SEQ ID NO: 260684 - DNA, 1359 bp, Artificial Sequence
  derived and/or modified sequence
atggccaacaactacaagaagatcgtgctgctgaagggcctggaggtcattaatgactatcatttccggatagttaaaagtctgctgagtaatgaccttaaattaaatccaaaaatgaaagaagaatatgacaagatccagatcgcggacttgatggaggagaagtttcccggagacgcagggctggggaagctcatcgagtttttcaaggagatccccacactgggcgatctagctgagactctaaagagagagaagcttaaggtgaaggggattatcccatccaagaaaacgaaacagaaagaagtttaccccgcaactcctgcttgtacgcccagtaatcggctgactgctaagggggcggaagagaccttgggacctcagaaaaggaaaaaaccttccgaagaggaaaccggaaccaaacggtctaagatgagcaaagagcagacacgtcccagctgctctgcaggagcatctactagcacagccatgggacggagtccacccccacagacaagctcctcagcccctccaaataccagtagcacagagagcctcaagcccttagctaatagacacgccacagcatcaaaaaacatttttcgtgaggatccaattattgctatggtgctgaacgccactaaggtgttcaagtatgaatcatctgagaatgaacagagacgcatgttccacgctacggttgccacccagacacagtttttccacgtcaaggtgctgaacatcaacttaaagcgtaaatttattaagaaaaggattatcataattagtaactattcgaagcgcaattcactgctggaagtcaacgaagcatcctcagtatccgaagcgggaccggatcagacttttgaagtgccaaaggatattatccggagagccaagaagatcccgaagatcaatatcctccacaagcaaacgagtggctatattgtatacgggctgtttatgctccacacaaagatcgtgaacagaaagaccacgatttacgaaatccaggacaagaccgggtccatggccgtcgttggtaaaggggagtgtcacaacatcccgtgtgaaaagggagataagcttaggctgttctgcttcaggctacgaaagcgcgagaatatgtcaaagctgatgtcagaaatgcatagttttatccagattcagaagaatactaatcagaggagccatgactctcgttccatggccctaccacaggagcagtcacaacaccctaagcctagcgaagcctcgaccacactccccgaatcccaccttaaaacaccgcaaatgccccctacaacgcctagtagcagttcgtttacaaaagtaactaaggacaaagacatcaaatag

SEQ ID NO: 260685 - DNA, 1359 bp, Artificial Sequence
  derived and/or modified sequence
atggccaacaactataagaaaatagtgctcctgaaagggttggaggtaatcaacgattaccattttaggattgtgaaaagcctcttatcaaacgacctgaagttgaatccgaaaatgaaggaggagtacgataagatccagatcgccgatctgatggaggaaaagtttcctggggacgccggtcttggaaagttgatcgagttttttaaagagataccaactctcggcgacctggctgagaccctgaaaagagaaaagctgaaagttaagggcataattccatccaagaagacaaagcaaaaggaggtttatccagctactccggcatgtacaccttccaacagacttaccgccaagggtgctgaggagaccctgggcccacagaagagaaaaaagccttcagaagaagagacagggactaaacggtctaagatgagcaaagagcagaccaggccgtcgtgctccgctggagcctccacatctaccgccatgggacgaagcccccctcctcagacctcaagtagcgctcctccgaacacctcttcaaccgagtccctcaagccactggccaatcgtcatgccaccgcatcgaaaaacatcttcagggaagacccaataatcgcaatggttcttaacgcgacaaaggtgtttaaatacgagtcttctgagaatgaacagcgtcggatgttccacgcgacagtagcaactcagacccagttctttcacgtcaaggtcctgaacatcaacttgaagagaaaatttattaagaaaagaattatcattatttccaactactccaaacgaaactcactgttagaagtgaacgaagcctcctctgtgagtgaggctggacccgatcagacatttgaggtccccaaagatatcatccgcagagctaagaagatacctaaaataaacatcctccataagcagaccagtggttacatagtgtacgggctgttcatgctgcacacaaagatcgtgaatcgcaagaccactatttatgagatccaggacaagactggtagcatggctgtcgtgggcaaaggtgaatgccacaatattccttgcgagaagggagataagctgcgtctgttttgctttaggctccgaaaacgtgaaaatatgagtaagctgatgtcagaaatgcacagcttcatccagatacagaagaacactaatcaaaggtctcatgatagcaggtctatggctcttccccaagaacaatcccaacacccgaagccgagcgaggcgagcactaccctcccagaaagccatctgaaaaccccgcagatgcctcccacgacaccttcttcgagcagttttaccaaagtgacgaaggataaagacatcaagtag

SEQ ID NO: 260686 - DNA, 1597 bp, Artificial Sequence
  derived and/or modified sequence
aggaagccagcactagtcaagtgactctaagaagggccattttcccttgttgtctttgaaaatacttcattttcttagcatttcaggagattataacatcctgtatttcagtttctgagagctttactgactgatttccctattcaaaacaatcctcatttcctacatttctgaagatctcaagatctggactactgttgaagaaattcccagtaaggctcacttatatctttagagatggcaaataactacaagaaaattgttctactgaaaggattagaggtcatcaatgattatcattttagaattgttaagtccttactgagtaacgatttaaaacttaatccaaaaatgaaagaagagtatgacaaaattcagattgctgacttgatggaggaaaagttcccaggtgatgccggtttgggcaaactaatagaattcttcaaagaaataccaacactgggagaccttgctgaaactcttaaaagagaaaagttaaaagtcaaaggaataatcccatctaaaaagacgaaacagaaagaagtgtatcctgctacacctgcatgcaccccaagcaaccgtctcacagctaaaggagcagaggagactcttggacctcagaaaagaaaaaaaccatctgaagaagagactggaaccaaaaggagtaagatgtccaaagagcagactcggccttcctgctctgcaggagccagcacgtccacagccatgggccgttccccacctccccagacctcatcatcagctccacccaacacttcctcaactgagagcctaaaaccattggccaaccgtcacgcaactgccagtaaaaatattttccgagaagacccaataatcgcgatggtactaaatgcaacaaaagtatttaaatatgaatcctcagaaaatgagcaaagaagaatgtttcatgctacagtggctacgcagacacagttctttcatgtgaaggttttaaacatcaacttgaagaggaaattcattaaaaagagaatcatcattatatcaaattattccaaacgtaatagtctcctagaggtgaatgaagcctcttctgtatctgaagctggtcctgaccaaacgtttgaggttccaaaggacatcatcagaagagcaaagaaaattccgaagatcaatattcttcacaaacaaacttcaggatatattgtatatggattatttatgctacatacgaaaattgtaaataggaagacgacaatctatgaaattcaggataaaacaggaagtatggctgtagtaggaaaaggagaatgccacaatatcccctgtgaaaaaggagataagcttcgactcttctgctttcgactgagaaagagggaaaatatgtcaaaactgatgtcagaaatgcatagtttcatccagatacagaaaaatacaaaccagagaagccatgactccaggagcatggcactaccccaggaacagagtcagcatccaaaaccttcagaggccagcacaaccctacctgaaagccatctcaagactcctcagatgccaccaacaaccccatccagcagttccttcaccaaggtcaccaaggacaaggatatcaaataac

SEQ ID NO: 260687 - DNA, 1359 bp, Artificial Sequence
  derived and/or modified sequence
atggccaacaactacaagaagatcgtgctgctgaagggcctggaggtgatcaacgactaccacttcagaatcgtgaagagcctgctgagcaacgacctgaagctgaaccccaagatgaaggaggagtacgacaagatccagatcgccgacctgatggaggagaagttccccggcgacgccggcctgggcaagctgatcgagttcttcaaggagatccccaccctgggcgacctggccgagaccctgaagagagagaagctgaaggtgaagggcatcatccccagcaagaagaccaagcagaaggaggtgtaccccgccacccccgcctgcacccccagcaacagactgaccgccaagggcgccgaggagaccctgggcccccagaagagaaagaagcccagcgaggaggagaccggcaccaagagaagcaagatgagcaaggagcagaccagacccagctgcagcgccggcgccagcaccagcaccgccatgggcagaagcccccccccccagaccagcagcagcgccccccccaacaccagcagcaccgagagcctgaagcccctggccaacagacacgccaccgccagcaagaacatcttcagagaggaccccatcatcgccatggtgctgaacgccaccaaggtgttcaagtacgagagcagcgagaacgagcagagaagaatgttccacgccaccgtggccacccagacccagttcttccacgtgaaggtgctgaacatcaacctgaagagaaagttcatcaagaagagaatcatcatcatcagcaactacagcaagagaaacagcctgctggaggtgaacgaggccagcagcgtgagcgaggccggccccgaccagaccttcgaggtgcccaaggacatcatcagaagagccaagaagatccccaagatcaacatcctgcacaagcagaccagcggctacatcgtgtacggcctgttcatgctgcacaccaagatcgtgaacagaaagaccaccatctacgagatccaggacaagaccggcagcatggccgtggtgggcaagggcgagtgccacaacatcccctgcgagaagggcgacaagctgagactgttctgcttcagactgagaaagagagagaacatgagcaagctgatgagcgagatgcacagcttcatccagatccagaagaacaccaaccagagaagccacgacagcagaagcatggccctgccccaggagcagagccagcaccccaagcccagcgaggccagcaccaccctgcccgagagccacctgaagaccccccagatgccccccaccacccccagcagcagcagcttcaccaaggtgaccaaggacaaggacatcaagtag

SEQ ID NO: 260688 - protein, 396 aa, Artificial Sequence
  derived and/or modified sequence
MSVAFASARPRGKGEVTQQTIQKMLDENHHLIQCILEYQSKGKTAECTQYQQILHRNLVYLATIADSNQNMQSLLPAPPTQNMNLGPGALTQSGSSQGLHSQGSLSDAISTGLPPSSLLQGQIGNGPSHVSMQQTAPNTLPTTSMSISGPGYSHAGPASQGVPMQGQGTIGNYVSRTNINMQSNPVSMMQQQAATSHYSSAQGGSQHYQGQSSIAMMGQGSQGSSMMGQRPMAPYRPSQQGSSQQYLGQEEYYGEQYSHSQGAAEPMGQQYYPDGHGDYAYQQSSYTEQSYDRSFEESTQHYYEGGNSQYSQQQAGYQQGAAQQQTYSQQQYPSQQSYPGQQQGYGSAQGAPSQYPGYQQGQGQQYGSYRAPQTAPSAQQQRPYGYEQGQYGNYQQ

SEQ ID NO: 260689 - DNA, 1191 bp, Artificial Sequence
  derived and/or modified sequence
atgagcgtggccttcgccagcgccagacccagaggcaagggcgaggtgacccagcagaccatccagaagatgctggacgagaaccaccacctgatccagtgcatcctggagtaccagagcaagggcaagaccgccgagtgcacccagtaccagcagatcctgcacagaaacctggtgtacctggccaccatcgccgacagcaaccagaacatgcagagcctgctgcccgccccccccacccagaacatgaacctgggccccggcgccctgacccagagcggcagcagccagggcctgcacagccagggcagcctgagcgacgccatcagcaccggcctgccccccagcagcctgctgcagggccagatcggcaacggccccagccacgtgagcatgcagcagaccgcccccaacaccctgcccaccaccagcatgagcatcagcggccccggctacagccacgccggccccgccagccagggcgtgcccatgcagggccagggcaccatcggcaactacgtgagcagaaccaacatcaacatgcagagcaaccccgtgagcatgatgcagcagcaggccgccaccagccactacagcagcgcccagggcggcagccagcactaccagggccagagcagcatcgccatgatgggccagggcagccagggcagcagcatgatgggccagagacccatggccccctacagacccagccagcagggcagcagccagcagtacctgggccaggaggagtactacggcgagcagtacagccacagccagggcgccgccgagcccatgggccagcagtactaccccgacggccacggcgactacgcctaccagcagagcagctacaccgagcagagctacgacagaagcttcgaggagagcacccagcactactacgagggcggcaacagccagtacagccagcagcaggccggctaccagcagggcgccgcccagcagcagacctacagccagcagcagtaccccagccagcagagctaccccggccagcagcagggctacggcagcgcccagggcgcccccagccagtaccccggctaccagcagggccagggccagcagtacggcagctacagagccccccagaccgcccccagcgcccagcagcagagaccctacggctacgagcagggccagtacggcaactaccagcagtag

SEQ ID NO: 260690 - DNA, 1191 bp, Artificial Sequence
  derived and/or modified sequence
atgtccgtcgccttcgcctcagctcgtccacgcggtaaaggtgaggtgacacagcaaactatccagaaaatgctcgacgaaaatcatcaccttatccagtgtattttggaatatcaatctaagggtaaaaccgccgagtgtacccagtatcagcagatcctccaccgtaacctcgtttacctagcaaccatcgccgatagcaatcagaatatgcaatctctcctgcctgcaccccctacacaaaatatgaatctgggtcccggtgctctgacacagtcgggctctagtcagggactccattcacagggcagcctgagtgacgcaatttcaaccggcctgccacccagtagcctcctgcaaggccagataggcaacggcccatctcacgtttctatgcagcaaactgccccgaacactctccccaccacatccatgagtatttcaggacccgggtacagccatgcaggacccgccagccaaggtgtccccatgcagggacagggtaccatcggaaactatgtgtcccgcactaatattaatatgcagagcaatccagtgtctatgatgcagcagcaggccgccacctcccattacagttcggcacaggggggcagccaacactatcagggacagagcagcatcgccatgatggggcagggatctcaaggttcttccatgatgggtcagagaccaatggctccttacaggccttcccagcaaggaagttctcagcagtacctgggccaggaggagtactacggtgagcagtactcgcattcccagggagccgccgaacctatggggcaacagtactatcccgatggacatggggattacgcatatcaacagtccagctatacagagcagtcatatgatagatccttcgaggaatcgactcaacattactatgaaggggggaactcccaatactctcagcagcaggccggctaccagcaaggtgcagcccagcagcagacctactctcaacaacagtatccatcgcaacagtcctaccctggccagcaacagggctacgggtcggcacagggggcacctagccagtatcctgggtaccagcaagggcaggggcagcagtatggttcatatcgggccccgcagacagcccccagcgcacagcagcagcgcccatacggctacgagcaaggacagtatgggaattaccagcagtag

SEQ ID NO: 260691 - DNA, 1191 bp, Artificial Sequence
  derived and/or modified sequence
atgtcagttgcgttcgcctcagctcggcctaggggcaagggggaagttacccagcagaccattcagaaaatgctcgatgaaaaccaccaccttattcagtgcattttagaataccagtccaaggggaaaactgctgaatgcacccaataccaacaaatcctgcaccggaacctagtgtacctggccacgatcgccgattcaaatcagaacatgcagtctctgctcccagccccgcccacccaaaatatgaacctgggcccgggagcactaacacaatcgggatcatcgcaagggctacactcacaggggtcgctgagtgacgctatttccacaggcctgcctccatcaagtcttctacagggtcaaatcgggaatggcccgtcccacgtgagtatgcagcaaacggccccaaacactcttcctaccacctctatgagcatttccgggcccggctactctcacgcaggccccgcatctcagggagtacctatgcagggacagggaacaatcgggaattacgtcagccgaacaaacataaatatgcagtcgaaccctgttagtatgatgcagcagcaggccgccacatcacactacagttccgcacagggcgggtcccagcattaccaggggcagtcatccattgctatgatgggccaggggtctcagggaagctccatgatggggcagaggcccatggccccctaccgtccttcgcagcagggttcatcacagcaatacctcgggcaggaggaatactacggcgaacagtactctcactcacagggagccgccgagcctatgggacagcaatattatccagatggtcatggagactatgcttatcaacagagttcatatacagaacaatcctacgacaggtctttcgaggagtctacccagcactattatgagggtgggaattcccagtactcacagcagcaggccggatatcagcagggagccgcccagcagcagacctactcacaacagcagtaccccagccaacagtcatatccaggccagcagcagggctacggtagcgcacagggggccccaagtcagtaccctggatatcagcagggccagggccagcaatacggttcttatcgagccccccaaacagcccctagcgctcaacaacagcggccctatggatatgaacaaggtcagtatgggaactaccagcagtag

SEQ ID NO: 260692 - DNA, 1191 bp, Artificial Sequence
  derived and/or modified sequence
atgtctgtggcctttgccagcgcccggccccggggcaaaggagaggtgacccagcagaccatccagaagatgctggatgagaaccaccacctgatccagtgcatcctggagtaccagagcaagggcaagacagctgagtgcacccagtaccagcagatcctgcacaggaacctggtgtacctggccaccatcgctgacagcaaccagaacatgcagagcctgctgcctgccccacccacccagaacatgaacctgggccctggggccctgacccagagcggcagcagccagggcctgcacagccagggcagcctgagtgatgccatcagcacaggcctgccccccagcagcctgctgcagggccagattggaaatggccccagccacgtgtccatgcagcagacagcccccaacaccctgcccaccacctccatgagcatcagcggccctggctacagccatgctggccctgccagccagggcgtgcccatgcagggccagggcaccatcggcaactacgtgtccaggaccaacatcaacatgcagagcaaccctgtgtccatgatgcagcagcaggccgccaccagccactacagcagcgcccagggcggcagccagcactaccagggccagagcagcatcgccatgatgggccagggcagccagggcagctccatgatgggccagaggcccatggccccctaccggcccagccagcagggcagcagccagcagtacctgggccaggaggagtactatggagagcagtacagccacagccagggcgctgctgagcccatgggccagcagtactacccagatggccacggggactatgcctaccagcagagcagctacacagagcagagctatgacaggagctttgaggagagcacccagcactactatgaaggaggcaacagccagtacagccagcagcaggccggctaccagcagggcgccgcccagcagcagacctacagccagcagcagtaccccagccagcagagctacccaggccagcagcagggctacggcagcgcccagggcgcccccagccagtacccaggctaccagcagggccagggccagcagtatggcagctaccgggccccccagacagcccccagcgcccagcagcagaggccctacggctatgagcagggccagtatggcaactaccagcagtag

SEQ ID NO: 260693 - DNA, 1191 bp, Artificial Sequence
  derived and/or modified sequence
atgagcgtggccttcgccagcgcccggccccggggcaagggcgaggttacccagcagacaatccaaaaaatgctcgatgaaaaccatcatctcattcaatgcatcctggagtaccagtcaaagggcaaaacggcagaatgtacccagtaccaacagattctgcaccgcaatctcgtatacctagccacaattgccgactcaaaccaaaatatgcaatccctgcttcccgccccccctacgcagaacatgaatctcggacccggcgctctgacacagagtggatcttcccagggtctgcacagccagggatctctgtccgatgccatatctacaggcctgccgccttcttccctgcttcaggggcagatcggcaatgggccttctcatgtcagtatgcagcagactgcgccaaacaccctgcctactacgtccatgagcatcagcggacccggatattctcacgctgggcccgcatcccagggggtccctatgcagggacagggcacgataggtaactatgtgagcaggacaaatatcaacatgcagagtaatcccgtatctatgatgcagcagcaggcagctacaagccattatagttctgcacagggggggtctcagcactaccagggacagagctccatcgcaatgatgggccaaggctcacaggggtcctctatgatgggccagcggcccatggcgccttataggccctctcagcagggctcttcccagcagtaccttggccaggaagagtattacggtgagcaatattcacatagccagggcgcagctgagcccatgggtcagcagtactacccagacggccatggagattacgcctatcaacaatcttcttacactgaacagtcctatgacagatcttttgaagaatcaacccagcattattacgaggggggaaactctcagtactcccagcaacaggccggttaccagcagggagctgctcaacagcaaacatattctcagcaacaataccccagccagcagtcttatcccggacagcaacaggggtacggaagcgctcagggggctccaagccaataccctggataccagcaggggcaggggcagcagtacgggagttatcgggcccctcaaacggctcccagcgcacagcagcagcggccatatggttacgaacagggacaatacggaaattaccaacagtag

SEQ ID NO: 260694 - DNA, 1191 bp, Artificial Sequence
  derived and/or modified sequence
atgagcgtggccttcgccagcgcccggccccggggcaagggcgaggtgacacagcaaaccattcagaagatgctggatgaaaatcatcaccttatccaatgcatactggagtaccagtccaagggaaaaaccgcggaatgcacccagtatcagcagattctccaccggaacctggtttatctcgctactatcgctgacagcaaccagaacatgcaaagcctgctgcctgcaccacccactcaaaacatgaacctgggacccggagcgctgacacagagcggttcatcccagggacttcacagccagggctcactgtcagatgccatatcgactggcttgcccccgagcagcctgcttcagggacagatcggcaacggcccgtctcacgtttctatgcaacagactgcccctaatacactgccaaccaccagtatgagcataagtggacctggctacagccatgccggcccagcctcccaaggcgtgccaatgcagggccagggcacaatcggcaactatgtgagtagaactaacatcaatatgcaatctaaccccgtgagtatgatgcagcagcaggccgccacaagtcactacagctccgcccaaggtggatcccaacactaccagggtcagtcttcaattgccatgatggggcaggggtcgcaaggcagtagtatgatgggccagcgccctatggccccgtacaggccctctcagcaaggtagctctcaacaatacctcgggcaggaggagtactatggggaacagtactcccacagccagggagctgccgagcctatgggacagcagtactatccagacggccacggagactacgcctaccaacaaagttcttatactgagcagagctatgacaggagtttcgaggagtcaactcagcactactacgagggaggcaactcacagtattcacagcagcaggcaggatatcaacagggcgccgcccaacagcagacctattcacagcagcagtacccaagtcagcagagctatcccggccagcagcagggatacggttccgcgcagggtgccccgtctcaataccccgggtatcagcaggggcaaggacaacaatacgggtcctatagggcaccccagactgcacccagcgctcagcaacaacgtccatatggatacgaacaggggcagtacggcaactatcagcagtag

SEQ ID NO: 260695 - DNA, 1191 bp, Artificial Sequence
  derived and/or modified sequence
atgtcagtagcgttcgcgtccgccaggcccagaggcaagggcgaggtgacccaacagaccattcagaagatgctcgacgaaaatcaccacttgattcagtgcatactcgagtaccagagtaaaggaaaaactgccgaatgtactcagtatcaacagatcctacaccgcaacctggtgtatcttgcaacaatagctgatagtaatcagaatatgcagtccctcttaccagcacccccaacccagaacatgaatctgggcccaggggctctcacacagtctggctcttctcagggactgcactcacagggttcgctgagcgatgcaattagcaccggtttaccacctagcagtctgctgcagggtcaaattggcaatggccctagccacgtgtcaatgcagcagacagccccaaacacgctgccgacaaccagcatgtcaatttctggacccggttactcccacgccggaccagcgtctcagggagtgcctatgcagggacaggggaccattggtaactacgtgtcccgcacgaacattaatatgcagagcaacccggtcagcatgatgcaacagcaggcagcaacctcacattattccagcgcacaaggcggttcccaacattatcagggccagtccagtattgctatgatgggacagggctctcaagggtcttcaatgatgggccagcgacctatggccccatatcgcccttctcagcaagggagctctcagcagtatctgggtcaagaagaatactacggcgagcagtattctcattcacagggggcagctgagcctatgggacagcaatattacccggacggccatggggattacgcttaccagcagtcatcatacacggaacaatcctatgataggtcatttgaggagtctacacagcactattatgaaggcggaaacagccagtacagccagcagcaggctggctaccagcaaggagccgctcagcagcagacctacagccagcaacaatacccaagtcagcagagctaccccggtcagcaacagggatacggttccgctcagggggctccctctcagtatcccggttatcagcagggccagggtcaacagtacggcagttatcgcgctcctcagaccgcacccagcgcacagcagcagaggccttacgggtatgagcagggccagtacggcaattatcagcagtag

SEQ ID NO: 260696 - DNA, 1191 bp, Artificial Sequence
  derived and/or modified sequence
atgtctgtggcctttgcaagcgcacgcccacgtggcaaaggagaggtgacccagcaaaccatccaaaagatgcttgacgaaaatcatcatcttatccaatgtattctcgaataccagagtaaaggaaagactgcagaatgcacccagtatcagcagatccttcacagaaatctcgtctatctggctactatcgccgattctaatcagaacatgcagagcctcctgccagcccctccaacacagaacatgaatctcggccctggcgctcttacacagagcggcagttctcaggggttgcattcacagggctcactgtcagatgccatatccacagggctccccccttcaagcctgctacaggggcaaattggcaacggacccagccacgtgtctatgcagcaaacagcccctaatactttaccaaccacgtccatgagcatcagcggtccaggttattctcatgctggcccagcatcacagggcgtgccaatgcagggacagggaaccatagggaattacgtttcaagaactaacatcaatatgcagagcaatcccgtgtctatgatgcagcaacaggcagccactagtcattattcaagtgctcaaggtggatctcagcactatcagggacagagcagcattgcaatgatgggacagggctcacagggcagctccatgatgggacagagaccaatggctccctacaggccatcgcaacagggatcatcgcaacagtacttagggcaggaagagtattacggagagcaatatagccacagtcagggggctgcagaaccaatgggccagcagtactatcccgacggccatggagactacgcttaccagcagtcaagctacaccgaacagtcgtatgacagatcctttgaggagtcaacacagcactactatgaaggcggtaatagccagtattcccaacagcaagccggataccaacagggcgctgcacagcagcagacgtactctcagcagcagtacccaagccagcagagttacccaggccagcagcagggctacggatcggctcaaggcgcacctagtcagtaccctggttatcagcaaggccaagggcaacaatacggcagctaccgagcacctcagaccgcaccatccgcccagcagcagcgcccttacgggtacgagcaggggcaatacgggaattaccagcagtag

SEQ ID NO: 260697 - DNA, 4493 bp, Artificial Sequence
  derived and/or modified sequence
cacgggctgagccccgcgccgccaccatgtccgtggccttcgcgtctgcccggccaagaggcaaaggggaggttacgcagcaaaccatccagaagatgctggacgagaaccaccacctgatccagtgcatcctggagtaccagagcaagggcaagacggccgagtgcacgcagtaccagcagatcctgcaccggaacctggtatacctggccacgatcgcagactccaaccagaacatgcagtccctgcttcctgccccgcccacgcagaacatgaacctgggccctggagccctgactcagagcggctccagccagggcctgcactctcagggcagcctgagtgacgccatcagcacgggcctgccaccctcctccctcctgcagggccagattggcaacgggccgagccacgtgtccatgcagcagacggcgcctaacacgctgcccaccacctccatgagcatctctgggcccggctacagccacgcgggacccgcctcgcagggcgtccccatgcaggggcaaggcaccatcggcaactacgtgtctcggaccaacatcaacatgcagtccaacccagtctccatgatgcagcagcaggcggccacgtcgcactacagctcggcgcagggcggcagccagcactaccagggccagtcgtccatcgccatgatggggcagggcagccaggggagcagcatgatggggcagcggcccatggcgccctaccggccctcccagcaaggctcttcccagcagtacctgggccaggaggagtactatggcgagcagtacagccacagccagggcgccgcggagcccatgggccagcagtactaccccgacggccatggcgattacgcctaccagcagtcatcctacacggagcagagctacgaccggtccttcgaggagtccacgcagcactactatgaggggggaaactcccagtacagccagcagcaggccgggtaccagcagggtgccgcgcagcagcagacgtactcccagcagcagtaccccagccagcagagctaccccgggcagcagcagggctacgggtctgcccagggagccccgtcacagtaccccggctaccagcaaggccaaggccagcagtacggaagctaccgagcaccgcagacagcgccgtctgcccagcagcagcggccctacggctatgaacagggccagtatggaaattaccagcagtaagggacacacattctggctggagcccttgtggtagcgtgttcatccaggggccggatgggctggcggcagctctggtgaattgtgacatgttggttacctgttcgcccagtgccacgtctgcatgtgaagcgtgctcatttcatgctgggtatgacgccgagcgcacaccactggcgtgagacagcgcttggtggtgtgatacttttggtgctgtgtatagtattgtatgtcggtacacggagaggtatcctttttttgtcccccgcccccttctcaatgtttctagctagctttgggggtcattttgtcatcagagcattctgtgcccagggacaggacagatctcgaggacaccacagtccacctgttcccgtcaacagacgttaggtctcattttcctcctcatgcagtgttgtagtgtgggttgtcaacttttctttaactggctacgccacagctggacacacatgcagcccctggagggcagcctcttcctgtgcctcgatggggtgggtgggagggcatcttctgtgcgttgggtcagtttctgttacgtaacgaaaaggataaacatctcccacgggagaggccacagatggccacttccagagcttgcccattgcctgtctctcgccaattccgtttatccaaaaaggtacatgtttttgtattaaaaagtaaacagggatcagtgactgtattccaaataaatatgaatccctaagggccgtggacaaattgcctaacccagggccagcggtattgctgaaggaaaggggcagctctctgggaagtgggccctcagagattactctggctttgacccttgtttagctgatggtcatttctgggattggaatatttaataagcccaattctaagttgataggtaattttaaatattcaaaccaaatcttcccaacagttggcaagttgtttattttatattatttcttccaggacctacttgctcagatctccaagcaagcatttcttttcttttagggatgtctgaaagtcacatccagttacattactgtgttctttctaatgaaaagtaaaggttttatatagagaaacttgagtaatttttacatttctaagacattaaatcccatttaaattctgtgtgaacattaaagacagcacacttgcaaaagtatggtcaaaggaaaaaaatcccacatttcaattaacaagtagcatggacatttgatcaacctttagttggaataataatattcatatttgctatgaatccttttaaaaaaatctttggataaatgctgacagatttccaagaactaccaagaaaatacaagagatatccaatgcttgatatatgaggcctagtaataacgatatttctctttaattgatgttttgttttaaaagttaaaagtaattcttggcgtggtggttcacgcctgtaatcccagcactttgggaggccgaagcgggcggatcacctgaggtcgggagttcgagaccagcctgaccaacatggagaaaccccgtccctactaaaaatacaaaattagccaggtatggtggtgcatacctgtaatcccagctactcgggaacctgaggcaggagaatggcttgaacccaggagacagaggttgtggtggggcaagatcgcaccattgcacccgagcctaggcaacaagagtgaaattccgtctcaaaaaaataaataaataaataaataaataagttaaaattaattctttatccagagtcgggtgctttagaatttataagtcacttatgtgttttgcttgaattaattctgacagcccctatgaggaaatctggaggcaggtaacagttcccattttagagatgaagaactgaggcacagattaaaggacttgcctgtgttgaataccagtcctgttctaggacattctcccctctcctaggagacggatgtcacgcacaaatggggagagaagtgtttattttgtaggcactaagggtttctaaaacccttaacactggtaagggctcaaaaataaacgtatgtgttcatattcgatcaccgaaatgagagttcttaattgctaattgacaaacgcgttagcaatttcagttagggagtcatctcccttgattgtgttcttttcctgtcaattttcatagacctaatttgcaaactcaatcggggactaaaatttcccactgaaaatgttaaacattttagataactgtgaagatagtttatttttattccttgccaatctgggaatatgccttttttgtgtgtttgtgtgtttttttaagtgctgtattaataatactttctgaaagaaaaggacacttaccccaaaacttcaatctgaaatgtcttacattaagaatatcttgaatgttgtgtatatattttaaaaagcactttgcaaaatagtttgtacatttatttcctaatttatacatgatttttggtgttaatatatttaatgattaataacagaatgtttatttaatgtgctgtccatttttatgtaatattatggggaaagtgatgccagcagttccttttcattattctatcttctgtcatatgaatgttgagcaaagcttaggccaacatgaattgtttgtgaagtgtggttgatggtgctttgtttttttctgactacttctatggaaggccagtgaagaagcaaaggaagacatgaaaattgacgctcattcttcttcctattgttccctgacatccagcaaattgtgaatttgaaaaatgatggccagttttcagaagtgctgacaaattcatattggtatgcaaaagctcatcacccattaaggtttgttgttgaatcaacagtactcagcatattaaaacagtacatcagaactcatgccaacagtctttatgatgggattaaggtggacaagatctcctaagatctgtgaatgggattaaggtggacaagatctcctaagatctgaaaagaaaccttaatacgctcatatggttggagtgttaagtgaacctctgattttgtcagggtttttctacgtgtaggcgtgaatagggggcaccccttcaaaactgtacaaagaagacgactgttttccatttccatttaaacatttttagccacttcatttctatttattgaacaggtcaaatttgtcttgttatttgtgagtacagtacatttaaaaaacatccttatcggttatttttttttcagtcggagtttgacgtataaattgtttatgcttttggtgtaatctcttaataaactggttcttcaaaaatc

SEQ ID NO: 260698 - DNA, 3703 bp, Artificial Sequence
  derived and/or modified sequence
agcgcagccggagtatccacctcgatgaccacgggctgagccccgcgccgccaccatgtccgtggccttcgcgtctgcccggccaagaggcaaaggggaggttacgcagcaaaccatccagaagatgctggacgagaaccaccacctgatccagtgcatcctggagtaccagagcaagggcaagacggccgagtgcacgcagtaccagcagatcctgcaccggaacctggtatacctggccacgatcgcagactccaaccagaacatgcagtccctgcttcctgccccgcccacgcagaacatgaacctgggccctggagccctgactcagagcggctccagccagggcctgcactctcagggcagcctgagtgacgccatcagcacgggcctgccaccctcctccctcctgcagggccagattggcaacgggccgagccacgtgtccatgcagcagacggcgcctaacacgctgcccaccacctccatgagcatctctgggcccggctacagccacgcgggacccgcctcgcagggcgtccccatgcaggggcaaggcaccatcggcaactacgtgtctcggaccaacatcaacatgcagtccaacccagtctccatgatgcagcagcaggcggccacgtcgcactacagctcggcgcagggcggcagccagcactaccagggccagtcgtccatcgccatgatggggcagggcagccaggggagcagcatgatggggcagcggcccatggcgccctaccggccctcccagcaaggctcttcccagcagtacctgggccaggaggagtactatggcgagcagtacagccacagccagggcgccgcggagcccatgggccagcagtactaccccgacggccatggcgattacgcctaccagcagtcatcctacacggagcagagctacgaccggtccttcgaggagtccacgcagcactactatgaggggggaaactcccagtacagccagcagcaggccgggtaccagcagggtgccgcgcagcagcagacgtactcccagcagcagtaccccagccagcagagctaccccgggcagcagcagggctacgggtctgcccagggagccccgtcacagtaccccggctaccagcaaggccaaggccagcagtacggaagctaccgagcaccgcagacagcgccgtctgcccagcagcagcggccctacggctatgaacagggccagtatggaaattaccagcagtaagggacacacattctggctggagcccttgtggtagcgtgttcatccaggggccggatgggctggcggcagctctggtgaattgtgacatgttggttacctgttcgcccagtgccacgtctgcatgtgaagcgtgctcatttcatgctgggacctacttgctcagatctccaagcaagcatttcttttcttttagggatgtctgaaagtcacatccagttacattactgtgttctttctaatgaaaagtaaaggttttatatagagaaacttgagtaatttttacatttctaagacattaaatcccatttaaattctgtgtgaacattaaagacagcacacttgcaaaagtatggtcaaaggaaaaaaatcccacatttcaattaacaagtagcatggacatttgatcaacctttagttggaataataatattcatatttgctatgaatccttttaaaaaaatctttggataaatgctgacagatttccaagaactaccaagaaaatacaagagatatccaatgcttgatatatgaggcctagtaataacgatatttctctttaattgatgttttgttttaaaagttaaaagtaattcttggcgtggtggttcacgcctgtaatcccagcactttgggaggccgaagcgggcggatcacctgaggtcgggagttcgagaccagcctgaccaacatggagaaaccccgtccctactaaaaatacaaaattagccaggtatggtggtgcatacctgtaatcccagctactcgggaacctgaggcaggagaatggcttgaacccaggagacagaggttgtggtggggcaagatcgcaccattgcacccgagcctaggcaacaagagtgaaattccgtctcaaaaaaataaataaataaataaataaataagttaaaattaattctttatccagagtcgggtgctttagaatttataagtcacttatgtgttttgcttgaattaattctgacagcccctatgaggaaatctggaggcaggtaacagttcccattttagagatgaagaactgaggcacagattaaaggacttgcctgtgttgaataccagtcctgttctaggacattctcccctctcctaggagacggatgtcacgcacaaatggggagagaagtgtttattttgtaggcactaagggtttctaaaacccttaacactggtaagggctcaaaaataaacgtatgtgttcatattcgatcaccgaaatgagagttcttaattgctaattgacaaacgcgttagcaatttcagttagggagtcatctcccttgattgtgttcttttcctgtcaattttcatagacctaatttgcaaactcaatcggggactaaaatttcccactgaaaatgttaaacattttagataactgtgaagatagtttatttttattccttgccaatctgggaatatgccttttttgtgtgtttgtgtgtttttttaagtgctgtattaataatactttctgaaagaaaaggacacttaccccaaaacttcaatctgaaatgtcttacattaagaatatcttgaatgttgtgtatatattttaaaaagcactttgcaaaatagtttgtacatttatttcctaatttatacatgatttttggtgttaatatatttaatgattaataacagaatgtttatttaatgtgctgtccatttttatgtaatattatggggaaagtgatgccagcagttccttttcattattctatcttctgtcatatgaatgttgagcaaagcttaggccaacatgaattgtttgtgaagtgtggttgatggtgctttgtttttttctgactacttctatggaaggccagtgaagaagcaaaggaagacatgaaaattgacgctcattcttcttcctattgttccctgacatccagcaaattgtgaatttgaaaaatgatggccagttttcagaagtgctgacaaattcatattggtatgcaaaagctcatcacccattaaggtttgttgttgaatcaacagtactcagcatattaaaacagtacatcagaactcatgccaacagtctttatgatgggattaaggtggacaagatctcctaagatctgtgaatgggattaaggtggacaagatctcctaagatctgaaaagaaaccttaatacgctcatatggttggagtgttaagtgaacctctgattttgtcagggtttttctacgtgtaggcgtgaatagggggcaccccttcaaaactgtacaaagaagacgactgttttccatttccatttaaacatttttagccacttcatttctatttattgaacaggtcaaatttgtcttgttatttgtgagtacagtacatttaaaaaacatccttatcggttatttttttttcagtcggagtttgacgtataaattgtttatgcttttggtgtaatctcttaataaactggttcttc

SEQ ID NO: 260699 - DNA, 963 bp, Artificial Sequence
  derived and/or modified sequence
atggaaacaggtaaccagacccatgcccaagagtttctgctactcggattttccgccacatcagaaatacagttcatactcttcggcctgttccttagtatgtacctcgttacctttacgggcaatttgctgattattctcgcaatttgttcagattcacacctccatacacctatgtacttcttcctctccaacctgagtttcgccgatctctgctttactagcacgaccgtcccaaaaatgcttttgaatattctcactcagaacaaatttatcacctatgcaggatgcctgtcgcagatattcttcttcacgagttttggctgtttggataatcttctactgacagtgatggcttacgaccgatttgtcgcagtgtgtcatcctctccattatactgtgattatgaacccccagctgtgcgggctgctcgtgctaggctcttggtgtatctcggtcatgggatccctactggagaccctgaccgtgcttcgtctcagcttttgcacggagatggagatcccacattttttttgtgacctgctcgaagtgctcaaattagcctgcagtgatacttttataaacaacgtggtgatctactttgcgacgggggtactgggcgtgatcagcttcacgggtatctttttttcgtattacaagatcgtttttagcattctgagaatttcttccgccggccgtaaacacaaagccttttctacatgcgggtcccacttgtccgttgtgacgttattctatgggacaggattcggcgtgtatctgtcctccgctgccacaccaagctcacggacttctcttgtggccagcgtaatgtacacgatggttacacccatgttgaatccttttatctacagtttacgcaataccgacatgaagagggcactgggcagactgctgtctagagctacattttttaatggtgacattacagccgggctctcttag

SEQ ID NO: 260700 - DNA, 963 bp, Artificial Sequence
  derived and/or modified sequence
atggagactggaaaccagacccacgcccaggagttcctgctgctgggcttcagcgccaccagcgagatccagttcatcctgtttggcctcttcctgtccatgtacctggtgaccttcaccggcaacctgctgatcatcctggccatctgcagcgacagccacctgcacacccccatgtacttcttcctgagcaacctgagctttgctgacctgtgcttcaccagcaccaccgtgcccaagatgctgctgaacatcctgacccagaacaagttcatcacctacgccggctgcctgagccagatcttcttcttcaccagctttggctgcctggacaacctgctgctgactgtgatggcctatgacagatttgtggccgtgtgccaccccctgcactacaccgtcatcatgaacccccagctgtgtggcctgctggtgctgggctcctggtgcatctctgtgatgggcagcctgctggagaccctgactgtgctgcggctgtccttctgcacagagatggagatcccccacttcttctgtgacctgctggaggtgctgaagctggcctgcagcgacaccttcatcaacaacgtggtgatctactttgccactggagtgctgggcgtcatctccttcaccggcatcttcttctcctactacaagatcgtgttcagcatcctgcgcatcagcagcgctggcaggaagcacaaggccttcagcacctgtggcagccacctgtctgtggtgaccctcttctacggcaccggcttcggcgtgtacctgagcagcgctgccacccccagcagcaggaccagcctggtggcctctgtgatgtacaccatggtgacccccatgctgaaccccttcatctacagcctgaggaacacagacatgaagagggccctgggccgcctgctgagccgggccaccttcttcaacggggacatcacagctggcctgtcctag

SEQ ID NO: 260701 - DNA, 963 bp, Artificial Sequence
  derived and/or modified sequence
atggagaccggcaaccagacccacgcccaggagttcctgctgctgggtttttctgcgactagcgaaattcagttcattctgttcgggttgttcctgtcaatgtacctggtcacgttcactggaaacctactaattattctggctatctgctccgattctcacctccacacgccgatgtacttttttctttctaacctcagtttcgccgatctatgttttaccagcaccacagtgcctaagatgctgttgaatattctgacgcagaacaaatttattacgtacgccggatgtctaagccagattttcttctttacctcattcggatgtctggacaatctgcttctgacagtaatggcctacgaccgcttcgtggctgtgtgtcacccacttcattacacagttattatgaatccgcagctgtgtgggctgttggtcctcggaagttggtgcatatccgtcatgggcagcctcttggagactctcaccgtactgaggttgtccttttgtaccgagatggagataccccactttttttgcgatctgctggaggtgctgaagttggcatgttccgacactttcattaacaatgtcgtcatctacttcgccactggtgtgctgggagtgatttcatttactggcatattcttcagctattataaaatagttttttcaatattgcggatctcaagtgctggccgcaagcacaaggctttttccacatgcgggagccatctgagtgtcgtgaccctattctatggcaccggattcggagtgtatctgtcaagcgctgccaccccatccagccgtaccagcttggtagctagcgtgatgtacactatggtgacccctatgctgaaccccttcatttactccctaagaaatactgacatgaagcgggcactgggacgattgttaagtcgggctacattcttcaacggagacatcactgccgggttgtcctag

SEQ ID NO: 260702 - DNA, 963 bp, Artificial Sequence
  derived and/or modified sequence
atggagaccgggaaccaaactcatgcccaggagtttctgctgctcggttttagcgccacatctgaaattcagtttatcctattcgggctgtttctctctatgtatctagtgacttttactgggaacctgttaatcatactggcaatttgttcagactctcatctgcatactccgatgtacttttttctgtctaacttatcttttgcagatctctgtttcacttccaccaccgtgcctaagatgttgctgaacatcctcactcagaacaaatttatcacttatgccggatgcttaagtcagatttttttcttcacgtcttttgggtgccttgacaacctgctccttacagtgatggcttacgaccgattcgtcgccgtgtgccatcctctgcattacacagtcattatgaatccccagttgtgtggcctgttagtcctgggcagctggtgtatttctgtcatgggttccctactcgaaacacttacagtcttacggcttagtttctgtaccgagatggaaattcctcactttttctgcgatctgctggaagtactgaagctggcgtgcagcgacaccttcattaacaacgttgtgatctatttcgctacaggcgtgctgggcgtgatcagcttcaccggaatctttttctcctactacaagattgtgttctctatactcagaatcagctctgcgggtagaaaacacaaggctttttccacctgtggctctcatctatctgtagtcaccctcttttatggtaccggatttggagtgtatctcagttccgctgctaccccgtcaagccgcacatctcttgtcgcaagcgtgatgtatacgatggtgacacccatgctcaatcccttcatttacagccttcgcaacactgatatgaaacgggctctggggaggctcctgtcaagggcaacatttttcaacggcgacataaccgctggcctcagctag

SEQ ID NO: 260703 - DNA, 963 bp, Artificial Sequence
  derived and/or modified sequence
atggagaccggcaaccagacccacgcccaggagttcctgctgctgggcttcagcgccaccagcgagatccagttcatcctgttcggcctgttcctgagcatgtacctggtgaccttcaccggcaacctgctgatcatcctggccatctgcagcgacagccacctgcacacccccatgtacttcttcctgagcaacctgagcttcgccgacctgtgcttcaccagcaccaccgtgcccaagatgctgctgaacatcctgacccagaacaagttcatcacctacgccggctgcctgagccagatcttcttcttcaccagcttcggctgcctggacaacctgctgctgaccgtgatggcctacgacagattcgtggccgtgtgccaccccctgcactacaccgtgatcatgaacccccagctgtgcggcctgctggtgctgggcagctggtgcatcagcgtgatgggcagcctgctggagaccctgaccgtgctgagactgagcttctgcaccgagatggagatcccccacttcttctgcgacctgctggaggtgctgaagctggcctgcagcgacaccttcatcaacaacgtggtgatctacttcgccaccggcgtgctgggcgtgatcagcttcaccggcatcttcttcagctactacaagatcgtgttcagcatcctgagaatcagcagcgccggcagaaagcacaaggccttcagcacctgcggcagccacctgagcgtggtgaccctgttctacggcaccggcttcggcgtgtacctgagcagcgccgccacccccagcagcagaaccagcctggtggccagcgtgatgtacaccatggtgacccccatgctgaaccccttcatctacagcctgagaaacaccgacatgaagagagccctgggcagactgctgagcagagccaccttcttcaacggcgacatcaccgccggcctgagctag

SEQ ID NO: 260704 - protein, 734 aa, Artificial Sequence
  derived and/or modified sequence
MNSMKTEENKSFSAMEDDQRTRPEVSKDTVMKQTHADTPVDHCLSGIRKCSSTFKLKSEVNKHETALEMQNPNLNNKECCFTFTLNGNSRKLDRSVFTAYGKPSESIYSALSANDYFSERIKNQFNKNIIVYEEKTIDGHINLGMPLKCLPSDSHFKITFGQRKSSKEDGHILRQCENPNMECILFHVVAIGRTRKKIVKINELHEKGSKLCIYALKGETIEGALCKDGRFRSDIGEFEWKLKEGHKKIYGKQSMVDEVSGKVLEMDISKKKALQQKDIHKKIKQNESATDEINHQSLIQSKKKVHKPKKDGETKDVEHSREQILPPQDLSHYIKDKTRQTIPRIRNYYFCSLPRKYRQINSQVRRRPHLGRRYAINLDVQKEAINLLKNYQTLNEAIMHQYPNFKEEAQWVRKYFREEQKRMNLSPAKQFNIYKKDFGKMTANSVSVATCEQLTYYSKSVGFMQWDNNGNTGNATCFVFNGGYIFTCRHVVHLMVGKNTHPSLWPDIISKCAKVTFTYTEFCPTPDNWFSIEPWLKVSNENLDYAILKLKENGNAFPPGLWRQISPQPSTGLIYLIGHPEGQIKKIDGCTVIPLNERLKKYPNDCQDGLVDLYDTTSNVYCMFTQRSFLSEVWNTHTLSYDTCFSDGSSGSPVFNASGKLVALHTFGLFYQRGFNVHALIEFGYSMDSILCDIKKTNESLYKSLNDEKLETYDEEKGKQESSLQDHQIEPMEC

SEQ ID NO: 260705 - protein, 704 aa, Artificial Sequence
  derived and/or modified sequence
MKQTHADTPVDHCLSGIRKCSSTFKLKSEVNKHETALEMQNPNLNNKECCFTFTLNGNSRKLDRSVFTAYGKPSESIYSALSANDYFSERIKNQFNKNIIVYEEKTIDGHINLGMPLKCLPSDSHFKITFGQRKSSKEDGHILRQCENPNMECILFHVVAIGRTRKKIVKINELHEKGSKLCIYALKGETIEGALCKDGRFRSDIGEFEWKLKEGHKKIYGKQSMVDEVSGKVLEMDISKKKALQQKDIHKKIKQNESATDEINHQSLIQSKKKVHKPKKDGETKDVEHSREQILPPQDLSHYIKDKTRQTIPRIRNYYFCSLPRKYRQINSQVRRRPHLGRRYAINLDVQKEAINLLKNYQTLNEAIMHQYPNFKEEAQWVRKYFREEQKRMNLSPAKQFNIYKKDFGKMTANSVSVATCEQLTYYSKSVGFMQWDNNGNTGNATCFVFNGGYIFTCRHVVHLMVGKNTHPSLWPDIISKCAKVTFTYTEFCPTPDNWFSIEPWLKVSNENLDYAILKLKENGNAFPPGLWRQISPQPSTGLIYLIGHPEGQIKKIDGCTVIPLNERLKKYPNDCQDGLVDLYDTTSNVYCMFTQRSFLSEVWNTHTLSYDTCFSDGSSGSPVFNASGKLVALHTFGLFYQRGFNVHALIEFGYSMDSILCDIKKTNESLYKSLNDEKLETYDEEKGKQESSLQDHQIEPMEC

SEQ ID NO: 260706 - protein, 162 aa, Artificial Sequence
  derived and/or modified sequence
MKQTHADTPVDHCLSGIRKCSSTFKLKSEVNKHETALEMQNPNLNNKECCFTFTLNGNSRKLDRSVFTAYGKPSESIYSALSANDYFSERIKNQFNKNIIVYEEKTIDGHINLGMPLKCLPSDSHFKITFGQRKSSKEDGHILRQCENPNMECILFHVVAIG

SEQ ID NO: 260707 - DNA, 2205 bp, Artificial Sequence
  derived and/or modified sequence
atgaacagcatgaagaccgaggagaacaagagcttcagcgccatggaggacgaccagagaaccagacccgaggtgagcaaggacaccgtgatgaagcagacccacgccgacacccccgtggaccactgcctgagcggcatcagaaagtgcagcagcaccttcaagctgaagagcgaggtgaacaagcacgagaccgccctggagatgcagaaccccaacctgaacaacaaggagtgctgcttcaccttcaccctgaacggcaacagcagaaagctggacagaagcgtgttcaccgcctacggcaagcccagcgagagcatctacagcgccctgagcgccaacgactacttcagcgagagaatcaagaaccagttcaacaagaacatcatcgtgtacgaggagaagaccatcgacggccacatcaacctgggcatgcccctgaagtgcctgcccagcgacagccacttcaagatcaccttcggccagagaaagagcagcaaggaggacggccacatcctgagacagtgcgagaaccccaacatggagtgcatcctgttccacgtggtggccatcggcagaaccagaaagaagatcgtgaagatcaacgagctgcacgagaagggcagcaagctgtgcatctacgccctgaagggcgagaccatcgagggcgccctgtgcaaggacggcagattcagaagcgacatcggcgagttcgagtggaagctgaaggagggccacaagaagatctacggcaagcagagcatggtggacgaggtgagcggcaaggtgctggagatggacatcagcaagaagaaggccctgcagcagaaggacatccacaagaagatcaagcagaacgagagcgccaccgacgagatcaaccaccagagcctgatccagagcaagaagaaggtgcacaagcccaagaaggacggcgagaccaaggacgtggagcacagcagagagcagatcctgcccccccaggacctgagccactacatcaaggacaagaccagacagaccatccccagaatcagaaactactacttctgcagcctgcccagaaagtacagacagatcaacagccaggtgagaagaagaccccacctgggcagaagatacgccatcaacctggacgtgcagaaggaggccatcaacctgctgaagaactaccagaccctgaacgaggccatcatgcaccagtaccccaacttcaaggaggaggcccagtgggtgagaaagtacttcagagaggagcagaagagaatgaacctgagccccgccaagcagttcaacatctacaagaaggacttcggcaagatgaccgccaacagcgtgagcgtggccacctgcgagcagctgacctactacagcaagagcgtgggcttcatgcagtgggacaacaacggcaacaccggcaacgccacctgcttcgtgttcaacggcggctacatcttcacctgcagacacgtggtgcacctgatggtgggcaagaacacccaccccagcctgtggcccgacatcatcagcaagtgcgccaaggtgaccttcacctacaccgagttctgccccacccccgacaactggttcagcatcgagccctggctgaaggtgagcaacgagaacctggactacgccatcctgaagctgaaggagaacggcaacgccttcccccccggcctgtggagacagatcagcccccagcccagcaccggcctgatctacctgatcggccaccccgagggccagatcaagaagatcgacggctgcaccgtgatccccctgaacgagagactgaagaagtaccccaacgactgccaggacggcctggtggacctgtacgacaccaccagcaacgtgtactgcatgttcacccagagaagcttcctgagcgaggtgtggaacacccacaccctgagctacgacacctgcttcagcgacggcagcagcggcagccccgtgttcaacgccagcggcaagctggtggccctgcacaccttcggcctgttctaccagagaggcttcaacgtgcacgccctgatcgagttcggctacagcatggacagcatcctgtgcgacatcaagaagaccaacgagagcctgtacaagagcctgaacgacgagaagctggagacctacgacgaggagaagggcaagcaggagagcagcctgcaggaccaccagatcgagcccatggagtgctag

SEQ ID NO: 260708 - DNA, 2205 bp, Artificial Sequence
  derived and/or modified sequence
atgaatagtatgaaaacagaggagaacaaatccttttctgcaatggaggacgaccagcggacccgccctgaggtgtcgaaagacacggtgatgaagcaaacccacgccgatacacccgtggaccactgtctttctggtattcggaaatgcagctccacttttaagctgaagtccgaggtcaataagcatgaaacagctttggaaatgcagaacccaaatctgaataacaaagaatgctgtttcaccttcacactcaacgggaactccagaaaactcgacagatccgtgtttaccgcttatggtaagccttcagagtccatttactctgcactgagcgcaaacgactatttttctgaaagaatcaagaatcagttcaacaagaacatcatcgtgtacgaagagaaaactatcgatggccacatcaatttgggtatgccgctgaagtgtctgccatccgattctcatttcaagataacgtttggccagcgaaaatcaagtaaagaagatggccatattttgcggcagtgtgaaaacccaaatatggagtgcattctgttccacgtggtggctattggccgtaccagaaaaaagattgtcaaaatcaacgagctacacgagaagggtagcaaactctgcatctatgccctgaaaggcgaaactatcgaaggggccctgtgcaaagacggtcgcttccgaagcgacatcggagaattcgagtggaagttgaaggagggccacaagaagatttacggaaaacagtctatggtcgacgaagtgagcggcaaagtgcttgaaatggatatttccaaaaagaaggccttgcagcaaaaggatatacataaaaaaattaaacagaacgagtctgcaaccgacgaaatcaatcaccagtccttaatccagtcaaagaagaaggtgcacaaaccgaaaaaggatggagagactaaagatgtcgagcattcccgggagcagatccttcctccccaggatttgtctcattacattaaggataaaactcgtcagactatcccccgcattcgtaattactatttctgtagcttgccgcgcaagtacaggcagattaactcccaggttcgaagaagaccccacttaggtcgaaggtacgctataaatctggatgtgcagaaggaggccattaatctcctgaagaattatcagacactcaacgaagctattatgcaccagtaccctaatttcaaggaggaggctcagtgggttcgcaaatatttcagggaggagcagaagcgaatgaacctttcccctgccaaacagtttaatatctataagaaagattttgggaaaatgacagccaactcagtttcagtagcaacctgtgagcagctgacctattacagcaagtcagtcggattcatgcaatgggataacaacggcaatacaggcaatgccacatgtttcgtgtttaatggggggtacatcttcacatgccgtcacgtggtgcatctgatggtggggaaaaacactcatccatcactgtggccagacatcatcagcaagtgtgctaaggttacattcacttacacagagttctgccccacacccgataattggtttagcatcgagccttggctgaaagtgagcaacgagaatctggactacgctatcctaaagctaaaagagaacggcaacgccttccctcccggattgtggcgtcagatcagtccacagccctcaacaggactaatctacctgatcggccatcctgagggtcagatcaaaaagattgatggttgcaccgtcattccattaaacgaaagacttaagaagtatcccaatgattgccaggacggcttagtggacctatatgacaccaccagcaacgtttactgtatgttcacacaaaggtcattcctcagtgaggtgtggaatactcacacactatcctatgacacatgcttctcagatggttctagtgggagccctgtgtttaacgccagtggcaaactggttgcactccacacctttgggctgttttaccagaggggatttaacgtccacgctctgatcgaattcggctacagcatggactcaattctgtgcgacatcaagaaaactaatgaaagtctatacaaaagcttaaacgatgagaaactggagacgtatgacgaggagaaaggtaaacaggagtcctcactacaagaccaccagattgaaccaatggaatgttag

SEQ ID NO: 260709 - DNA, 3488 bp, Artificial Sequence
  derived and/or modified sequence
aaatccagagcggcgggcactgacgggcacttgcaccgtgtggacagactctccggttctggggaaatccagtccctgttactccattttggccagaaattcaagacatttcaggtggcagaataaattcaatccttgtttctccatcttatcgagtagtagaagttagttacattctctttgaactcatcatgaattccatgaagactgaagaaaacaagtcatttagcgctatggaagatgaccagaggactagacctgaagtttcaaaggatactgtcatgaagcagacacatgctgacacacctgttgatcattgtctatctggcataagaaagtgtagcagcacctttaagcttaaaagtgaagtcaacaagcatgaaacagcccttgaaatgcagaatccaaatttgaacaataaagaatgttgtttcacctttacgttgaatggaaactccagaaaattagaccgtagtgtgtttacagcatatggtaaacccagcgagagtatctactcagccctgagtgctaatgactatttcagtgaaaggataaagaatcagtttaataagaacattattgtttatgaagaaaagacaatagatggacatataaatttaggaatgcctctcaagtgcctgcctagtgattctcattttaaaattacatttggtcaaagaaagagtagcaaagaagatggacacatattacgccaatgtgaaaatccaaacatggaatgcattctttttcatgttgttgctataggaaggacaagaaagaagattgttaagatcaacgaacttcatgaaaaaggaagtaaactttgtatttatgccttgaagggtgagactattgaaggagccttatgcaaggatggccgttttcggtctgacataggtgaatttgaatggaaactaaaggaaggtcataagaaaatttatggaaaacagtccatggtggatgaagtatctggaaaagtcttagaaatggacatttcaaaaaaaaaagcattacaacagaaagatatccataaaaaaattaaacagaatgaaagtgccactgatgaaattaatcaccagagtctgatacagtctaagaaaaaagtccacaaaccaaagaaagatggagagaccaaagatgtagaacacagcagagagcaaattctcccacctcaggatctaagccattatattaaagataaaactcgccagacaattcccaggattagaaattattacttttgtagtttgccccgaaaatataggcaaataaactcacaagttagacggaggccgcatctgggtaggcggtatgctattaatctggatgtccaaaaggaggcaattaatctcttaaagaattatcaaacgttgaatgaagccataatgcatcagtatccgaattttaaagaggaggcacagtgggtaagaaaatattttcgggaagaacaaaagagaatgaatctttcaccagctaagcaattcaacatatataaaaaggacttcggaaaaatgactgcaaattctgtttcagttgcaacctgcgaacagcttacatattatagcaagtcagttgggttcatgcaatgggacaataatggaaacacaggtaatgctacttgctttgtcttcaatggtggttatattttcacctgtcgacatgttgtacatcttatggtgggtaaaaacacacatccaagtttgtggccagatataattagcaaatgtgcgaaggtaaccttcacttatacagagttctgccctactcctgacaattggttttccattgagccatggcttaaagtgtccaatgaaaatctagattatgccattttaaaactaaaagaaaatggaaatgcgtttcctccaggactatggcgacagatttctcctcaaccatctactggtttgatttatttaattggtcatcctgaaggccagatcaagaaaatagatggttgtactgtgattcctctaaacgaacgattgaaaaaatatccaaacgattgtcaagatgggttggtagatctctatgataccaccagtaatgtatactgtatgtttacccaaagaagtttcctatcagaggtttggaacacacacacgcttagttatgatacttgtttctctgatgggtcctcaggctccccagtgtttaatgcatctggcaaattggttgctttgcatacctttgggcttttttatcaacgaggatttaatgtgcatgcccttattgaatttggttattctatggattctattctttgtgatattaaaaagacaaatgagagcttgtataaatcattaaatgatgagaaacttgagacctacgatgaagagaaaggtaaacaagagtcatcacttcaagatcatcagattgaacccatggaatgttagaaaagagatgctgtcttcaagaaaatatgccaataattcctggcaaagatttcatgacaaagacacttaaagcaattgcaacaaaagtgaaaattggcaaatgagacctaattaaatcttctgcacagcaaaagaaactatcaacagggtaaacacacaacctacggaatgggagaaaatatttgcaaactatgcatacagcaaagatctaatattcagaatccattaggaacttaaacagattaacaagcaaaaaaaacaagcaaccccattaaaaagtgggcaaaggacatgaacaaacacttttcaaaagaagatatacacatggccaacaaggatatgaaaaaatacctgatatcactaatcattagagaaatgcaaatcaaaaaaatgccatcacactaatcagaatggctgttattaaaatgccaaaaaattacagatgctggcgaggttgcagagaaaggggaatgcttatacactgctagtgggaaaataaattagttcagccattgtggaaagcagttgggtgatttctaaaagaacttaaaacagctaccattcaagccagcaatctcatgactgggtatatgtccaaaggaatataaattgttctaccataaagacatgcacatatatgttcactgcagcactattcacaatagcaaaacatgaaatcaacctaaatgcccatcaatggtagactggataaagaaaatgtgacacatatacaccatagcatactacacagccataaaaaagtacaagatcatgtgctttgcagcaacatggatggaactgaaggtcattatcctaagcgaactaatgcaggaacagaaagccaagtaccacatgttctctcataagtggaagctaaatattgagtacacatggacacaaagaagaaaacaacagatatggggcctacttgagggtggagggtgggaggagggtgaagactgaaaaactgcctatggggtactatgcttattacctgggtgatgaaataatctgaacacaaaaccctggtgacatgcagtttacctatataacaaaactgcacatggactcttaaacctaaataaaagttta

SEQ ID NO: 260710 - DNA, 3344 bp, Artificial Sequence
  derived and/or modified sequence
gcgggaaaagttcagctgagagatataaaagagcagtctttccagcacctgcaaatccagagcggcgggcactgacgggcacttgcaccgtgtggacagactctccggttctgatactgtcatgaagcagacacatgctgacacacctgttgatcattgtctatctggcataagaaagtgtagcagcacctttaagcttaaaagtgaagtcaacaagcatgaaacagcccttgaaatgcagaatccaaatttgaacaataaagaatgttgtttcacctttacgttgaatggaaactccagaaaattagaccgtagtgtgtttacagcatatggtaaacccagcgagagtatctactcagccctgagtgctaatgactatttcagtgaaaggataaagaatcagtttaataagaacattattgtttatgaagaaaagacaatagatggacatataaatttaggaatgcctctcaagtgcctgcctagtgattctcattttaaaattacatttggtcaaagaaagagtagcaaagaagatggacacatattacgccaatgtgaaaatccaaacatggaatgcattctttttcatgttgttgctataggaaggacaagaaagaagattgttaagatcaacgaacttcatgaaaaaggaagtaaactttgtatttatgccttgaagggtgagactattgaaggagccttatgcaaggatggccgttttcggtctgacataggtgaatttgaatggaaactaaaggaaggtcataagaaaatttatggaaaacagtccatggtggatgaagtatctggaaaagtcttagaaatggacatttcaaaaaaaaaagcattacaacagaaagatatccataaaaaaattaaacagaatgaaagtgccactgatgaaattaatcaccagagtctgatacagtctaagaaaaaagtccacaaaccaaagaaagatggagagaccaaagatgtagaacacagcagagagcaaattctcccacctcaggatctaagccattatattaaagataaaactcgccagacaattcccaggattagaaattattacttttgtagtttgccccgaaaatataggcaaataaactcacaagttagacggaggccgcatctgggtaggcggtatgctattaatctggatgtccaaaaggaggcaattaatctcttaaagaattatcaaacgttgaatgaagccataatgcatcagtatccgaattttaaagaggaggcacagtgggtaagaaaatattttcgggaagaacaaaagagaatgaatctttcaccagctaagcaattcaacatatataaaaaggacttcggaaaaatgactgcaaattctgtttcagttgcaacctgcgaacagcttacatattatagcaagtcagttgggttcatgcaatgggacaataatggaaacacaggtaatgctacttgctttgtcttcaatggtggttatattttcacctgtcgacatgttgtacatcttatggtgggtaaaaacacacatccaagtttgtggccagatataattagcaaatgtgcgaaggtaaccttcacttatacagagttctgccctactcctgacaattggttttccattgagccatggcttaaagtgtccaatgaaaatctagattatgccattttaaaactaaaagaaaatggaaatgcgtttcctccaggactatggcgacagatttctcctcaaccatctactggtttgatttatttaattggtcatcctgaaggccagatcaagaaaatagatggttgtactgtgattcctctaaacgaacgattgaaaaaatatccaaacgattgtcaagatgggttggtagatctctatgataccaccagtaatgtatactgtatgtttacccaaagaagtttcctatcagaggtttggaacacacacacgcttagttatgatacttgtttctctgatgggtcctcaggctccccagtgtttaatgcatctggcaaattggttgctttgcatacctttgggcttttttatcaacgaggatttaatgtgcatgcccttattgaatttggttattctatggattctattctttgtgatattaaaaagacaaatgagagcttgtataaatcattaaatgatgagaaacttgagacctacgatgaagagaaaggtaaacaagagtcatcacttcaagatcatcagattgaacccatggaatgttagaaaagagatgctgtcttcaagaaaatatgccaataattcctggcaaagatttcatgacaaagacacttaaagcaattgcaacaaaagtgaaaattggcaaatgagacctaattaaatcttctgcacagcaaaagaaactatcaacagggtaaacacacaacctacggaatgggagaaaatatttgcaaactatgcatacagcaaagatctaatattcagaatccattaggaacttaaacagattaacaagcaaaaaaaacaagcaaccccattaaaaagtgggcaaaggacatgaacaaacacttttcaaaagaagatatacacatggccaacaaggatatgaaaaaatacctgatatcactaatcattagagaaatgcaaatcaaaaaaatgccatcacactaatcagaatggctgttattaaaatgccaaaaaattacagatgctggcgaggttgcagagaaaggggaatgcttatacactgctagtgggaaaataaattagttcagccattgtggaaagcagttgggtgatttctaaaagaacttaaaacagctaccattcaagccagcaatctcatgactgggtatatgtccaaaggaatataaattgttctaccataaagacatgcacatatatgttcactgcagcactattcacaatagcaaaacatgaaatcaacctaaatgcccatcaatggtagactggataaagaaaatgtgacacatatacaccatagcatactacacagccataaaaaagtacaagatcatgtgctttgcagcaacatggatggaactgaaggtcattatcctaagcgaactaatgcaggaacagaaagccaagtaccacatgttctctcataagtggaagctaaatattgagtacacatggacacaaagaagaaaacaacagatatggggcctacttgagggtggagggtgggaggagggtgaagactgaaaaactgcctatggggtactatgcttattacctgggtgatgaaataatctgaacacaaaaccctggtgacatgcagtttacctatataacaaaactgcacatggactcttaaacctaaataaaagtttaaaatatatataatgcc

SEQ ID NO: 260711 - DNA, 2364 bp, Artificial Sequence
  derived and/or modified sequence
caaatccagagcggcgggcactgacgggcacttgcaccgtgtggacagactctccggttctggggaaatccagtccctgttactccattttggccagaaattcaaggatactgtcatgaagcagacacatgctgacacacctgttgatcattgtctatctggcataagaaagtgtagcagcacctttaagcttaaaagtgaagtcaacaagcatgaaacagcccttgaaatgcagaatccaaatttgaacaataaagaatgttgtttcacctttacgttgaatggaaactccagaaaattagaccgtagtgtgtttacagcatatggtaaacccagcgagagtatctactcagccctgagtgctaatgactatttcagtgaaaggataaagaatcagtttaataagaacattattgtttatgaagaaaagacaatagatggacatataaatttaggaatgcctctcaagtgcctgcctagtgattctcattttaaaattacatttggtcaaagaaagagtagcaaagaagatggacacatattacgccaatgtgaaaatccaaacatggaatgcattctttttcatgttgttgctataggaaggacaagaaagaagattgttaagatcaacgaacttcatgaaaaaggaagtaaactttgtatttatgccttgaagggtgagactattgaaggagccttatgcaaggatggccgttttcggtctgacataggtgaatttgaatggaaactaaaggaaggtcataagaaaatttatggaaaacagtccatggtggatgaagtatctggaaaagtcttagaaatggacatttcaaaaaaaaaagcattacaacagaaagatatccataaaaaaattaaacagaatgaaagtgccactgatgaaattaatcaccagagtctgatacagtctaagaaaaaagtccacaaaccaaagaaagatggagagaccaaagatgtagaacacagcagagagcaaattctcccacctcaggatctaagccattatattaaagataaaactcgccagacaattcccaggattagaaattattacttttgtagtttgccccgaaaatataggcaaataaactcacaagttagacggaggccgcatctgggtaggcggtatgctattaatctggatgtccaaaaggaggcaattaatctcttaaagaattatcaaacgttgaatgaagccataatgcatcagtatccgaattttaaagaggaggcacagtgggtaagaaaatattttcgggaagaacaaaagagaatgaatctttcaccagctaagcaattcaacatatataaaaaggacttcggaaaaatgactgcaaattctgtttcagttgcaacctgcgaacagcttacatattatagcaagtcagttgggttcatgcaatgggacaataatggaaacacaggtaatgctacttgctttgtcttcaatggtggttatattttcacctgtcgacatgttgtacatcttatggtgggtaaaaacacacatccaagtttgtggccagatataattagcaaatgtgcgaaggtaaccttcacttatacagagttctgccctactcctgacaattggttttccattgagccatggcttaaagtgtccaatgaaaatctagattatgccattttaaaactaaaagaaaatggaaatgcgtttcctccaggactatggcgacagatttctcctcaaccatctactggtttgatttatttaattggtcatcctgaaggccagatcaagaaaatagatggttgtactgtgattcctctaaacgaacgattgaaaaaatatccaaacgattgtcaagatgggttggtagatctctatgataccaccagtaatgtatactgtatgtttacccaaagaagtttcctatcagaggtttggaacacacacacgcttagttatgatacttgtttctctgatgggtcctcaggctccccagtgtttaatgcatctggcaaattggttgctttgcatacctttgggcttttttatcaacgaggatttaatgtgcatgcccttattgaatttggttattctatggattctattctttgtgatattaaaaagacaaatgagagcttgtataaatcattaaatgatgagaaacttgagacctacgatgaagagaaaggtaaacaagagtcatcacttcaagatcatcagattgaacccatggaatgttagaaaagagatgctgtcttcaagaaaatatgccaataattcctggcaaagatttcatgacaaagacacttaaagcaattgcaacaaaagtgaaaattggcaaatgagacctaattaaatcttctgcacagcaaaag

SEQ ID NO: 260712 - DNA, 557 bp, Artificial Sequence
  derived and/or modified sequence
aaatccagagcggcgggcactgacgggcacttgcaccgtgtggacagactctccggttctgatactgtcatgaagcagacacatgctgacacacctgttgatcattgtctatctggcataagaaagtgtagcagcacctttaagcttaaaagtgaagtcaacaagcatgaaacagcccttgaaatgcagaatccaaatttgaacaataaagaatgttgtttcacctttacgttgaatggaaactccagaaaattagaccgtagtgtgtttacagcatatggtaaacccagcgagagtatctactcagccctgagtgctaatgactatttcagtgaaaggataaagaatcagtttaataagaacattattgtttatgaagaaaagacaatagatggacatataaatttaggaatgcctctcaagtgcctgcctagtgattctcattttaaaattacatttggtcaaagaaagagtagcaaagaagatggacacatattacgccaatgtgaaaatccaaacatggaatgcattctttttcatgttgttgctataggaag

SEQ ID NO: 260713 - DNA, 2205 bp, Artificial Sequence
  derived and/or modified sequence
atgaacagcatgaagacagaggagaacaagagcttcagcgccatggaggatgaccagaggaccaggcctgaggtgtccaaggacacagtgatgaagcagacccacgccgacacccctgtggaccactgcctgagcggcatcaggaagtgcagcagcaccttcaagctgaagtctgaggtgaacaagcatgaaacagccctggagatgcagaaccccaacctgaacaacaaggagtgctgcttcaccttcaccctgaatggaaacagcaggaagctggacagatctgtgttcaccgcctacggcaagcccagcgagagcatctacagcgccctgagcgccaatgactacttcagcgagcgcatcaagaaccagttcaacaagaacatcatcgtgtatgaggagaagaccattgatggccacatcaacctgggcatgcccctgaagtgcctgcccagcgacagccacttcaagatcaccttcggccagaggaagagcagcaaggaggatggccacatcctgcggcagtgtgagaaccccaacatggagtgcatcctcttccacgtggtggccatcggccgcaccaggaagaagatcgtgaagatcaatgagctgcacgagaagggcagcaagctgtgcatctatgccctgaagggggagaccattgaaggagccctgtgcaaggatggccgcttcagaagtgacattggagaatttgagtggaagctgaaggagggccacaagaagatctacggcaagcagagcatggtggatgaggtgtctgggaaggtgctggagatggacatcagcaagaagaaggccctgcagcagaaggacatccacaagaagatcaagcagaatgaaagtgccacagatgagatcaaccaccagagcctcatccagagcaagaagaaggtgcacaagcccaagaaggatggagagaccaaggatgtggagcacagccgggagcagatcctgcccccccaggacctgagccactacatcaaggacaagacccggcagaccatcccccgcatccggaactactacttctgcagcctgcccaggaagtaccggcagatcaacagccaggtgagaagaagaccccacctgggccgccgctatgccatcaacctggatgtgcagaaggaggccatcaacctgctgaagaactaccagaccctgaatgaggccatcatgcaccagtaccccaacttcaaggaggaggcccagtgggtgaggaagtacttccgggaggagcagaagaggatgaacctgagccctgccaagcagttcaacatctacaagaaggactttgggaagatgacagccaacagcgtgtctgtggccacctgtgagcagctgacctactacagcaagtctgtgggcttcatgcagtgggacaacaatggaaacacaggaaatgccacctgctttgtgttcaatggaggctacatcttcacctgccgccacgtggtgcacctgatggtgggcaagaacacccaccccagcctgtggccagacatcatcagcaaatgtgccaaggtgaccttcacctacacagagttctgccccaccccagacaactggttcagcattgagccctggctgaaggtgtccaatgaaaacctggactatgccatcctgaagctgaaggaaaatggaaatgccttccccccaggcctgtggaggcagatcagcccccagcccagcacaggcctcatctacctgattggccaccctgagggccagatcaagaagattgatggctgcaccgtcatccccctgaatgaaaggctgaagaagtacccaaatgactgccaggacggcctggtggacctgtatgacaccaccagcaatgtgtactgcatgttcacccagaggagcttcctgtctgaggtgtggaacacccacaccctgtcctatgacacctgcttcagtgatggcagcagcggcagccctgtgttcaatgccagcggcaagctggtggccctgcacaccttcggcctcttctaccagaggggcttcaacgtgcacgccctgattgaatttggctacagcatggacagcatcctgtgtgacatcaagaagaccaatgaaagcctgtacaagagcctgaatgatgagaagctggagacctatgatgaggagaagggcaagcaggagagcagcctgcaggaccaccagatcgagcccatggagtgctag

SEQ ID NO: 260714 - DNA, 2205 bp, Artificial Sequence
  derived and/or modified sequence
atgaacagcatgaagaccgaggagaacaagagcttcagcgccatggaagatgatcagcgcactcggccggaagtcagcaaagacaccgtaatgaaacagacgcatgcagacacccctgtagatcactgtctgagtggtatcaggaaatgtagctctactttcaaactcaagtctgaggtgaacaaacacgagacagctctggaaatgcagaacccgaacctgaacaacaaagaatgctgtttcacatttactctgaatggcaactctcggaagcttgatcgctcagtattcacagcgtatggaaaaccttccgaatcaatatactcagcactatccgcgaacgactatttcagcgaaagaatcaagaaccagtttaataagaacatcatagtgtacgaagagaaaactatagacggacatatcaatctgggaatgccactgaagtgcctgcccagcgactcacatttcaagataactttcgggcagaggaagagcagcaaggaggatggccatattcttcgacaatgcgagaacccaaatatggaatgtatcttatttcatgtggtggctatcggccgtacacgaaaaaagatagtgaagatcaatgagcttcatgagaagggatcgaagctttgtatctacgcattgaagggcgagacaatcgagggggcactgtgcaaagacggaagattccgctcagacatcggtgagtttgagtggaaactgaaagaagggcacaaaaaaatatatgggaaacaatcaatggtcgatgaagtatccggcaaagtgttggagatggacatttctaaaaagaaggctctacagcaaaaggatatccacaagaagattaagcagaatgaaagtgcaaccgatgaaatcaatcaccagtccctgatccagagcaagaaaaaagtgcataaacccaaaaaggatggagaaacaaaagacgttgaacatagtagagaacagatcctgcctccccaggacctgtcccactacataaaagacaagacacgacagacaattcccaggatccgaaattactacttttgcagcttgccgcgaaaataccgtcagatcaacagtcaggttcggcgccggccacacctggggagaaggtacgccattaatttggacgttcagaaggaggccattaacctgttgaagaactaccaaacactgaatgaggccatcatgcaccagtatcctaatttcaaagaagaggctcaatgggtcaggaagtatttccgtgaagagcaaaagaggatgaacctcagccctgctaagcaattcaatatatataaaaaagacttcgggaagatgactgctaacagcgtgtcggtggcaacctgtgagcagctaacctattatagcaagagtgttggttttatgcagtgggacaataacggcaacaccggcaacgccacctgcttcgttttcaatggaggctatatcttcacttgccgccacgtggtgcacctgatggtaggaaagaacactcacccaagcctgtggcctgacatcatatcaaagtgtgcgaaagtcaccttcacttacacagagttttgcccgaccccagataactggtttagtatcgagccgtggctcaaagtgtctaatgagaacctcgactacgctattttgaagctaaaggagaacggcaatgcctttcctccaggcctgtggcgtcagattagtccacaacccagcacaggcttaatctatcttatcggacatcctgaaggccagatcaaaaaaatagatggctgcaccgtgatccctctgaacgagcggctgaaaaagtatcccaatgattgccaggatggcctggtagacctctacgatacgacatccaatgtgtactgcatgttcactcagcgatcctttctttctgaggtgtggaatacgcacactctgtcatacgatacttgtttcagtgatggatcctctggaagtcccgtttttaatgctagtgggaagctggtagcgctgcatactttcggactcttctaccagagagggttcaatgttcacgcactgatcgagtttgggtacagcatggactcaatactttgcgatatcaaaaagaccaatgaaagcctgtacaagtctctgaacgatgagaaactcgagacttacgacgaagagaaggggaagcaagagtcaagcctacaagatcatcagattgaaccaatggagtgttag

SEQ ID NO: 260715 - DNA, 2205 bp, Artificial Sequence
  derived and/or modified sequence
atgaactcaatgaagactgaagaaaataagtctttctcagccatggaggatgaccagcggacacgtcctgaggtttcaaaagatactgtaatgaaacagacacacgcagatacgcccgtggatcattgcctctccggaatcagaaagtgctcatcaacttttaaactgaaaagcgaggtgaacaagcatgaaacggccttggaaatgcaaaatcccaatttgaataataaagagtgttgtttcaccttcaccctgaacggcaacagtaggaaactggacagatcagtctttaccgcatatggcaaaccatcagagagcatatactcagcactatcggccaatgactacttcagtgagaggattaagaaccagtttaacaaaaacatcattgtgtacgaggaaaaaacaatagatggacatataaatcttggcatgcctctcaaatgcctgccatccgactcccatttcaaaattacgttcggacagcgtaagtcctccaaagaggatggacacatcctccggcagtgcgagaaccccaatatggagtgcatacttttccacgtcgtggccattgggagaacacggaagaagattgttaaaataaacgagctgcacgagaagggttccaagctgtgcatttacgcgttgaagggtgaaacaatcgagggagccctctgcaaggatggcagattcaggagcgacataggagaattcgagtggaagcttaaggaaggccacaaaaagatctatgggaaacaaagtatggtggacgaagtgagcggcaaggtcctggagatggacatctcaaagaaaaaggcgcttcagcaaaaggacattcacaagaagattaagcagaacgaaagcgcaaccgacgagatcaaccatcagtcactgattcagtccaaaaagaaggtccataaaccgaagaaagatggtgagaccaaggacgtggagcactcacgcgagcaaatcttgccaccgcaggatctgtctcattatatcaaggataaaaccaggcagactattcccaggattagaaattattacttctgtagcttgccacgtaagtatcggcaaatcaactcccaggtgcgccgacgcccacatctcggaaggagatatgccattaacctggatgtacagaaagaagcaataaacttattgaaaaactatcagacgctcaacgaagctattatgcaccagtacccgaactttaaggaggaagctcagtgggtgcgaaagtattttcgcgaagaacagaagcgcatgaatctttcccccgctaagcagtttaatatttacaagaaggactttggcaaaatgacagccaactctgtttcagtggccacttgtgaacagctgacctattactctaaatctgtaggttttatgcagtgggataacaatgggaatacgggtaacgctacttgctttgtctttaacgggggatatatatttacgtgccggcacgttgttcaccttatggtcgggaaaaatacccacccatccttgtggcctgatattatctcaaagtgcgccaaagtaacctttacctacaccgagttttgtccaaccccagacaattggttcagtattgaaccgtggctgaaggtttcaaatgagaacctggactacgcaatcttgaaactgaaggaaaatggcaatgcgttcccaccaggtctgtggcggcagatttcccctcagccctctaccggcctcatctacttaattggtcaccccgagggacagatcaagaagatcgatgggtgcacagtgatccctctcaatgagcgcctgaaaaagtacccaaacgactgtcaggatgggttggtggacctgtacgatacaactagcaacgtgtactgcatgtttacccaacggagcttcctttctgaggtatggaatactcacaccctcagttacgacacatgtttcagtgacggctcatccgggagcccggtgttcaatgccagtggcaaactggtggcgctgcataccttcgggctcttttaccaacgtgggtttaatgtccacgctcttatcgagttcggttactcaatggattctattctctgcgacataaagaaaaccaacgaaagtctgtacaagtctctgaacgatgaaaaactggagacttacgatgaagaaaagggaaaacaggaatcctccctacaggaccatcagatcgagccaatggagtgttag

SEQ ID NO: 260716 - DNA, 1596 bp, Artificial Sequence
  derived and/or modified sequence
atcagcggcagaagggcagcaatggccacacaccgaagcaccttggcgggctattccccttgcagctctcctcagcgcgctgctcccactcgcaatcaaaaggcggaaaaagcgcgaaaccgccaggcatctcccatacccacccggctgccgcgcaacccctccttggcttccactgggagacaggggacgccgatgagcaggaagaagcagggcagtgactgcttagtttatcctggtcacccgccaggtttgtggcctgtgatctcttgtcaccttggtctctcagctttgtcttctgaaatctggacttccaattgtctttgtcttgctgcccttccttgcgacactggcctggaatccctcacggtagtctgctggagtggaatttaggacgcatctcagttgtcaccatctttaattgcatgatgtctagttccttgcaaaccattatttcatgtatttcgctcttttttgtttgttttgttttgttttgttttcaggctaggggaaaatccagtccctgttactccattttggccagaaattcaaggtaatgacttttaatgttcctgactactagttctatcatctctctcacttctggatctgtctctattcactgatgtttctagtcattgtgggtcatattttttccacgttttaaatacttcctgatttttgactagatatcaagctttgttaatttcacaactttgggtgccaaaaatttttacattcctatcaatattcttgagctttgttccagtacgttgttattttacatggaaaccatttcatactttcaaagcttgcatttatttgttaggtgggaccagaacaagggctaatgttgtcccactatggaagcaatactttctgagtagtctccctgatacttcatgaattatgaagttttctagtcggattttggggaactgaaaccattttctgtcctgtatgagcctcagaaattgttacatctgctcctttccgatagttcttttcctgttccttttcaacagtttcattatactcatgcattgaccaagctgaaatctcaagggttgcccactgcacatctctgatcctctgtgctcctgtggcgctcttcatcctagtactctgccatacaggctccagtcatcttggcctcccacaactcccagcttgtcttctcaactcagggaaactgccaggttctgcctgtttcccctccctgagatatgccttggaaatgccatacagtaagctagatagccataggggttaccgcatatgattttcttctcagatatcagagatgagatcccacacagcctgatgtccagtgtttgaaagtggttatttcatagatcttgtttttttgtttttttagacatttaaggtggcagaataaattcaatccttggttctccattttttccactagtagaagttagttatattgtctttgaactcatcatgaattccatgaagactgaagggaacaagtcatttagtgctacagaggatgaccagagggctagacctgaagtttcaaaggcatatctacttttttacaactcctcactggagagatagtctaaccgtggt

SEQ ID NO: 260717 - DNA, 846 bp, Artificial Sequence
  derived and/or modified sequence
atggccgaggagctggtgctggagagatgcgacctggagctggagaccaacggcagagaccaccacaccgccgacctgtgcagagagaagctggtggtgagaagaggccagcccttctggctgaccctgcacttcgagggcagaaactacgaggccagcgtggacagcctgaccttcagcgtggtgaccggccccgcccccagccaggaggccggcaccaaggccagattccccctgagagacgccgtggaggagggcgactggaccgccaccgtggtggaccagcaggactgcaccctgagcctgcagctgaccacccccgccaacgcccccatcggcctgtacagactgagcctggaggccagcaccggctaccagggcagcagcttcgtgctgggccacttcatcctgctgttcaacgcctggtgccccgccgacgccgtgtacctggacagcgaggaggagagacaggagtacgtgctgacccagcagggcttcatctaccagggcagcgccaagttcatcaagaacatcccctggaacttcggccagttcgaggacggcatcctggacatctgcctgatcctgctggacgtgaaccccaagttcctgaagaacgccggcagagactgcagcagaagaagcagccccgtgtacgtgggcagagtggtgagcggcatggtgaactgcaacgacgaccagggcgtgctgctgggcagatgggacaacaactacggcgacggcgtgagccccatgagctggatcggcagcgtggacatcctgagaagatggaagaaccacggctgccagagagtgaagtacggccagtgctgggtgttcgcctag

SEQ ID NO: 260718 - DNA, 483 bp, Artificial Sequence
  derived and/or modified sequence
atggccgaggagctggtgctggagagatgcgacctggagctggagaccaacggcagagaccaccacaccgccgacctgtgcagagagaagctggtggtgagaagaggccagcccttctggctgaccctgcacttcgagggcagaaactacgaggccagcgtggacagcctgaccttcagcgtggtgaccggccccgcccccagccaggaggccggcaccaaggccagattccccctgagagacgccgtggaggagggcgactggaccgccaccgtggtggaccagcaggactgcaccctgagcctgcagctgaccacccccgccaacgcccccatcggcctgtacagactgagcctggaggccagcaccggctaccagggcagcagcttcgtgctgggccacttcatcctgctgttcaacgcctggtgccccgccgacgccgtgtacctggacagcgaggaggagagacaggagtacgtgtag

SEQ ID NO: 260719 - DNA, 846 bp, Artificial Sequence
  derived and/or modified sequence
atggcggaagagctggtattggaaagatgcgatctcgagctcgagacaaacggtcgcgatcaccacacagcggacttatgccgcgaaaagctagtagtgcgtcgcgggcaacctttctggcttactctacattttgagggacgtaattacgaagcatctgtggattccctcaccttctcagtggtaactgggccagcccctagtcaggaggccgggaccaaagcacggtttccgctgagggatgccgttgaagagggggactggacggctaccgttgtggaccagcaagattgcactctgtccctccagttgactacacctgcaaacgcccccatcggtctttatcgcctcagcctggaggccagcactggttatcagggctccagctttgtacttggccactttattctgttatttaatgcctggtgtcccgcagacgcggtgtatcttgacagtgaagaggagaggcaggaatacgttctaacacagcagggattcatataccaaggatcggccaagttcatcaagaatatcccgtggaacttcgggcaatttgaggacggaattcttgacatttgtctcattctcctcgacgtgaacccgaagtttctgaagaatgcaggcagggactgcagtcgacgcagcagcccggtctatgtgggccgggtcgtgagtggtatggttaactgtaacgatgaccagggagttctgctgggacgatgggacaataactacggagacggcgtgtcaccaatgtcctggattgggtctgtagatatattgaggcgctggaaaaatcacggctgtcaacgagtaaaatacggacaatgctgggtgttcgcatag

SEQ ID NO: 260720 - DNA, 483 bp, Artificial Sequence
  derived and/or modified sequence
atggcggaggaactggtgctcgaacgttgtgatctggaattggagactaatggtcgggatcaccacaccgccgacttatgcagggagaaacttgtcgtgcgccggggtcagccattctggctcacgctgcactttgagggaaggaattatgaggcctctgtggacagtctgacattttccgttgtgacgggccctgccccctcacaggaagcggggacaaaagccagatttcctctgagagatgccgttgaagagggagactggaccgccaccgtggtggatcagcaagattgtactctttcactgcaactgacgaccccggccaatgccccaatcgggctctatcgactgtctcttgaagcctcaaccgggtatcagggaagctcattcgtgctgggtcatttcatcctacttttcaatgcgtggtgccccgctgacgccgtgtacctcgattcagaagaagaaaggcaggagtacgtgtag

SEQ ID NO: 260721 - DNA, 846 bp, Artificial Sequence
  derived and/or modified sequence
atggccgaggagctggtgctggagcgctgtgacctggagctggagaccaacggccgggaccaccacacagctgacctgtgccgggagaagctggtggtgcggcggggccagcccttctggctgaccctgcactttgagggcaggaactatgaggcctctgtggacagcctgaccttctctgtggtgactggacctgcccccagccaggaggccggcaccaaggcccgcttccccctgagagatgctgtggaggagggggactggacagccaccgtggtggaccagcaggactgcaccctgagcctgcagctgaccaccccagccaatgcccccatcggcctgtaccgcctgagcctggaggccagcacaggctaccagggcagcagctttgtgctgggccacttcatcctgctcttcaatgcctggtgcccagcagatgctgtgtacctggacagcgaggaggagcggcaggagtatgtgctgacccagcagggcttcatctaccagggcagcgccaagttcatcaagaacatcccctggaactttggccagtttgaagatggcatcctggacatctgcctgatcctgctggatgtgaaccccaagttcctgaagaatgccggccgggactgcagcagaagaagcagccctgtgtatgtgggccgggtggtgtctggcatggtgaactgcaatgatgaccagggcgtgctgctgggccgctgggacaacaactatggagatggagtgagccccatgtcctggattggctctgtggacatcctgcggcgctggaagaaccacggctgccagagggtgaagtatggccagtgctgggtgtttgcctag

SEQ ID NO: 260722 - DNA, 483 bp, Artificial Sequence
  derived and/or modified sequence
atggccgaggagctggtgctggagcgctgtgacctggagctggagaccaacggccgggaccaccacacagctgacctgtgccgggagaagctggtggtgcggcggggccagcccttctggctgaccctgcactttgagggcaggaactatgaggcctctgtggacagcctgaccttctctgtggtgactggacctgcccccagccaggaggccggcaccaaggcccgcttccccctgagagatgctgtggaggagggggactggacagccaccgtggtggaccagcaggactgcaccctgagcctgcagctgaccaccccagccaatgcccccatcggcctgtaccgcctgagcctggaggccagcacaggctaccagggcagcagctttgtgctgggccacttcatcctgctcttcaatgcctggtgcccagcagatgctgtgtacctggacagcgaggaggagcggcaggagtatgtgtag

SEQ ID NO: 260723 - DNA, 846 bp, Artificial Sequence
  derived and/or modified sequence
atggccgaggagctggtgctggagcggtgcgacctggagctggagacaaacggacgagatcaccatactgctgacctctgcagagaaaagctggtggttcgccggggtcaacccttttggctgactctccattttgaaggacggaactatgaagcttccgtggattcactgacgtttagtgtggtgactggacctgccccatcacaagaggccggtaccaaggctcggttcccgctcagagacgcggtggaagaaggtgactggactgctacagtggttgaccagcaggattgcaccttgtccctgcaactgaccactcctgcgaatgcccctattggcctttaccgactgtctcttgaagcctccactggttatcaagggagtagctttgtgctagggcatttcattttgctcttcaatgcatggtgcccggcggacgcggtgtacctggacagcgaggaggagcgtcaagaatatgtgctgactcagcagggatttatttaccagggcagcgcaaaatttattaagaatattccttggaatttcgggcagtttgaagacggaatcctggacatatgtctcatcttgctggatgtgaatcccaaattcttaaaaaacgccgggcgtgactgctcgcggaggagctctcccgtatacgtggggagggttgtctctgggatggttaactgtaatgacgatcagggggtgttgctaggaaggtgggataacaactacggtgacggcgtgtctcccatgtcctggatcggttctgtggatattcttcgccgatggaagaatcatgggtgtcagagagtaaaatacggccaatgctgggttttcgcctag

SEQ ID NO: 260724 - DNA, 483 bp, Artificial Sequence
  derived and/or modified sequence
atggccgaggagctggtgctggagcggtgcgacctggagctggagactaatggacgggaccatcatacagccgatctctgtcgcgagaagctcgttgtccggcgaggtcagcctttttggctgaccttgcacttcgaaggaagaaattatgaggcttcagtggacagcctaactttctcagtcgtcaccggcccggctccttcccaagaagctggcactaaagccagatttcctttgcgcgatgctgtggaggagggcgactggacggccacagtcgtcgatcagcaggattgtacgctctctttacaactgaccacaccagcgaacgcacccattggactctacagactctccctggaagcgtctaccggataccagggcagcagttttgtactggggcacttcatactgcttttcaacgcctggtgtccagcagacgctgtgtaccttgatagcgaagaggagagacaggagtatgtctag

SEQ ID NO: 260725 - DNA, 846 bp, Artificial Sequence
  derived and/or modified sequence
atggcagaagagctggtgttggaaaggtgcgatcttgagctggagacaaatggtagagatcaccatacggccgacctgtgtcgggagaagttggttgtcaggcgtggacagccgttctggctcacgctgcacttcgaaggacggaactacgaggcttctgtggacagtctcaccttcagcgtggttactgggccagccccttcgcaggaagccggaaccaaggctaggttccctttgcgggacgctgttgaggaaggcgattggaccgccacagttgtcgatcagcaggattgtactctctccctgcaactcaccacgccagcaaacgccccaattggtttataccggctgagtcttgaggccagcaccggttaccaggggtcctcttttgtcctgggccattttatcctgctttttaatgcatggtgtcccgctgatgccgtgtacctagattcggaagaggagcgacaggagtatgttctaacacagcagggttttatttaccagggatctgcaaaattcatcaagaacataccctggaattttggtcagttcgaagacggcattctggatatttgtctgattctgctcgacgtgaaccctaaatttctgaagaatgccggtagggactgctcccggaggtcttcaccagtatacgttgggagggtggtctccggcatggtcaactgtaatgacgaccagggcgtactcctcggcagatgggataataattacggggacggggtgagccctatgtcttggatagggtccgttgatatcctgagacggtggaagaaccatgggtgccaacgtgtcaagtatgggcaatgctgggtctttgcttag

SEQ ID NO: 260726 - DNA, 483 bp, Artificial Sequence
  derived and/or modified sequence
atggcggaggagttggtgctggagcgatgtgaccttgaactggagactaatggtcgcgaccaccatactgccgatctatgtcgagaaaagcttgtcgttagaaggggacagcctttctggctgaccctccattttgaagggagaaattatgaagcctctgtggactctctgaccttcagcgtagtgacaggaccagcaccctcccaggaggctggcacaaaggcaagatttccattacgcgacgccgtggaggagggcgattggacggccacggttgttgatcagcaagattgtaccttgtccctgcaactcacgactcccgcaaacgctccaatcggcttgtacaggctgtctctcgaagcatctaccggatatcaggggagttcattcgtgctcggccacttcatcttgctcttcaatgcctggtgtcccgctgacgccgtgtacctggactccgaagaggaacgtcaggaatacgtgtag

SEQ ID NO: 260727 - DNA, 1018 bp, Artificial Sequence
  derived and/or modified sequence
acagtggatccggaagcacaggagaccaagagaccagagataccaggatgagagataggacccctggttgccaggttcgagaagtcctaggctgagtccctggaaatgccagccgccagtggtcgcacttggagggtctcgccgccagtggaaggagccaccgcccccgcccgaccatggccgaggagctggtcttagagaggtgtgatctggagctggagaccaatggccgagaccaccacacggccgacctgtgccgggagaagctggtggtgcgacggggccagcccttctggctgaccctgcactttgagggccgcaactacgaggccagtgtagacagtctcaccttcagtgtcgtgaccggcccagcccctagccaggaggccgggaccaaggcccgttttccactaagagatgctgtggaggagggtgactggacagccaccgtggtggaccagcaagactgcaccctctcgctgcagctcaccaccccggccaacgcccccatcggcctgtatcgcctcagcctggaggcctccactggctaccagggatccagctttgtgctgggccacttcattttgctcttcaacgcctggtgcccagcggatgctgtgtacctggactcggaagaggagcggcaggagtatgtcctcacccagcagggctttatctaccagggctcggccaagttcatcaagaacataccttggaattttgggcagtttgaagatgggatcctagacatctgcctgatccttctagatgtcaaccccaagttcctgaagaacgccggccgtgactgctcccgccgcagcagccccgtctacgtgggccgggtggtgagtggcatggtcaactgcaacgatgaccagggtgtgctgctgggacgctgggacaacaactacggggacggcgtcagccccatgtcctggatcggcagcgtggacatcctgcggcgctggaagaaccacggctgccagcgcgtcaagtatggccagtgctgggtcttcgc

SEQ ID NO: 260728 - DNA, 693 bp, Artificial Sequence
  derived and/or modified sequence
gttttggaaaaagtgccagggaagccccgtgggcctctgtctctccgggaacccttcccgctcagggctcacagtggatccggaagcacaggagaccaagagaccagagataccaggatgagagataggacccctggttgccagtgccagccgccagtggtcgcacttggagggtctcgccgccagtggaaggagccaccgcccccgcccgaccatggccgaggagctggtcttagagaggtgtgatctggagctggagaccaatggccgagaccaccacacggccgacctgtgccgggagaagctggtggtgcgacggggccagcccttctggctgaccctgcactttgagggccgcaactacgaggccagtgtagacagtctcaccttcagtgtcgtgaccggcccagcccctagccaggaggccgggaccaaggcccgttttccactaagagatgctgtggaggagggtgactggacagccaccgtggtggaccagcaagactgcaccctctcgctgcagctcaccaccccggccaacgcccccatcggcctgtatcgcctcagcctggaggcctccactggctaccagggatccagctttgtgctgggccacttcattttgctcttcaacgcctggtgcccagcggatgctgtgtacctggactcggaagaggagcggcaggagtatgt

SEQ ID NO: 260729 - protein, 37 aa, Artificial Sequence
  derived and/or modified sequence
MGASRLYTLVLVLQPQRVLLGMKKRGFGAGRWNGFGG

SEQ ID NO: 260730 - DNA, 471 bp, Artificial Sequence
  derived and/or modified sequence
atgggagcctcccggctctatacattagttctcgtgctgcagccccagagagttctgctaggcatgaaaaagcggggttttggagctggaagatggaacggtttcgggggcaaagtgcaggagggagaaaccattgaggatggtgctagacgggagcttcaggaagagagtggacttacggtagacgctctccacaaggtagggcagatcgtgtttgagttcgtgggagaacccgagcttatggacgtccacgtgttctgtactgattctattcaggggacgcccgtggagtccgacgagatgagaccctgctggttccagctggatcaaatcccgttcaaagacatgtggccagatgactcatattggttccccctgctgctgcagaagaagaagtttcatgggtatttcaaatttcagggacaggacacgattctagattacaccttgcgcgaggtggacacagtgtag

SEQ ID NO: 260731 - DNA, 471 bp, Artificial Sequence
  derived and/or modified sequence
atgggagctagcagattatatactctggtacttgtgctgcagccacagagggtattactcggcatgaaaaaacgcggattcggagcgggcagatggaacggatttggaggcaaggtacaggaaggagaaaccatcgaagacggagcaagacgggagttgcaggaggagtcaggcctcacggtggacgccctgcacaaggtaggccagatagtcttcgaatttgtaggggaacctgagctgatggatgtccatgtgttctgtaccgactcaattcaggggactcccgtcgaaagtgatgagatgagaccatgctggtttcagctagatcagattccatttaaagacatgtggcccgacgattcgtactggttcccactcttactgcagaagaagaagtttcacggatattttaaatttcaaggccaggatactattttggattacaccctgcgggaagttgatacagtgtag

SEQ ID NO: 260732 - DNA, 471 bp, Artificial Sequence
  derived and/or modified sequence
atgggtgcctcgaggctgtacacactggtgctggtccttcagcctcagagggtgctcctggggatgaaaaagcgcggcttcggtgccggcagatggaatggattcggcggaaaggtgcaagagggtgaaacaatcgaggatggagcaagaagagagttgcaggaggaaagcggactgaccgtggacgctttacataaggtgggacaaatcgtcttcgagttcgtcggcgaaccagagctcatggacgtccatgtgttttgcacagacagtattcagggaactccagtcgagagcgatgaaatgagaccctgttggtttcaacttgatcagattcccttcaaggatatgtggcccgacgactcatattggtttcctcttttgcttcagaaaaagaagtttcacggctatttcaagttccagggccaggataccatcctcgattacaccctgcgcgaggtcgacactgtttag

SEQ ID NO: 260733 - DNA, 471 bp, Artificial Sequence
  derived and/or modified sequence
atgggcgccagccggctgtacaccctggtgctggtgctgcagccccagagggtgctgctgggcatgaagaagaggggctttggagctggccgctggaatggatttggaggcaaggtgcaggagggggagaccattgaagatggagcccggcgggagctgcaggaggagagcggcctgactgtggatgccctgcacaaggtgggccagatcgtgtttgaatttgtgggggagcctgagctgatggatgtgcacgtgttctgcacagacagcatccagggcacccctgtggagagtgatgagatgaggccctgctggttccagctggaccagatccccttcaaggacatgtggccagatgacagctactggttccccctgctgctgcagaagaagaagttccacggctacttcaagttccagggccaggacaccatcctggactacaccctgcgggaggtggacacagtgtag

SEQ ID NO: 260734 - DNA, 471 bp, Artificial Sequence
  derived and/or modified sequence
atgggcgccagccggctgtacaccctggtgctggtgctgcagccccagagggtgctcctggggatgaagaaacgcgggtttggagcagggcgctggaatggcttcggcggcaaagtgcaggagggcgaaacgattgaggacggcgcccgtagggaactccaggaggaaagtgggctgacggtggatgcactacataaagtcgggcagatagtgtttgagttcgtaggcgagcccgagctgatggatgttcatgtattctgtactgattctatccagggaactcccgtcgagtctgacgaaatgaggccttgttggtttcagctggatcaaattcccttcaaggacatgtggcctgatgatagctattggttccccctactgttacagaagaagaaatttcacggatacttcaaattccagggccaggacaccatcctggattacacgctgcgggaggtggacactgtatag

SEQ ID NO: 260735 - DNA, 471 bp, Artificial Sequence
  derived and/or modified sequence
atgggcgccagccggctgtacaccctggtgctggtgctgcagccccagcgggtactgctggggatgaagaaacggggcttcggcgccggaagatggaatggttttggcggaaaggtgcaggaaggcgaaaccatcgaagacggggccagaagggagctgcaggaagagtcaggcctcacggtggatgctctgcataaggttgggcaaattgtctttgagtttgtaggggaacctgaactgatggacgtacatgttttctgcacggacagcatccagggaactccagtcgagtctgatgaaatgcggccatgctggttccaactcgatcagattccattcaaggacatgtggccagacgactcctattggtttcctctcctattgcaaaagaagaaattccacgggtactttaagttccaaggccaggatactattttggactacactttgagggaggtggacaccgtctag

SEQ ID NO: 260736 - DNA, 471 bp, Artificial Sequence
  derived and/or modified sequence
atgggcgccagccggctgtacaccctggtgctggtgctgcagccccaaagggtgttactcggaatgaagaaaagaggtttcggtgctgggagatggaacgggttcggggggaaggtacaagagggggagaccattgaagatggagcccggcgcgagctacaagaggagtccggactgaccgtcgatgccctacacaaggtgggacaaatagttttcgaatttgttggtgaacccgaactgatggatgtacatgtgttttgtacagacagcatacagggtactcccgtcgagagcgacgaaatgcgaccttgctggtttcagctggaccaaattccgttcaaggatatgtggccagatgatagctactggtttccacttttgttacagaagaagaagtttcacggctatttcaaatttcaagggcaagataccattctcgattatacactgagggaggtggacaccgtgtag

SEQ ID NO: 260737 - DNA, 471 bp, Artificial Sequence
  derived and/or modified sequence
atgggcgcaagtagactatatactctcgtgctagtcctgcaaccacagagagtgctgctgggaatgaaaaagcgcggattcggagcaggtaggtggaacggtttcggagggaaagtgcaggagggcgaaaccattgaggatggcgctagacgagagctccaagaggagagcgggctgaccgtggatgccttgcacaaggtcggacaaatcgtgtttgagtttgtcggggagcccgagctgatggacgtgcatgtcttttgtacagactcaattcaaggaacaccggtggagagcgacgagatgagaccttgctggtttcagctcgaccagatcccctttaaggacatgtggcctgacgactcctactggttcccgttgctgctgcaaaagaagaagttccatggatactttaaatttcaggggcaggatacgattctggactatacactccgtgaggtggatacagtgtag

SEQ ID NO: 260738 - DNA, 471 bp, Artificial Sequence
  derived and/or modified sequence
atgggtgcgtcccggctgtacaccctggtgctagtcttgcagccacagcgcgtgctgttgggtatgaagaaaagagggtttggcgctggtcgctggaacggatttggcggaaaggttcaggaaggggagacaatcgaagatggtgcccgtagagagcttcaggaagagagcgggctgacggtggatgccttgcacaaggtagggcagatcgtgtttgaatttgtcggtgagcccgaactgatggacgttcacgtgttctgcacggatagtattcagggcacaccagtcgagtccgatgagatgcgcccttgctggttccagctggaccagatacctttcaaagacatgtggccagatgattcctattggttcccactgctgttacagaagaagaagtttcatggctactttaagtttcagggacaggatacaatcctggactataccctacgggaggttgataccgtgtag

SEQ ID NO: 260739 - DNA, 471 bp, Artificial Sequence
  derived and/or modified sequence
atgggcgctagcagactgtacacactggtgctcgttctacagccgcagagggtccttctcggtatgaagaagagaggattcggtgcgggacgatggaacggcttcggtgggaaagtacaggaaggagaaacaatcgaggacggtgctcggagggagttgcaggaggagtctggcctgactgtggatgccctgcacaaagtgggacagattgttttcgagttcgtgggggaaccagagctgatggacgtgcatgtgttctgcaccgacagcattcaagggaccccagtggagagcgacgagatgagaccctgttggtttcaactggaccagatcccctttaaggatatgtggcctgacgacagctactggttccctctgctgcttcaaaaaaaaaaattccatggatactttaaatttcaaggtcaagacacgattctggactacaccttgcgcgaagtcgatacagtttag

SEQ ID NO: 260740 - DNA, 471 bp, Artificial Sequence
  derived and/or modified sequence
atgggcgccagcagactgtacaccctggtgctggtgctgcagccccagagagtgctgctgggcatgaagaagagaggcttcggcgccggcagatggaacggcttcggcggcaaggtgcaggagggcgagaccatcgaggacggcgccagaagagagctgcaggaggagagcggcctgaccgtggacgccctgcacaaggtgggccagatcgtgttcgagttcgtgggcgagcccgagctgatggacgtgcacgtgttctgcaccgacagcatccagggcacccccgtggagagcgacgagatgagaccctgctggttccagctggaccagatccccttcaaggacatgtggcccgacgacagctactggttccccctgctgctgcagaagaagaagttccacggctacttcaagttccagggccaggacaccatcctggactacaccctgagagaggtggacaccgtgtag

SEQ ID NO: 260741 - protein, 156 aa, Artificial Sequence
  derived and/or modified sequence
MGASRLYTLVLVLQPQRVLLGMKKRGFGAGRWNGFGGKVQEGETIEDGARRELQEESGLTVDALHKVGQIVFEFVGEPELMDVHVFCTDSIQGTPVESDEMRPCWFQLDQIPFKDMWPDDSYWFPLLLQKKKFHGYFKFQGQDTILDYTLREVDTV

SEQ ID NO: 260742 - protein, 179 aa, Artificial Sequence
  derived and/or modified sequence
MSGISPQQMGEPEGSWSGKNPGTMGASRLYTLVLVLQPQRVLLGMKKRGFGAGRWNGFGGKVQEGETIEDGARRELQEESGLTVDALHKVGQIVFEFVGEPELMDVHVFCTDSIQGTPVESDEMRPCWFQLDQIPFKDMWPDDSYWFPLLLQKKKFHGYFKFQGQDTILDYTLREVDTV

SEQ ID NO: 260743 - DNA, 540 bp, Artificial Sequence
  derived and/or modified sequence
atgagcgggattagcccccagcagatgggcgaaccagaaggaagctggagcggtaagaatcccggtacgatgggcgcctccaggctgtacactctggttctcgtcctgcagcctcaaagagtgctgctgggcatgaagaagcggggcttcggtgcggggcgctggaatggattcggcggtaaggtccaggaaggggagactatagaagacggagctaggcgcgaactgcaggaggaatccggactcacggtggatgcactgcacaaagtcggccagattgtgtttgaattcgtgggggaaccagagctgatggacgttcacgtattttgtaccgatagtatccagggtacgccggtggaatctgacgaaatgcggccatgttggtttcagctggaccagatccctttcaaagacatgtggccagatgattcatactggttccctctccttctccagaagaagaaattccatggctatttcaagtttcaagggcaggacaccatactggactatacattacgggaggtggatacagtgtag

SEQ ID NO: 260744 - DNA, 540 bp, Artificial Sequence
  derived and/or modified sequence
atgtctggcataagcccgcagcaaatgggagaacctgagggctcttggagtggcaaaaaccccggtactatgggcgcctctcggttgtacacgttggtactggtcctacagcctcagcgcgtattactcggcatgaagaaaagggggtttggagcggggaggtggaatggctttggcggaaaagttcaagaaggcgaaacaatcgaagatggcgccaggcgcgagcttcaggaagagtctggactgacagtggatgccctacataaagtcggccagattgtctttgagttcgtgggagagcccgagcttatggatgtacatgtcttctgcaccgacagtattcagggaacgcccgtggaaagtgacgagatgcgcccctgttggttccagctggaccaaatcccttttaaagatatgtggcctgatgactcatactggttccctctgctattgcaaaagaagaagttccacggctattttaagttccaggggcaggatacaattctggattataccttgagagaagtcgacaccgtgtag

SEQ ID NO: 260745 - DNA, 540 bp, Artificial Sequence
  derived and/or modified sequence
atgtccggaatttctccccagcagatgggcgaaccggagggtagctggtccggcaagaatccaggaactatgggagcttcgaggctgtacactcttgtgcttgttttgcagcctcagagagtgcttcttggtatgaagaagcggggattcggcgcgggtcgatggaatggctttgggggcaaggtacaggagggggagaccattgaggacggagccaggcgtgagcttcaggaagaatccggactaaccgtagatgccctccacaaagtgggacagatcgtgtttgagttcgtgggagagcctgaactgatggatgttcacgtcttttgtactgactccattcaaggcacaccagtggagtcagatgagatgagaccttgctggtttcagctcgaccagattcctttcaaagacatgtggccggatgactcgtattggtttcccttgctgcttcagaagaagaagtttcacggctactttaaattccagggtcaggacaccattcttgattacactctgagagaggtggatacagtgtag

SEQ ID NO: 260746 - DNA, 540 bp, Artificial Sequence
  derived and/or modified sequence
atgagcggcatcagcccccagcagatgggagagcctgagggctcctggagcggcaagaaccctggcaccatgggcgccagccggctgtacaccctggtgctggtgctgcagccccagagggtgctgctgggcatgaagaagaggggctttggagctggccgctggaatggatttggaggcaaggtgcaggagggggagaccattgaagatggagcccggcgggagctgcaggaggagagcggcctgactgtggatgccctgcacaaggtgggccagatcgtgtttgaatttgtgggggagcctgagctgatggatgtgcacgtgttctgcacagacagcatccagggcacccctgtggagagtgatgagatgaggccctgctggttccagctggaccagatccccttcaaggacatgtggccagatgacagctactggttccccctgctgctgcagaagaagaagttccacggctacttcaagttccagggccaggacaccatcctggactacaccctgcgggaggtggacacagtgtag

SEQ ID NO: 260747 - DNA, 540 bp, Artificial Sequence
  derived and/or modified sequence
atgagcggcatcagcccccagcagatgggcgagcccgagggcagctggtcgggcaaaaaccccggcacaatgggagcaagccggctctacactctcgtcctggtgctccagcctcaacgcgtgctgctgggaatgaagaagcggggcttcggagccggtcgctggaatgggttcggtgggaaagtccaggagggggagacaatcgaagacggtgctcgccgagagcttcaggaagagagtggattaacggtggacgctctacacaaggtgggtcagatcgtgtttgaatttgtgggcgagcccgaacttatggacgtccatgtgttctgtacagacagcatccagggaacacccgtggagtccgacgaaatgcgtccatgctggtttcagcttgatcagattcccttcaaggacatgtggcccgacgactcatattggttcccgctactactacagaagaaaaagtttcatgggtattttaaatttcaggggcaagacaccattctcgactacactcttagagaggtggataccgtgtag

SEQ ID NO: 260748 - DNA, 540 bp, Artificial Sequence
  derived and/or modified sequence
atgagcggcatcagcccccagcagatgggcgagcccgagggcagctggagcggcaaaaacccaggaaccatgggcgcttctcgtttatacaccttggttttagtcctgcagcctcagcgggttctcctcggcatgaaaaagaggggctttggggccggcagatggaacggtttcggtggtaaggtgcaggagggggaaactattgaggacggggctagacgcgagctacaggaagaaagcgggctgactgtggacgcgctgcacaaggttggccagatagtgttcgagtttgtgggggagccagagttaatggacgtacatgtcttctgcacagattctattcaggggacccccgtggaatcagatgaaatgcgaccatgttggttccaactggatcagattcctttcaaggatatgtggcccgacgattcgtattggttccccctgttgctccagaagaagaagttccatgggtacttcaagttccaaggccaggacaccattttagattacacactccgagaggtggatacagtctag

SEQ ID NO: 260749 - DNA, 540 bp, Artificial Sequence
  derived and/or modified sequence
atgagcggcatcagcccccagcagatgggcgagcccgagggcagctggtccggcaagaatccggggacgatgggagcctctaggctgtacaccctcgtattggtccttcaaccacagagggtcctgctggggatgaagaaacggggattcggggccggcaggtggaacggttttggcggcaaggtacaggaaggcgagaccattgaagacggcgcccggagagaactgcaggaagagtctggattaacggtggacgccctgcataaggtgggacaaattgtatttgagtttgtgggggaacccgagctgatggatgtccacgtcttctgtacagacagcattcaggggacccccgtggagtccgacgagatgcgcccttgctggtttcaactggaccagatcccctttaaggacatgtggccagatgactcatattggttccccctgctgctccagaaaaagaagtttcacggctacttcaagttccaggggcaggacaccatcttggattacacgctccgtgaagttgatacagtgtag

SEQ ID NO: 260750 - DNA, 698 bp, Artificial Sequence
  derived and/or modified sequence
agggctttctgtatccctaggtttcttgccttgatgtactggagcaatcagatcacacggcggcttggagaaacccagggaccatgggcgcctccaggctctataccctggtgctggtcctgcagcctcagcgagttctcctgggcatgaaaaagcgaggcttcggggccggccggtggaatggctttgggggcaaagtgcaagaaggagagaccatcgaggatggggctaggagggagctgcaggaggagagcggtctgacagtggacgccctgcacaaggtgggccagatcgtgtttgagttcgtgggcgagcctgagctcatggacgtgcatgtcttctgcacagacagcatccaggggacccccgtggagagcgacgaaatgcgcccatgctggttccagctggatcagatccccttcaaggacatgtggcccgacgacagctactggtttccactcctgcttcagaagaagaaattccacgggtacttcaagttccagggtcaggacaccatcctggactacacactccgcgaggtggacacggtctagcgggagcccagggcagcccctgggcaggagacgtggctgctgaacagccgcaaaccatcttcacctgggggcattgagtggcgcagagccgggtttcatctggaattaactggatggaagggaaaataaagctatctagcggtg

SEQ ID NO: 260751 - DNA, 771 bp, Artificial Sequence
  derived and/or modified sequence
agggctttctgtatccctaggtttcttgccttgatgtactggagcaatcagatcacacggcggcttggagagtgagtgcaaggttttatgagtggaattagccctcagcagatgggggagccagaaggcagttggagtgggaagaacccagggaccatgggcgcctccaggctctataccctggtgctggtcctgcagcctcagcgagttctcctgggcatgaaaaagcgaggcttcggggccggccggtggaatggctttgggggcaaagtgcaagaaggagagaccatcgaggatggggctaggagggagctgcaggaggagagcggtctgacagtggacgccctgcacaaggtgggccagatcgtgtttgagttcgtgggcgagcctgagctcatggacgtgcatgtcttctgcacagacagcatccaggggacccccgtggagagcgacgaaatgcgcccatgctggttccagctggatcagatccccttcaaggacatgtggcccgacgacagctactggtttccactcctgcttcagaagaagaaattccacgggtacttcaagttccagggtcaggacaccatcctggactacacactccgcgaggtggacacggtctagcgggagcccagggcagcccctgggcaggagacgtggctgctgaacagccgcaaaccatcttcacctgggggcattgagtggcgcagagccgggtttcatctggaattaactggatggaagggaaaataaagctatctagcggtg

SEQ ID NO: 260752 - DNA, 662 bp, Artificial Sequence
  derived and/or modified sequence
ggtcagaggccacgcccccggaagcggcggtgcagaacccagggaccatgggcgcctccaggctctataccctggtgctggtcctgcagcctcagcgagttctcctgggcatgaaaaagcgaggcttcggggccggccggtggaatggctttgggggcaaagtgcaagaaggagagaccatcgaggatggggctaggagggagctgcaggaggagagcggtctgacagtggacgccctgcacaaggtgggccagatcgtgtttgagttcgtgggcgagcctgagctcatggacgtgcatgtcttctgcacagacagcatccaggggacccccgtggagagcgacgaaatgcgcccatgctggttccagctggatcagatccccttcaaggacatgtggcccgacgacagctactggtttccactcctgcttcagaagaagaaattccacgggtacttcaagttccagggtcaggacaccatcctggactacacactccgcgaggtggacacggtctagcgggagcccagggcagcccctgggcaggagacgtggctgctgaacagccgcaaaccatcttcacctgggggcattgagtggcgcagagccgggtttcatctggaattaactggatggaagggaaaataaagctatctagcggtg

SEQ ID NO: 260753 - DNA, 712 bp, Artificial Sequence
  derived and/or modified sequence
acgaaaagcgcgcgcggggattccaggagtcgtggtttcttgccttgatgtactggagcaatcagatcacacggcggcttggagaaacccagggaccatgggcgcctccaggctctataccctggtgctggtcctgcagcctcagcgagttctcctgggcatgaaaaagcgaggcttcggggccggccggtggaatggctttgggggcaaagtgcaagaaggagagaccatcgaggatggggctaggagggagctgcaggaggagagcggtctgacagtggacgccctgcacaaggtgggccagatcgtgtttgagttcgtgggcgagcctgagctcatggacgtgcatgtcttctgcacagacagcatccaggggacccccgtggagagcgacgaaatgcgcccatgctggttccagctggatcagatccccttcaaggacatgtggcccgacgacagctactggtttccactcctgcttcagaagaagaaattccacgggtacttcaagttccagggtcaggacaccatcctggactacacactccgcgaggtggacacggtctagcgggagcccagggcagcccctgggcaggagacgtggctgctgaacagccgcaaaccatcttcacctgggggcattgagtggcgcagagccgggtttcatctggaattaactggatggaagggaaaataaagctatctagcggtg

SEQ ID NO: 260754 - DNA, 783 bp, Artificial Sequence
  derived and/or modified sequence
gaaaagcgcgcgcggggattccaggagtcgtggtttcttgccttgatgtactggagcaatcagatcacacggcggcttggagagtgagtgcaaggttttatgagtggaattagccctcagcagatgggggagccagaaggcagttggagtgggaagaacccagggaccatgggcgcctccaggctctataccctggtgctggtcctgcagcctcagcgagttctcctgggcatgaaaaagcgaggcttcggggccggccggtggaatggctttgggggcaaagtgcaagaaggagagaccatcgaggatggggctaggagggagctgcaggaggagagcggtctgacagtggacgccctgcacaaggtgggccagatcgtgtttgagttcgtgggcgagcctgagctcatggacgtgcatgtcttctgcacagacagcatccaggggacccccgtggagagcgacgaaatgcgcccatgctggttccagctggatcagatccccttcaaggacatgtggcccgacgacagctactggtttccactcctgcttcagaagaagaaattccacgggtacttcaagttccagggtcaggacaccatcctggactacacactccgcgaggtggacacggtctagcgggagcccagggcagcccctgggcaggagacgtggctgctgaacagccgcaaaccatcttcacctgggggcattgagtggcgcagagccgggtttcatctggaattaactggatggaagggaaaataaagctatctagcggtg

SEQ ID NO: 260755 - DNA, 786 bp, Artificial Sequence
  derived and/or modified sequence
ggtcagaggccacgcccccggaagcggcggtgcaggtttcttgccttgatgtactggagcaatcagatcacacggcggcttggagagtgagtgcaaggttttatgagtggaattagccctcagcagatgggggagccagaaggcagttggagtgggaagaacccagggaccatgggcgcctccaggctctataccctggtgctggtcctgcagcctcagcgagttctcctgggcatgaaaaagcgaggcttcggggccggccggtggaatggctttgggggcaaagtgcaagaaggagagaccatcgaggatggggctaggagggagctgcaggaggagagcggtctgacagtggacgccctgcacaaggtgggccagatcgtgtttgagttcgtgggcgagcctgagctcatggacgtgcatgtcttctgcacagacagcatccaggggacccccgtggagagcgacgaaatgcgcccatgctggttccagctggatcagatccccttcaaggacatgtggcccgacgacagctactggtttccactcctgcttcagaagaagaaattccacgggtacttcaagttccagggtcaggacaccatcctggactacacactccgcgaggtggacacggtctagcgggagcccagggcagcccctgggcaggagacgtggctgctgaacagccgcaaaccatcttcacctgggggcattgagtggcgcagagccgggtttcatctggaattaactggatggaagggaaaataaagctatctagcggtg

SEQ ID NO: 260756 - DNA, 540 bp, Artificial Sequence
  derived and/or modified sequence
atgagtggcatcagccctcagcagatgggtgagcctgagggttcatggtccggaaaaaacccaggtacgatgggcgctagccgcttgtacaccctagtgttagttcttcaaccccagcgggttctgctcgggatgaaaaagcggggattcggggctgggcgatggaacggatttgggggaaaagtgcaggagggagagacaattgaggatggggctagaagagaactgcaagaagaatccggacttacagtcgatgcccttcacaaggtagggcagattgtttttgaattcgttggcgagcccgaactgatggatgtgcacgtgttctgtaccgacagcattcagggaactcctgttgagagtgacgaaatgcggccttgttggtttcagctggatcagattcctttcaaggacatgtggcctgatgatagctattggttcccactcttgctgcagaagaaaaaatttcatggctacttcaaattccagggccaggatactattttggattacactcttcgggaagtggatacagtctag

SEQ ID NO: 260757 - DNA, 540 bp, Artificial Sequence
  derived and/or modified sequence
atgagcgggattagcccacaacagatgggcgaacctgagggatcatggtctgggaaaaacccaggcacgatgggcgctagtcgactgtacacgctggtccttgttctccaacctcagcgcgtgctgctgggtatgaagaagagaggctttggcgcaggtagatggaacggcttcgggggaaaggtccaggagggcgaaactatagaagacggagccagacgcgaattgcaggaagagtcaggtctcaccgtcgacgctctccacaaagtgggtcagatcgtattcgaattcgtcggggaaccagagctaatggacgtgcacgtcttctgcaccgactccatccagggtacgcctgtagagtcggatgagatgagaccctgctggttccagcttgatcagattccattcaaggatatgtggcctgacgactcgtactggtttcctttattgcttcagaaaaagaaattccacggttactttaagttccagggtcaggacactattctggactacaccctgcgggaagtagatacagtgtag

SEQ ID NO: 260758 - DNA, 540 bp, Artificial Sequence
  derived and/or modified sequence
atgagcggaattagccctcaacagatgggcgagcccgagggatcctggtcagggaaaaacccagggacaatgggggcttctagactttacacgttggtgcttgttctgcagccacagcgggtcctcctgggcatgaaaaaacgagggtttggggcaggaagatggaatggattcgggggtaaggtccaggaaggtgagaccatagaagacggcgctagacgtgaactgcaggaggaaagcggcctgactgtcgacgccttacataaggtcgggcagatcgtctttgagttcgtaggtgaacccgaactcatggacgtgcacgtattttgcactgattctatccaaggaaccccagtggaatcagacgagatgcggccatgctggtttcagctggaccagatccctttcaaagacatgtggcctgatgacagctactggttcccacttctcctgcagaagaagaaatttcacggctattttaagttccagggacaagacaccatactggactatacactgcgtgaggtagatacagtgtag

SEQ ID NO: 260759 - DNA, 540 bp, Artificial Sequence
  derived and/or modified sequence
atgagcggcatcagcccccagcagatgggcgagcccgagggcagctggagcggcaagaaccccggcaccatgggcgccagcagactgtacaccctggtgctggtgctgcagccccagagagtgctgctgggcatgaagaagagaggcttcggcgccggcagatggaacggcttcggcggcaaggtgcaggagggcgagaccatcgaggacggcgccagaagagagctgcaggaggagagcggcctgaccgtggacgccctgcacaaggtgggccagatcgtgttcgagttcgtgggcgagcccgagctgatggacgtgcacgtgttctgcaccgacagcatccagggcacccccgtggagagcgacgagatgagaccctgctggttccagctggaccagatccccttcaaggacatgtggcccgacgacagctactggttccccctgctgctgcagaagaagaagttccacggctacttcaagttccagggccaggacaccatcctggactacaccctgagagaggtggacaccgtgtag

SEQ ID NO: 260760 - protein, 801 aa, Artificial Sequence
  derived and/or modified sequence
MHSFVKHLCSRYVVERQGTMALPALLTRLLPLRRLFVLGIGFFTLCFLMTSLGGQFSARRLGDSPFTIRTEVMGGPESRGVLRKMSDLLELMVKRMDALARLENSSELHRAGGDLHFPADRMPPGAGLMERIQAIAQNVSDIAVKVDQILRHSLLLHSKVSEGRRDQCEAPSDPKFPDCSGKVEWMRARWTSDPCYAFFGVDGTECSFLIYLSEVEWFCPPLPWRNQTAAQRAPKPLPKVQAVFRSNLSHLLDLMGSGKESLIFMKKRTKRLTAQWALAAQRLAQKLGATQRDQKQILVHIGFLTEESGDVFSPRVLKGGPLGEMVQWADILTALYVLGHGLRVTVSLKELQSNLGVPPGRGSCPLTMPLPFDLIYTDYHGLQQMKRHMGLSFKKYRCRIRVIDTFGTEPAYNHEEYATLHGYRTNWGYWNLNPKQFMTMFPHTPDNSFMGFVSEELNETEKRLIKGGKASNMAVVYGKEASIWKGKEKFLGILNKYMEIHGTVYYESQRPPEVPAFVKNHGLLPQPEFQQLLRKAKLFIGFGFPYEGPAPLEAIANGCIFLQSRFSPPHSSLNHEFFRGKPTSREVFSQHPYAENFIGKPHVWTVDYNNSEEFEAAIKAIMRTQVDPYLPYEYTCEGMLERIHAYIQHQDFCRAPDPALPEAHAPQSPFVLAPNATHLEWARNTSLAPGAWPPAHALRAWLAVPGRACTDTCLDHGLICEPSFFPFLNSQDAFLKLQVPCDSTESEMNHLYPAFAQPGQECYLQKEPLLFSCAGSNTKYRRLCPCRDFRKGQVALCQGCL

SEQ ID NO: 260761 - DNA, 2406 bp, Artificial Sequence
  derived and/or modified sequence
atgcatagcttcgtgaaacatctttgcagtcgatatgttgtggagcgacaggggacgatggctctgccagccttacttacacgtttgctgcccctccgccggctgttcgttctcggcataggattctttacactttgctttctgatgactagcctgggcggacagttctctgccaggcgtctgggcgacagtccctttaccatccgcacggaggtcatgggtgggccagagtctcggggagttctccgaaagatgtctgatctgctcgagctgatggttaagcgcatggacgcccttgcccgattagagaatagttcagagttgcatcgcgccggtggggacctccacttcccagcagaccggatgcctcctggcgccggcttgatggaacgtatccaggcaatcgcccagaacgtgagcgatatcgctgttaaagtggatcaaatattacggcacagcttgctgctgcacagcaaggtgtcagagggccggcgagatcagtgtgaagcaccctctgatcccaaatttccagactgcagcgggaaggtcgaatggatgcgtgcccggtggacaagcgacccatgttacgcattttttggggtagatggaaccgagtgctctttcctgatatatctctctgaagtggagtggttctgcccacctctcccttggaggaatcagaccgcagcacagcgagctcccaaaccactgcctaaggtgcaggccgtgttccggagcaacctttcccatttgcttgaccttatgggcagcggcaaggaatctctaatctttatgaagaaacggacaaaacgcctaacagcacagtgggccctcgccgcccagcgcctcgcacaaaaactgggggccactcagagggatcagaaacagatccttgtgcacattgggttcctgaccgaggagtctggggacgtgttctcccctcgcgtgctaaagggcggtcccctgggggagatggttcagtgggccgacatattaactgcactatacgtgctcgggcacggcctccgtgtgactgtgtccctaaaagagcttcaatctaacttgggggtgccccctggcaggggctcatgccctctcacaatgccactgcctttcgatctgatctacaccgactaccacggcttacagcagatgaagagacatatggggctatccttcaagaaataccgctgccgaattagagttattgatactttcgggacggagccagcctataaccacgaggagtatgcaactctgcacgggtatagaacgaattgggggtactggaatttgaaccccaagcaatttatgactatgtttccccataccccagataatagctttatgggctttgtttcagaagagttgaacgaaacagagaagcgcctgatcaaggggggtaaggctagtaatatggcagtagtttatgggaaagaagccagcatttggaaaggaaaagaaaagttccttggcatcctgaacaagtatatggagatccacggtaccgtgtactacgagtctcaaaggccacccgaagtccccgcttttgttaagaaccacggacttctgccacaacctgagttccagcaacttcttcggaaggctaagctctttatcggattcggtttcccgtacgaaggccctgccccccttgaggcaattgcaaacggatgcatctttttacagtccaggttcagtcctccccactcctccctcaaccatgagttttttcgtggcaagccgaccagcagggaggtgttctcccagcacccttacgcagagaactttatcggcaaaccccacgtgtggacagtcgactataacaattctgaggaattcgaagcagcgatcaaagctatcatgcgtactcaggtggatccttatctcccctatgaatatacctgcgagggaatgctagagcgcatccatgcttatatacagcatcaggacttctgccgagctccggatccagccttgccagaagcacacgcgccccaatcgcccttcgtgctcgcacccaacgccacacacctggaatgggctcgaaacacctctcttgcccctggggcctggcctcctgcacacgccctgagagcatggctcgcagtgcccgggagagcatgtaccgatacctgcctcgatcacgggctcatctgcgagccttcattctttccctttcttaatagtcaggatgcttttctgaaactccaggtcccctgtgattcaactgagtccgagatgaaccacctctaccccgcctttgctcagccgggacaagaatgctacctgcagaaggaaccactgctcttcagctgcgcgggtagcaacactaagtaccggcgtctctgtccctgcagggactttaggaagggtcaggtcgctctctgtcaaggctgtctgtag

SEQ ID NO: 260762 - DNA, 2406 bp, Artificial Sequence
  derived and/or modified sequence
atgcacagctttgtgaagcacctgtgcagccgctacgtggtggagcggcagggcaccatggccctgcctgccctgctgacccggctgctgcccctgcggcggctgtttgtgctgggcatcggcttcttcaccctgtgcttcctgatgaccagcctgggcggccagttcagcgcccggcggctgggggacagccccttcaccatcagaacagaggtgatgggcggccctgagagccggggcgtgctgaggaagatgtctgacctgctggagctgatggtgaagaggatggatgccctggcccggctggagaacagcagcgagctgcacagagctggaggagacctgcacttccctgctgacaggatgcctcctggggccggcctgatggagcgcatccaggccatcgcccagaatgtgtctgacattgctgtgaaggtggaccagatcctgcggcacagcctgctgctgcacagcaaggtgtctgagggccggcgggaccagtgtgaggcccccagcgaccccaagttcccagactgcagcggcaaggtggagtggatgagggcccgctggaccagtgacccctgctacgccttctttggagtggatggaacagaatgttccttcctgatctacctgtctgaggtggagtggttctgcccccccctgccctggaggaaccagacagctgcccagagggcccccaagcccctgcccaaggtgcaggccgtgttccgcagcaacctgagccacctgctggacctgatgggcagcggcaaggagagcctcatcttcatgaagaagaggaccaagaggctgacagcccagtgggccctggccgcccagaggctggcccagaagctgggcgccacccagagggaccagaagcagatcctggtgcacatcggcttcctgacagaggagagcggagatgtgttcagcccccgggtgctgaagggcggccccctgggggagatggtgcagtgggccgacatcctgacagccctgtatgtgctgggccacggcctgcgggtgacagtgtccctgaaggagctgcagagcaacctgggcgtgcccccaggccggggcagctgccccctgaccatgcccctgccctttgacctgatctacacagactaccacggcctgcagcagatgaagaggcacatgggcctgtccttcaagaagtaccgctgccgcatccgggtgattgacaccttcggcacagagcccgcctacaaccacgaggagtatgccaccctgcacggctaccgcaccaactggggctactggaacctgaaccccaagcagttcatgaccatgttcccccacaccccagacaacagcttcatgggctttgtgtctgaggagctgaatgaaacagagaagaggctcatcaagggcggcaaggccagcaacatggctgtggtgtatggcaaggaggccagcatctggaagggcaaggagaagttcctgggcatcctgaacaagtacatggagatccatggaacagtgtactatgagagccagaggcctcctgaggtgcctgcctttgtgaagaaccacggcctgctgccccagcctgagttccagcagctgctgaggaaggccaagctgttcatcggcttcggcttcccctatgagggccctgcccccctggaggccatcgccaacggctgcatcttcctgcagagccgcttcagccccccccacagcagcctgaaccacgagttcttccggggcaagcccaccagccgggaggtgttcagccagcacccctatgcagagaacttcatcggcaagccccacgtgtggacagtggactacaacaacagcgaggagtttgaggccgccatcaaggccatcatgaggacccaggtggacccctacctgccctatgagtacacctgtgagggcatgctggagcgcatccacgcctacatccagcaccaggacttctgccgggccccagaccctgccctgcctgaggcccacgccccccagagcccctttgtgctggccccaaatgccacccacctggagtgggccaggaacaccagcctggcccctggggcctggcccccagcccacgccctgcgggcctggctggccgtgcccggccgggcctgcacagacacctgcctggaccacggcctcatctgtgagcccagcttcttccccttcctgaacagccaggatgccttcctgaagctgcaggtgccctgtgacagcacagagagcgagatgaaccacctgtacccagcctttgcccagcccggccaggagtgctacctgcagaaggagcccctgctcttcagctgtgccggcagcaacaccaagtacagaaggctgtgcccctgccgggacttcaggaagggccaggtggccctgtgccagggctgcctgtag

SEQ ID NO: 260763 - DNA, 4054 bp, Artificial Sequence
  derived and/or modified sequence
gccagcatcttgtagttgagctctctttatcctatagtgggggggccctcctgggtctggagctcagcccccatcctttcattctcccttgcttccttcactcatgcactcattcgtaaaacatttgtgcagccggtacgtggtggagcgtcagggcacgatggcccttcctgccctcctgacccgcctccttcctctccgcaggctttttgtcctgggcatcggcttcttcactctctgcttcctgatgacgtctctgggaggccagttctcggcccggcgcctgggggactcgccattcaccatccgcacagaagtgatggggggccccgagtcccgcggcgtcctgcgcaagatgagcgacctgctggagctgatggtgaagcgcatggacgcactggccaggctggagaacagcagtgagctgcaccgggccggcggcgacctgcactttcccgcagacaggatgccccctggggccggcctcatggagcggatccaggctattgcccagaacgtctccgacatcgctgtgaaggtggaccagatcctgcgccacagtctgctcctgcacagcaaggtgtcagaaggccggcgggaccagtgtgaggcacccagtgaccccaagttccctgactgctcagggaaggtggagtggatgcgtgcccgctggacctctgacccctgctacgccttctttggggtggacggcaccgagtgctccttcctcatctacctcagtgaggtcgagtggttctgccccccgctgccctggaggaaccagacggctgcccagagggcacccaagcccctccccaaagtccaggcagttttccgaagcaacctgtcccaccttctggacctgatgggcagcgggaaggagtccctgatcttcatgaagaagcggaccaagaggctcacagcccagtgggcgctggctgcccagcgcctggcacagaagctgggggccacccagagggaccagaagcagatcctggtccacatcggcttcctgacggaggagtccggggacgtgttcagccctcgggtcctgaagggcgggcccctaggggagatggtgcagtgggcggacattctgactgcactctatgtcctgggccatggcctgcgggtcacagtctccctgaaggagctgcagagtaacttaggggtaccgccaggccggggaagctgcccgctcaccatgcccctgcccttcgacctcatctacaccgactaccacggcctgcagcagatgaagcggcacatgggactctccttcaagaagtaccggtgccgaatcagggtcatcgacaccttcgggacggaacctgcgtacaaccacgaggagtacgccacgctgcacggctaccggaccaactggggctactggaacctcaaccccaagcagttcatgaccatgtttcctcatacccccgacaactccttcatgggcttcgtgtccgaggagctcaacgagacggagaagcggctcatcaaaggcggcaaggccagcaacatggccgtggtgtacggcaaggaggcgagcatctggaaggggaaggagaagttcctgggcatcctgaacaaatacatggagatccatggcaccgtgtactacgagagccagcggccccccgaggtgccagcctttgtgaagaaccacggcctcttaccgcagcctgagtttcagcagctgctgcgcaaggccaaactcttcatcgggtttggcttcccctacgagggccccgcccccctggaggccatcgccaatggttgcatcttcctgcagtcccgcttcagcccgccccacagctccctcaaccacgagttcttccgaggcaagcccacctccagagaggtgttctcccagcatccctacgcggagaacttcatcggcaagccccacgtgtggacagtcgactacaacaactcagaggagtttgaagcagccatcaaggccattatgagaactcaggtagacccctacctaccctacgagtacacctgcgaggggatgctggagcggatccacgcctacatccagcaccaggacttctgcagagctccagaccctgccctaccagaggcccacgccccgcagagcccctttgtcctggcccccaatgccacccacctcgagtgggctcggaacaccagcttggctcctggggcctggccccccgcgcacgccctgcgggcctggctggccgtgcctgggagggcctgcaccgacacctgcctggaccacgggctaatctgtgagccctccttcttccccttcctgaacagccaggacgccttcctcaagctgcaggtgccctgtgacagcaccgagtcggagatgaaccacctgtacccggcgttcgcccagcctggccaggagtgctacctgcagaaggagcctctgctcttcagctgcgccggctccaacaccaagtaccgccggctctgcccctgccgcgacttccgcaagggccaggtggccttgtgccagggctgtctgtgaatccgcctctgccgccctgcctggcacccacgctggctctctcctgccgcgggagaaagcaccagcaggttctgagccctggctgcttgtcctcctcgcaacccccccaggccggagcttccttccttagccgggaagctggcagaggagagccgtgcccgggaataggaggaggcagcatgccgagcccctgggacctcccaggcaggctccggttctctcctggggactcacagaagcatcgtggccaagcaggtgtcggactgctcagagtccgcatggcccaggagcaggtggtcggaggcccctggctttgtgcaaggccggatctgggccaggtggcgaaaggggcccagtcgttcttgggcccaggatggggcctctagacttgcaagggagaggaacagggaccaggctgccccacggtccctgaagggtccaaggaggggccctccccatggccctggagagtgggcctgggtggtacctgctccaggcagggaaactgggggctcgcccttctcctgtgaggggagccaggcacacagggcccattggtgtttgggatgtggacagaggggcagggggctgggagaaggctaagccgaggggtcctgtttgtgcctccccttagtcccttccctcccgatttcccgattcccccaccctccctctacacttgaggaccacagttgggggtgtagggaccacccagaccctggttgaattgtttctctctcctgcttgttccaacccttttcactctgggcttctcccaaaacccatcctggcatgacctgcaactccaggtggtggatttgttccaaagcctcaatccctaccccctccaaggggcaggtttccagtccagcctcagagatcaggctctgggacccctgcctggggggtggccttcatgcactagccacttccgcaggtgctgactcccgcactccctggcattttttgcagacaagggcttgggatggaccctcagccccatggtacgccctgcccagtttccagttgccctgtccacttaccctaggtagccccccaccccatcagtgccgagtccttgtccctacctccagcttcctccagcctcaaaccgcctctggatctagctgtccttctccgagtggcacgcctgccccaggatgccccctttccctcccccccatgcccagagccccgcctgcctcagcgggtcaggccttcagaacactgccacccacccagttttataatcccgctccctctccaggcaaccccacccaccagcctaggcctgctcctccacccttcccgggaggcagccccgggatgctgagagttggtggaggggccaggctggacgcttcctgtgggagtcccctccagacctggctggcccctgcagccacagaaaccacgatggcaaaaaatctcattggttctcaaggactaacctgtgggggaaagcaatagagacactctttttctctcttttttttaaagatttatttcttgaaataataaatattttattgggatgtgaggtgc

SEQ ID NO: 260764 - DNA, 2406 bp, Artificial Sequence
  derived and/or modified sequence
atgcacagcttcgtgaagcacctgtgcagccggtacgtggtggagcgtcaggggacaatggccctgccggcgcttctgacgcgcctgctgcctctccgcagacttttcgttcttggaattggcttttttacactctgttttttgatgacatcactcggcgggcaatttagcgcccgtcgactgggagactctccttttactattcgcaccgaagtgatgggtggccctgagtctcgaggcgtgctgcgaaagatgtccgacctgttggagctgatggtcaaaaggatggatgccctcgctagactagagaatagctccgagctgcacagagcaggtggcgatctccattttccggctgaccgaatgcctcccggagccgggctgatggagcgaattcaggcaatcgcgcagaatgtgtctgacatcgctgtgaaggtagatcaaatcctgcgacatagtctgctcctccacagtaaagtgtctgagggcagacgtgaccagtgtgaagccccgagtgatccaaagttccctgactgcagcggcaaggttgaatggatgagagcgagatggacatcagacccttgctacgccttctttggggttgatggaaccgagtgctctttccttatctatttgagcgaggtggagtggttctgtccaccactcccctggagaaaccaaacagccgcccagcgtgctcccaagcccctgcccaaggtgcaggctgtatttaggtccaatctctcacatttgctggatctcatggggtctggtaaggaatccctaattttcatgaaaaagcgcactaagaggctcacagcccagtgggctctcgcagctcagcgtcttgctcagaagctgggcgctactcagcgcgatcaaaaacagatactggtacatattggattcttgaccgaggagtccggagacgttttttcccccagggttctaaaaggaggcccattaggagagatggtacagtgggcagacatactgactgccttgtacgtattggggcacgggctcagggtaacagtaagcctgaaagagcttcagtctaacctcggtgttcctcccggacgcggatcttgccccctgactatgcctctaccgttcgatttgatctatactgactaccatggtctgcagcagatgaaacgacacatgggactatccttcaaaaaatatcggtgtcgaatcagggtcatcgataccttcgggaccgaacctgcatacaatcatgaggaatacgctactctgcacgggtatcggacaaactgggggtactggaatttgaatccaaaacaatttatgacgatgtttccacacacccctgataatagcttcatggggttcgtgagtgaggagctcaatgaaacggagaaacgcttaatcaagggcggtaaggctagtaacatggcagtggtgtacggtaaggaggcctctatttggaaggggaaggaaaaattccttgggatactgaacaaatatatggagatccacgggacagtttactatgaatcccaaaggccacccgaggttcccgccttcgtgaaaaatcacggactgcttcctcagcctgagttccagcagttgttgcgcaaggccaagttgtttattggttttggttttccatacgaaggccccgccccactggaggcaattgcaaatggctgtattttcctccaatctcgcttttcaccaccgcacagctcgctgaaccacgagttttttcgcggaaaaccaacaagccgagaagtgttcagccagcacccttatgcggaaaactttataggtaagccccatgtatggactgtggattataacaattcagaggagtttgaggctgctattaaggctattatgcggacccaagttgatccgtatttgccgtacgaatacacatgtgagggcatgctggagcggatacacgcctacatccagcatcaggatttttgccgcgctccagaccctgcgttgcccgaggcccatgctccccagtctccatttgttttggcccctaacgccacacatctggaatgggcgcgtaatacctcgctggcacccggagcctggccccctgcccacgccctccgagcttggcttgccgtgccaggtcgtgcttgtaccgacacatgtcttgaccacggactgatctgtgagccctcctttttccccttccttaactctcaggatgctttcctgaagttgcaggtcccatgcgattccaccgagtccgaaatgaatcatctgtaccccgccttcgcccagcccggtcaggaatgttatctacagaaagagcctcttttgttttcttgcgccggcagtaatacaaaataccgccggctctgtccctgcagggatttcagaaaaggccaggtcgcactgtgtcaaggctgcctatag

SEQ ID NO: 260765 - DNA, 2406 bp, Artificial Sequence
  derived and/or modified sequence
atgcactcctttgtcaaacacttgtgcagcaggtatgtggtggaaaggcagggaacgatggctctgcccgctttactcaccaggctccttcctctgcgacgtctcttcgtgctggggattggcttctttactctttgctttctcatgactagtcttggtggacagttttccgcaagacggctgggagacagcccctttactattaggacggaagtgatgggcggtccggaatctagaggagtactgaggaaaatgagcgatctcctggagctgatggtcaaacggatggacgctctggccaggttagaaaattcttcagaactccacagggctggaggtgacttacactttccagccgatagaatgcccccaggagcaggactgatggaaaggatccaggcgattgcccagaatgtgtctgatatcgctgtcaaagtggaccagattttgagacactcactattgctccacagtaaagtgtcagaaggtagacgcgaccagtgtgaagctccctccgaccccaaatttccagactgcagtggcaaagtcgagtggatgagagctcgttggaccagtgacccttgctatgcatttttcggtgtggacggtaccgagtgctcattcttgatttacctcagcgaggttgagtggttctgccctccactgccgtggcgaaaccagactgctgcccaacgtgcccctaagcctctaccaaaagttcaggccgtgttccgttccaatctgagtcacctgctggatcttatgggaagcgggaaggaaagccttattttcatgaagaagaggactaaaagactcactgcacagtgggcgctggccgcacagcggctcgctcaaaagctcggcgctactcagcgggatcagaaacagatcctagtgcatataggctttttgactgaagagtctggcgatgtattcagtcccagagtacttaaggggggacctcttggagagatggtccagtgggcagatatcttgacagccttgtacgttcttgggcacggcctgcgagtcactgtctctctgaaagagctgcagagcaacttgggcgtcccaccaggacgaggatcttgtccactaactatgcccctgcccttcgatctaatctacaccgactaccacggccttcagcagatgaagcgacacatgggcttatcattcaagaaatatagatgtaggatcagggtgattgacacctttggaactgaaccagcttataatcatgaagaatacgctacattgcatggatatcggaccaattggggatactggaacctgaaccctaaacagttcatgacaatgttccctcacactcctgataatagcttcatgggatttgtgagtgaagagctcaatgaaacagagaagaggctcattaaaggcggtaaggcaagcaatatggctgttgtgtacggaaaagaagcctccatctggaaaggcaaagaaaaattcttggggatcctcaacaaatatatggaaattcacgggactgtttattacgaatctcagcgccctccagaagtgcccgcttttgtgaagaaccacggcctgttgccgcagcccgaatttcagcagctcttgcgtaaggcaaaattgttcattgggttcggtttcccctatgaaggacctgccccacttgaagcaatcgcaaacgggtgcattttcctccagagcagattctcgcctcctcatagttctctgaatcatgagtttttccggggaaaacccacgtctagagaagtgttctcccagcatccctatgcggaaaacttcatcggaaaaccccatgtgtggacggtagactataacaactccgaagaattcgaggctgcgattaaagcaatcatgagaacacaggtggacccatacttgccgtatgagtacacctgcgaaggtatgcttgaaaggatacacgcttatatccagcatcaagacttttgccgcgctcccgaccctgccctgcctgaagcacatgccccacagtccccgttcgtcctggccccaaacgccactcatctggaatgggccagaaacacttctctcgccccaggagcctggccccctgctcacgcacttcgggcatggctggctgttcctggacgggcttgcacagacacgtgtctagatcatgggttgatttgtgagccaagcttcttcccgttcctcaattcacaagacgcctttttaaagctgcaggtgccatgtgatagcaccgaatcagaaatgaatcacctgtacccggctttcgcccaaccgggacaagaatgttacctgcaaaaagaaccactgctgttcagttgcgccggatccaacacaaaataccggagactctgcccatgtagagattttaggaagggccaagtcgccctgtgccagggttgcctgtag

SEQ ID NO: 260766 - DNA, 2406 bp, Artificial Sequence
  derived and/or modified sequence
atgcacagcttcgtgaagcacctgtgcagcagatacgtggtggagagacagggcaccatggccctgcccgccctgctgaccagactgctgcccctgagaagactgttcgtgctgggcatcggcttcttcaccctgtgcttcctgatgaccagcctgggcggccagttcagcgccagaagactgggcgacagccccttcaccatcagaaccgaggtgatgggcggccccgagagcagaggcgtgctgagaaagatgagcgacctgctggagctgatggtgaagagaatggacgccctggccagactggagaacagcagcgagctgcacagagccggcggcgacctgcacttccccgccgacagaatgccccccggcgccggcctgatggagagaatccaggccatcgcccagaacgtgagcgacatcgccgtgaaggtggaccagatcctgagacacagcctgctgctgcacagcaaggtgagcgagggcagaagagaccagtgcgaggcccccagcgaccccaagttccccgactgcagcggcaaggtggagtggatgagagccagatggaccagcgacccctgctacgccttcttcggcgtggacggcaccgagtgcagcttcctgatctacctgagcgaggtggagtggttctgcccccccctgccctggagaaaccagaccgccgcccagagagcccccaagcccctgcccaaggtgcaggccgtgttcagaagcaacctgagccacctgctggacctgatgggcagcggcaaggagagcctgatcttcatgaagaagagaaccaagagactgaccgcccagtgggccctggccgcccagagactggcccagaagctgggcgccacccagagagaccagaagcagatcctggtgcacatcggcttcctgaccgaggagagcggcgacgtgttcagccccagagtgctgaagggcggccccctgggcgagatggtgcagtgggccgacatcctgaccgccctgtacgtgctgggccacggcctgagagtgaccgtgagcctgaaggagctgcagagcaacctgggcgtgccccccggcagaggcagctgccccctgaccatgcccctgcccttcgacctgatctacaccgactaccacggcctgcagcagatgaagagacacatgggcctgagcttcaagaagtacagatgcagaatcagagtgatcgacaccttcggcaccgagcccgcctacaaccacgaggagtacgccaccctgcacggctacagaaccaactggggctactggaacctgaaccccaagcagttcatgaccatgttcccccacacccccgacaacagcttcatgggcttcgtgagcgaggagctgaacgagaccgagaagagactgatcaagggcggcaaggccagcaacatggccgtggtgtacggcaaggaggccagcatctggaagggcaaggagaagttcctgggcatcctgaacaagtacatggagatccacggcaccgtgtactacgagagccagagaccccccgaggtgcccgccttcgtgaagaaccacggcctgctgccccagcccgagttccagcagctgctgagaaaggccaagctgttcatcggcttcggcttcccctacgagggccccgcccccctggaggccatcgccaacggctgcatcttcctgcagagcagattcagccccccccacagcagcctgaaccacgagttcttcagaggcaagcccaccagcagagaggtgttcagccagcacccctacgccgagaacttcatcggcaagccccacgtgtggaccgtggactacaacaacagcgaggagttcgaggccgccatcaaggccatcatgagaacccaggtggacccctacctgccctacgagtacacctgcgagggcatgctggagagaatccacgcctacatccagcaccaggacttctgcagagcccccgaccccgccctgcccgaggcccacgccccccagagccccttcgtgctggcccccaacgccacccacctggagtgggccagaaacaccagcctggcccccggcgcctggccccccgcccacgccctgagagcctggctggccgtgcccggcagagcctgcaccgacacctgcctggaccacggcctgatctgcgagcccagcttcttccccttcctgaacagccaggacgccttcctgaagctgcaggtgccctgcgacagcaccgagagcgagatgaaccacctgtaccccgccttcgcccagcccggccaggagtgctacctgcagaaggagcccctgctgttcagctgcgccggcagcaacaccaagtacagaagactgtgcccctgcagagacttcagaaagggccaggtggccctgtgccagggctgcctgtag

SEQ ID NO: 260767 - protein, 175 aa, Artificial Sequence
  derived and/or modified sequence
MQRRLVQQWSVAVFLLSYAVPSCGRSVEGLSRRLKRAVSEHQLLHDKGKSIQDLRRRFFLHHLIAEIHTAEIRATSEVSPNSKPSPNTKNHPVRFGSDDEGRYLTQETNKVETYKEQPLKTPGKKKKGKPGKRKEQEKKKRRTRSAWLDSGVTGSGLEGDHLSDTSTTSLELDSR

SEQ ID NO: 260768 - protein, 209 aa, Artificial Sequence
  derived and/or modified sequence
MQRRLVQQWSVAVFLLSYAVPSCGRSVEGLSRRLKRAVSEHQLLHDKGKSIQDLRRRFFLHHLIAEIHTAEIRATSEVSPNSKPSPNTKNHPVRFGSDDEGRYLTQETNKVETYKEQPLKTPGKKKKGKPGKRKEQEKKKRRTRSAWLDSGVTGSGLEGDHLSDTSTTSLELDSRTALLWGLKKKKENNRRTHHMQLMISLFKSPLLLL

SEQ ID NO: 260769 - protein, 172 aa, Artificial Sequence
  derived and/or modified sequence
MQRRLVQQWSVAVFLLSYAVPSCGRSVEGLSRRLKRAVSEHQLLHDKGKSIQDLRRRFFLHHLIAEIHTAEIRATSEVSPNSKPSPNTKNHPVRFGSDDEGRYLTQETNKVETYKEQPLKTPGKKKKGKPGKRKEQEKKKRRTRSAWLDSGVTGSGLEGDHLSDTSTTSLEL

SEQ ID NO: 260770 - DNA, 528 bp, Artificial Sequence
  derived and/or modified sequence
atgcagcgcaggttggtgcaacagtggagcgtggcggtgtttttgctgtcttacgctgtgccatcctgcggaagaagtgtggaaggcctctcacgccggctgaaacgcgcagtatccgagcatcagctgctacatgataagggtaaatctatccaggacctgaggagacgatttttcctgcaccatttaatcgccgaaatccacactgccgaaataagggccacctcagaggttagcccaaacagcaagccttctcctaacactaaaaaccatcccgtgcggtttggttccgatgacgaagggcggtatttaacacaggaaacaaacaaagtggagacttataaggagcagcccctgaaaacgccagggaagaagaaaaaagggaagccaggcaaaagaaaggaacaagagaagaaaaaaaggaggacgcgatcagcctggcttgactccggcgtgacaggtagcggcctcgagggagaccacctgtccgacacctccaccacctcactggaactggacagcaggtag

SEQ ID NO: 260771 - DNA, 630 bp, Artificial Sequence
  derived and/or modified sequence
atgcaacgacgcctcgttcaacaatggagcgttgctgttttcctgttatcatatgccgtgccatcctgtgggcgatccgttgaaggtttgagccgaaggctgaagagggcagtttccgaacaccagcttctccacgataaggggaagtcgattcaggacctcaggcgtagatttttcctccaccatctgatcgctgagatccacactgccgagatcagggccacctccgaagtgtcccccaactcaaagccctcaccgaatactaagaaccatcctgtacgcttcggctccgatgacgaggggcggtacttaacacaagagacgaacaaggtggagacctacaaagagcagcctctgaagacccccggaaagaaaaagaagggaaagcccggcaagcgaaaggaacaagagaaaaagaagaggagaacccgttctgcatggctggacagtggtgtgactggcagcgggttggagggtgatcatctgagcgacactagcacaaccagcctcgaactggactctcgaactgcattgctgtggggcctgaagaagaagaaagagaacaaccgacgcactcaccatatgcagctgatgatctctctgtttaaaagtccactccttttactgtag

SEQ ID NO: 260772 - DNA, 528 bp, Artificial Sequence
  derived and/or modified sequence
atgcaacggcggctggtccaacagtggtcagttgcagtgttcttactctcttatgcagtcccatcgtgcggccggagtgtggaaggactgtcacgcagacttaaacgtgctgtgagtgagcaccagcttcttcatgataagggtaaatctattcaggatctccgtagaaggttcttcttgcaccacctcattgccgagattcataccgccgaaatacgagccactagcgaggtctcgccgaacagcaaacccagccccaataccaagaaccaccctgtgcgctttggttccgacgacgaaggtcgatatctaactcaggaaacaaacaaggtggaaacatataaagaacagccccttaaaaccccggggaagaaaaaaaaagggaagcctgggaagcggaaagagcaggagaagaagaaaaggcgaacacggtctgcatggctcgactctggggtcacgggcagtgggctggagggcgaccaccttagcgatacgagtaccacttctcttgagctcgattcacggtag

SEQ ID NO: 260773 - DNA, 528 bp, Artificial Sequence
  derived and/or modified sequence
atgcagagacgccttgtccaacagtggtctgttgcagtcttcctgctgtcttacgccgtacctagttgtgggcgcagcgtggaagggttgtccagacgtctgaagcgtgctgtgtccgagcatcagctgctgcatgacaaggggaagtctatccaggatctaagacgccggttttttttgcatcacctcattgctgagattcacacagctgagatacgagcgactagcgaagtcagtcccaattccaaacctagcccaaatacaaaaaaccatccggtccggttcggctctgatgatgagggccgttatctgacacaggagacaaataaggttgaaacttataaggaacagccactgaagacacccggcaaaaagaaaaaggggaagcccggcaaaagaaaggagcaggaaaagaaaaagaggagaacccgatcggcgtggttggattccggcgtgaccggttcaggcctcgagggtgaccatctgtctgatacgtcgaccaccagtttagaactggattcccgatag

SEQ ID NO: 260774 - DNA, 630 bp, Artificial Sequence
  derived and/or modified sequence
atgcagcggagactggtgcagcagtggagtgtcgccgtatttctgctaagctacgccgtaccaagctgcggccgcagcgttgaaggcctgtcaaggcggttgaagagagctgtgtcagaacatcaacttctgcacgataagggcaagagtattcaggatctcaggcgtcgattttttttgcatcatctgatcgctgagattcacaccgcagaaattagagccacctcagaggtaagtccaaactccaaacctagccctaacacgaaaaaccacccagtgcggtttgggtccgacgacgaaggcaggtatctgacccaggagacaaataaggtggagacctataaagaacaacctcttaagacaccaggtaaaaaaaagaaagggaaacccggtaaaagaaaggaacaggagaagaagaagcgaagaacaagatccgcctggcttgattccggagtcacgggaagcggcctggagggagaccatctgagcgacacaagtaccactagcctggaacttgatagtcgaactgcactgctgtgggggctgaagaagaaaaaagagaacaaccggagaacccaccacatgcagctcatgatttcgttatttaagagccccctcctactgctgtag

SEQ ID NO: 260775 - DNA, 519 bp, Artificial Sequence
  derived and/or modified sequence
atgcagaggcgcctggtacagcaatggtcagtcgcagtgttccttctgagttacgccgttcctagctgtggacgtagcgtcgagggcctgagccgcagactgaaacgcgcggtgagcgaacatcaattgcttcacgacaaaggcaaatccattcaagacctccgccggcggttcttcctgcatcatttgattgcagagatccacactgctgagatccgcgctacgagtgaggtctcccccaatagtaaacccagtcccaacactaagaatcaccccgtccgattcggctctgacgatgagggtcgttacctcacacaggaaaccaataaagtggagacttacaaggaacagccactgaagactcctggaaagaaaaagaaagggaagccaggaaaaaggaaggagcaagaaaagaagaaaagaagaacaagaagtgcctggctagattctggcgtgacgggcagtgggctggaaggcgaccatttaagcgacacatcaacgacaagcctcgaactttag

SEQ ID NO: 260776 - DNA, 528 bp, Artificial Sequence
  derived and/or modified sequence
atgcagaggcggctggtgcagcagtggagcgtggccgtgttcctgctgtcctatgctgtgcccagctgtggccgctctgtggagggcctgagccggcggctgaagagagctgtgtctgagcaccagctgctgcatgacaagggcaagagcatccaggacctgcggcggcgcttcttcctgcaccacctgattgctgagatccacacagctgagatccgggccaccagcgaggtgagccccaacagcaagcccagccccaacaccaagaaccaccctgtgcgctttggaagtgatgatgagggccgctacctgacccaggagaccaacaaggtggagacctacaaggagcagcccctgaagacccctgggaagaagaagaagggcaagccaggcaagaggaaggagcaggagaagaagaagaggaggaccaggtctgcctggctggacagcggcgtgactggaagtggcctggagggggaccacctgagtgacaccagcaccaccagcctggagctggacagcaggtag

SEQ ID NO: 260777 - DNA, 630 bp, Artificial Sequence
  derived and/or modified sequence
atgcagaggcggctggtgcagcagtggagcgtggccgtgttcctgctgtcctatgctgtgcccagctgtggccgctctgtggagggcctgagccggcggctgaagagagctgtgtctgagcaccagctgctgcatgacaagggcaagagcatccaggacctgcggcggcgcttcttcctgcaccacctgattgctgagatccacacagctgagatccgggccaccagcgaggtgagccccaacagcaagcccagccccaacaccaagaaccaccctgtgcgctttggaagtgatgatgagggccgctacctgacccaggagaccaacaaggtggagacctacaaggagcagcccctgaagacccctgggaagaagaagaagggcaagccaggcaagaggaaggagcaggagaagaagaagaggaggaccaggtctgcctggctggacagcggcgtgactggaagtggcctggagggggaccacctgagtgacaccagcaccaccagcctggagctggacagcaggacagccctgctgtggggcctgaagaagaagaaggagaacaacagaaggacccaccacatgcagctgatgatcagcctcttcaagagccccctgctgctgctgtag

SEQ ID NO: 260778 - DNA, 519 bp, Artificial Sequence
  derived and/or modified sequence
atgcagaggcggctggtgcagcagtggagcgtggccgtgttcctgctgtcctatgctgtgcccagctgtggccgctctgtggagggcctgagccggcggctgaagagagctgtgtctgagcaccagctgctgcatgacaagggcaagagcatccaggacctgcggcggcgcttcttcctgcaccacctgattgctgagatccacacagctgagatccgggccaccagcgaggtgagccccaacagcaagcccagccccaacaccaagaaccaccctgtgcgctttggaagtgatgatgagggccgctacctgacccaggagaccaacaaggtggagacctacaaggagcagcccctgaagacccctgggaagaagaagaagggcaagccaggcaagaggaaggagcaggagaagaagaagaggaggaccaggtctgcctggctggacagcggcgtgactggaagtggcctggagggggaccacctgagtgacaccagcaccaccagcctggagctgtag

SEQ ID NO: 260779 - DNA, 528 bp, Artificial Sequence
  derived and/or modified sequence
atgcagcggcggctggtgcagcagtggagcgtggccgtgttcctgttaagctacgcggtgcccagttgcgggcggagtgtggaggggctgtctaggcgccttaagagggctgttagcgaacaccagttgttacatgataagggtaagtcgatccaggatttgcggcgcaggttctttctgcatcacttgatcgctgaaatccatacagctgagatccgagccacaagcgaagtgagcccaaactccaagccttctcctaacacgaagaaccatccggtgcgtttcgggagcgacgatgaaggcagatatttaacacaagagactaacaaggtggagacctataaagagcagccacttaaaacccccggaaagaagaagaaaggaaagcctgggaaaaggaaggagcaggagaaaaagaagcggaggacaaggagtgcttggttagattctggtgtgacaggctctggcctggaaggggaccatctttccgacacatccactactagtctggagttagactcccgctag

SEQ ID NO: 260780 - DNA, 630 bp, Artificial Sequence
  derived and/or modified sequence
atgcagcggcggctggtgcagcagtggagcgtggccgtgttcctgctatcgtacgccgtaccctcctgcggcagatctgtggagggattgagccggagactcaagagagctgtgtccgaacatcaactcctgcatgacaaagggaagtccattcaggatctgcggagaaggttttttctgcaccacctaatagccgaaattcataccgctgaaatccgcgctacgtcagaggtctcccctaattccaagccgtcacctaacactaagaatcaccctgtgagattcgggagcgatgatgaggggcggtatttaacccaggaaaccaacaaggtggagacctacaaagagcagcctctgaaaacaccagggaagaagaagaagggcaagccaggcaaaaggaaggaacaggaaaagaaaaaacggagaacgcggtctgcctggctggactctggggttactggatccggcctggaaggggaccacctttctgacaccagcacaactagcctggaactggactctagaaccgccttgctgtggggactcaaaaagaagaaagagaataatcgccgtacccaccacatgcaactgatgatctcgttgtttaagagcccacttcttctgctatag

SEQ ID NO: 260781 - DNA, 528 bp, Artificial Sequence
  derived and/or modified sequence
atgcagcggcggctggtgcagcagtggagcgtggccgtgttcctgctatcatacgccgtcccatcttgtggaaggagtgtcgaggggctgtctaggcgactcaagcgcgccgtcagcgaacaccagttactgcatgacaaaggcaagtccattcaggatttgaggcgacgcttttttttacatcacttaattgcagaaatccataccgcagaaatacgcgcgacttccgaggttagtcctaacagtaaacctagtcctaacactaagaaccaccctgtgcgatttggcagcgacgacgagggaagatacttaacccaggagaccaataaagtcgagacttacaaagaacaacctctgaagactcccggtaaaaaaaaaaaggggaaacccggtaaacggaaagaacaggaaaaaaagaagcgcagaactaggagcgcctggctagattcaggagtcaccgggagcgggttagagggagatcatctgagtgacaccagcacaacttccctagagttagattcgcggtag

SEQ ID NO: 260782 - DNA, 528 bp, Artificial Sequence
  derived and/or modified sequence
atgcagcggcggctggtgcagcagtggagcgtggccgtgttcctgttgtcctatgccgtgcccagctgtgggagaagcgttgagggcctttcgaggcgcttgaagcgagcggtatcagaacaccagctcctccatgacaagggtaagagcatccaagatctgcggaggcggttttttctgcaccacctgattgctgaaattcataccgctgagatcagggctaccagcgaagttagtccaaactctaaacctagcccgaacaccaagaaccaccctgtgaggttcggatctgacgatgagggacgctatctgacccaggagaccaataaggtggaaacctacaaggagcagccactgaaaactccgggcaaaaagaagaaggggaaacctggcaagcgaaaggaacaggaaaagaagaaacgtcggacccgcagcgcctggttagacagcggagttaccggaagtgggctggagggcgaccatcttagtgacaccagcactacgagcctggaactggacagccgttag

SEQ ID NO: 260783 - DNA, 630 bp, Artificial Sequence
  derived and/or modified sequence
atgcagcggcggctggtgcagcagtggagcgtggccgtgttcctgctaagctacgccgtcccaagctgcggacgcagcgtggaggggctttcaagacgactcaaaagagccgtgtccgagcaccagctgctgcatgataaaggtaagtcaattcaagacctgagacgaaggttctttttacaccaccttatcgccgagattcacacggcggagatccgcgcaacttctgaggtctctcctaattccaagccctctcccaacactaagaatcatcccgttaggtttgggtcagacgatgaaggaaggtatctaacacaggagaccaacaaagtggagacttacaaggaacagccccttaagactcctgggaagaagaagaaaggaaagcctggcaaacgcaaggaacaagaaaaaaagaagagacggacacggtctgcatggctggactcaggcgtgactgggagcggtttggagggcgatcacctcagcgacacgagtaccacgtctctggagctcgattctcgtacagcgctactgtgggggctgaaaaaaaagaaggagaataacaggcggacccaccacatgcagctgatgattagcctgttcaagtcccctctcctactgctgtag

SEQ ID NO: 260784 - DNA, 519 bp, Artificial Sequence
  derived and/or modified sequence
atgcagcggcggctggtgcagcagtggagcgtggccgtgttcctgctttcctacgccgtgccctcatgcggaagatccgttgaaggtctgtccagacgccttaagagagcagtttcggagcaccaactgctgcacgacaaaggaaagtccattcaagatctgcgaagaagatttttcttgcaccacctgattgctgaaatccacacagcagagattcgtgccacgagtgaggtgtcaccaaattcaaagccgtctcccaacacaaaaaatcacccggtccgctttggcagtgatgatgaaggcagatatttaactcaggagacaaacaaggtagagacctacaaggaacagccgctcaaaactcctgggaaaaaaaaaaagggcaaacctggcaagcggaaagaacaggagaaaaagaagaggagaactcgatccgcatggctagattctggcgtaactggaagcggacttgaaggcgaccatctttccgacacctccaccacctccttggagctctag

SEQ ID NO: 260785 - DNA, 1872 bp, Artificial Sequence
  derived and/or modified sequence
cctgcatctttttggaaggattctttttataaatcagaaagtgttcgaggttcaaaggtttgcctcggagcgtgtgaacattcctccgctcggttttcaactcgcctccaacctgcgccgcccggccagcatgtctccccgcccgtgaagcggggctgccgcctccctgccgctccggctgccactaacgacccgccctcgccgccacctggccctcctgatcgacgacacacgcacttgaaacttgttctcagggtgtgtggaatcaactttccggaagcaaccagcccaccagaggaggtcccgagcgcgagcggagacgatgcagcggagactggttcagcagtggagcgtcgcggtgttcctgctgagctacgcggtgccctcctgcgggcgctcggtggagggtctcagccgccgcctcaaaagagctgtgtctgaacatcagctcctccatgacaaggggaagtccatccaagatttacggcgacgattcttccttcaccatctgatcgcagaaatccacacagctgaaatcagagctacctcggaggtgtcccctaactccaagccctctcccaacacaaagaaccaccccgtccgatttgggtctgatgatgagggcagatacctaactcaggaaactaacaaggtggagacgtacaaagagcagccgctcaagacacctgggaagaaaaagaaaggcaagcccgggaaacgcaaggagcaggaaaagaaaaaacggcgaactcgctctgcctggttagactctggagtgactgggagtgggctagaaggggaccacctgtctgacacctccacaacgtcgctggagctcgattcacggtaacaggcttctctggcccgtagcctcagcggggtgctctcagctgggttttggagcctcccttctgccttggcttggacaaacctagaattttctccctttatgtatctctatcgattgtgtagcaattgacagagaataactcagaatattgtctgccttaaagcagtacccccctaccacacacacccctgtcctccagcaccatagagaggcgctagagcccattcctctttctccaccgtcacccaacatcaatcctttaccactctaccaaataatttcatattcaagcttcagaagctagtgaccatcttcataatttgctggagaagtgtgtttcttccccttactctcacacctgggcaaactttcttcagtgtttttcatttcttacgttctttcacttcaagggagaatatagaagcatttgatattatctacaaacactgcagaacagcatcatgtcataaacgattctgagccattcacactttttatttaattaaatgtatttaattaaatctcaaatttattttaatgtaaagaacttaaattatgttttaaacacatgccttaaatttgtttaattaaatttaactctggtttctaccagctcatacaaaataaatggtttctgaaaatgtttaagtattaacttacaaggatataggtttttctcatgtatctttttgttcattggcaagatgaaataatttttctagggtaatgccgtaggaaaaataaaacttcacatttatgtggcttgtttatccttagctcacagattgaggtaataatgacactcctagactttgggatcaaataacttagggccaagtcttgggtctgaatttatttaagttcacaacctagggcaagttactctgcctttctaagactcacttacatcttctgtgaaatataattgtaccaacctcatagagtttggtgtcaactaaatgagattatatgtggactaaatatctgtcatatagtaaacactcaataaattgcaacatatt

SEQ ID NO: 260786 - DNA, 952 bp, Artificial Sequence
  derived and/or modified sequence
cctgcatctttttggaaggattctttttataaatcagaaagtgttcgaggttcaaaggtttgcctcggagcgtgtgaacattcctccgctcggttttcaactcgcctccaacctgcgccgcccggccagcatgtctccccgcccgtgaagcggggctgccgcctccctgccgctccggctgccactaacgacccgccctcgccgccacctggccctcctgatcgacgacacacgcacttgaaacttgttctcagggtgtgtggaatcaactttccggaagcaaccagcccaccagaggaggtcccgagcgcgagcggagacgatgcagcggagactggttcagcagtggagcgtcgcggtgttcctgctgagctacgcggtgccctcctgcgggcgctcggtggagggtctcagccgccgcctcaaaagagctgtgtctgaacatcagctcctccatgacaaggggaagtccatccaagatttacggcgacgattcttccttcaccatctgatcgcagaaatccacacagctgaaatcagagctacctcggaggtgtcccctaactccaagccctctcccaacacaaagaaccaccccgtccgatttgggtctgatgatgagggcagatacctaactcaggaaactaacaaggtggagacgtacaaagagcagccgctcaagacacctgggaagaaaaagaaaggcaagcccgggaaacgcaaggagcaggaaaagaaaaaacggcgaactcgctctgcctggttagactctggagtgactgggagtgggctagaaggggaccacctgtctgacacctccacaacgtcgctggagctcgattcacgtacagcacttctgtggggtttgaaaaaaaaaaaggaaaacaacagaagaacacatcatatgcaactaatgatctcattatttaagagtcccctgttacttctttag

SEQ ID NO: 260787 - DNA, 1674 bp, Artificial Sequence
  derived and/or modified sequence
aagcaaccagcccaccagaggaggtagacagacagctatgtatatatatgtgggtttcgctacaagtggctctggaacgaaagggcctggttcgcaaagaagctgacttcagagggggaaactttcttcttttaggaggcggttagccctgttccacgaacccaggagaactgctggccagattaattagacattgctatgggagacgtgtaaacacactacttatcattgatgcatatataaaaccattttattttcgctattatttcagaggaagcgcctctgatttgtttcttttttccctttttgctctttctggctgtgtggtttggagaaagcacagttggagtagccggttgctaaataagtcccgagcgcgagcggagacgatgcagcggagactggttcagcagtggagcgtcgcggtgttcctgctgagctacgcggtgccctcctgcgggcgctcggtggagggtctcagccgccgcctcaaaagagctgtgtctgaacatcagctcctccatgacaaggggaagtccatccaagatttacggcgacgattcttccttcaccatctgatcgcagaaatccacacagctgaaatcagagctacctcggaggtgtcccctaactccaagccctctcccaacacaaagaaccaccccgtccgatttgggtctgatgatgagggcagatacctaactcaggaaactaacaaggtggagacgtacaaagagcagccgctcaagacacctgggaagaaaaagaaaggcaagcccgggaaacgcaaggagcaggaaaagaaaaaacggcgaactcgctctgcctggttagactctggagtgactgggagtgggctagaaggggaccacctgtctgacacctccacaacgtcgctggagctcgattcacggtaacaggcttctctggcccgtagcctcagcggggtgctctcagctgggttttggagcctcccttctgccttggcttggacaaacctagaattttctccctttatgtatctctatcgattgtgtagcaattgacagagaataactcagaatattgtctgccttaaagcagtacccccctaccacacacacccctgtcctccagcaccatagagaggcgctagagcccattcctctttctccaccgtcacccaacatcaatcctttaccactctaccaaataatttcatattcaagcttcagaagctagtgaccatcttcataatttgctggagaagtgtgtttcttccccttactctcacacctgggcaaactttcttcagtgtttttcatttcttacgttctttcacttcaagggagaatatagaagcatttgatattatctacaaacactgcagaacagcatcatgtcataaacgattctgagccattcacactttttatttaattaaatgtatttaattaaatctcaaatttattttaatgtaaagaacttaaattatgttttaaacacatgccttaaatttgtttaattaaatttaactctggtttctaccagctcatacaaaataaatggtttctgaaaatgtttaagtattaacttacaaggatataggtttttctcatgtatctttttgttcattggcaagatgaaataatttttctagggtaatgccgtaggaaaaataaaacttcacattta

SEQ ID NO: 260788 - DNA, 1891 bp, Artificial Sequence
  derived and/or modified sequence
cgccagcccgcctgcgccctcgctcgccccgcgcgcgttcctagggcgccacctctttgcgactagctcacttctccggcaggtttgcctcggagcgtgtgaacattcctccgctcggttttcaactcgcctccaacctgcgccgcccggccagcatgtctccccgcccgtgaagcggggctgccgcctccctgccgctccggctgccactaacgacccgccctcgccgccacctggccctcctgatcgacgacacacgcacttgaaacttgttctcagggtgtgtggaatcaactttccggaagcaaccagcccaccagaggaggtcccgagcgcgagcggagacgatgcagcggagactggttcagcagtggagcgtcgcggtgttcctgctgagctacgcggtgccctcctgcgggcgctcggtggagggtctcagccgccgcctcaaaagagctgtgtctgaacatcagctcctccatgacaaggggaagtccatccaagatttacggcgacgattcttccttcaccatctgatcgcagaaatccacacagctgaaatcagagctacctcggaggtgtcccctaactccaagccctctcccaacacaaagaaccaccccgtccgatttgggtctgatgatgagggcagatacctaactcaggaaactaacaaggtggagacgtacaaagagcagccgctcaagacacctgggaagaaaaagaaaggcaagcccgggaaacgcaaggagcaggaaaagaaaaaacggcgaactcgctctgcctggttagactctggagtgactgggagtgggctagaaggggaccacctgtctgacacctccacaacgtcgctggagctcgattcacggtaacaggcttctctggcccgtagcctcagcggggtgctctcagctgggttttggagcctcccttctgccttggcttggacaaacctagaattttctccctttatgtatctctatcgattgtgtagcaattgacagagaataactcagaatattgtctgccttaaagcagtacccccctaccacacacacccctgtcctccagcaccatagagaggcgctagagcccattcctctttctccaccgtcacccaacatcaatcctttaccactctaccaaataatttcatattcaagcttcagaagctagtgaccatcttcataatttgctggagaagtgtgtttcttccccttactctcacacctgggcaaactttcttcagtgtttttcatttcttacgttctttcacttcaagggagaatatagaagcatttgatattatctacaaacactgcagaacagcatcatgtcataaacgattctgagccattcacactttttatttaattaaatgtatttaattaaatctcaaatttattttaatgtaaagaacttaaattatgttttaaacacatgccttaaatttgtttaattaaatttaactctggtttctaccagctcatacaaaataaatggtttctgaaaatgtttaagtattaacttacaaggatataggtttttctcatgtatctttttgttcattggcaagatgaaataatttttctagggtaatgccgtaggaaaaataaaacttcacatttatgtggcttgtttatccttagctcacagattgaggtaataatgacactcctagactttgggatcaaataacttagggccaagtcttgggtctgaatttatttaagttcacaacctagggcaagttactctgcctttctaagactcacttacatcttctgtgaaatataattgtaccaacctcatagagtttggtgtcaactaaatgagattatatgtggactaaatatctgtcatatagtaaacactcaataaattgcaa

SEQ ID NO: 260789 - DNA, 854 bp, Artificial Sequence
  derived and/or modified sequence
atgcagcggagactggttcagcagtggagcgtcgcggtgttcctgctgagctacgcggtgccctcctgcgggcgctcggtggagggtctcagccgccgcctcaaaagagctgtgtctgaacatcagctcctccatgacaaggggaagtccatccaagatttacggcgacgattcttccttcaccatctgatcgcagaaatccacacagctgaaatcagagctacctcggaggtgtcccctaactccaagccctctcccaacacaaagaaccaccccgtccgatttgggtctgatgatgagggcagatacctaactcaggaaactaacaaggtggagacgtacaaagagcagccgctcaagacacctgggaagaaaaagaaaggcaagcccgggaaacgcaaggagcaggaaaagaaaaaacggcgaactcgctctgcctggttagactctggagtgactgggagtgggctagaaggggaccacctgtctgacacctccacaacgtcgctggagctcgattcacgtacagcacttctgtggggtttgaaaaaaaaaaaggaaaacaacagaagaacacatcatatgcaactaatgatctcattatttaagagtcccctgttacttctttagtcatttcctttgactctgctacagataggattataggatgatgcttcaaaggggaccttgaacctattcaccattatttgtctctttaagctggcaaacccatcattaaatagcacataaaatagcaatcatatgggataagtagtacagcttcagtaatcaatgggcagtggcactagaaaaatcttgagcacagtgaatgacctatcctgcaaacatctaat

SEQ ID NO: 260790 - DNA, 746 bp, Artificial Sequence
  derived and/or modified sequence
tctccggcaggtttgcctcggagcgtgtgaacattcctccgctcggttttcaactcgcctccaacctgcgccgcccggccagcatgtctccccgcccgtgaagcggggctgccgcctccctgccgctccggctgccactaacgacccgccctcgccgccacctggccctcctgatcgacgacacacgcacttgaaacttgttctcagggtcccgagcgcgagcggagacgatgcagcggagactggttcagcagtggagcgtcgcggtgttcctgctgagctacgcggtgccctcctgcgggcgctcggtggagggtctcagccgccgcctcaaaagagctgtgtctgaacatcagctcctccatgacaaggggaagtccatccaagatttacggcgacgattcttccttcaccatctgatcgcagaaatccacacagctgaaatcagagctacctcggaggtgtcccctaactccaagccctctcccaacacaaagaaccaccccgtccgatttgggtctgatgatgagggcagatacctaactcaggaaactaacaaggtggagacgtacaaagagcagccgctcaagacacctgggaagaaaaagaaaggcaagcccgggaaacgcaaggagcaggaaaagaaaaaacggcgaactcgctctgcctggttagactctggagtgactgggagtgggctagaaggggaccacctgtctgacacctccacaacgtcgctggagctc

SEQ ID NO: 260791 - DNA, 528 bp, Artificial Sequence
  derived and/or modified sequence
atgcaacggaggctcgttcagcagtggagtgtggccgtcttcctgctgtcttacgctgtcccctcttgcggacgctctgtcgagggattgagtagacgcctcaagcgggctgtctccgagcaccagctgttgcatgataaggggaaaagcatacaagacttacgacgcaggttctttcttcatcatctaatcgcggagattcatactgctgaaattagagccacaagcgaggtgtcgccaaattctaagcccagcccgaatactaagaaccatcctgtccggtttggcagcgacgatgaggggaggtacctgacccaggaaaccaacaaggttgaaacatataaagaacaaccattaaagacccctggcaagaaaaaaaagggcaaaccgggtaagcgtaaagaacaggagaagaaaaagcgtcggacccgatctgcctggctggattccggtgtaacagggtctggcctggagggagaccacttaagcgatactagtactacttcccttgagctggattcaaggtag

SEQ ID NO: 260792 - DNA, 630 bp, Artificial Sequence
  derived and/or modified sequence
atgcagcgcagattggtgcaacagtggagcgtcgccgtgttccttctttcctacgcagtgccttcatgcggcagaagtgtcgagggcctgagccggagactgaaaagagctgtttcggagcaccagttgcttcatgacaaggggaagtccatacaggacctgcgtcgacggttcttcctacatcatctcatcgcggaaatccataccgccgaaatcagggcaacaagtgaagtgtcacctaactcaaagccttctccgaacaccaagaatcacccggtgcgcttcggctcggacgacgagggaagatacctgacacaggaaacaaataaagtggaaacgtacaaagagcaacctcttaaaacacctggaaaaaagaaaaaagggaagccaggaaagcggaaagaacaagaaaaaaagaagcgcaggactaggtccgcgtggctcgattctggagtgacaggttccggactagaaggagaccacttgtccgataccagcactactagcctggaacttgattcacggaccgcactcctctggggcctgaaaaagaagaaagagaacaatcggagaacccaccacatgcaactaatgatttcccttttcaagtctcccctgctgcttctttag

SEQ ID NO: 260793 - DNA, 528 bp, Artificial Sequence
  derived and/or modified sequence
atgcaacggagacttgtgcagcagtggtctgtggccgtatttctgttaagctatgctgttccgagctgtggtagatcagttgaaggcctttcgagaaggctaaagagggccgtcagcgagcaccaattgttgcacgataaggggaagtcaattcaggaccttagaagacggttcttcctacaccatctcatcgcagaaatccacaccgccgagattagggccacgagcgaagtgtctcctaatagcaaacccagcccaaataccaagaaccaccctgtgcggttcgggtctgatgatgaaggtcgctaccttacccaggagactaacaaggtcgagacctacaaggaacagccattaaagactcccggaaagaaaaaaaaaggtaaaccaggcaagaggaaggagcaggagaagaaaaaaagacggacaaggtccgcatggttagactcaggggtcaccggttcaggcctggagggagatcatctgagcgacacatcgaccacttcgctggaactcgactcacgatag

SEQ ID NO: 260794 - DNA, 528 bp, Artificial Sequence
  derived and/or modified sequence
atgcagaggcgattggttcagcagtggtccgtggcagtgtttctgctttcgtatgccgtgcctagctgcggacggtctgtggaaggcttgtcacggcgactgaagcgcgctgtgtccgagcatcagctgcttcatgataagggaaagtctattcaagatttgcgtcggagattcttcctgcaccatctgatcgcagaaattcataccgccgaaatcagagctaccagcgaggtttcacccaattcaaagccatcaccgaatacaaagaaccaccctgtgcggttcggttccgacgacgagggaagataccttacccaggagacgaataaagtcgagacatacaaggagcagccattgaagacgcccggaaagaaaaaaaaaggaaaacctgggaagcgcaaagagcaagagaagaaaaagaggaggacccggtctgcatggctggactcaggggtgaccggatctggcctggagggcgatcacttatcagatacctctactacaagcctggagctcgacagcaggtag

SEQ ID NO: 260795 - DNA, 630 bp, Artificial Sequence
  derived and/or modified sequence
atgcaacggagattggtgcagcagtggtctgtcgcagtgtttctgctgagttatgctgtgccttcgtgtggtcgatctgtcgagggactgtcaagaaggctgaaacgggcagtatctgaacaccagctgctgcatgacaagggaaaatctatccaggacttgaggaggagattctttctgcaccatctaatagctgagatacataccgccgaaatccgggcaacgtctgaggtgtcgcccaacagcaaacccagccctaacaccaagaatcatcccgtccgctttggctcagacgacgaaggtaggtaccttacacaggagaccaacaaggtcgaaacctacaaagagcaacctttaaagactccaggaaaaaaaaaaaagggcaagcctggtaaaaggaaggagcaggaaaagaaaaagaggcgcacaaggtcagcctggttagactctggcgtgaccggttctggtctggagggggatcacttaagtgataccagtacaacgtctctcgaactcgactctaggaccgctttgctttggggcttgaaaaagaagaaagaaaacaacaggcggactcaccatatgcagttgatgatctccctgttcaagagccctctccttttgctctag

SEQ ID NO: 260796 - DNA, 519 bp, Artificial Sequence
  derived and/or modified sequence
atgcaaaggcggttggtccagcaatggtcagtggccgtttttctgctgagctacgccgtcccgagttgcggaaggagcgttgaagggctgagcaggcgattgaagcgcgctgtgagcgagcaccaactgctgcacgataaaggaaagtccatacaggatctgcggcgacgctttttcctgcaccacctgattgccgaaatccacactgccgagatcagagccacgtcggaagtctccccaaacagtaaaccctcacccaacactaaaaatcaccccgtgaggtttggctcagacgacgaaggaagatatctgactcaagagacaaataaggtagagacttacaaggaacagccccttaagacgcccggaaagaagaagaaagggaaaccaggtaaaagaaaggagcaggagaaaaagaagagacggactagaagtgcttggctggactctggcgtgaccggctctggacttgaaggagatcacctttcagataccagcacgacaagtctcgagctgtag

SEQ ID NO: 260797 - DNA, 528 bp, Artificial Sequence
  derived and/or modified sequence
atgcagagaagactggtgcagcagtggagcgtggccgtgttcctgctgagctacgccgtgcccagctgcggcagaagcgtggagggcctgagcagaagactgaagagagccgtgagcgagcaccagctgctgcacgacaagggcaagagcatccaggacctgagaagaagattcttcctgcaccacctgatcgccgagatccacaccgccgagatcagagccaccagcgaggtgagccccaacagcaagcccagccccaacaccaagaaccaccccgtgagattcggcagcgacgacgagggcagatacctgacccaggagaccaacaaggtggagacctacaaggagcagcccctgaagacccccggcaagaagaagaagggcaagcccggcaagagaaaggagcaggagaagaagaagagaagaaccagaagcgcctggctggacagcggcgtgaccggcagcggcctggagggcgaccacctgagcgacaccagcaccaccagcctggagctggacagcagatag

SEQ ID NO: 260798 - DNA, 630 bp, Artificial Sequence
  derived and/or modified sequence
atgcagagaagactggtgcagcagtggagcgtggccgtgttcctgctgagctacgccgtgcccagctgcggcagaagcgtggagggcctgagcagaagactgaagagagccgtgagcgagcaccagctgctgcacgacaagggcaagagcatccaggacctgagaagaagattcttcctgcaccacctgatcgccgagatccacaccgccgagatcagagccaccagcgaggtgagccccaacagcaagcccagccccaacaccaagaaccaccccgtgagattcggcagcgacgacgagggcagatacctgacccaggagaccaacaaggtggagacctacaaggagcagcccctgaagacccccggcaagaagaagaagggcaagcccggcaagagaaaggagcaggagaagaagaagagaagaaccagaagcgcctggctggacagcggcgtgaccggcagcggcctggagggcgaccacctgagcgacaccagcaccaccagcctggagctggacagcagaaccgccctgctgtggggcctgaagaagaagaaggagaacaacagaagaacccaccacatgcagctgatgatcagcctgttcaagagccccctgctgctgctgtag

SEQ ID NO: 260799 - DNA, 519 bp, Artificial Sequence
  derived and/or modified sequence
atgcagagaagactggtgcagcagtggagcgtggccgtgttcctgctgagctacgccgtgcccagctgcggcagaagcgtggagggcctgagcagaagactgaagagagccgtgagcgagcaccagctgctgcacgacaagggcaagagcatccaggacctgagaagaagattcttcctgcaccacctgatcgccgagatccacaccgccgagatcagagccaccagcgaggtgagccccaacagcaagcccagccccaacaccaagaaccaccccgtgagattcggcagcgacgacgagggcagatacctgacccaggagaccaacaaggtggagacctacaaggagcagcccctgaagacccccggcaagaagaagaagggcaagcccggcaagagaaaggagcaggagaagaagaagagaagaaccagaagcgcctggctggacagcggcgtgaccggcagcggcctggagggcgaccacctgagcgacaccagcaccaccagcctggagctgtag

SEQ ID NO: 260800 - protein, 867 aa, Artificial Sequence
  derived and/or modified sequence
MQAEAADWFSSMPFQKHVYYPLASGPEGPDVAVAAAAAGAASMACAPPSAASGPLPFFQFRPRLESVDWRRLSAIDVDKVAGAVDVLTLQENIMNITFCKLEDEKCPHCQSGVDPVLLKLIRLAQFTIEYLLHSQEFLTSQLHTLEERLRLSHCDGEQSKKLLTKQAGEIKTLKEECKRRKKMISTQQLMIEAKANYYQCHFCDKAFMNQAFLQSHIQRRHTEENSHFEYQKNAQIEKLRSEIVVLKEELQLTRSELEAAHHASAVRFSKEYEMQKTKEEDFLKLFDRWKEEEKEKLVDEMEKVKEMFMKEFKELTSKNSALEYQLSEIQKSNMQIKSNIGTLKDAHEFKEDRSPYPQDFHNVMQLLDSQESKWTARVQAIHQEHKKEKGRLLSHIEKLRTSMIDDLNASNVFYKKRIEELGQRLQEQNELIITQRQQIKDFTCNPLNSISEPKGNPLAWQAFESQPAAPAVPMNAPALHTLETKSSLPMVHEQAFSSHILEPIEELSEEEKGRENEQKLNNNKMHLRKALKSNSSLTKGLRTMVEQNLMEKLETLGINADIRGISSDQLHRVLKSVESERHKQEREIPNFHQIREFLEHQVSCKIEEKALLSSDQCSVSQMDTLSTGEVPKMIQLPSKNRQLIRQKAVSTDRTSVPKIKKNVMEDPFPRKSSTITTPPFSSEEEQEDDDLIRAYASPGPLPVPPPQNKGSFGKNTVKSDADGTEGSEIEDTDDSPKPAGVAVKTPTEKVEKMFPHRKNVNKPVGGTNVPEMFIKKEELQELKCADVEDEDWDISSLEEEISLGKKSGKEQKEPPPAKNEPHFAHVLNAWGAFNPKGPKGEGLQENESSTLKSSLVTVTDWSDTSDV

SEQ ID NO: 260801 - DNA, 2604 bp, Artificial Sequence
  derived and/or modified sequence
atgcaggccgaggccgccgactggttcagcagcatgcccttccagaagcacgtgtactaccccctggccagcggccccgagggccccgacgtggccgtggccgccgccgccgccggcgccgccagcatggcctgcgccccccccagcgccgccagcggccccctgcccttcttccagttcagacccagactggagagcgtggactggagaagactgagcgccatcgacgtggacaaggtggccggcgccgtggacgtgctgaccctgcaggagaacatcatgaacatcaccttctgcaagctggaggacgagaagtgcccccactgccagagcggcgtggaccccgtgctgctgaagctgatcagactggcccagttcaccatcgagtacctgctgcacagccaggagttcctgaccagccagctgcacaccctggaggagagactgagactgagccactgcgacggcgagcagagcaagaagctgctgaccaagcaggccggcgagatcaagaccctgaaggaggagtgcaagagaagaaagaagatgatcagcacccagcagctgatgatcgaggccaaggccaactactaccagtgccacttctgcgacaaggccttcatgaaccaggccttcctgcagagccacatccagagaagacacaccgaggagaacagccacttcgagtaccagaagaacgcccagatcgagaagctgagaagcgagatcgtggtgctgaaggaggagctgcagctgaccagaagcgagctggaggccgcccaccacgccagcgccgtgagattcagcaaggagtacgagatgcagaagaccaaggaggaggacttcctgaagctgttcgacagatggaaggaggaggagaaggagaagctggtggacgagatggagaaggtgaaggagatgttcatgaaggagttcaaggagctgaccagcaagaacagcgccctggagtaccagctgagcgagatccagaagagcaacatgcagatcaagagcaacatcggcaccctgaaggacgcccacgagttcaaggaggacagaagcccctacccccaggacttccacaacgtgatgcagctgctggacagccaggagagcaagtggaccgccagagtgcaggccatccaccaggagcacaagaaggagaagggcagactgctgagccacatcgagaagctgagaaccagcatgatcgacgacctgaacgccagcaacgtgttctacaagaagagaatcgaggagctgggccagagactgcaggagcagaacgagctgatcatcacccagagacagcagatcaaggacttcacctgcaaccccctgaacagcatcagcgagcccaagggcaaccccctggcctggcaggccttcgagagccagcccgccgcccccgccgtgcccatgaacgcccccgccctgcacaccctggagaccaagagcagcctgcccatggtgcacgagcaggccttcagcagccacatcctggagcccatcgaggagctgagcgaggaggagaagggcagagagaacgagcagaagctgaacaacaacaagatgcacctgagaaaggccctgaagagcaacagcagcctgaccaagggcctgagaaccatggtggagcagaacctgatggagaagctggagaccctgggcatcaacgccgacatcagaggcatcagcagcgaccagctgcacagagtgctgaagagcgtggagagcgagagacacaagcaggagagagagatccccaacttccaccagatcagagagttcctggagcaccaggtgagctgcaagatcgaggagaaggccctgctgagcagcgaccagtgcagcgtgagccagatggacaccctgagcaccggcgaggtgcccaagatgatccagctgcccagcaagaacagacagctgatcagacagaaggccgtgagcaccgacagaaccagcgtgcccaagatcaagaagaacgtgatggaggaccccttccccagaaagagcagcaccatcaccaccccccccttcagcagcgaggaggagcaggaggacgacgacctgatcagagcctacgccagccccggccccctgcccgtgccccccccccagaacaagggcagcttcggcaagaacaccgtgaagagcgacgccgacggcaccgagggcagcgagatcgaggacaccgacgacagccccaagcccgccggcgtggccgtgaagacccccaccgagaaggtggagaagatgttcccccacagaaagaacgtgaacaagcccgtgggcggcaccaacgtgcccgagatgttcatcaagaaggaggagctgcaggagctgaagtgcgccgacgtggaggacgaggactgggacatcagcagcctggaggaggagatcagcctgggcaagaagagcggcaaggagcagaaggagcccccccccgccaagaacgagccccacttcgcccacgtgctgaacgcctggggcgccttcaaccccaagggccccaagggcgagggcctgcaggagaacgagagcagcaccctgaagagcagcctggtgaccgtgaccgactggagcgacaccagcgacgtgtag

SEQ ID NO: 260802 - DNA, 7068 bp, Artificial Sequence
  derived and/or modified sequence
tgttaggaaagaaaaaaaaattcctgatgtctggtccaagcaggaattccccggtggattggggaatgtctggcttttcctcagcttattgatctctgtggtaaccactggaggcccccagaagacccatagaaatgagaggcctgaggtctacaagtcgctgctagaaatattttagcctctccaaagcccagaatgcagccccgacccaagtttgtaagggttctgggtgcacgctgaccctgcgcgggcagacgcgccctttgctccaggtccggacctgggcgctgctatagcaacgtcctggacgcccagaccttaggccgccgccgccgcggaagcgaggaacccggccttctcccgctcctgagggctgtggcggcggcggcccgggaggcggcccaggctgggtaaagaccgcccggctcctcctatgcaagctgaggcagcggattggttttcaagcatgcccttccagaagcatgtctactacccgctcgccagcggcccagaggggcccgacgtcgctgtggccgccgccgccgcgggtgcggcctccatggcctgtgcgccccccagcgcggcttcggggcccctgcccttcttccagttcaggccgcggctggagagtgtggactggcggcggctgagcgccatcgacgtggacaaggtggcgggggctgtggacgtgctgacgctgcaggagaacatcatgaacatcaccttctgcaagctggaagacgagaagtgcccacactgccagtcgggggtggacccggtgctgctgaagctcatccgtctggcgcagttcaccatcgagtacttgctgcactcacaagagttcctcacctcgcagctgcacaccctggaggagcggctgcgcctgagccactgcgacggcgagcagagcaagaagctgctcaccaagcaggcgggggagatcaagacgctcaaggaagagtgcaaacgccggaagaagatgatctccacccagcagctgatgatcgaggccaaagccaactattaccagtgccatttttgtgacaaggcctttatgaaccaagcttttctacaaagtcacattcaacgccgccacactgaagaaaattctcattttgagtatcagaaaaatgcacagattgagaagctccggagtgagatcgtcgtattgaaggaagagctgcagctcaccaggtctgagctagaggctgcacaccatgccagtgcagtcagattctccaaggaatatgaaatgcagaaaacaaaagaggaagactttttgaagttatttgacaggtggaaagaagaagaaaaggagaaactagttgatgaaatggaaaaagtcaaggagatgtttatgaaggaatttaaagaattaacttcgaagaattcagcattagaatatcaactgtcagaaatccagaagtccaatatgcagatcaagtccaacataggcacattaaaagatgcacacgagtttaaagaagaccgttctccatatccccaggatttccataatgtcatgcagcttcttgatagtcaggaaagcaaatggacagctcgagttcaagctattcatcaagaacacaagaaagagaagggtcggctcctgtcacatatagagaaacttcgaacctcaatgatagatgatctaaatgcaagcaatgttttctataagaaaaggatagaagagctagggcagagactccaggagcagaatgagctgattataactcagagacagcagattaaagactttacctgtaatccattaaacagtatcagtgaacccaaaggaaatcctttagcctggcaggcttttgaatctcagccagctgctccagctgtgcctatgaatgccccagccctgcacactttggaaactaaatcaagtctgccaatggtgcatgaacaggcattctcgtcgcacatactggaaccaatagaagaactttcagaggaagaaaaaggaagggaaaatgaacagaaattaaataacaacaaaatgcatttaaggaaagctttgaagagtaactcctccctcactaagggactaagaacaatggtggagcagaacttgatggagaaactggaaaccttggggattaatgcagatatacgtggcatttcaagtgatcagttgcatagagtactaaaaagtgtggaatcagaaagacataagcaagaaagagaaatacctaactttcatcaaattcgagaattccttgaacatcaagtcagctgtaaaattgaggagaaagcactactctcttcagatcagtgcagtgtttctcaaatggataccctttcaactggagaagtacccaaaatgatacaacttccttccaaaaacagacaactgattagacaaaaagctgtttctactgataggacatctgttccaaaaattaagaaaaatgtcatggaagatccttttcccagaaagtcttcaactattacgacccctccttttagttcagaggaggagcaggaggacgacgacctcatccgggcatacgcatccccaggcccacttcctgtgccgccaccacaaaacaagggcagcttcgggaagaacacagtgaaaagtgacgcggacgggaccgagggaagcgaaatcgaggacactgatgattctcccaagcccgcaggagtcgccgttaaaacacctactgaaaaagttgaaaagatgtttccacatcgcaaaaatgtgaacaaaccagtcggtggaactaatgtccctgagatgtttatcaaaaaagaagaattacaagaactaaagtgtgcggatgtggaggatgaagactgggacatatcatccctagaggaagagatatctttgggaaaaaaatctgggaaagaacagaaggaacctccacctgcgaaaaatgaaccacattttgctcatgtgctaaatgcctggggcgcatttaatcctaaggggccaaagggagaaggacttcaagaaaatgaatcaagcacattaaaaagcagcttagtaactgtgactgattggagcgacacttcagatgtctaattccacatgtcagaagattattccagaagccagcagtatttcagtatcacagtgtttcagtaatttgcctccatgattctagtgcttctgccttaccgtgtttcccacagcaacacagagactgattcaaagaacaatggtctctttaatggcacccaatacagtattgaaaatcagatcatcaacagtatttcgaagcatgtaaaggtgtttaagacttccgctgctgcttaaaaataacatgtcattgaagtcataaaaagttttttcttcagaaaggtactctagtgttaagtgtatttttttcaactaattttttagtgaattttttttaaacttacagcatgttttggtttgaattactaaaactttaaaaaatatttttcttatgtatgctgtcgtatcgtaggcgtttatattataaaattctgttagtagtcttaaaattgaattggtggaaccactaatccttaaaagttagtctggttatttttcatatagaagtaagtttaatccgagtgtggtggtgttcacctttaatcccagctacttgggaggctgaggtgggaggataacttgagcacaggagttcaagaccagcgtgggcaatatagcaagactccacccctccacaccccaaaaaagtaagtttaggattagaatatagctaggtccaatgttaaatacattttcctggagtacatttgtcacattcagctttgagccactgtaagcatgttactattaaatggttggttattttatatagcatattctttatcttggatattttatgaataaagtatagttattttaagtgccaattaatttatcagactaaatagaaaatatttgagccattactgaattcacatatgtatgtttttttttactatttaaaatacccaacatgtattatgaaatacctcaaaagtaatttagttacattcttaaacaatgacattgtcgaaagaaagttcttataagctgttttttgcatttttataacttggttatactatattctgtttccaagtaaccttttaactaaaagatttgttgggttttagatctcttttcatttgtcaaccttttcagtaaagccctctgttacatcactgtgactgtggctgtgttattagagatgaattctgagttaaatttgtacttattaggggtcttacagagggagaatctggccttgattgctatgccatatgacattctgtcctaatggttagaacaaatctttatctgtttccacccaccctgggatcctttttacttgtagcccattcctgccctctaaaagaatccttccaacttcctataggggccatttcatgcagatatactcactttatatgtatgtttctaaaagctttagtgaaggctgaatccaagtttcatgtagtaggacagagaacagaaggccgaatccaagtttcatgtggtaggacagagaacggcaatctacaaaactacaccaagcctaagatggcccatgtgccactttgttcattcatttatttattcagcagatatttattgaaccacttggtctggtttggttttgaacacgcactaattcatttaattacaacaactttgcgatgtagttattgttataatcctcatcctaaaggtgtgagaaacagagttattaagtaagttgccagaagccatacaagtacaaagtgtcaaggggagactttaagccaggtctctattccatgttttgtgtctgccatgttttcattcctgagcagaagagcttggggaaatgaacttttgctaagtaaacccagtatttaaattaagtcactatatctgtgtcttttaagagcccctcctttagcttacatggttagttgtatctttttttttttttttttttgagacagagtctcactatgttgcccaggcttgagcgcagtggcaccatctcggctcactacaacctccgcctcccagattcaagcgattttcctgcctcagcctcccaagtagctgggattacaggtgcccaccaccatgcctggcttaattttttgtatttttagtagagatgaggtttcaccatgttggccagactggtctcgaactcctgacctcaaatgatccgctgtcttgtcctcccaaagtgctgggattataggcgtgagccatcgcgccctgctgcatttcatttttttgtataaaatttggtttgttcgtttttgaggggaaccattcctttatgttgccccttactgatgcccaactaatgtgtttctggttactaacagaccttcatcccccaccctccctaaattcttcggtgtaatctaagcgttatctgcaccacttctgaataataaatgtgtttgaaatgcacacctacacaaccctgtcccacactggcctgtaggacctaatctaccttcatgtctttcagttgatttgtatttctgcaaaagatatttcaaggattatcaaggtatggaattttttttattttttatcttttaacaaacttgttcatttccttttctttccattgagcacctctgaacaatgtgattcttttttttaagtctttcacacttcaggaaaatactacattcacccacgttgtgattcatatcggacagtttcttactcaaagataacacaaataccaattcttattcatactttgaaactatattttaccctagactgccttggttcaaaggcctagtttcgacattactgtggcaaattatttaagctctctgttttcatttctttttctgtaaatgcaggatgaaaacaatatgtatctcctaggatggctgtgaggagtgagtgagacaggacatgaaaggtgtgtatgaactgtgataactgttgcccttgtgggcatgttatatagggctggctctaggaagaagcctgtgtcttttttcagaaatccctggagcaacttaaatgtctttagaaatgacaagtctctcagttatccagttagccgtaaacaggttctggaagacacacctagatagaactcggcccgtcagttctgagtgaggcacgtaccacttgggcttgggatgtccttaacccatttatgcctgaggttgcaattttttgaatttttccaatcacaccttggcgatgaccttgagcagtaggatataaataactcccacatgcttagtgttccaataatggaacactaggcataaacaggttttaattggctcctcagtcaaccatgaccaatatctctatctcagcttctgctgatgccctagctcagggctctgcattccgtgccagggacgcctcagccccttaacatggatgtgccacatgacaggcaataatatattggccccattagcccttcctggagcagtcataatgaattacagtcatgacaggcacatgtaagaaaccaaaatttgctaaatatgtacatgagtcttcatcacagcatcgtttatgaaaacaactaaatattcactaatggtgccagtggaataaatcagagaacatcccctgctacgtaactctctgcatacatcaaagagaatggtgtggctttgctttttcaacaatctactgagtggccatgggcatgtggatatggccatgaatgagcaagatcctctctgatcctgtagaagttaagttctaccagataacttgctgcttcaacaaaaagatttacctttttaaataaatgttgtagaatacttaaaaaaaacaaactagaatttgcctgtgtgcagccagtaacatgtctatttaacctggacaccttttgaggaatattctcagattgcccccatgctgtttataagacattgttccttatacacctgtttatgaatgaaaagaaacataaggagtgggtacaaagacttctatctatgaatgattaaaaaggctagagtacgaatacttcttgaacctttggtactaaatgcttttcatgttctatataaatgtagaaaacattttacaaatcctgtaaataaactgtttattttttatagaaagcc

SEQ ID NO: 260803 - DNA, 2604 bp, Artificial Sequence
  derived and/or modified sequence
atgcaggccgaagcagcggactggttcagcagtatgccgttccagaagcatgtgtattatccattagcctcagggcccgagggtccggacgttgccgtggctgcggccgccgccggtgctgcctccatggcctgcgctcctccctcagccgctagcggtcccctccctttcttccagttccggcccaggttggagtccgttgattggcgccggttaagtgcaatcgacgtcgataaggtggcaggcgcggtggatgtccttactcttcaagaaaacatcatgaacatcaccttctgcaaactagaggacgaaaaatgccctcattgtcagtcaggcgtggatcctgtgcttttaaaactaatacggcttgcccagtttaccatcgagtatttactgcattcacaggagtttctcacctctcagttacacacactggaggaaagactgaggttatcacactgtgacggagaacaaagcaaaaagctgctcacaaagcaagcaggggagattaagaccctgaaggaggagtgcaagcgaagaaagaagatgattagcactcagcagttaatgatcgaggcgaaagccaattactaccagtgtcacttctgcgataaagcttttatgaaccaggcattcctccaatcacacatccaaagacgtcacaccgaggagaactctcactttgaatatcagaagaacgcacaaatcgagaagcttcgatccgagatcgtcgtgctgaaggaggaattacagctgaccagaagcgaactagaggctgcccatcatgcatcggcagtccggttctccaaagagtatgagatgcaaaagacaaaagaagaagattttctaaaactttttgaccggtggaaagaagaggaaaaggaaaagctggtggacgagatggagaaagtgaaagaaatgtttatgaaggagtttaaagaactgacttcgaaaaactctgctctggaatatcagctttcagaaatccagaagtctaacatgcagattaaatccaacatcggtactctgaaagatgctcacgaatttaaggaagatcgttcaccctacccgcaggatttccacaatgtgatgcagctgttggactcccaggaatcgaaatggacagcgcgcgtgcaggccatccatcaggaacataagaaagaaaaaggtcgcctgctctcccatattgagaagctgagaaccagcatgatagacgacttgaacgcctccaatgtgttctacaagaaacgtattgaggaactcgggcagcgcctgcaggagcaaaacgagttgatcatcacccagcgacagcagattaaagattttacctgcaaccccctcaatagtatctccgaaccgaaggggaatccattggcttggcaggcctttgagtcccaacctgctgctcccgccgtccctatgaacgctcccgcgctccatacactggagactaaatcatccttgccaatggtgcacgagcaggcgttcagttctcacattttggaaccaattgaggagctatctgaagaggaaaaaggccgcgaaaatgaacagaagctcaataacaacaagatgcatcttaggaaagctctgaagtccaattcctctctgaccaagggcctgcgcacgatggtggaacagaatctgatggagaaactcgagacactcgggataaatgctgatatccgcggcatatcaagtgaccaactgcatagggtgctgaagagtgtggagtccgaacggcacaaacaggagagagaaatccctaatttccatcaaatacgcgagttcctagagcaccaggtcagctgcaaaatcgaggagaaagccctcttgagttccgaccaatgttcggtgagccaaatggacactctctcaacgggagaagtcccaaagatgattcaactgccatcaaagaatcgccagctcatccgccagaaggccgtctccactgacagaacatctgtgcccaagataaaaaagaacgtaatggaggatcccttcccaagaaaatcctccaccattaccacacccccctttagctctgaggaagaacaagaggatgatgatcttattagggcatacgcaagccctggcccactgccagtgccacccccacagaataagggaagctttggtaagaacacggtgaagtccgatgccgacggaacagaagggagtgaaattgaggatacagatgactctcctaaacctgccggggtggctgtcaaaactcccactgagaaggtggagaaaatgttcccccatcgtaagaacgtgaacaaaccagttgggggaactaatgtccccgaaatgttcatcaaaaaagaagagcttcaggaactgaagtgcgcagacgtggaagacgaagattgggacatctcttccttagaggaggaaatttctctcggaaagaaatccgggaaggagcagaaggaacctccccccgccaaaaacgaaccccacttcgcccatgtgctgaatgcgtggggagctttcaacccgaaggggcctaagggcgaggggctccaggaaaacgagagcagtaccctgaaatcctcgttggttaccgtgaccgactggtccgacacaagcgacgtttag

SEQ ID NO: 260804 - DNA, 2604 bp, Artificial Sequence
  derived and/or modified sequence
atgcaggcagaggctgcggactggttctcctccatgccattccagaaacacgtgtactaccctttagctagcggaccagagggcccagatgtggccgttgccgccgccgccgctggggcagcctctatggcctgtgctccaccttctgctgctagcgggcctctgccgttcttccaattcagaccacggttagagagcgtcgattggcgcagattatcagccattgatgttgataaagtcgcgggagccgtggacgtgcttacactgcaggagaatatcatgaatattacattctgcaaactggaagatgagaagtgtccccactgtcagtccggagtggacccggtactgctgaaactaattaggctggcacagtttaccatcgaataccttctgcacagtcaagagttcctgacgtcccagctgcatacattggaagagaggctccgactgtcacactgcgacggagagcagagcaagaaattacttacaaagcaggctggagagattaagacattgaaggaagagtgcaaacggagaaaaaagatgatcagtacacagcagttgatgattgaagcaaaggccaactattatcaatgccacttctgcgataaggcttttatgaatcaggcgtttctgcagtctcacatccagcgccgacacacggaggaaaattctcacttcgagtatcagaaaaacgcccagattgaaaaactgagatccgagatcgtcgtcctgaaagaggagctgcagttaacacgctccgagcttgaagcagcccaccatgcaagcgctgtcagattttctaaggaatacgagatgcaaaaaacaaaggaggaggatttcctcaagctgttcgaccggtggaaggaagaagaaaaagagaaacttgtcgacgagatggagaaagtgaaagagatgttcatgaaggaattcaaggaactgacctctaaaaattccgccctggaataccagctgagtgagatccaaaagtcaaacatgcaaatcaaaagtaacatcggaaccctcaaagatgctcacgagttcaaagaggatcgctctccctacccccaggattttcacaatgtgatgcaactgctggacagccaggagtcgaaatggacagcccgcgtccaagctatacatcaggaacataaaaaagagaagggacgcctcctcagtcatatcgaaaagttaagaacttccatgatcgacgatctgaatgctagcaatgtattttataagaagcggatcgaagagttagggcaacgcctccaggaacagaacgagttgattatcacacagcgccagcagattaaggatttcacatgcaatccactcaactccatctccgagcctaagggaaacccacttgcgtggcaggcatttgaatcacagcccgccgctccggcagtacccatgaacgcacccgccttacacactctggagactaagtcctccctccccatggtccatgagcaagccttttcgagccatatcctggaaccaattgaggagttgtccgaggaggaaaaagggagggaaaacgagcagaagctgaataataataaaatgcatctgcgcaaggccctgaaatctaacagctctctaaccaaaggcttgaggactatggtggagcagaacctgatggagaaacttgagactctgggaatcaatgccgacatccgcgggatatcttctgaccagctgcaccgagtgcttaaaagcgtggaatctgaacgccacaagcaggaacgagagattccaaactttcatcagatacgggagttcctcgagcaccaggtctcgtgcaaaatagaggagaaagccctcttgtcgagcgaccagtgtagcgtgagtcagatggacaccctttcgaccggcgaggtgccaaaaatgattcagttgcctagcaaaaatcgacagcttattcgccagaaagctgtatccacagataggacctctgtacccaagatcaaaaaaaacgtgatggaagacccatttccacgaaagtcttctacgatcaccacgcctccattctccagtgaggaggaacaggaggatgatgatttaatcagagcctacgctagtcctggaccgctacctgtgccaccaccccaaaataaggggtctttcggaaagaacacagtgaagagcgatgccgacggaactgagggctccgaaattgaagataccgatgactcacccaagcccgctggcgtggctgtgaaaacccctacagagaaggtcgagaaaatgttcccacatcgcaagaacgtgaacaagcccgtcggcgggactaacgtaccagaaatgtttataaagaaggaagagttacaagagctgaagtgtgctgacgtagaggacgaggattgggacatcagctctctcgaggaagagataagtcttggtaaaaagtctggcaaggaacagaaggaacctccccccgccaaaaacgaaccacacttcgcccacgtcttgaatgcgtggggggcttttaatcccaaaggtcctaagggcgaggggcttcaggagaatgagtcctccacattgaaaagcagtcttgtcacagtcactgattggtccgatacaagcgatgtatag

SEQ ID NO: 260805 - DNA, 2604 bp, Artificial Sequence
  derived and/or modified sequence
atgcaggccgaggccgctgactggttcagctccatgcccttccagaagcacgtgtactaccccctggccagcggccctgagggcccagatgtggccgtggccgctgctgctgctggggccgcctccatggcctgtgcccctccttctgctgccagcggccccctgcccttcttccagttccggccccggctggagagcgtggactggaggcggctgagcgccattgatgtggacaaggtggccggggctgtggatgtgctgaccctgcaggagaacatcatgaacatcaccttctgcaagctggaggatgagaagtgcccccactgccagagcggcgtggaccctgtgctgctgaagctgatccggctggcccagttcaccatcgagtacctgctgcacagccaggagttcctgaccagccagctgcacaccctggaggagcggctgcggctgagccactgtgatggagagcagagcaagaagctgctgaccaagcaggccggggagatcaagaccctgaaggaggagtgcaagaggaggaagaagatgatcagcacccagcagctgatgattgaggccaaggccaactactaccagtgccacttctgtgacaaggccttcatgaaccaggccttcctgcagagccacatccagaggaggcacacagaggagaacagccactttgagtaccagaagaatgcccagatcgagaagctgcggagtgaaattgtggtgctgaaggaggagctgcagctgaccaggtctgagctggaggccgcccaccacgccagcgctgtgcgcttcagcaaggagtatgagatgcagaagaccaaggaggaggacttcctgaagctgtttgaccgctggaaggaggaggagaaggagaagctggtggatgagatggagaaggtgaaggagatgttcatgaaggagttcaaggagctgaccagcaagaacagcgccctggagtaccagctgtctgagatccagaagagcaacatgcagatcaagagcaacatcggcaccctgaaggatgcccacgagttcaaggaggacaggagcccctacccccaggacttccacaacgtgatgcagctgctggacagccaggagagcaagtggacagcccgggtgcaggccatccaccaggagcacaagaaggagaagggccgcctgctgagccacatcgagaagctgcggacctccatgattgatgacctgaatgccagcaatgtgttctacaagaagagaattgaggagctgggccagaggctgcaggagcagaatgaactcatcatcacccagaggcagcagatcaaggacttcacctgcaaccccctgaacagcatcagcgagcccaagggcaaccccctggcctggcaggcctttgagagccagcctgctgccccagctgtgcccatgaatgccccagccctgcacaccctggagaccaagagcagcctgcccatggtgcatgagcaggccttcagcagccacatcctggagcccatcgaggagctgtctgaggaggagaagggcagagaaaatgagcagaagctgaacaacaacaagatgcacctgaggaaggccctgaagagcaacagcagcctgaccaagggcctgcggaccatggtggagcagaacctgatggagaagctggagaccctgggcatcaatgctgacatccggggcatcagcagtgaccagctgcaccgggtgctgaagtctgtggagagcgagcggcacaagcaggagcgggagatccccaacttccaccagatccgggagttcctggagcaccaggtgtcctgcaagattgaggagaaggccctgctgagcagtgaccagtgcagcgtgtcccagatggacaccctgagcactggagaggtgcccaagatgatccagctgcccagcaagaaccggcagctgatccggcagaaggctgtgtccacagacaggacctctgtgcccaagatcaagaagaatgtgatggaggaccccttccccaggaagagcagcaccatcaccaccccacccttcagcagcgaggaggagcaggaggatgatgacctgatccgggcctatgccagccctggccccctgcctgtgcccccaccccagaacaagggcagctttgggaagaacacagtgaagagtgatgctgatggaacagagggcagcgagattgaggacacagatgacagccccaagccagctggggtggccgtgaagacccccacagagaaggtggagaagatgttcccccacaggaagaatgtgaacaagcctgtgggcggcaccaacgtgcctgagatgttcatcaagaaggaggagctgcaggagctgaagtgtgctgatgtggaggatgaggactgggacatcagcagcctggaggaggagatcagcctgggcaagaagagcggcaaggagcagaaggagcccccaccagccaagaatgagccccactttgcccacgtgctgaatgcctggggcgccttcaaccccaagggccccaagggggagggcctgcaggagaatgaaagcagcaccctgaagagcagcctggtgacagtgacagactggagcgacaccagtgatgtgtag

SEQ ID NO: 260806 - DNA, 3738 bp, Artificial Sequence
  derived and/or modified sequence
ggagccgggacaccgagggaagaggccggagggagatcgcggaggggagggggcgggaggggggtggggtatcctgagtcgtccgtggtccggagtctggaaggccctagagcggcgccagtcgacccgcctcgccacaacttgcccagaccagacacgtttcatcctgcgccctgcaagaaggagccggcctgcctctctccgctttgctgctcctcggcctccgcgggcccggcccgcgtcagcagcgaccctggggtctgggtcccctgtgtcgcccccgcccgcctgcagcgcccggcacccgcccaggagcgcgcagctggggttctagggacgtatacttgagcaagagagaccacagctcttgttcccgctgatcctgcagcccagtggatggagtccagaatctacagacctgccaggaaagaaaaaaaaattcctgatgtctggtccaagcaggaattccccggtggattggggaatgtctggcttttcctcagcttattgatctctgtggtaaccactggaggcccccagaagacccatagaaatgagaggcctgaggtctacaagtcgctgctagaaatattttagcctctccaaagcccagaatgcagccccgacccaagtttgtaagggttctgggtgcacgctgaccctgcgcgggcagacgcgccctttgctccaggtccggacctgggcgctgctatagcaacgtcctggacgcccagaccttaggccgccgccgccgcggaagcgaggaacccggccttctcccgctcctgagggctgtggcggcggcggcccgggaggcggcccaggctgggtaaagaccgcccggctcctcctatgcaagctgaggcagcggattggttttcaagcatgcccttccagaagcatgtctactacccgctcgccagcggcccagaggggcccgacgtcgctgtggccgccgccgccgcgggtgcggcctccatggcctgtgcgccccccagcgcggcttcggggcccctgcccttcttccagttcaggccgcggctggagagtgtggactggcggcggctgagcgccatcgacgtggacaaggtggcgggggctgtggacgtgctgacgctgcaggagaacatcatgaacatcaccttctgcaagctggaagacgagaagtgcccacactgccagtcgggggtggacccggtgctgctgaagctcatccgtctggcgcagttcaccatcgagtacttgctgcactcacaagagttcctcacctcgcagctgcacaccctggaggagcggctgcgcctgagccactgcgacggcgagcagagcaagaagctgctcaccaagcaggcgggggagatcaagacgctcaaggaagagtgcaaacgccggaagaagatgatctccacccagcagctgatgatcgaggccaaagccaactattaccagtgccatttttgtgacaaggcctttatgaaccaagcttttctacaaagtcacattcaacgccgccacactgaagaaaattctcattttgagtatcagaaaaatgcacagattgagaagctccggagtgagatcgtcgtattgaaggaagagctgcagctcaccaggtctgagctagaggctgcacaccatgccagtgcagtcagattctccaaggaatatgaaatgcagaaaacaaaagaggaagactttttgaagttatttgacaggtggaaagaagaagaaaaggagaaactagttgatgaaatggaaaaagtcaaggagatgtttatgaaggaatttaaagaattaacttcgaagaattcagcattagaatatcaactgtcagaaatccagaagtccaatatgcagatcaagtccaacataggcacattaaaagatgcacacgagtttaaagaagaccgttctccatatccccaggatttccataatgtcatgcagcttcttgatagtcaggaaagcaaatggacagctcgagttcaagctattcatcaagaacacaagaaagagaagggtcggctcctgtcacatatagagaaacttcgaacctcaatgatagatgatctaaatgcaagcaatgttttctataagaaaaggatagaagagctagggcagagactccaggagcagaatgagctgattataactcagagacagcagattaaagactttacctgtaatccattaaacagtatcagtgaacccaaaggaaatcctttagcctggcaggcttttgaatctcagccagctgctccagctgtgcctatgaatgccccagccctgcacactttggaaactaaatcaagtctgccaatggtgcatgaacaggcattctcgtcgcacatactggaaccaatagaagaactttcagaggaagaaaaaggaagggaaaatgaacagaaattaaataacaacaaaatgcatttaaggaaagctttgaagagtaactcctccctcactaagggactaagaacaatggtggagcagaacttgatggagaaactggaaaccttggggattaatgcagatatacgtggcatttcaagtgatcagttgcatagagtactaaaaagtgtggaatcagaaagacataagcaagaaagagaaatacctaactttcatcaaattcgagaattccttgaacatcaagtcagctgtaaaattgaggagaaagcactactctcttcagatcagtgcagtgtttctcaaatggataccctttcaactggagaagtacccaaaatgatacaacttccttccaaaaacagacaactgattagacaaaaagctgtttctactgataggacatctgttccaaaaattaagaaaaatgtcatggaagatccttttcccagaaagtcttcaactattacgacccctccttttagttcagaggaggagcaggaggacgacgacctcatccgggcatacgcatccccaggcccacttcctgtgccgccaccacaaaacaagggcagcttcgggaagaacacagtgaaaagtgacgcggacgggaccgagggaagcgaaatcgaggacactgatgattctcccaagcccgcaggagtcgccgttaaaacacctactgaaaaagttgaaaagatgtttccacatcgcaaaaatgtgaacaaaccagtcggtggaactaatgtccctgagatgtttatcaaaaaagaagaattacaagaactaaagtgtgcggatgtggaggatgaagactgggacatatcatccctagaggaagagatatctttgggaaaaaaatctgggaaagaacagaaggaacctccacctgcgaaaaatgaaccacattttgctcatgtgctaaatgcctggggcgcatttaatcctaaggggccaaagggagaaggacttcaagaaaatgaatcaagcacattaaaaagcagcttagtaactgtgactgattggagcgacacttcagatgtctaattccacatgtcagaagattattccagaagccagcagtatttcagtatcacagtgtttcagtaatttgcctccatgattctagtgcttctgccttaccgtgtttcccacagcaacacagagactgattcaaagaacaatggtctctttaatggcacccaatacagtattgaaaatcagatcatcaacagtatttcgaagcatgtaaaggtgtttaagacttccgctgctgcttaaaaataacatgtcattgaagtcataaaaagttttttcttcagaaaggta

SEQ ID NO: 260807 - DNA, 2604 bp, Artificial Sequence
  derived and/or modified sequence
atgcaggccgaggccgccgactggttcagcagcatgcccttccagaagcacgtgtattatcctctggctagcggtccagaaggcccagatgtcgcagttgcagccgcagcagcgggggcagccagtatggcctgcgccccacccagcgctgcctcggggcccctgcctttctttcagttcaggcctagactggagtcagtcgactggagaagactgtctgctattgatgtggacaaggttgctggggcggtagacgtgctcactctacaagagaatatcatgaatatcacattctgcaaactcgaagacgagaagtgcccccattgccagtccggcgtggatcccgtgctactgaaacttatcaggcttgcgcagtttacgatagagtacctgctgcacagccaggagttcctgacctctcagctgcacactctggaggagaggctgagactttctcactgtgatggggaacagtccaagaagctgttgactaagcaggcaggggaaattaaaacactcaaagaagaatgtaaacgccgaaaaaaaatgatctctacacagcagcttatgatcgaagctaaagcaaattactaccaatgccatttctgcgataaagcgtttatgaaccaggccttcttgcaatcacacattcagcgcaggcacaccgaagaaaactctcacttcgagtaccagaaaaatgcccagattgagaagctcaggtcagaaatcgtagtgctgaaggaagaactccaactgaccaggtcagaactggaagccgctcatcatgctagtgccgtacgattttctaaggaatatgagatgcagaagaccaaagaggaagatttcctaaaactgtttgacagatggaaggaggaagaaaaagagaaactcgtcgacgagatggaaaaggtcaaggagatgttcatgaaggaatttaaggagctcacatcaaagaatagtgcccttgaataccaactgtcggagatccagaaaagcaatatgcagatcaagtctaatatcggtactctcaaggacgctcacgaatttaaggaggatcgtagtccgtatccgcaggatttccataatgtgatgcaacttcttgactcccaggaatccaaatggaccgcaagagtgcaggctatccaccaggagcacaagaaggaaaaaggcaggctgctgagtcatatagagaagctccggacctccatgattgatgacctcaatgcctctaatgtcttttacaagaaaagaattgaggaactgggccagaggctgcaagaacagaacgaactcataataactcagagacaacagatcaaggattttacctgcaaccctctcaattccatcagcgaacctaaaggaaacccgctggcatggcaggcatttgagtcccagccagccgcacctgctgtacccatgaatgccccagctctccacactctagaaacaaagtcttctctgccgatggtacatgagcaagctttcagctcacacattcttgaaccaatagaagagctctcagaagaggaaaaaggccgtgagaatgagcaaaaactgaataacaacaagatgcatctgcggaaggctctgaagtccaactcttccctgaccaaaggcctacgaacaatggtggaacagaaccttatggagaaactggaaactttgggtatcaatgccgatattcgtggaatttcttcagatcagctgcaccgcgtgctgaagagtgttgagtctgagcgtcataagcaagagcgcgaaattccgaactttcaccagatcagggagttcttagagcatcaagtgagctgcaagattgaagagaaggcactgctgagctccgaccaatgctcggtttcccaaatggataccctatcaacaggggaagtgcccaagatgattcagctcccgagcaaaaatagacagcttatacgacagaaagccgtcagtaccgaccgcacttcagtgcctaagatcaagaaaaatgttatggaggaccccttccccaggaaatcaagtacaattaccaccccaccgttcagcagcgaggaggagcaggaagacgatgatctgattcgggcatatgcttctcccggaccccttcccgtcccccctccccagaataagggtagctttggcaagaatacagttaagtccgacgccgacggtactgaaggttcagaaatcgaggataccgacgattcacccaagccagcaggagtcgccgtgaaaaccccaaccgaaaaggtcgaaaaaatgtttccccaccgcaagaatgtcaacaaacccgtggggggtacgaacgttcccgaaatgttcatcaagaaggaggagctccaggagctcaagtgtgcagacgtggaggacgaagactgggacatatcctcactggaagaggaaatatccctcggaaaaaaatccggcaaggagcaaaaggagcccccccccgcgaaaaatgagccgcacttcgcacacgtccttaatgcgtggggcgctttcaatccaaaaggcccaaaaggcgaggggctgcaagaaaacgaatcgagcacccttaaatcttctttagtgacagtgaccgactggtctgacaccagtgatgtttag

SEQ ID NO: 260808 - DNA, 2604 bp, Artificial Sequence
  derived and/or modified sequence
atgcaggccgaggccgccgactggttcagcagcatgcccttccagaagcacgtgtactaccccctggcatctggaccagagggacctgacgtggctgtggccgctgccgccgctggcgcggcttcaatggcctgtgctccaccgtctgccgctagcgggcctctgccctttttccagttcagaccacgcttagagtctgttgattggcgtcgactgtctgcaatcgatgtggacaaggtcgcgggcgctgtcgacgtgctgacccttcaggaaaacatcatgaatattacattttgtaagttagaggatgaaaagtgcccccattgccagtccggcgtggatcccgtgttactcaaactgatcagactcgctcaatttacaattgagtacctgttacactcccaggaattcctaaccagccagttgcacactttagaggagagactgcgcttgtcccactgcgacggtgagcagtccaagaaattactaaccaagcaggctggcgagatcaagacactgaaggaggagtgtaaaagaagaaagaagatgatctcaacccaacagctgatgatagaagccaaggccaactattaccagtgccacttctgcgataaagcctttatgaaccaggcctttctacagtcacatatccagcgcagacacactgaagagaactcccacttcgaataccagaagaacgcccaaatcgaaaagctgcgcagtgaaatcgtggtgctcaaagaggaactacagctgacacgttctgagttggaggccgcgcaccacgcttctgccgtacgtttcagtaaggaatacgagatgcagaagaccaaggaggaggatttcctaaaattgttcgaccgctggaaggaggaagaaaaggagaagttggttgacgagatggagaaagttaaggaaatgttcatgaaagagtttaaggagcttactagcaagaactctgccttggaataccaactgtctgaaatccaaaaaagtaacatgcagatcaaaagtaacatagggacattaaaagacgcacatgaatttaaagaggatcgatcaccatacccccaagactttcacaatgtaatgcaactcctcgactctcaagaatccaaatggaccgcgcgagtccaagccattcaccaggagcacaaaaaagaaaagggacgactactcagccacatagagaagctgcgcacgtccatgattgatgatctcaacgcaagcaatgttttttacaagaaaaggatagaggagcttggtcagagactccaagaacagaatgagctgattattacacagaggcagcagatcaaggactttacctgcaacccgctgaactctatttccgagcctaagggtaatccactggcatggcaagccttcgagtctcagcccgctgccccagcagtaccaatgaacgcccctgcactccataccctggagactaagagctcattgcccatggtccatgagcaagctttctcgagccacatactagagcctattgaggaactttccgaggaagaaaaagggagagaaaacgagcagaaacttaacaacaacaaaatgcacctgcgcaaggctctcaagtccaactctagtctcacgaaagggttacgtacaatggtggagcaaaacctgatggaaaaacttgagaccttggggataaacgctgacattaggggaatttctagcgatcagctgcaccgcgtgctcaaaagcgttgaatcagagagacacaaacaagagagggagattcccaacttccatcagatccgcgagttcctggagcaccaagtgtcatgcaaaattgaagagaaggcgttgttgagcagcgaccagtgttcagtatctcagatggacactctgagcaccggagaagtgccgaagatgatacagctacctagtaagaatcgacagctcattcggcagaaagctgtctcaacagaccggacgtccgttcctaagattaagaaaaatgtcatggaggacccgtttccaaggaagtcctcgactatcacgactcctcctttctcatccgaggaagaacaagaagacgacgatttgatacgtgcctacgcttctccaggccctctgccagtacctccaccacagaacaaaggctccttcggaaagaatactgtcaaatctgatgcggacggcacagagggtagcgagatcgaggacacagacgatagcccaaagcctgccggtgtcgcagtgaaaactcccactgaaaaagtcgaaaagatgtttccccacagaaagaacgttaacaagccagtcggcggaaccaacgtgcctgaaatgtttatcaagaaggaagagttgcaggagttgaagtgcgccgacgtggaggacgaggactgggatatctccagcttggaggaggaaatttcccttggcaaaaagtccgggaaggaacagaaggaacctcccccagccaagaacgaaccgcatttcgctcatgttctgaacgcttggggtgcatttaacccaaaaggcccaaagggcgagggactccaggagaatgaatcctccacactgaaatcctctctcgtaaccgtcaccgactggtctgatacatctgacgtgtag

SEQ ID NO: 260809 - DNA, 2604 bp, Artificial Sequence
  derived and/or modified sequence
atgcaggctgaagccgcagactggttctccagtatgccttttcagaagcacgtatactacccacttgcctcgggccctgagggaccggacgtcgccgttgccgcagccgcagcaggtgcagccagcatggcctgtgccccacccagtgccgctagcggacccctccctttctttcaattccggcctcggcttgagagcgtggactggaggaggctgagtgctattgacgtcgataaagtggctggggctgtggatgtgctgaccctccaagagaatattatgaacatcactttctgtaaacttgaagacgagaaatgtcctcactgccaaagcggcgtcgacccggtgttgctaaagctgattcgcttagctcagtttaccattgaatatctgttacacagccaagagttcctgacatctcaactgcatacattggaagaacgtctcagactgagccactgcgacggagagcaaagtaagaaactgttgactaagcaggccggagagataaagactctaaaggaggagtgcaaaagacggaagaaaatgataagcacccagcagttgatgatcgaagctaaggctaattactaccagtgtcacttctgtgacaaggctttcatgaaccaagcattcctgcaaagccatatacagagaaggcacaccgaggagaattcgcatttcgagtatcagaagaacgcccagatcgaaaaactccggtccgagattgtcgtattaaaggaggagctccagttgacccgtagtgaactagaagccgcacatcacgcttccgcagtgcgattttcaaaggagtacgagatgcagaagactaaagaggaggactttctgaaactgttcgatagatggaaggaagaagaaaaggaaaagctggtcgatgagatggagaaggtcaaagaaatgtttatgaaggagtttaaggagctgaccagtaaaaacagtgcactggaataccagctgtccgagatccagaagtcaaatatgcagattaagtcaaacattggtacattaaaggacgctcacgagttcaaggaggaccgctccccatatccgcaggattttcataacgtgatgcagctgcttgatagtcaggaaagcaagtggaccgcacgagtccaggcgattcatcaggaacataaaaaggagaagggtagactgttgagccatatcgaaaaactccggaccagtatgatagacgacctgaatgcaagcaatgtattctataagaagcggatagaagaattgggacaaagactgcaggagcagaatgagctgattattacccagcggcagcaaattaaggattttacctgcaatccattaaattcaatctcagagccaaaaggcaaccctctcgcctggcaggcctttgaatcccagccagcagcacctgccgtgcccatgaatgctcccgcacttcatactctagaaactaagtctagtcttccaatggtgcacgaacaagccttttccagccacattctggaaccaattgaggagcttagcgaggaggaaaaagggagagaaaatgaacagaagctcaacaataacaaaatgcaccttaggaaggccctgaaatctaactcatccttaacaaaaggactgcgcactatggtggagcaaaatctgatggagaaactagaaacactgggaattaatgcagatattcggggaatcagtagtgatcagttacaccgtgtgctgaagtccgtagagtctgagaggcataagcaggagcgggagatcccaaacttccaccagatacgtgagttcctcgagcatcaggtcagttgtaagatcgaggagaaagcgcttctttcctctgatcaatgttctgtttcacagatggataccctttccactggcgaggtgcccaagatgattcagcttcccagtaaaaataggcagctgattaggcaaaaggccgtgtctacagaccgaacctccgtccccaagattaagaagaacgtgatggaggacccgttccccaggaaatccagcacaatcactacgcctccattctcttctgaggaggagcaagaggacgacgacctgatccgggcatacgcaagcccaggacctctgccagtgcccccacctcagaacaagggctccttcggaaaaaacaccgttaagtcagatgccgatgggactgagggtagcgaaatcgaagacacagacgatagcccaaagccagcaggcgtcgccgtgaagaccccaactgagaaggtggaaaagatgttcccccacagaaagaacgttaacaagcctgtggggggtaccaatgtgcccgagatgtttatcaagaaggaggagttacaggaattaaaatgtgcggatgttgaagacgaggactgggacatttcttctctggaagaggaaatttccctcggtaagaaatctggcaaagagcagaaagagccccctcctgcgaagaacgagcctcacttcgcccatgtactgaacgcctggggtgctttcaacccaaaaggaccaaaaggcgagggtctgcaggaaaatgagtcttctacactgaaatcttccctcgtgacagtaactgactggagtgacacgtccgacgtgtag

SEQ ID NO: 260810 - DNA, 2604 bp, Artificial Sequence
  derived and/or modified sequence
atgcaggccgaagccgcagactggttctcatctatgcctttccagaaacatgtgtactacccgctcgcaagcggaccagaaggccctgacgtggctgttgcagctgccgctgccggagcagcttcaatggcttgcgcacccccaagtgccgcatccggaccactgcctttttttcagttccggcctcggttggagagcgtcgattggcgcaggctgtctgctatagacgtcgataaggtcgctggggcagtagatgtccttactcttcaggagaacattatgaatatcacgttttgtaaactggaagacgagaagtgcccacattgccagagcggcgtcgaccccgtgctgctcaagctgatccgtcttgcacaatttacaatcgaatatcttctgcatagccaggagttcctgacaagtcagttgcacacactggaggaacggctgagactgagccattgtgatggcgaacagtccaagaaactgctcaccaagcaggccggtgaaattaagaccctgaaagaagaatgtaaaaggagaaaaaaaatgatcagcacccagcagctaatgattgaagctaaggcaaattattaccagtgccatttctgtgacaaagcttttatgaaccaggcatttcttcagtcacatatccagcgcaggcataccgaggaaaactcccatttcgagtaccaaaaaaacgcccaaatcgaaaaattgagatcagaaatcgtcgtattgaaggaagaactgcagctgacccgttctgagctggaagcggctcaccacgcctctgcagtacgattttcaaaagaatatgaaatgcagaagaccaaagaggaagacttcctcaaactattcgaccgctggaaggaggaggaaaaggagaaacttgttgatgagatggagaaggtaaaagagatgttcatgaaggagttcaaagagctgactagcaagaacagcgctcttgaatatcaactcagtgagattcagaaatcaaatatgcagatcaaaagtaatattggcacacttaaagatgctcacgagttcaaagaggatagaagtccatatccacaagattttcacaatgtcatgcagctgctggacagccaagagtccaagtggaccgctagagtccaggctatccatcaagaacataagaaggaaaagggtcggcttctcagtcatatagagaagcttcggacatcaatgattgacgacctgaatgcctcaaatgtcttttacaagaagcgcatagaggaactaggacagcgcttgcaagagcagaatgagctgataatcactcagaggcagcaaataaaagactttacctgtaatccattaaacagcatcagcgagcccaaggggaatccactcgcctggcaggccttcgaatcgcagcccgcagcgcctgcagtgcctatgaatgccccagctctccacactttggaaacaaagagttccctccctatggttcacgaacaggcgttctcttctcatattctggaaccgattgaggagcttagcgaggaggagaaagggagggagaatgagcaaaagctgaataacaataagatgcatctgcgaaaggcactcaagagcaattcatctctaacaaaagggctgcggaccatggtggagcaaaatctgatggaaaaacttgagacccttggtattaacgctgacatccgtggaatcagcagcgatcaacttcacagagtgctaaagtcagtggagtctgaacgtcacaagcaggaacgggaaatcccaaactttcaccaaattcgggagtttctggaacatcaggtatcatgcaaaatagaggaaaaagcactcttgtcctctgatcaatgctctgtgagccaaatggacacactgagcaccggagaggtccctaaaatgattcagctaccctctaagaaccgtcaactcatcaggcaaaaggctgtctctaccgaccgtacctctgtccccaagattaaaaagaacgtgatggaagatccgtttccgaggaaaagtagtactatcaccactccccctttctcatccgaggaagagcaggaggacgacgatctaatccgcgcatatgcctcacctggccctcttcctgtcccaccaccacaaaataaaggcagcttcgggaaaaacactgtcaagtccgatgcagacggtaccgaggggtctgagatcgaggacacagatgactctcccaagcccgcaggcgtggccgtcaagacaccaaccgagaaggtcgaaaagatgttcccacatcggaagaatgtgaataagccagtcggcggtaccaatgtgcccgagatgtttatcaagaaagaggaacttcaagaattgaaatgcgccgacgtagaggacgaagactgggatatttcaagcctggaggaggagatctctctcggtaaaaagtccggtaaagaacagaaagagccaccccctgctaaaaatgagccccatttcgctcatgtccttaatgcatggggagcgttcaatccgaagggaccaaagggggaaggactccaggagaacgagagcagcacccttaagagttcactcgtgacggtgactgactggtctgatacgtccgacgtgtag

SEQ ID NO: 260811 - protein, 264 aa, Artificial Sequence
  derived and/or modified sequence
MCHKNGFPQEGGITAAFLQKRKLRLSKNHRPARAKVTEHVRGTRPGRATAGPAASTRAAGSLFFDRWGNRGPAGCRGSSHLPQQLKFTTSDSCDRIKDEFQLLQAQYHSLKLECDKLASEKSEMQRHYVMYYEMSYGLNIEMHKQAEIVKRLNGICAQVLPYLSQEHQQQVLGAIERAKQVTAPELNSIIRQQLQAHQLSQLQALALPLTPLPVGLQPPSLPAVSAGTGLLSLSALGSQAHLSKEDKNGHDGDTHQEDDGEKSD

SEQ ID NO: 260812 - DNA, 795 bp, Artificial Sequence
  derived and/or modified sequence
atgtgccataagaacggctttccgcaggagggagggatcacagcggccttccttcagaagagaaaactacgactgagcaaaaatcatcgtccagcacgggctaaggtgacagagcacgtacggggcactagacccggacgggccacggcgggcccagcagcctcaacacgcgctgccggctctttattcttcgacagatggggaaaccggggcccagctggttgtcggggatcaagtcacctgccacagcagctcaaatttactacctctgactcctgtgatcgaattaaagatgagttccaactgctccaggcccagtaccactctctcaaacttgagtgtgataaacttgcttccgaaaagagcgaaatgcaacggcactatgttatgtactacgagatgagctatggactgaatatcgaaatgcataaacaagccgaaatcgtcaaacgtctcaatggcatttgcgcccaggtcctaccatatctgtcccaggagcaccagcagcaggtgctcggagccatcgagagagctaagcaagtgacggcgcctgagcttaatagcatcatccgacagcagctccaggcccatcagttatcgcagttgcaggcacttgccctgcccctaacccccctgccggtcggcctgcagcccccaagtctgcctgccgtcagtgcaggaaccggtctgctgagcctgtcagctcttggatcccaggcacacctgtccaaggaagataaaaacggtcacgacggagacacacatcaagaggatgacggcgaaaagtccgactag

SEQ ID NO: 260813 - DNA, 795 bp, Artificial Sequence
  derived and/or modified sequence
atgtgccacaagaatggcttcccccaggagggcggcatcacagctgccttcctgcagaagaggaagctgcggctgagcaagaaccacaggcctgcccgggccaaggtgacagaacatgtgcggggcaccaggcctggccgggccacagctggccctgctgccagcaccagggctgctggcagcctcttctttgaccgctggggcaacagaggccctgctggctgccggggcagcagccacctgccccagcagctgaagttcaccaccagtgacagctgtgaccgcatcaaggatgagttccagctgctgcaggcccagtaccacagcctgaagctggagtgtgacaagctggccagcgagaagtctgagatgcagaggcactacgtgatgtactatgagatgtcctatggcctgaacatcgagatgcacaagcaggccgagatcgtgaagaggctgaatggcatctgtgcccaggtgctgccctacctgagccaggagcaccagcagcaggtgctgggcgccatcgagcgggccaagcaggtgacagcccctgagctgaacagcatcatccggcagcagctgcaggcccaccagctgagccagctgcaggccctggccctgcccctgacccccctgcctgtgggcctgcagccccccagcctgcctgctgtgtctgctggcaccggcctgctgagcctgagcgccctgggcagccaggcccacctgagcaaagaagacaagaatggacatgatggagacacccaccaggaggatgatggagagaagagtgactag

SEQ ID NO: 260814 - DNA, 1743 bp, Artificial Sequence
  derived and/or modified sequence
tggagcagcggggcctggcacacagtaggcgttctataaatgtgtcacaagaatggcttccctcaggaaggcggcattaccgctgcctttctgcagaaaaggaaactaaggctcagcaagaaccaccgcccagccagagccaaggtcacagagcacgtccgtggcacgcgtccaggtcgtgccacagcagggccggcggcttcgacgcgggcagccgggtcccttttctttgacagatggggaaaccgaggcccggccggctgccggggctcctcgcacctaccccagcaactcaaattcaccacctcggactcctgcgaccgcatcaaagacgaatttcagctactgcaagctcagtaccacagcctcaagctcgaatgtgacaagttggccagtgagaagtcagagatgcagcgtcactatgtgatgtactacgagatgtcctacggcttgaacatcgagatgcacaaacaggctgagatcgtcaaaaggctgaacgggatttgtgcccaggtcctgccctacctctcccaagagcaccagcagcaggtcttgggagccattgagagggccaagcaggtcaccgctcccgagctgaactctatcatccgacagcagctccaagcccaccagctgtcccagctgcaggccctggccctgcccttgaccccactacccgtggggctgcagccgccttcgctgccggcggtcagcgcaggcaccggcctcctctcgctgtccgcgctgggttcccaggcccacctctccaaggaagacaagaacgggcacgatggtgacacccaccaggaggatgatggcgagaagtcggattagcagggggccgggacagggaggttgggaggggggacagaggggagacagaggcacggagagaaaggaatgtttagcacaagacacagcggagctcgggattggctaaactcccatagtatttatggtggccgccggcgggggccccagcccagcttgcaggccacctctagctttcttcctaccccattcccggcttccctcctcctcccctgcagcctggttaggtggatacctgccctgacatgtgaggcaagctaaggcctggagggtcagatgggagaccaggtcccaagggagcaagacctcgcgaagcgcagcagccccggcccttcccccgttttgaacatgtgtaaccgacagtctgcctgggccacagccctctcaccctggtactgcatgcacgcaatgctagctgcccctttcccgtcctgggcaccccgagtctcccccgaccccgggtcccaggtatgctcccacctccacctgccccactcaccacctctgctagttccagacacctccacgcccacctggtcctctcccatcgcccacaaaagggggggcacgagggacgagcttagctgagctgggaggagcagggtgagggtgggcgacccaggattccccctccccttcccaaataaagatgagggtactaaagttgtcttggtttttattttattattatttttttctttttccagtatactagcttgtcttttaagaaaggggatattaaaaaaaaaaaaagacaaaagtgtttttaaaaaaaagcaacacccacacctgtgtctgtatatagtcagcttatctcgtgttcaatcgtctgatctctacagagagaagtggaaaatgctgtatcaagggtgggcttagctgtgcctttccaataaagatgtgagaagcttc

SEQ ID NO: 260815 - DNA, 795 bp, Artificial Sequence
  derived and/or modified sequence
atgtgccacaagaacggcttcccccaggagggcggcatcaccgccgctttcctccagaagcggaagctgcgcctgagcaagaaccacaggccagcccgggccaaggtgacagaacacgtccgtggcacccgaccaggcagagctacggccggtccggccgcctctacccgcgccgctgggtccttgtttttcgatcgttgggggaatcggggtcctgccgggtgcaggggatcatctcatctgccccagcagctcaaattcactacctcggatagctgtgatcgaataaaagacgagttccaactgctgcaggcccagtaccacagcctaaagctggaatgtgataaactggcctccgaaaaatcggagatgcagcgccactatgtgatgtattacgaaatgtcttacggcctgaatattgagatgcataagcaggcggagatcgtaaaacggcttaatgggatttgcgcccaggtgttgccctatttaagccaggagcaccagcagcaggtgctgggggcgatcgagcgggccaagcaggtgactgcacccgagctgaattctatcatccggcagcagctccaggctcatcagttgtcgcaactacaggcattggccctgcctctgactcccttgccagtgggcctgcaaccaccatcgttaccagccgtgtctgctggaactggactcctgtccctgtctgctctgggttcccaggcccatttaagtaaggaagacaagaatggccacgacggtgacacacatcaggaggatgacggcgagaaatcagattag

SEQ ID NO: 260816 - DNA, 795 bp, Artificial Sequence
  derived and/or modified sequence
atgtgccacaaaaacgggtttcctcaggaagggggaataacagccgctttccttcagaagcggaagttacggctgagcaagaaccatcgacccgcacgagctaaggtcacagaacacgtcagaggcactcgtcccggtagagccaccgccggaccggctgccagtacccgagcggcagggtccctattctttgaccgctggggaaatcggggtccagcagggtgcagggggtcctctcacctgcctcagcagcttaagttcactacatcagatagttgcgatagaattaaggacgaatttcagttgctgcaagcacaataccactccttaaaactcgaatgtgacaaactcgcctcggaaaagagcgagatgcagcgccactacgtcatgtactatgagatgtcctacggattaaacattgaaatgcataagcaggcggagattgtgaagcgccttaatggcatatgtgcgcaagtcctgccctatctctcccaggagcaccagcagcaggtcctaggggcaatcgaaagagccaaacaggtgacagcgccagaactgaacagtataatccgccagcagctgcaggcccatcagctgtcgcagttgcaagcccttgccctaccactcacacccctgcccgtgggcctccagcctccaagtcttccagcagtcagtgctgggaccggcctcctgtctttgtcagccctggggagtcaggctcacctgtctaaagaggataaaaatggacatgacggagacacacaccaggaggatgacggcgaaaagtctgattag

SEQ ID NO: 260817 - DNA, 795 bp, Artificial Sequence
  derived and/or modified sequence
atgtgccacaagaacggcttcccccaggagggcggcatcaccgccgccttcctgcagaagagaaagctgagactgagcaagaaccacagacccgccagagccaaggtgaccgagcacgtgagaggcaccagacccggcagagccaccgccggccccgccgccagcaccagagccgccggcagcctgttcttcgacagatggggcaacagaggccccgccggctgcagaggcagcagccacctgccccagcagctgaagttcaccaccagcgacagctgcgacagaatcaaggacgagttccagctgctgcaggcccagtaccacagcctgaagctggagtgcgacaagctggccagcgagaagagcgagatgcagagacactacgtgatgtactacgagatgagctacggcctgaacatcgagatgcacaagcaggccgagatcgtgaagagactgaacggcatctgcgcccaggtgctgccctacctgagccaggagcaccagcagcaggtgctgggcgccatcgagagagccaagcaggtgaccgcccccgagctgaacagcatcatcagacagcagctgcaggcccaccagctgagccagctgcaggccctggccctgcccctgacccccctgcccgtgggcctgcagccccccagcctgcccgccgtgagcgccggcaccggcctgctgagcctgagcgccctgggcagccaggcccacctgagcaaggaggacaagaacggccacgacggcgacacccaccaggaggacgacggcgagaagagcgactag

SEQ ID NO: 260818 - protein, 590 aa, Artificial Sequence
  derived and/or modified sequence
MAGAVPGAIMDEDYYGSAAEWGDEADGGQQEDDSGEGEDDAEVQQECLHKFSTRDYIMEPSIFNTLKRYFQAGGSPENVIQLLSENYTAVAQTVNLLAEWLIQTGVEPVQVQETVENHLKSLLIKHFDPRKADSIFTEEGETPAWLEQMIAHTTWRDLFYKLAEAHPDCLMLNFTVKLISDAGYQGEITSVSTACQQLEVFSRVLRTSLATILDGGEENLEKNLPEFAKMVCHGEHTYLFAQAMMSVLAQEEQGGSAVRRIAQEVQRFAQEKGHDASQITLALGTAASYPRACQALGAMLSKGALNPADITVLFKMFTSMDPPPVELIRVPAFLDLFMQSLFKPGARINQDHKHKYIHILAYAASVVETWKKNKRVSINKDELKSTSKAVETVHNLCCNENKGASELVAELSTLYQCIRFPVVAMGVLKWVDWTVSEPRYFQLQTDHTPVHLALLDEISTCHQLLHPQVLQLLVKLFETEHSQLDVMEQLELKKTLLDRMVHLLSRGYVLPVVSYIRKCLEKLDTDISLIRYFVTEVLDVIAPPYTSDFVQLFLPILENDSIAGTIKTEGEHDPVTEFIAHCKSNFIMVN

SEQ ID NO: 260819 - DNA, 1773 bp, Artificial Sequence
  derived and/or modified sequence
atggccggcgccgtgcccggcgccatcatggacgaggactactacggcagcgccgccgagtggggcgacgaggccgacggcggccagcaggaggacgacagcggcgagggcgaggacgacgccgaggtgcagcaggagtgcctgcacaagttcagcaccagagactacatcatggagcccagcatcttcaacaccctgaagagatacttccaggccggcggcagccccgagaacgtgatccagctgctgagcgagaactacaccgccgtggcccagaccgtgaacctgctggccgagtggctgatccagaccggcgtggagcccgtgcaggtgcaggagaccgtggagaaccacctgaagagcctgctgatcaagcacttcgaccccagaaaggccgacagcatcttcaccgaggagggcgagacccccgcctggctggagcagatgatcgcccacaccacctggagagacctgttctacaagctggccgaggcccaccccgactgcctgatgctgaacttcaccgtgaagctgatcagcgacgccggctaccagggcgagatcaccagcgtgagcaccgcctgccagcagctggaggtgttcagcagagtgctgagaaccagcctggccaccatcctggacggcggcgaggagaacctggagaagaacctgcccgagttcgccaagatggtgtgccacggcgagcacacctacctgttcgcccaggccatgatgagcgtgctggcccaggaggagcagggcggcagcgccgtgagaagaatcgcccaggaggtgcagagattcgcccaggagaagggccacgacgccagccagatcaccctggccctgggcaccgccgccagctaccccagagcctgccaggccctgggcgccatgctgagcaagggcgccctgaaccccgccgacatcaccgtgctgttcaagatgttcaccagcatggaccccccccccgtggagctgatcagagtgcccgccttcctggacctgttcatgcagagcctgttcaagcccggcgccagaatcaaccaggaccacaagcacaagtacatccacatcctggcctacgccgccagcgtggtggagacctggaagaagaacaagagagtgagcatcaacaaggacgagctgaagagcaccagcaaggccgtggagaccgtgcacaacctgtgctgcaacgagaacaagggcgccagcgagctggtggccgagctgagcaccctgtaccagtgcatcagattccccgtggtggccatgggcgtgctgaagtgggtggactggaccgtgagcgagcccagatacttccagctgcagaccgaccacacccccgtgcacctggccctgctggacgagatcagcacctgccaccagctgctgcacccccaggtgctgcagctgctggtgaagctgttcgagaccgagcacagccagctggacgtgatggagcagctggagctgaagaagaccctgctggacagaatggtgcacctgctgagcagaggctacgtgctgcccgtggtgagctacatcagaaagtgcctggagaagctggacaccgacatcagcctgatcagatacttcgtgaccgaggtgctggacgtgatcgcccccccctacaccagcgacttcgtgcagctgttcctgcccatcctggagaacgacagcatcgccggcaccatcaagaccgagggcgagcacgaccccgtgaccgagttcatcgcccactgcaagagcaacttcatcatggtgaactag

SEQ ID NO: 260820 - DNA, 1773 bp, Artificial Sequence
  derived and/or modified sequence
atggcgggtgctgtgcctggagccattatggacgaggactattacggctccgcagccgagtggggagacgaggcggacggtggccaacaggaagacgatagcggagaaggggaagacgacgctgaggtgcagcaagaatgtctgcacaagttctccactcgagactatatcatggagcctagcatcttcaataccctaaaacgctactttcaagccggcggctcaccggagaatgtgatccagttactgtcggaaaactacactgcagtggcccagacagttaatctgctcgccgaatggttgattcagacaggcgttgaaccagtgcaggttcaggaaaccgtcgaaaaccacctgaagagcctgttgatcaaacactttgatccccgaaaggcggatagcatcttcacagaggagggagagacgcccgcatggctcgagcagatgattgcccatacaacctggcgggatctgttctataaattggcggaggcgcaccctgattgtttgatgctcaacttcactgtgaaactcatttctgacgccgggtaccagggggagatcacttcggtctctacagcctgtcagcaactggaggtattcagtagagtgcttcggactagcctggccacgatactcgacggcggtgaggagaatctcgaaaaaaacctccctgagttcgcaaaaatggtgtgccatggcgaacatacttacttgttcgctcaggcaatgatgagcgtgcttgcacaagaggaacagggaggcagcgcagtgcgccgcatagctcaggaagtgcagcgatttgcccaggagaaggggcacgatgcctcccagattacacttgccctgggtaccgccgccagctatccgcgtgcctgtcaagccctgggagctatgttgagcaagggagcgctcaaccctgcggacattactgtcctctttaaaatgtttacctcaatggatccgcctcccgtggagctgatccgcgtccccgcatttctcgatttgttcatgcaatctctcttcaaaccgggagcccgcatcaatcaggaccataaacataaatacatacacattttggcttacgcggcatctgtggtggagacttggaagaagaataaacgggtttccattaataaagacgaactcaagtcaacttctaaggcagtggagacagtacacaacctgtgctgtaacgaaaacaagggcgccagcgagctcgtggcagaattgagcaccctctaccagtgcatcagatttcccgtagtagctatgggggtcttaaaatgggtcgattggacggttagtgagcctcgctacttccagctgcagacagaccatacacccgttcaccttgctcttctcgacgaaattagcacctgtcaccagctactacatcctcaggtgttgcagttgcttgtgaagctgttcgagactgaacattcccagctcgatgtaatggaacagctcgaactgaaaaagactctactggatcggatggttcatctcctcagcagggggtacgtgctgcccgtagtcagctatattaggaaatgcctggaaaaactcgataccgatatatcattgatccggtacttcgttacagaggtcttggacgtaatcgcccccccctatactagcgacttcgtgcagctttttttacctatattggagaatgactccatcgctggcactattaaaaccgaaggagagcacgaccctgtgacagagtttattgcgcactgcaagagtaatttcatcatggtgaactag

SEQ ID NO: 260821 - DNA, 1773 bp, Artificial Sequence
  derived and/or modified sequence
atggccggagccgtccctggtgccatcatggatgaggattattacggctcagctgctgaatggggcgatgaagcggacggcggacaacaggaagatgattctggggagggtgaggatgatgccgaggtacagcaggaatgccttcacaaattttccacccgcgattacatcatggagcccagcatttttaataccctcaaaaggtattttcaagccgggggaagtcctgagaatgtgatccaactcctctctgagaattatacagcagtggcccagactgtgaacctcctggccgagtggctgattcaaaccggcgtggagcccgtacaagttcaggagacggtggagaaccatctgaagtccctgctcataaaacactttgaccctcggaaggctgacagcatctttacagaggagggtgagacaccagcctggctggaacagatgatcgctcatacaacatggagggacctgttttacaagctcgcagaagcccaccctgattgcttgatgctgaattttacagtgaagctaattagtgatgctggataccaaggggaaattacatcagtgagcactgcatgccagcagctggaggtgttctctagagtgctcagaacttccttagctaccattttggatggaggtgaagagaatttggagaagaatctgcctgagtttgcaaagatggtatgccatggggagcatacatatttgttcgctcaagcaatgatgtccgttttggctcaagaggagcaggggggtagcgctgtcagacgtatcgctcaggaggtgcagcggtttgcgcaggaaaaaggacatgacgcctctcagataaccttggccctggggaccgccgcctcttatccccgtgcctgccaggccttgggggctatgttgtcaaagggagccttaaacccagctgacattactgtgctgttcaagatgttcacctcaatggatccaccaccagtcgaactcatccgggtgcccgcgtttttggacttgtttatgcagtccttattcaaacccggagcgagaatcaaccaggatcataagcataagtatatccatatcctggcgtacgcagcctccgttgtggagacgtggaaaaagaacaagagggtctcaatcaacaaggatgagcttaagagcacctctaaggctgtggaaaccgtccacaacctgtgttgtaatgagaacaagggcgcctccgagctggttgccgaactgtccactctgtaccagtgtattcgatttcccgtggttgccatgggagtgctgaaatgggtggactggaccgtgtcagaaccgaggtacttccagcttcagactgatcacacccctgttcacttggctttgcttgacgagatcagtacatgtcaccagctgctgcatccacaggtgctgcaattgttagttaagctgttcgaaacagaacactcccagctggacgtgatggagcaattggaactaaaaaaaacactgctggatcgcatggtccacttattatctcgggggtacgtcttgccagttgtctcctatatccgaaagtgcctggaaaagctggataccgacattagtctcatccggtatttcgtcactgaggtgctggacgtgatcgctccaccctacacatcagacttcgttcaactgtttcttcccatcctcgagaacgacagtatcgccggcaccattaaaacagagggcgaacacgatccagtgacggagtttatcgctcattgtaaaagtaatttcatcatggtcaattag

SEQ ID NO: 260822 - DNA, 1773 bp, Artificial Sequence
  derived and/or modified sequence
atggccggggctgtgcctggggccatcatggatgaggactactacggcagcgctgctgagtggggagatgaagcagatggcggccagcaggaggatgacagcggggagggggaggatgatgctgaggtgcagcaggagtgcctgcacaagttcagcacccgggactacatcatggagcccagcatcttcaacaccctgaagcgctacttccaggccggcggcagcccagaaaatgtcatccagctgctgtctgagaactacacagctgtggcccagacagtgaacctgctggccgagtggctgatccagacaggagtggagcctgtgcaggtgcaggagaccgtggagaaccacctgaagagcctgctgatcaagcactttgaccccaggaaggctgacagcatcttcacagaggagggggagaccccagcctggctggagcagatgattgcccacaccacctggagggacctcttctacaagctggccgaggcccacccagactgcctgatgctgaacttcaccgtgaagctgatcagtgatgctggctaccagggcgagatcacctctgtgtccacagcctgccagcagctggaggtgttcagccgggtgctgcggaccagcctggccaccatcctggatggaggagaggagaacctggagaagaacctgcctgagtttgccaagatggtgtgccacggggagcacacctacctgtttgcccaggccatgatgtctgtgctggcccaggaggagcagggcggcagcgctgtgagaagaattgcccaggaggtgcagagatttgcccaggagaagggccatgatgccagccagatcaccctggccctgggcacagctgccagctacccccgggcctgccaggccctgggcgccatgctgagcaagggggccctgaacccagctgacatcaccgtgctcttcaagatgttcacctccatggaccccccacctgtggagctgatccgggtgcctgccttcctggacctcttcatgcagagcctcttcaagccaggggcccgcatcaaccaggaccacaagcacaagtacatccacatcctggcctatgctgcctctgtggtggagacctggaagaagaacaagagggtgtccatcaacaaggatgagctgaagagcaccagcaaggctgtggagaccgtgcacaacctgtgctgcaatgaaaacaagggggccagcgagctggtggccgagctgagcaccctgtaccagtgcatccgcttccctgtggtggccatgggcgtgctgaagtgggtggactggacagtgtctgagccccgctacttccagctgcagacagaccacacccctgtgcacctggccctgctggatgagatcagcacctgccaccagctgctgcacccccaggtgctgcagctgctggtgaagctgtttgaaacagagcacagccagctggatgtgatggagcagctggagctgaagaagaccctgctggacaggatggtgcacctgctgagccggggctacgtgctgcctgtggtgtcctacatcaggaagtgcctggagaagctggacacagacatcagcctcatccgctactttgtgacagaggtgctggatgtgattgccccaccctacaccagtgactttgtgcagctgttcctgcccatcctggagaatgacagcattgctggcaccatcaagacagaaggagaacatgaccctgtgacagagttcatcgcccactgcaagagcaacttcatcatggtgaactag

SEQ ID NO: 260823 - DNA, 1773 bp, Artificial Sequence
  derived and/or modified sequence
atggccggcgccgtgcccggcgccatcatggacgaggactactacggatccgccgctgagtggggggacgaagcggacggcggtcaacaggaggatgacagcggcgagggcgaggatgatgccgaagtccagcaggaatgcctgcataaattcagtacaagagattatataatggagccatccatttttaatactctcaaacgatattttcaggccggcggctctcccgagaatgtgatccagcttcttagtgagaattataccgcagttgcccagaccgtgaatctcctggcagagtggcttatccaaaccggcgttgagcccgttcaagtgcaggagactgtcgagaatcacctcaaatctctgttgattaagcactttgaccctaggaaggctgatagcattttcacagaggaaggcgagacccccgcttggttggagcaaatgattgcccacacaacctggcgcgaccttttttataagttggctgaagcccaccctgactgtcttatgctgaattttactgttaagctgattagtgatgcgggctatcagggggagatcacctctgtgtccactgcttgtcaacagttagaagtattcagtagggtcctccggactagcctagccacaattctggatggaggcgaggagaatctggagaagaacctgcccgaattcgcaaagatggtttgccacggagagcatacttacctctttgctcaagctatgatgtccgtcctggcccaagaagaacaaggcggctcagctgtgagacgcatcgcacaggaggtgcagcgattcgctcaggaaaagggacatgacgccagccagatcacactggcacttggaacagccgctagctacccgcgtgcttgtcaggccctgggagctatgctgtccaagggtgcacttaatcctgccgacatcactgtgctcttcaaaatgttcacatcaatggacccacccccagtagagctcatccgcgttccggccttcttagatctctttatgcagagcctctttaagccgggcgccaggatcaatcaggatcacaaacacaagtacatccatattcttgcctacgctgcctccgtggttgagacgtggaaaaaaaataaaagggtctcaatcaataaggacgagttgaagagcacgtcaaaggccgtggaaacagtgcacaatttatgttgtaatgaaaacaaaggggcatccgagttggtggcagaactgtccaccttgtatcagtgtataagatttccagtcgttgccatgggcgtcctgaaatgggttgattggacagtgagcgagcctaggtattttcagctccagacggatcatacgcctgtacatctcgctctcctggacgagatttccacgtgccatcagcttcttcatcctcaggtcctccagttgctggtaaagttattcgaaaccgagcattcacagctcgatgtcatggaacaattggagctcaaaaagacgcttctcgatagaatggtccaccttctctctcgcggatatgttcttcccgtggtgagctatatcagaaaatgcctagagaagttggacacagacatttccttgatacggtattttgtcacagaggttttggatgtgattgcacccccatatacctctgactttgtgcaattgtttcttccaattctcgagaacgactccatagctggcaccattaaaactgaaggcgaacacgaccctgttaccgaatttatcgctcactgcaaaagtaatttcatcatggtcaattag

SEQ ID NO: 260824 - DNA, 1773 bp, Artificial Sequence
  derived and/or modified sequence
atggccggcgccgtgcccggcgccatcatggacgaggactactacggctccgctgcagaatggggggacgaagctgacggggggcagcaggaggacgactccggtgaaggtgaggatgacgcagaagtgcagcaagagtgcctgcataagttctccactagggattatattatggagcccagcatatttaacaccctgaagagatacttccaggctggcggctctcctgagaacgtgatccagctactatcagaaaattatacggcagtggcccagaccgttaatttactagcagagtggctgatccagaccggcgtggaacctgtacaggtgcaagagactgtcgaaaatcacctcaaaagtctgctgattaaacacttcgacccacggaaggccgacagtatctttaccgaggaaggagaaacacccgcatggctggagcagatgattgcgcatactacctggcgggacctattctataaactcgctgaagcgcaccctgattgtctgatgctaaatttcacggtcaagctgataagcgacgccggatatcagggcgagatcaccagcgtgagcactgcatgccagcagctcgaagtgttttcacgggtgctgagaacctccctggcaaccattttggatgggggcgaggagaacctagaaaaaaatctgccggagtttgccaagatggtatgccacggcgagcatacatacctgtttgcccaggccatgatgtcggttctcgcccaagaagagcaaggtggtagtgctgtgagaagaatagcccaggaggtgcagaggtttgcccaggagaaaggacatgatgctagccagatcactctcgcccttggcaccgccgcctcctacccacgggcatgccaggcactgggggcaatgctctctaagggtgctctgaatcccgccgacatcactgtcctgttcaagatgtttacatctatggatccaccaccagtggaattgatccgcgtgccagcctttctggaccttttcatgcagtccctgttcaagcccggcgcgagaattaaccaggatcacaaacataaatacatccacatcctggcttacgctgcctcagtggtagagacttggaaaaaaaataagagggtatcaatcaacaaagatgagctgaagtccactagcaaggcagttgagacagtccataacctgtgctgcaacgaaaacaagggcgcctccgaactggtagccgaacttagtacactgtaccagtgtattcggttccccgtagtggccatgggcgtgctcaagtgggtggattggaccgtgtcggagccacgctacttccagttgcagacagaccacactcccgtgcacctggctttgttggatgagattagcacttgtcatcagctgctacacccacaggtgctccagctccttgtaaaactctttgagacagagcactctcagctggacgtcatggagcagcttgagttgaagaaaactctgttggatagaatggtgcacctcctgagccgaggatatgtactgccagtggtgtcttatattagaaaatgcctggaaaagttggatacagacattagtttgattcggtacttcgttaccgaagtgcttgatgtgattgcccccccatatactagtgatttcgtgcagctattcctcccaattttagaaaacgatagtatagccgggactataaaaacagagggtgagcacgaccccgtaaccgaatttattgcacactgtaagtccaattttattatggtgaactag

SEQ ID NO: 260825 - DNA, 1773 bp, Artificial Sequence
  derived and/or modified sequence
atggcaggtgctgtgccaggagcgatcatggacgaggactattacggttctgcagcagaatggggggacgaagccgatggtggccaacaggaagacgacagtggggagggggaggacgatgccgaggttcaacaggaatgtctgcataaattttcaacgagagactatattatggaaccaagtattttcaatacactgaagaggtacttccaggcagggggtagccccgagaacgttatccagctgctttcagaaaattacactgccgtcgctcaaacggtgaatttactggctgaatggctgattcaaactggggtcgaacctgtgcaggtgcaggagaccgtcgaaaatcatcttaagtccctgctgatcaagcattttgacccgaggaaggctgattcgatcttcacagaggagggtgagacaccagcgtggctcgagcagatgattgcacataccacctggagggacctgttttataagctggccgaggcacaccccgattgcctgatgctgaactttaccgtgaaattgatctcagatgcaggataccaaggtgagatcacgagcgtgagtacagcctgccagcagctcgaggtgttctctagagtcttaagaacttccctggccaccattttggacggtggcgaagagaatctagagaaaaacttacctgagtttgcgaagatggtgtgccatggggaacatacatatctctttgcccaggccatgatgagtgtcctggcacaggaggagcaaggcggatctgctgtccgccgaatcgctcaggaggttcagagattcgcacaggagaaagggcacgacgccagtcaaattacattagccttgggtactgctgcatcgtatcccagggcatgccaagcgctcggggctatgctctcaaaaggcgctttaaacccagccgacattaccgtgctgtttaagatgttcactagtatggaccctccgccagtggaactgattagggtgcctgcgtttctcgacctgttcatgcagtctctcttcaaacccggagcccgtattaatcaggaccacaagcacaagtacatccatatcttagcttatgcagcttctgtagtggagacctggaagaaaaataagagggtgtcgatcaacaaggatgagctaaagtccacaagtaaagctgtagagaccgtacataatctgtgctgtaacgagaacaaaggcgcttctgaactcgtggcggaattgagtaccctctaccaatgtatcaggtttcccgttgtggctatgggcgtgctgaagtgggttgactggaccgttagcgaacccagatatttccaactgcagaccgatcacacacccgtccacctggcgctgctagacgagatttccacttgtcaccagctgttacacccccaggtgctccagcttcttgtgaagctgtttgagaccgaacattctcaactggacgtcatggagcagcttgagctgaaaaagactcttctggatagaatggttcaccttctgagtcggggttacgttctcccagtggtgagctacattcgcaagtgtttggagaaacttgatacagatatctcgctgattcgctatttcgtcaccgaggtcctggacgtcattgcacctccatacactagcgacttcgtccagcttttcctgcctattctggaaaatgactcaattgccggaaccattaagactgaaggcgaacacgatcctgtgaccgagtttatcgcccactgtaaaagcaacttcatcatggtgaattag

SEQ ID NO: 260826 - DNA, 1773 bp, Artificial Sequence
  derived and/or modified sequence
atggccggtgctgtgcccggagccataatggacgaggactactatggctccgcagccgaatggggagacgaggctgacggaggacagcaagaagacgactcgggtgagggagaagacgacgctgaagtgcaacaagagtgtctgcacaaattcagtacgcgggactacatcatggaaccttccatctttaataccttaaagcggtacttccaggcgggtggttctcccgagaatgtgattcagctgctgagcgagaattacacagctgtggcgcaaaccgttaatctactggcagagtggcttatccagactggagttgaaccagtccaggtccaggaaaccgttgagaatcatctaaagtccctgcttataaagcacttcgaccccagaaaggccgattccatttttacagaggagggcgagacacctgcgtggctggagcaaatgatagcccatacaacatggcgggatctgttctataagttagcggaagcccaccccgactgcctcatgctcaatttcactgtaaagttaatctccgatgcaggctaccagggcgagatcacttcagttagcacagcatgtcaacagctggaggtgttttcacgcgttctcaggacctcactcgctacaatccttgacggaggtgaagagaacctcgagaaaaacctgcccgagttcgctaaaatggtgtgccatggagagcacacctatctcttcgcgcaagcgatgatgagcgtactcgcccaggaggagcaggggggaagcgccgttcgcaggatcgcgcaggaggtgcagaggttcgcccaggaaaaaggtcatgacgcttcccagattacactcgctttgggcacagctgcttcttacccgagggcctgccaggccctaggggcaatgctctcaaagggcgcactcaaccctgccgacattaccgtcctgttcaagatgtttaccagcatggacccacctcctgtggagctgatccgggtgccagcctttctggacctgttcatgcagtctttgttcaagcccggagccagaatcaaccaggaccacaaacacaagtacatacacatcttggcctatgccgctagcgtggtagagacatggaagaagaataagcgcgtttctataaacaaggatgagctgaagtctacctcaaaggcagtggagacagtccacaatctgtgttgcaacgaaaacaagggcgcaagtgaattagtcgccgagttatccacgctgtaccagtgcatcagatttccagtagtggccatgggtgtactcaaatgggtggattggaccgtctccgagcccaggtactttcagcttcagactgaccacactcccgtgcacctagctctattggatgaaatctcgacttgtcaccaattgttgcaccctcaggtccttcagctcctcgtaaagctgtttgagactgaacactctcagcttgacgtgatggaacagctagagctaaaaaaaaccctcttggatcgaatggtccacttgttgtcaagaggctacgtgcttccggtcgtgtcctacatcaggaagtgtcttgagaagttggatacagatatatccctgatccgctactttgtgacagaggttctggatgtcattgctcccccatacacatccgactttgtgcagctgtttcttccaattttggaaaacgattcaattgccggtaccatcaagaccgagggagagcatgacccagtgacagaattcattgcccattgtaaaagcaattttatcatggtcaactag

SEQ ID NO: 260827 - DNA, 2272 bp, Artificial Sequence
  derived and/or modified sequence
gtccccgcctcgcgcatgcgccgcgctcgctcgcgggagggcatggcgggggccgtgccgggcgccatcatggacgaggactactacgggagcgcggccgagtggggcgacgaggctgacggcggccagcaggaggatgattctggagaaggagaggatgatgcggaggttcagcaagaatgcctgcataaattttccacccgggattatatcatggaaccctccatcttcaacactctgaagaggtattttcaggcaggagggtctccagagaatgttatccagctcttatctgaaaactacaccgctgtggcccagactgtgaacctgctggccgagtggctcattcagacaggtgttgagccagtgcaggttcaggaaactgtggaaaatcacttgaagagtttgctgatcaaacattttgacccccgcaaagcagattctatttttactgaagaaggagagaccccagcgtggctggaacagatgattgcacataccacgtggcgggaccttttttataaactggctgaagcccatccagactgtttgatgctgaacttcaccgttaagcttatttctgacgcagggtaccagggggagatcaccagtgtgtccacagcatgccagcagctagaagtgttctcgagagtgctccggacctctctagctacaattttagatggaggagaagaaaaccttgaaaaaaatctccctgagtttgccaagatggtgtgccacggggagcacacgtacctgtttgcccaggccatgatgtccgtgctggcccaggaggagcaggggggctccgctgtgcgcaggatcgcccaggaagtgcagcgctttgcccaggagaaaggtcatgacgccagtcagatcacactagccttgggcacagctgcctcctaccccagggcctgccaggctctcggggccatgctgtccaaaggagccctgaaccctgctgacatcaccgtcctgttcaagatgttcacaagcatggaccctcctccggttgaacttatccgcgttccagccttcctggacctgttcatgcagtcactctttaaaccaggggctcggatcaaccaggaccacaagcacaaatacatccacatcttggcgtacgcagcaagcgtggttgagacctggaagaagaacaagcgagtgagcatcaataaagatgagctgaagtcaacgtcaaaagctgtcgaaaccgttcacaatttgtgttgcaacgagaacaaaggggcctctgaactagtggcagaattgagcacactttatcagtgtattaggtttccagtggtagcaatgggtgtgctgaagtgggtggattggactgtatcagaaccaaggtactttcagctgcagactgaccatacccctgtccacctggcgttgctggatgagatcagcacctgccaccagctcctgcacccccaggtcctgcagctgcttgttaagctttttgagactgagcactcccagctggacgtgatggagcagcttgagttgaagaagacactgctggacaggatggttcacctgctgagtcgaggttatgtacttcctgttgtcagttacatccgaaagtgtctggagaagctggacactgacatttcactcattcgctattttgtcactgaggtgctggacgtcattgctcctccttatacctctgacttcgtgcaacttttcctccccatcctggagaatgacagcatcgcaggtaccatcaaaacggaaggcgagcatgaccctgtgacggagtttatagctcactgcaaatctaacttcatcatggtgaactaatttagagcatcctccagagctgaagcagaacattccagaacccgttgtggaaaaaccctttcaagaagctgttttaagaggctcgggcagcgtcttgaaaatgggcaccgctgggaggaggtggatgacttctttacaaaggaaaatggtagcagcttcagtgagaaactgcccttacaaacagtcccttctctgctgtcaatccaatactgctcccaaatcctgttttcagtgttcatttccctcaaggcaggcgctgggctcccacgacccctcaggacagatctggccgtcagccgcgggccgctgggaactccactcggggaactcctttccaagctgacctcagttttctcacaagaacccagttagctgatgttttattgtaattgtcttaatttgctaagaacaagtaataagtaaatttttaaaaagcctttctgctgggttggattaa

SEQ ID NO: 260828 - DNA, 2137 bp, Artificial Sequence
  derived and/or modified sequence
gggagggcatggcgggggccgtgccgggcgccatcatggacgaggactactacgggagcgcggccgagtggggcgacgaggctgacggcggccagcaggaggatgattctggagaaggagaggatgatgcggaggttcagcaagaatgcctgcataaattttccacccgggattatatcatggaaccctccatcttcaacactctgaagaggtattttcaggcaggagggtctccagagaatgttatccagctcttatctgaaaactacaccgctgtggcccagactgtgaacctgctggccgagtggctcattcagacaggtgttgagccagtgcaggttcaggaaactgtggaaaatcacttgaagagtttgctgatcaaacattttgacccccgcaaagcagattctatttttactgaagaaggagagaccccagcgtggctggaacagatgattgcacataccacgtggcgggaccttttttataaactggctgaagcccatccagactgtttgatgctgaacttcaccgttaagcttatttctgacgcagggtaccagggggagatcaccagtgtgtccacagcatgccagcagctagaagtgttctcgagagtgctccggacctctctagctacaattttagatggaggagaagaaaaccttgaaaaaaatctccctgagtttgccaagatggtgtgccacggggagcacacgtacctgtttgcccaggccatgatgtccgtgctggcccaggaggagcaggggggctccgctgtgcgcaggatcgcccaggaagtgcagcgctttgcccaggagaaaggtcatgacgccagtcagatcacactagccttgggcacagctgcctcctaccccagggcctgccaggctctcggggccatgctgtccaaaggagccctgaaccctgctgacatcaccgtcctgttcaagatgttcacaagcatggaccctcctccggttgaacttatccgcgttccagccttcctggacctgttcatgcagtcactctttaaaccaggggctcggatcaaccaggaccacaagcacaaatacatccacatcttggcgtacgcagcaagcgtggttgagacctggaagaagaacaagcgagtgagcatcaataaagatgagctgaagtcaacgtcaaaagctgtcgaaaccgttcacaatttgtgttgcaacgagaacaaaggggcctctgaactagtggcagaattgagcacactttatcagtgtattaggtttccagtggtagcaatgggtgtgctgaagtgggtggattggactgtatcagaaccaaggtactttcagctgcagactgaccatacccctgtccacctggcgttgctggatgagatcagcacctgccaccagctcctgcacccccaggtcctgcagctgcttgttaagctttttgagactgagcactcccagctggacgtgatggagcagcttgagttgaagaagacactgctggacaggatggttcacctgctgagtcgaggttatgtacttcctgttgtcagttacatccgaaagtgtctggagaagctggacactgacatttcactcattcgctattttgtcactgaggtgctggacgtcattgctcctccttatacctctgacttcgtgcaacttttcctccccatcctggagaatgacagcatcgcaggtaccatcaaaacggaaggcgagcatgaccctgtgacggagtttatagctcactgcaaatctaacttcatcatggtgaactaatttagagcatcctccagagctgaagcagaacattccagaacccgttgtggaaaaaccctttcaagaagctgttttaagaggctcgggcagcgtcttgaaaatgggcaccgctgggaggaggtggatgacttctttacaaaggaaaatggcaggcgctgggctcccacgacccctcaggacagatctggccgtcagccgcgggccgctgggaactccactcggggaactcctttccaagctgacctcagttttctcacaagaacccagttagctgatgttttattgtaattgtcttaatttgctaagaacaagtaataagtaaatttttaaaaagcctttctgctgggttggattaa

SEQ ID NO: 260829 - protein, 879 aa, Artificial Sequence
  derived and/or modified sequence
MEDFARGAASPGPSRPGLVPVSIIGAEDEDFENELETNSEEQNSQFQSLEQVKRRPAHLMALLQHVALQFEPGPLVLRVPVPPNVAFELDRTRADLISEDVQRRFVQEVVQSQQVAVGRQLEDFRSKRLMGMTPWEQELAQLEAWVGRDRASYEARERHVAERLLMHLEEMQHTISTDEEKSAAVVNAIGLYMRHLGVRTKSGDKKSGRNFFRKKVMGNRRSDEPAKTKKGLSSILDAARWNRGEPQVPDFRHLKAEVDAEKPGATDRKGGVGMPSRDRNIGAPGQDTPGVSLHPLSLDSPDREPGADAPLELGDSSPQGPMSLESLAPPESTDEGAETESPEPGDEGEPGRSGLELEPEEPPGWRELVPPDTLHSLPKSQVKRQEVISELLVTEAAHVRMLRVLHDLFFQPMAECLFFPLEELQNIFPSLDELIEVHSLFLDRLMKRRQESGYLIEEIGDVLLARFDGAEGSWFQKISSRFCSRQSFALEQLKAKQRKDPRFCAFVQEAESRPRCRRLQLKDMIPTEMQRLTKYPLLLQSIGQNTEEPTEREKVELAAECCREILHHVNQAVRDMEDLLRLKDYQRRLDLSHLRQSSDPMLSEFKNLDITKKKLVHEGPLTWRVTKDKAVEVHVLLLDDLLLLLQRQDERLLLKSHSRTLTPTPDGKTMLRPVLRLTSAMTREVATDHKAFYVLFTWDQEAQIYELVAQTVSERKNWCALITETAGSLKVPAPASRPKPRPSPSSTREPLLSSSENGNGGRETSPADARTERILSDLLPFCRPGPEGQLAATALRKVLSLKQLLFPAEEDNGAGPPRDGDGVPGGGPLSPARTQEIQENLLSLEETMKQLEELEEEFCRLRPLLSQLGGNSVPQPGCT

SEQ ID NO: 260830 - DNA, 2640 bp, Artificial Sequence
  derived and/or modified sequence
atggaggatttcgccaggggcgccgcttcacccggacccagcagacctggtctcgtgccagtctcaatcattggcgccgaagatgaggactttgagaacgaactcgagactaactcagaagagcaaaattcacagtttcagtccttggagcaggtgaagcgacggccagcacacctcatggccctgctacagcatgttgcattacagttcgaacccgggcccctcgtcctgagggttccagtgccacccaatgtcgcattcgaactcgatagaacgagagccgaccttatcagcgaagacgtgcagaggcgctttgtgcaggaggtggttcagtcacagcaggtggccgtaggcagacagttggaggacttccggtctaagaggttaatgggaatgactccctgggaacaggaactagcacaactggaggcctgggtggggagagatcgggccagctacgaagcgagagaacggcacgtcgcggaacgtctgctcatgcatcttgaagaaatgcagcacactatctctaccgacgaagaaaagtcagctgccgttgtaaacgccattggcttatatatgagacacctcggtgtgcgcactaagtctggagacaaaaagtcaggcaggaattttttccgcaaaaaggtgatgggcaataggcgatcggatgagcctgccaagaccaaaaaaggcttgtcctccatactcgacgccgcaagatggaatcgcggggaaccgcaggtgcccgattttaggcacttgaaagcggaagtggatgctgagaagcccggagccaccgatcgcaagggaggagtagggatgccaagtcgggaccggaatataggcgcccctggccaggatactccaggggtatctctgcatcccctcagtctggacagccccgacagagagccgggcgccgatgcaccattggagctgggagatagctctccccaaggtcccatgtccctggagtcgcttgctccccctgaaagtaccgacgaaggcgccgaaacggaaagcccagaacccggcgacgagggcgaacctggtcgctcgggcttggaattggagcccgaggaaccccccggatggcgcgagctcgtaccgcccgataccctccattcactgccaaagagccaggtgaagcgccaggaggtaatttccgagttgctcgtcactgaggctgcacacgtgcgtatgctcagggtgctgcacgacctcttttttcagcctatggcagagtgcctgttctttccactcgaagagctgcagaacatcttcccaagcctggatgaactcatagaggtgcattccctgtttctagatcgcctgatgaagcgccgtcaggagagcgggtatctgatagaggagattggcgatgtgcttctcgcccgattcgatggggccgaagggagttggttccagaagattagttctaggttttgcagtcgtcagtctttcgcccttgagcagcttaaggccaaacaacgaaaagacccccgcttctgtgcgtttgtacaggaggccgaatcccgtccgcggtgccggcgtctccagctcaaagacatgattccaactgagatgcaacgcctgaccaaataccctctcctgctccagtctatcggacagaacacagaagaaccaacggagagagaaaaggtggagctggcggcagaatgctgtcgcgagattctgcatcatgtgaatcaagccgttcgggacatggaggacctgttgcgcctgaaagattaccagcgcaggttagatctgtcccatctaagacagtcgtcagatccaatgctatcagagttcaagaacttggatatcacaaagaaaaaactggtccatgaggggcccttgacctggagggttactaaagataaggctgttgaagtgcacgttttacttctggatgatctcctgttgctattgcagcgccaggatgagcgcttgcttctaaagagccatagcagaacgcttacccctacaccggacggcaagacaatgttgaggcccgtgctacggctgaccagcgcaatgactcgggaggtggcgactgaccataaagccttctatgttctttttacttgggatcaggaggcacaaatttacgagctggtcgcacagaccgtgtccgagcgcaaaaactggtgtgcgctgatcacagagaccgccggaagcctcaaggtccccgccccagcctcgagacccaagcctcgaccctcaccatctagtaccagagagcctctcctgagctcttccgagaacggaaatggtggaagggaaacttcccctgccgacgcacgaacagaaagaattctgtcagacctgttacctttttgtcgacccgggccggagggacaattagctgccacagccctacggaaggtcttgtcactgaaacagcttctcttcccagctgaagaagataatggtgctggccctcccagagatggcgacggggtgcctggcggcgggcccctgagccccgctaggactcaggaaatccaggagaatctcctgtccctcgaggaaaccatgaaacagctcgaagagctcgaggaggaattttgtaggcttcggcctttgctgtcgcaattggggggtaattcagtcccgcaacctggctgtacatag

SEQ ID NO: 260831 - DNA, 2640 bp, Artificial Sequence
  derived and/or modified sequence
atggaggactttgcccggggggccgccagccctggccccagccggcccggcctggtgcctgtgtccatcatcggggctgaagatgaagattttgaaaatgagctggagaccaacagcgaggagcagaacagccagttccagagcctggagcaggtgaagaggaggcctgcccacctgatggccctgctgcagcacgtggccctgcagtttgagcccggccccctggtgctgcgggtgcctgtgccccccaacgtggcctttgagctggacaggaccagggctgacctgatcagtgaagatgtgcagaggagatttgtgcaggaggtggtgcagagccagcaggtggccgtgggccggcagctggaggacttccgcagcaagaggctgatgggcatgaccccctgggagcaggagctggcccagctggaggcctgggtgggccgggaccgggccagctatgaggcccgggagagacatgtggccgagcggctgctgatgcacctggaggagatgcagcacaccatcagcacagatgaggagaagtctgctgctgtggtgaatgccatcggcctgtacatgaggcacctgggcgtgaggaccaagagcggggacaagaagtctggaagaaacttcttcaggaagaaggtgatgggcaacagaagaagtgatgagcccgccaagaccaagaagggcctgagcagcatcctggatgctgcccgctggaacagaggagagccccaggtgcctgacttccgccacctgaaggccgaggtggatgctgagaagccaggggccacagacagaaaaggaggagtgggcatgcccagccgggacagaaatattggagcccctggccaggacaccccaggagtgtccctgcaccccctgagcctggacagcccagaccgggagcctggagcagatgcccccctggagctgggggacagcagcccccagggccccatgagcctggagagcctggcccctcctgagagcacagatgagggcgctgagacagagagccctgagcctggagatgaaggagagcccggccgcagcggcctggagctggagcctgaggagcccccaggctggagggagctggtgcccccagacaccctgcacagcctgcccaagagccaggtgaagaggcaggaggtgatcagcgagctgctggtgacagaggccgcccacgtgaggatgctgcgggtgctgcatgacctcttcttccagcccatggctgaatgtctcttcttccccctggaggagctgcagaacatcttccccagcctggatgagctgattgaggtgcacagcctcttcctggaccggctgatgaagaggcggcaggagagcggctacctgattgaggagattggagatgtgctgctggccaggtttgatggagctgagggctcctggttccagaagatcagcagccgcttctgcagccggcagagctttgccctggagcagctgaaggccaagcagaggaaggacccccgcttctgtgcctttgtgcaggaggccgagagccggccccgctgccggcggctgcagctgaaggacatgatccccacagagatgcagaggctgaccaagtaccccctgctgctgcagagcatcggccagaacacagaggagcccacagagcgggagaaggtggagctggccgctgagtgctgccgggagatcctgcaccacgtgaaccaggccgtgcgggacatggaggacctgctgcggctgaaggactaccagaggcggctggacctgagccacctgcggcagagcagtgaccccatgctgtctgagttcaagaacctggacatcaccaagaagaagctggtgcatgagggccccctgacctggagggtgaccaaggacaaggctgtggaggtgcacgtgctgctgctggatgacctgctgctgctgctgcagaggcaggatgagcggctgctgctgaagagccacagcaggaccctgacccccaccccagatggcaagaccatgctgcggcctgtgctgcggctgaccagcgccatgacccgggaggtggccacagaccacaaggccttctacgtgctcttcacctgggaccaggaggcccagatctatgagctggtggcccagacagtgtctgagaggaagaactggtgtgccctgatcacagaaacagctggcagcctgaaggtgcctgccccagccagccggcccaagccccggcccagccccagcagcacccgggagcccctgctgagcagcagtgaaaatggaaatggaggccgggagaccagccctgcagatgccaggacagagcgcatcctgagtgacctgctgcccttctgccggcccggccctgagggccagctggccgccacagccctgaggaaggtgctgagcctgaagcagctgctcttccctgctgaggaggacaacggggccggccccccaagagatggagatggagtgcctgggggcggccccctgagccctgcccggacccaggagatccaggagaacctgctgagcctggaggagaccatgaagcagctggaggagctggaggaggagttctgccgcctgcggcccctgctgagccagctgggcggcaacagcgtgccccagcccggctgcacctag

SEQ ID NO: 260832 - DNA, 2640 bp, Artificial Sequence
  derived and/or modified sequence
atggaggacttcgcccggggcgccgccagccccggccccagccggcccggcctagtccctgtatctatcataggggccgaagatgaggatttcgaaaatgagctggagaccaatagcgaagagcagaacagtcagtttcagtctctcgagcaggtgaagaggagacctgcccacttgatggcattgctgcagcatgtggccctccaatttgaaccaggccctctggtgttgcgcgtgcccgtgcctccaaatgtggcctttgaactggaccgcacacgcgccgaccttatcagtgaagacgtgcagcgcaggttcgttcaggaggtggtccaatcacagcaggtcgccgttggacgccaactcgaagattttcgtagtaagcgcttgatgggtatgacaccgtgggagcaggagcttgctcaactcgaggcttgggtgggacgggaccgtgcttcttatgaagccagggaaagacacgtggctgagcggctgttgatgcatctggaggagatgcagcacaccatcagtacagacgaagagaagtctgcagctgtcgtcaacgccatcgggttatacatgaggcacctgggggtacgaactaaatctggggacaagaagtcaggcagaaactttttcagaaagaaagtcatgggaaatagaaggtccgatgagcccgcaaagacaaagaaaggacttagcagcattctggacgcagcgaggtggaatagaggagagccgcaggttccagacttccgccatctcaaggccgaggtcgacgccgaaaaacccggagcaactgaccgcaaagggggtgtggggatgccttccagagatcgcaatataggtgccccgggtcaggacaccccgggcgtgtctcttcacccactttccctggacagcccggacagagagcctggagctgacgccccactggagctcggcgattctagcccccaaggccccatgtcacttgaatctctggctccacctgagagtactgatgagggcgctgagacggagtcaccggagcccggtgacgagggcgaacccgggcgtagtgggcttgaactggagccagaagaacccccgggctggagagaactagtacctccagatacccttcactccttgcccaagtctcaggtcaagagacaggaggtgatatctgaactgctcgtaacagaagcagcgcacgtgcggatgctgcgcgtgctccatgatctcttctttcaacctatggcggagtgcttattctttcctctggaggagctgcagaacatcttcccgagcctggatgaactgatcgaagtgcattccctgttccttgatcgcctcatgaaaagaaggcaggaatctgggtacttaatcgaagaaatcggcgacgtgttactcgcccgctttgatggtgccgagggttcttggttccagaaaatcagttctaggttttgttcgcgccaaagtttcgcattggagcagctgaaggccaagcagaggaaagatccaaggttttgcgcattcgtgcaggaagctgaaagccgaccacgatgtcggcgattgcagctgaaggacatgatcccgaccgaaatgcagcgacttaccaaatatcccctgttgctccaaagtatcggacaaaataccgaggagcccacagaacgagagaaggtcgagctggcagcagaatgctgcagggaaatcttacaccacgtgaaccaggcagtgcgtgacatggaggacctgctgagacttaaggactatcaaagacgccttgatctgtctcacctaagacagagctccgaccctatgttgagcgaatttaagaatttggacattactaaaaagaaactcgttcacgaaggccccctcacctggcgagtcaccaaggacaaggctgtggaagtgcatgtccttctgctggatgatttgttactgttgcttcagagacaggacgagcggctactcctcaaatcacatagcagaactttaacccccaccccagatggcaaaactatgcttcggcctgtgctccggctaacaagcgctatgacgagggaggtcgcgacagatcacaaagcattctacgtactctttacttgggatcaggaagcccaaatctacgaacttgtcgctcagacagttagcgagcgtaagaactggtgcgctttaatcaccgaaactgccggaagtctgaaagtgcctgcccccgcctcacggccaaagccgcggccatccccatcatctactcgcgagcctttgctgtctagcagcgaaaacggaaacggaggccgtgaaacgtcgcctgcagacgcccggaccgagcgtatacttagcgaccttctacccttttgccggcctggccctgaaggacagctggccgctacagctctccggaaagtcctgtctctgaagcagctgctgttcccagccgaggaggacaatggtgcaggccccccgcgggacggcgatggagtccctggtggtggccctctgtcccctgcccgcacgcaggaaattcaggaaaacctactttccctggaggaaaccatgaaacagctcgaagagctggaggaggagttttgccggctgcgccctctgctgagtcagctgggaggaaactctgtgccacaacctggatgcacctag

SEQ ID NO: 260833 - DNA, 2640 bp, Artificial Sequence
  derived and/or modified sequence
atggaagacttcgcaaggggcgcagcctccccagggccatcccggcctggtcttgtgccagtatcaataatcggagccgaagacgaggacttcgaaaacgaactggaaaccaactcagaagagcaaaactcacaatttcagtcgctggaacaggttaaacgccgtcctgctcatttgatggctctccttcagcatgtggcgctgcagtttgaaccaggccctctggtcctccgcgtgcctgttcctccgaacgtggcattcgagctggaccggacgcgggctgacctaattagcgaggatgtccagcgcaggttcgtccaggaggtcgtgcaatcccagcaggtggccgtcgggcgacaactcgaagatttcagatccaaacggcttatgggtatgactccatgggagcaggaactcgcccagctggaggcatgggtgggacgcgacagggcaagttacgaagctagggagcggcacgttgccgaacgtttgctgatgcacctcgaggaaatgcagcataccatctccactgatgaggaaaaaagtgctgccgtggtcaatgcaatcggtctgtatatgaggcacctgggagtccgcaccaaatccggcgataaaaagtcgggtcgcaacttttttagaaaaaaagtgatgggcaatcgccgatctgacgagcctgccaagaccaagaaggggctcagttcgattttggatgccgcaagatggaatcgcggagagccccaggttcctgacttccgacacctgaaagctgaggtagatgcagaaaagccaggagccactgatcgaaagggaggcgtcggcatgccgagcagagatcgcaacataggtgcccctggccaagatacgcccggagtgtccctccaccctttgagccttgactcccccgatcgggaacctggggctgatgctcctttagagctgggcgatagtagcccccaggggcctatgtctttagagagtctggctccacctgagtctacagacgaaggtgccgagactgagtcacccgaaccgggagatgaaggcgaacccggtagaagcggcctggaactcgaacctgaagagccgcctggctggcgagagctggtcccaccagatacattgcattccctgcctaagagtcaggtgaagagacaagaggtgatcagcgaacttctcgttactgaggccgcacacgtacggatgctccgcgtcttgcacgatctcttctttcaacccatggccgaatgtctattctttcctctggaagaactccagaatatctttccaagtctggacgaactgattgaggtgcactccctgtttctggacaggcttatgaagcggaggcaggaatcggggtacctgattgaagagataggtgacgttttgctcgccaggttcgatggggctgagggcagttggtttcagaagatatcctctagattttgttccaggcagagcttcgctttggaacagttgaaagcgaagcaacggaaggatccgaggttttgcgcatttgtgcaggaggcggagtcacggccaagatgtcgcaggctccagttaaaggatatgattcccactgaaatgcaacgattaacaaagtaccctctgttgctccagtccattggacagaacaccgaggaacctacagagcgagaaaaggttgaactggcagcggaatgctgcagagagatcctacatcatgtaaaccaggccgtgagggacatggaggatttgctccggttgaaagattaccaaaggcgactcgatttgtctcatttgcgccagagctctgatcccatgctgtctgagttcaaaaatctggacattacaaagaaaaagcttgtgcacgaaggacccctgacttggagagtgaccaaagacaaagctgtcgaagtccatgtcctcttgctggacgatttgctgctgctgctccagagacaagacgagcgtctgctactgaaatcacatagccgaaccctcacccccaccccagacggaaaaactatgctgagacctgtgctgagactgacatctgccatgacccgcgaggtagctactgatcacaaggctttctacgtcttattcacttgggaccaggaagcacaaatttacgagctggtagcccaaacagtgtcagaaaggaaaaactggtgcgcgctgatcaccgagaccgccggttctctgaaagtacccgcaccagccagtagacctaagcccaggccaagccctagctcaactcgggaaccgctactctcttcctctgaaaatggtaacgggggaagagaaaccagtcctgcggacgccaggaccgagcggatactctctgacctgttaccgttctgcagacctggacccgagggtcaactggcggcaacggcgctgcgtaaagtgctcagcttgaagcaattgttattcccggcagaggaagataacggcgctggaccaccccgagacggggatggcgttcctggcggtgggcctctgagtcccgctaggacccaggaaattcaggaaaatctcctgtccctggaagagactatgaaacaattggaagagctcgaggaggaattttgtcgccttagacccctgctgagccaactcggcggaaattcagtgccgcagcctggatgcacctag

SEQ ID NO: 260834 - DNA, 3107 bp, Artificial Sequence
  derived and/or modified sequence
agagccaggaagcgggagccgggacccagggcccgggatcgccgagcccgacctcgggcgccccgccggtcacctccgcgcggacaccagccctgcagagcccagggagatggaagacttcgcccgaggggcggcctccccaggcccctcccggcctggcctggttcccgtcagcatcatcggggctgaggatgaggattttgagaacgagctggagacaaactcagaagagcaaaacagccagttccagagcctggagcaggtgaagcggcgcccagcccacctcatggccctcctgcagcacgtggccctgcagtttgagccaggacccctggttctccgggtgccggtccctcccaacgtcgcctttgaacttgaccgcactagggctgacctcatctccgaggatgtccagcggcggttcgtgcaggaggtggtgcaaagccagcaggtagccgtgggccggcagctggaggacttccgttccaagcggctcatgggcatgacgccctgggagcaggagctggcccagctggaggcttgggttgggcgggaccgagccagctacgaggcccgggagcggcacgtggcggagcggctgctcatgcacctggaggagatgcaacataccatctctaccgacgaagaaaagagtgctgccgtggtcaacgccattggcctgtacatgcgccaccttggggtgcggaccaagagtggagacaagaagtcggggaggaacttcttccggaaaaaggtgatggggaaccggcggtcggacgagcctgccaagaccaagaaggggctgagcagcatcctggatgccgcccgctggaaccggggagagccccaggttccagattttcgacacctcaaagcagaggttgatgccgagaagccaggtgctacagaccggaagggaggcgtggggatgccctctcgggaccggaatatcggggctcctgggcaggacacccctggagtctctctgcaccctctgtccctggacagcccagaccgggaaccaggtgctgacgcccccctggagctgggggactcatccccgcagggcccaatgagcctggagtccttggcgcccccagagagtaccgacgagggggccgaaaccgagagccccgagcctggagatgagggggagccggggcggtcgggactggagcttgaaccagaagagcctcccggctggcgggaactcgtccccccagacaccctgcacagcctgcccaagagccaggtgaagcggcaggaggtcatcagcgagctgctggtgacagaggcggcccacgtgcgcatgctgcgggtgctgcacgacctcttcttccagcccatggcagaatgcctgttcttccccttggaggagctgcagaacatcttccccagcctggacgagctcatcgaggtgcattccctgttcctcgatcgcctgatgaagcggaggcaggagagtggctacctcatcgaggagatcggagacgtgctgctggcccggtttgatggtgctgagggctcctggttccagaaaatctcctcccgcttctgcagccgccagtcatttgccttagagcagctcaaagccaagcaacgcaaggaccctcggttctgtgccttcgtgcaggaagctgagagccgcccgcggtgccgccgcctgcagctgaaggacatgatccccacggagatgcagcggctgaccaagtaccccctgctcctgcagagcatcgggcagaacacagaagagcccacagaacgggagaaagtggagctggcagccgagtgctgccgggaaattctacaccacgtcaaccaagccgtgcgtgacatggaggacctgctgaggctcaaggactatcagcggcgcctggacttgtcccaccttcggcagagcagcgaccctatgctgagcgagttcaagaacctggacatcaccaagaagaaattggtccacgagggcccactgacgtggcgggtgactaaggacaaggcagtggaggtgcatgtgctgctgctggacgacctgctgctgctgctccagcgccaggacgagcggctgctgctcaagtcccatagccggacactgacgcccacgcccgatggcaagaccatgctgcggcccgtgctgcggctcacctccgccatgacccgcgaggtggccaccgatcacaaagccttctacgtcctttttacctgggaccaggaggcccagatatacgagctggtggcacagactgtgtcggagcggaaaaactggtgtgctctcatcactgagactgccggatccctgaaagtccctgcccctgcctctcgccctaagccccggcccagcccgagcagcacccgagaacccctcctcagcagctctgagaacggcaatggtggccgagagacgtctccagctgatgcccggaccgagagaatcctcagtgacctcctgcccttctgcagaccaggccccgagggccagctcgctgccacggcccttcggaaagtgctgtccctgaagcagcttctgtttccggcggaggaagacaatggggcggggcctcctcgagatggggatggggtcccagggggcggccccctgagcccagcacggacccaggaaatccaggagaacctgctcagcttggaggagaccatgaagcagctggaggagttggaggaggaattttgccgcctgagacccctcctgtctcagcttggggggaactctgtcccccagcctggctgcacttgaggttcccgcccaggaaggccttttgcaagaaggagaggaatgggggagaggacgtgagggaccacccccacccacacagctgccgcagcatctcacaccccgagggcctgaggagagggagctgtgggccacgcctgggaggggcccagctggggttactggccccgcatgagcctcggccatctctccctcctgccctctgcttgggggactcagggctccattctggagggcaccacggtgacccgggccatctcagtattgcctgtgggggccacccctccacccccacccccaagtgccttcgctctgtttttataccctgaattggaggtttattttttaatatatattatct

SEQ ID NO: 260835 - DNA, 2640 bp, Artificial Sequence
  derived and/or modified sequence
atggaggacttcgccagaggcgccgccagccccggccccagcagacccggcctggtgcccgtgagcatcatcggcgccgaggacgaggacttcgagaacgagctggagaccaacagcgaggagcagaacagccagttccagagcctggagcaggtgaagagaagacccgcccacctgatggccctgctgcagcacgtggccctgcagttcgagcccggccccctggtgctgagagtgcccgtgccccccaacgtggccttcgagctggacagaaccagagccgacctgatcagcgaggacgtgcagagaagattcgtgcaggaggtggtgcagagccagcaggtggccgtgggcagacagctggaggacttcagaagcaagagactgatgggcatgaccccctgggagcaggagctggcccagctggaggcctgggtgggcagagacagagccagctacgaggccagagagagacacgtggccgagagactgctgatgcacctggaggagatgcagcacaccatcagcaccgacgaggagaagagcgccgccgtggtgaacgccatcggcctgtacatgagacacctgggcgtgagaaccaagagcggcgacaagaagagcggcagaaacttcttcagaaagaaggtgatgggcaacagaagaagcgacgagcccgccaagaccaagaagggcctgagcagcatcctggacgccgccagatggaacagaggcgagccccaggtgcccgacttcagacacctgaaggccgaggtggacgccgagaagcccggcgccaccgacagaaagggcggcgtgggcatgcccagcagagacagaaacatcggcgcccccggccaggacacccccggcgtgagcctgcaccccctgagcctggacagccccgacagagagcccggcgccgacgcccccctggagctgggcgacagcagcccccagggccccatgagcctggagagcctggccccccccgagagcaccgacgagggcgccgagaccgagagccccgagcccggcgacgagggcgagcccggcagaagcggcctggagctggagcccgaggagccccccggctggagagagctggtgccccccgacaccctgcacagcctgcccaagagccaggtgaagagacaggaggtgatcagcgagctgctggtgaccgaggccgcccacgtgagaatgctgagagtgctgcacgacctgttcttccagcccatggccgagtgcctgttcttccccctggaggagctgcagaacatcttccccagcctggacgagctgatcgaggtgcacagcctgttcctggacagactgatgaagagaagacaggagagcggctacctgatcgaggagatcggcgacgtgctgctggccagattcgacggcgccgagggcagctggttccagaagatcagcagcagattctgcagcagacagagcttcgccctggagcagctgaaggccaagcagagaaaggaccccagattctgcgccttcgtgcaggaggccgagagcagacccagatgcagaagactgcagctgaaggacatgatccccaccgagatgcagagactgaccaagtaccccctgctgctgcagagcatcggccagaacaccgaggagcccaccgagagagagaaggtggagctggccgccgagtgctgcagagagatcctgcaccacgtgaaccaggccgtgagagacatggaggacctgctgagactgaaggactaccagagaagactggacctgagccacctgagacagagcagcgaccccatgctgagcgagttcaagaacctggacatcaccaagaagaagctggtgcacgagggccccctgacctggagagtgaccaaggacaaggccgtggaggtgcacgtgctgctgctggacgacctgctgctgctgctgcagagacaggacgagagactgctgctgaagagccacagcagaaccctgacccccacccccgacggcaagaccatgctgagacccgtgctgagactgaccagcgccatgaccagagaggtggccaccgaccacaaggccttctacgtgctgttcacctgggaccaggaggcccagatctacgagctggtggcccagaccgtgagcgagagaaagaactggtgcgccctgatcaccgagaccgccggcagcctgaaggtgcccgcccccgccagcagacccaagcccagacccagccccagcagcaccagagagcccctgctgagcagcagcgagaacggcaacggcggcagagagaccagccccgccgacgccagaaccgagagaatcctgagcgacctgctgcccttctgcagacccggccccgagggccagctggccgccaccgccctgagaaaggtgctgagcctgaagcagctgctgttccccgccgaggaggacaacggcgccggcccccccagagacggcgacggcgtgcccggcggcggccccctgagccccgccagaacccaggagatccaggagaacctgctgagcctggaggagaccatgaagcagctggaggagctggaggaggagttctgcagactgagacccctgctgagccagctgggcggcaacagcgtgccccagcccggctgcacctag

SEQ ID NO: 260836 - protein, 160 aa, Artificial Sequence
  derived and/or modified sequence
MASPAPLVASISHQMVALQTLQLLQQEWGWGDGPVAPGNPRDPDHVSTAPARRSGPPRARPGPGREERGGGVGTRSRRTAARANSPEEEVVRGAEGGAELLPFPRDRGPCTLAQMAMRSALARVVDSTSELVSVEQTLLGPLQQERSFPIHLKLQLLANE

SEQ ID NO: 260837 - DNA, 483 bp, Artificial Sequence
  derived and/or modified sequence
atggccagccccgcccccctggtggccagcatcagccaccagatggtggccctgcagaccctgcagctgctgcagcaggagtggggctggggcgacggccccgtggcccccggcaaccccagagaccccgaccacgtgagcaccgcccccgccagaagaagcggcccccccagagccagacccggccccggcagagaggagagaggcggcggcgtgggcaccagaagcagaagaaccgccgccagagccaacagccccgaggaggaggtggtgagaggcgccgagggcggcgccgagctgctgcccttccccagagacagaggcccctgcaccctggcccagatggccatgagaagcgccctggccagagtggtggacagcaccagcgagctggtgagcgtggagcagaccctgctgggccccctgcagcaggagagaagcttccccatccacctgaagctgcagctgctggccaacgagtag

SEQ ID NO: 260838 - DNA, 483 bp, Artificial Sequence
  derived and/or modified sequence
atggcttctcccgcgcccctcgtggcgtctatttcccaccagatggtggccttacagacactccagctcctgcagcaagagtgggggtggggcgatggccccgtggcccccggaaacccaagagacccagaccacgtgtccactgcacctgctaggagaagcgggcctcctagagcccgacccggcccgggaagggaggagaggggcggaggagtcggcacacgctcccggagaaccgctgcaagggcgaacagccccgaagaggaggtcgtgaggggagccgaaggaggagctgagcttcttccatttcctagagaccgcgggccctgtaccttagctcagatggccatgagaagtgccctcgcccgtgttgtcgactctacctctgaactcgtaagcgtggagcagacactgttaggaccgctgcagcaagagcggtctttcccaatacaccttaagctgcaactgttagccaatgaatag

SEQ ID NO: 260839 - DNA, 2092 bp, Artificial Sequence
  derived and/or modified sequence
ctggagagagggaagaagcaacgctcagcatttcgctgattttcaagtgcacaccgagcagcgcttcaggcagctttgggtcagaacacgcctgattcggacttcaggcgaaggcagaggccagcacgggtcaccgattcagagccgggggcggggccgaccacacacgctgtgagacccagaggccgaggagccgcgggttagaaaatgtgaccttggcgaccccaacgcccccgcctccctcgctgctgctccacctgcacgcggagcgcgccgggccgccagcggaggcgatggccagccctgcgcccttagtggcctccatcagccaccaaatggtggctctgcagaccttgcagctgctgcagcaggagtggggctggggggacggtccagtcgcccccgggaacccgcgggacccagaccacgtgtccaccgctccagcccgtcgctcaggcccgccgcgggcccggccggggcccgggcgcgaggagcggggcgggggcgtggggaccaggagtcggcggaccgcggcgcgggcgaactccccagaggaggaggtagtgcgaggcgctgaggggggcgccgagttgctgcccttcccccgggaccgcgggccctgcaccctggcccagatggcgatgcgcagcgcgctggcccgcgtggtggactcgacttcggagctggtcagcgtggagcagacgctgctggggcccctccagcaggagcggtcctttcccattcacctgaagcttcaactcctggctaatgagtgaagaaggtcactgtaggagtgtgaggaccatcaggagcttcatatttcaataaccagtgccaaattctgaatgccagatgggatgagatgggatgttaaaccacttcttattaccacgttgttggcctccattgccttcgtattggtctccaattgcatggtctctgtggatctctgacttcttattacctccgattggaacgcgccacaaatcatcctgctttctttatcctctctcacctccaagtaatcctgtcatcttgctccaattagagccgcttccattaagaagatcgtgacaaattccctacccctgtttgctcttcaggaaaattatcccctggaaaagtggatgttatagtcgcttttcagaatgtattgtctgaatttcttgtcttccaacattctcctaagccagttacctttgcactgaagtagaattcaaaaggagatagaggttctgaatttcttcctttgaccagatggaagtcgttacatcagaatgctgatgactgcaaaatcttggacatattgttttcacaattaggaaatggcaaacacaaagttcttcagtgcaaagccagcatgcgagttcagcttccatttgctgctataaattttgttcttgttgctgccagtaaacaccaactgttcaagtgaaatagtaaatccaaatgtgcctgttggatgagagtaaaaaaattatatgctgcataaatgctgatgcaaaaggatttttcaacacactaaaccagggtagggaaaggaaccgagaaagaaagttgaactgaatgcagctctcactaacaacttcttggtaaaagcactaaaaaagctcttgatagaatgttgattcaacatactgtttaaacctcaaggaaaaaaacaaacgcagaattgggatattggccttaggatatctgcttaaagtcctactttgagctctcatcagggttaccaaagaaggcgtacatagattgttacaaatcaaagcaaagaaaaatcccaaagttccctcaaaactgatgtgggcacttggcccagaagttgtttgctaatgatcagtctaacagctgaaagtcaaagtcagtggctagtaccatctgcaataggatttaggaagttttgatctcacaaatttactgtaaggctaatcaatgaatgtttgtactcaggtctccctacagttaaatttaatgtgtaactggaattacgattcaaagagatagtttcataaatggtccctgaaatttaattttggattacctaagtttacaatggatttctcttctcctttccccaatatttttcttacgc

SEQ ID NO: 260840 - DNA, 483 bp, Artificial Sequence
  derived and/or modified sequence
atggccagccctgcccccctggtggccagcatcagccaccagatggtggccctgcagaccctgcagctgctgcagcaggagtggggctggggagatggccctgtggcccctggcaacccccgggaccctgaccacgtgtccacagccccagcccggcgcagcggccccccccgggcccggcccggccctggccgggaggagcggggcggcggcgtgggcaccaggagcagaagaacagctgcccgggccaacagccctgaggaggaggtggtgagaggagctgagggcggcgctgagctgctgcccttcccccgggaccggggcccctgcaccctggcccagatggccatgaggtctgccctggcccgggtggtggacagcaccagcgagctggtgtctgtggagcagaccctgctgggccccctgcagcaggagaggagcttccccatccacctgaagctgcagctgctggccaatgaatag

SEQ ID NO: 260841 - DNA, 483 bp, Artificial Sequence
  derived and/or modified sequence
atggccagccccgcccccctggtggccagcatcagccaccagatggtcgctttgcagacactgcaacttcttcagcaagaatgggggtggggggacggcccagtggcgcccggaaatccccgcgacccagatcatgtgtccaccgccccagctaggagatcgggccccccccgggcccgacccggccccgggagggaagagcggggcgggggagtgggaaccaggtctcgcagaacggctgcacgtgctaattcacccgaagaggaggtggtgcgcggagcagagggaggtgccgagctactgccgttccccagggataggggaccatgcacccttgcccaaatggctatgcggagtgctctggccagagtggtggacagtacctcagagctagtgtccgtggagcagacactactagggccgctccaacaggagaggtccttccctattcacctgaagctacagctgttggccaatgagtag

SEQ ID NO: 260842 - DNA, 483 bp, Artificial Sequence
  derived and/or modified sequence
atggctagccctgcccctttggtggccagcataagtcatcaaatggtcgcacttcagacactgcaactgttgcagcaagagtgggggtggggagacggtccagtggcaccgggaaatccgagagatcctgaccacgtctccaccgctcctgcaagaaggtccggacctcccagagccagacctgggcctggcagggaagagagagggggtggtgtgggcacgagatccagacgcactgctgccagggcaaactcccctgaagaggaggtcgtgcggggtgctgaggggggtgctgagctcctcccctttccacgtgacagaggcccatgcacattggcacagatggccatgcgtagcgccctggcgagagtggtagatagcacctccgagctggtgtctgtggaacagaccctactgggtcccctccaacaggaaaggagtttccccattcacctgaagctgcagctgttagcaaatgaatag

SEQ ID NO: 260843 - protein, 706 aa, Artificial Sequence
  derived and/or modified sequence
MAGIRVTKVDWQRSRNGAAHHTQEYPCPELVVRRGQSFSLTLELSRALDCEEILIFTMETGPRASEALHTKAVFQTSELERGEGWTAAREAQMEKTLTVSLASPPSAVIGRYLLSIRLSSHRKHSNRRLGEFVLLFNPWCAEDDVFLASEEERQEYVLSDSGIIFRGVEKHIRAQGWNYGQFEEDILNICLSILDRSPGHQNNPATDVSCRHNPIYVTRVISAMVNSNNDRGVVQGQWQGKYGGGTSPLHWRGSVAILQKWLKGRYKPVKYGQCWVFAGVLCTVLRCLGIATRVVSNFNSAHDTDQNLSVDKYVDSFGRTLEDLTEDSMWNFHVWNESWFARQDLGPSYNGWQVLDATPQEESEGVFRCGPASVTAIREGDVHLAHDGPFVFAEVNADYITWLWHEDESRERVYSNTKKIGRCISTKAVGSDSRVDITDLYKYPEGSRKERQVYSKAVNRLFGVEASGRRIWIRRAGGRCLWRDDLLEPATKPSIAGKFKVLEPPMLGHDLRLALCLANLTSRAQRVRVNLSGATILYTRKPVAEILHESHAVRLGPQEEKRIPITISYSKYKEDLTEDKKILLAAMCLVTKGEKLLVEKDITLEDFITIKVLGPAMVGVAVTVEVTVVNPLIERVKDCALMVEGSGLLQEQLSIDVPTLEPQERASVQFDITPSKSGPRQLQVDLVSPHFPDIKGFVIVHVATAK

SEQ ID NO: 260844 - DNA, 2121 bp, Artificial Sequence
  derived and/or modified sequence
atggccggcatcagagtgaccaaggtggactggcagagaagcagaaacggcgccgcccaccacacccaggagtacccctgccccgagctggtggtgagaagaggccagagcttcagcctgaccctggagctgagcagagccctggactgcgaggagatcctgatcttcaccatggagaccggccccagagccagcgaggccctgcacaccaaggccgtgttccagaccagcgagctggagagaggcgagggctggaccgccgccagagaggcccagatggagaagaccctgaccgtgagcctggccagcccccccagcgccgtgatcggcagatacctgctgagcatcagactgagcagccacagaaagcacagcaacagaagactgggcgagttcgtgctgctgttcaacccctggtgcgccgaggacgacgtgttcctggccagcgaggaggagagacaggagtacgtgctgagcgacagcggcatcatcttcagaggcgtggagaagcacatcagagcccagggctggaactacggccagttcgaggaggacatcctgaacatctgcctgagcatcctggacagaagccccggccaccagaacaaccccgccaccgacgtgagctgcagacacaaccccatctacgtgaccagagtgatcagcgccatggtgaacagcaacaacgacagaggcgtggtgcagggccagtggcagggcaagtacggcggcggcaccagccccctgcactggagaggcagcgtggccatcctgcagaagtggctgaagggcagatacaagcccgtgaagtacggccagtgctgggtgttcgccggcgtgctgtgcaccgtgctgagatgcctgggcatcgccaccagagtggtgagcaacttcaacagcgcccacgacaccgaccagaacctgagcgtggacaagtacgtggacagcttcggcagaaccctggaggacctgaccgaggacagcatgtggaacttccacgtgtggaacgagagctggttcgccagacaggacctgggccccagctacaacggctggcaggtgctggacgccaccccccaggaggagagcgagggcgtgttcagatgcggccccgccagcgtgaccgccatcagagagggcgacgtgcacctggcccacgacggccccttcgtgttcgccgaggtgaacgccgactacatcacctggctgtggcacgaggacgagagcagagagagagtgtacagcaacaccaagaagatcggcagatgcatcagcaccaaggccgtgggcagcgacagcagagtggacatcaccgacctgtacaagtaccccgagggcagcagaaaggagagacaggtgtacagcaaggccgtgaacagactgttcggcgtggaggccagcggcagaagaatctggatcagaagagccggcggcagatgcctgtggagagacgacctgctggagcccgccaccaagcccagcatcgccggcaagttcaaggtgctggagccccccatgctgggccacgacctgagactggccctgtgcctggccaacctgaccagcagagcccagagagtgagagtgaacctgagcggcgccaccatcctgtacaccagaaagcccgtggccgagatcctgcacgagagccacgccgtgagactgggcccccaggaggagaagagaatccccatcaccatcagctacagcaagtacaaggaggacctgaccgaggacaagaagatcctgctggccgccatgtgcctggtgaccaagggcgagaagctgctggtggagaaggacatcaccctggaggacttcatcaccatcaaggtgctgggccccgccatggtgggcgtggccgtgaccgtggaggtgaccgtggtgaaccccctgatcgagagagtgaaggactgcgccctgatggtggagggcagcggcctgctgcaggagcagctgagcatcgacgtgcccaccctggagccccaggagagagccagcgtgcagttcgacatcacccccagcaagagcggccccagacagctgcaggtggacctggtgagcccccacttccccgacatcaagggcttcgtgatcgtgcacgtggccaccgccaagtag

SEQ ID NO: 260845 - DNA, 2121 bp, Artificial Sequence
  derived and/or modified sequence
atggcggggatccgcgtgactaaagtcgactggcagcggtcccgtaacggcgcggcccaccatacgcaggaatacccatgcccggagttggtcgtgcgccgcggtcaatctttttccctgaccttggagctgagcagggccctcgattgcgaggaaatccttatattcacgatggaaaccggcccacgggcctcggaagccttgcacacaaaggctgtgttccaaaccagcgagttggaacgcggggaaggttggacagcagctagggaagcacagatggagaagactctcactgtctcccttgcgagtcccccctctgccgtaatcggaaggtacctgctctcaatcaggctcagcagtcaccgcaagcattccaatcgccgcctgggagagttcgttctgttgtttaatccatggtgcgctgaagatgatgtgttcctcgcttccgaggaggagaggcaggagtatgtactgagtgatagtggtattattttccgcggagtcgagaaacacatcagggctcagggttggaattacggacagttcgaggaagatattctgaatatttgtttatccattttggatcggagcccggggcaccaaaacaatcccgcgaccgatgtgtcatgcagacataacccaatctatgtgactcgcgtgataagcgccatggtaaatagcaacaatgataggggagtagtgcagggtcaatggcagggcaagtatggcgggggaacctcgcctctgcattggcggggtagcgtggccattctgcagaagtggttaaagggtagatataaacccgtaaagtatggtcagtgctgggtgtttgcaggggtgctttgtaccgtgttgagatgcctgggcatcgccacccgcgtagtatccaactttaacagtgctcatgacaccgaccagaacctaagcgtagacaagtacgtcgattcattcggtaggaccctggaagacctgacagaagattccatgtggaatttccacgtctggaacgaatcatggttcgcccgccaggatctgggccctagctataacggatggcaagttctggatgccactcctcaggaggagtccgaaggggtcttcaggtgtggacctgccagcgttacagcaatacgggaaggagatgtgcacctcgctcacgacggtcccttcgtcttcgctgaggtcaacgctgactatatcacctggctgtggcacgaagatgagagccgggagcgcgtatattctaacactaagaagattgggcgctgtatcagcaccaaagccgttggctccgactccagagttgatatcaccgacctttataaataccctgagggctcaaggaaagaaaggcaggtctacagcaaggctgtcaatagactgtttggggtggaggcctccggccgacgaatctggattagaagggccggggggcgctgcctctggagagatgacctgcttgagcccgccacaaagcctagcatcgccggcaaattcaaagttttagaacccccaatgctggggcacgatttgagattggcgttgtgtctggccaacctgacctctcgagcacagcgggtgcgcgttaatctgtctggggcgaccatactttacactaggaaacccgtagcagagatcttacatgaaagccacgctgtgcgacttgggccacaggaagagaagagaattccaatcactatatcgtattctaagtacaaagaagatctgactgaggataagaagattctactggcggcgatgtgcctcgttactaaaggagagaagttgttggtcgagaaggacatcactctcgaggacttcataactatcaaggtgttgggcccagctatggtgggagtggccgtgaccgtggaagtcacagttgtaaaccccttgattgaaagagtcaaagattgcgctctgatggtcgagggttccggtctcctacaagaacaactgtcaatcgatgttcccacactcgagcctcaggagcgggccagtgttcagtttgatataacgccctccaagtcgggaccccgtcaactccaggtagacctggtcagtcctcactttcctgatataaagggattcgtgatcgtgcacgtcgccactgctaaatag

SEQ ID NO: 260846 - DNA, 2121 bp, Artificial Sequence
  derived and/or modified sequence
atggccggcatccgggtgaccaaggtggactggcagaggagcagaaatggagctgcccaccacacccaggagtacccctgcccagagctggtggtgagaagaggccagagcttcagcctgaccctggagctgagccgggccctggactgtgaggagatcctgatcttcaccatggagaccggcccccgggccagcgaggccctgcacaccaaggctgtgttccagaccagcgagctggagcggggggagggctggacagctgcccgggaggcccagatggagaagaccctgactgtgtccctggccagcccccccagcgctgtgattggccgctacctgctgagcatccggctgagcagccacaggaagcacagcaacagaaggctgggggagtttgtgctgctcttcaacccctggtgtgccgaggatgatgtgttcctggccagcgaggaggagcggcaggagtatgtgctgagtgacagcggcatcatcttccggggcgtggagaagcacatccgggcccagggctggaactacggccagtttgaggaggacatcctgaacatctgcctgagcatcctggacaggagccctggccaccagaacaacccagccacagatgtgtcctgccgccacaaccccatctacgtgaccagggtcatcagcgccatggtgaacagcaacaatgaccggggcgtggtgcagggccagtggcagggcaagtatggaggcggcaccagccccctgcactggaggggctctgtggccatcctgcagaagtggctgaagggccgctacaagcctgtgaagtatggccagtgctgggtgtttgctggggtgctgtgcaccgtgctgcgctgcctgggcatcgccaccagggtggtgagcaacttcaacagcgcccatgacacagaccagaacctgtctgtggacaagtatgtggacagctttggaagaaccctggaggacctgacagaggacagcatgtggaacttccacgtgtggaatgaatcctggtttgcccggcaggacctgggccccagctacaacggctggcaggtgctggatgccaccccccaggaggagagcgagggcgtcttccgctgtggccctgcctctgtgacagccatccgggagggagatgtgcacctggcccatgatggcccctttgtgtttgctgaggtgaatgctgactacatcacctggctgtggcatgaagatgagagccgggagcgggtgtacagcaacaccaagaagattggccgctgcatcagcaccaaggctgtgggcagtgacagccgggtggacatcacagacctgtacaagtacccagagggcagcaggaaggagcggcaggtgtacagcaaggctgtgaacagactctttggagtggaggccagcggccgccgcatctggatccggcgggccggcggccgctgcctgtggagagatgacctgctggagcccgccaccaagcccagcattgctgggaagttcaaggtgctggagccccccatgctgggccatgacctgcggctggccctgtgcctggccaacctgaccagccgggcccagagggtgcgggtgaacctgagcggggccaccatcctgtacaccaggaagcctgtggccgagatcctgcacgagagccatgctgtgcggctgggcccccaggaggagaagaggatccccatcaccatctcctacagcaagtacaaggaggacctgacagaggacaagaagatcctgctggccgccatgtgcctggtgaccaagggggagaagctgctggtggagaaggacatcaccctggaggacttcatcaccatcaaggtgctgggccctgccatggtgggcgtggccgtgacagtggaggtgacagtggtgaaccccctgattgagcgggtgaaggactgtgccctgatggtggagggcagcggcctgctgcaggagcagctgagcattgatgtgcccaccctggagccccaggagcgggcctctgtgcagtttgacatcacccccagcaagagcggcccccggcagctgcaggtggacctggtgagcccccacttcccagacatcaagggctttgtgattgtgcacgtggccacagccaagtag

SEQ ID NO: 260847 - DNA, 2121 bp, Artificial Sequence
  derived and/or modified sequence
atggccggcatccgggtgaccaaggtggactggcagcggagccggaatggcgctgctcatcatacccaggagtatccttgtcccgagctggtggtgcggagagggcagagctttagcctgacactggaattgtcccgggctttagactgcgaagagatccttatatttactatggaaacaggccctcgcgcctccgaagctcttcacacaaaggccgttttccagacttccgaactggaaagaggagaaggatggacagctgctcgggaagcccagatggagaagaccctcactgtgtcccttgccagcccaccatcggccgtgatcgggaggtacttgcttagtatcaggctgagctcgcataggaaacactcaaatcgaaggctgggggagttcgtgctgctcttcaatccttggtgcgctgaggatgacgtgtttctcgccagtgaggaagagcgacaggaatacgtgctttccgattccgggataatcttcagaggagtggagaaacacattagagctcagggctggaattatggccaattcgaggaggatattctgaatatctgtctgtctatcctcgaccgcagcccaggccaccagaacaatccagcaactgacgttagctgtcgccataacccaatttacgtcacccgggtgatctcagccatggtaaactcaaataacgacaggggggttgtgcagggtcagtggcagggcaaatacggcgggggtacctctcccctgcactggcgcggatctgtggcaatactccagaaatggctgaaggggagatataagcccgttaagtatggtcagtgttgggtcttcgcaggagtactgtgcacggtgcttcggtgcctcggaattgcaaccagagttgtctctaattttaattctgcgcatgacacagaccagaatctgtctgtcgacaaatatgtggatagctttggacgcaccttggaggatctgacggaggatagcatgtggaatttccatgtctggaatgagtcttggttcgccagacaggatctggggccttcttacaatggctggcaggtccttgatgccacacctcaagaagagagcgaaggcgtcttccgctgcggtcccgcctccgtcacggctatcagagagggcgatgtccatctggcgcacgatggtcccttcgtgttcgctgaagtgaatgctgactacattacatggctctggcacgaagatgagagccgggaacgggtgtattcaaacaccaagaaaatcgggaggtgtatatctactaaggccgttggctccgatagccgagtggatatcaccgatctctacaaatatcccgagggcagccggaaggagaggcaggtttactcaaaagcagtgaacagactcttcggcgtcgaggcctccgggcggaggatttggatccggcgtgctggcggtagatgcttgtggagagatgacttgctggaacccgccacgaaaccttctatcgcaggcaagttcaaggtgctcgagccaccgatgcttgggcacgacctccggcttgccctgtgcctcgctaacttaacctctcgggcccagcgcgttagggtgaacctgtccggtgccactatcctctataccagaaaaccagtggccgaaatattgcacgaatcccatgcagtgcggctgggcccacaagaagaaaaacgcatccccattaccattagctactcaaaatacaaggaggacctcacggaggataaaaaaatacttctggcagctatgtgccttgtgactaagggggaaaagttactggtggagaaggatataaccctggaggatttcatcacgattaaggtacttggtcccgccatggtgggtgtcgccgtgactgtggaagttaccgtcgtcaatccactcatagaaagggtgaaggattgcgcattaatggtggaaggcagtggactattgcaggaacaattatccattgacgtcccaacccttgagccccaggagcgtgctagtgtacagtttgacatcactcccagtaagagtggtccaagacaactgcaggtggacttggtgagcccccactttcccgatattaaaggattcgtcatcgtgcacgtcgctactgctaagtag

SEQ ID NO: 260848 - DNA, 2121 bp, Artificial Sequence
  derived and/or modified sequence
atggcagggatcagggtgactaaagtagattggcagcggtcacggaacggcgctgctcaccacacgcaggagtatccatgtcccgaactggtggttcggagaggtcaaagcttctctctcactctggaactgagcagagctctggactgtgaggagattctcatctttacaatggaaacagggccacgcgcaagcgaagctctgcacacgaaggcagtctttcagacctccgaactcgagcggggagaggggtggacagcagccagggaagctcagatggagaaaactctaacagtgtctcttgccagccctccatcagctgtgatcgggagatacctattgtctattcggctgtctagccatcgtaagcatagcaatcgccgtcttggtgaattcgtactactatttaatccttggtgcgccgaggacgatgtgttcttagcttcagaagaagagaggcaggagtacgtgctgtctgacagcggcatcatcttcaggggagtggagaagcatattcgcgctcagggctggaactatggtcagttcgaagaggacatcctgaatatttgcctttctattctcgatcgcagccccggacaccagaacaacccagcaaccgatgtctcctgtaggcacaacccaatatatgtcaccagggtgatttcggccatggtaaactcaaataatgatcgaggtgtggttcaggggcagtggcagggcaaatacggaggtggcacctccccattgcattggagaggctcagtggctatcctgcagaagtggctgaaggggaggtataagccagtgaagtatgggcagtgttgggtctttgcgggagtcctctgtaccgtactcagatgtcttggtatcgcaactagagtcgtcagcaatttcaactcagcccacgacactgaccaaaacctttcagtagacaaatatgttgattcttttggcaggaccctggaagatttaacagaggactcaatgtggaattttcatgtctggaacgagtcctggtttgcccgtcaggatctggggccttcttacaacgggtggcaggtcttagatgctactccacaggaagaaagcgaaggcgttttccggtgcggaccagccagcgtgacagcaattagagagggagacgtccatctcgctcacgacgggccattcgtgtttgcagaggtgaacgccgattatattacttggctttggcacgaagatgaaagccgagagagggtatacagtaacaccaagaaaattggcaggtgcatatctactaaggctgtgggctctgacagtagagtggacattactgacctgtataagtacccagagggtagcaggaaggagcgacaagtgtactccaaggcggttaacaggctctttggtgtcgaagctagcgggaggcgtatttggatcagaagagcgggagggagatgtttatggcgtgatgatctgctcgagcccgcaacaaagcctagtattgctggcaaattcaaagtactggagccacccatgctaggccatgatttgaggttggcgctctgcctggccaatctaacatctagagcgcaacgcgtgcgcgtcaacctgagcggagcaacaattctgtatacaaggaaacctgtggcagaaatattacatgagtcacatgcagtgaggttagggccacaggaagagaagcgtatccccataactatatcgtactccaaatacaaggaagacctcaccgaggacaaaaagatcctgctggctgcaatgtgcctggtgacgaaaggcgaaaagctccttgtcgaaaaagatatcaccctggaggattttattaccatcaaggtgctgggcccagctatggtcggggtggcagtgactgtggaggtcactgttgtgaaccctctcattgagagggtcaaagactgtgccctgatggtggaaggttctggactcctgcaagagcagctttccattgatgtgcccaccctggaaccccaggaaagagcaagtgtgcagtttgatattacgcctagcaagtctggacctcggcagttacaagtcgacttagtaagtccccattttccggacataaagggattcgtcatcgtccatgtggctactgcaaagtag

SEQ ID NO: 260849 - DNA, 2292 bp, Artificial Sequence
  derived and/or modified sequence
actgtcctgacggtgcacacactgctgtgtggaggaacagaggagtccagctggccttcacatggcagggatcagagtcaccaaggtggactggcagcggtcgaggaatggcgctgcccaccacacccaggagtacccctgccctgagctggtggttcgcaggggccagtcgttcagcctcacgctggagctgagcagagccctggactgtgaggagatcctcatcttcacgatggagacaggaccccgggcttctgaggccctccacaccaaagctgtgttccagacatcggagctggagcggggtgagggctggacagcagcaagggaggctcagatggagaaaactctgaccgtcagtctcgccagccctcccagtgctgtcattggccgctacctgctgagcatcaggctttcctctcaccgcaaacacagcaaccggaggctgggcgagtttgttctccttttcaacccatggtgtgcagaggacgatgtgtttctggcctcagaggaggagagacaggagtacgtgctcagcgacagcggcatcatcttccgaggcgtggagaagcacatacgagcccagggctggaactacgggcagtttgaggaggacatcctgaacatctgcctctccatcctggatcgaagccccggtcaccaaaacaacccagccaccgacgtgtcctgccgccacaaccccatctacgtcaccagggtcatcagtgccatggtgaacagcaacaacgaccgaggtgtggtgcaaggacagtggcagggcaagtacggcggcggcaccagcccgctgcactggcgcggcagcgtggccattctgcagaagtggctcaagggcaggtacaagccagtcaagtacggccagtgctgggtcttcgccggagtcctgtgcacagtcctcaggtgcttggggatagccacacgggtcgtgtccaacttcaactcagcccacgacacagaccagaacctgagtgtggacaaatacgtggactccttcgggcggaccctggaggacctgacagaagacagcatgtggaatttccatgtctggaatgagagctggtttgcccggcaggacctaggcccctcttacaatggctggcaggttctggatgccaccccccaggaggagagtgaaggtgtgttccggtgcggcccagcctcagtcaccgccatccgcgagggtgatgtgcacctggctcacgatggccccttcgtgtttgcggaggtcaacgccgactacatcacctggctgtggcacgaggatgagagccgggagcgtgtatactcaaacacgaagaagattgggagatgcatcagcaccaaggcggtgggcagtgactcccgcgtggacatcactgacctctacaagtatccggaagggtcccggaaagagaggcaggtgtacagcaaggcggtgaacaggctgttcggcgtggaagcctctggaaggagaatctggatccgcagggctgggggtcgctgtctctggcgtgacgacctcctggagcctgccaccaagcccagcatcgctggcaagttcaaggtgctagagcctcccatgctgggccacgacctgagactggccctgtgcttggccaacctcacctcccgggcccagcgggtgagggtcaacctgagcggtgccaccatcctctatacccgcaagccagtggcagagatcctgcatgaatcccacgccgtgaggctggggccgcaagaagagaagagaatcccaattacaatatcttactctaagtataaagaagacctgacagaggacaagaagatcctgttggctgccatgtgccttgtcaccaaaggagagaagcttctggtggagaaggacattactctagaggacttcatcaccatcaaggttctgggcccagccatggtgggagtggcagttacagtggaagtgacagtagtcaaccccctcatagagagagtgaaggactgtgcgctgatggtggagggcagcggccttctccaggaacagctcagcatcgacgtgcctaccctggagcctcaggagagggcctcagtccagtttgacatcaccccctccaaaagtggcccaaggcagctgcaggtggaccttgtaagccctcacttcccggacatcaagggctttgtgatcgtccatgtggccactgccaagtgatggatcatgagggactgagaggggtggatttggcccctgtcctcctcctgcccattctttgtctcttccacatgggagccaggaggcctcagttaatcctgcctcaacct

SEQ ID NO: 260850 - protein, 829 aa, Artificial Sequence
  derived and/or modified sequence
MTENKTVSSSSTRDDQTNIGLTCQEVKALREKAWSRTNEGNAMSQSLVLYGASKENSEGFHESKMTNTEGVNKGIYFSYPCRRHSCAVVNIPAPCVNKMISHIQDVESKIQEHLKRFETSFEEWSRTSSTKDLKEDWSVTTPVKEVKPGEKRDEKCPELKQEMETLLSEAIRLIKSLETDRADAEEALKQQRSRKNMINMKIDSWSVWKLQELPLAVQKEHEAYLSDVIELQWHLEDKANQLQHFEKQKTELEEANAKIQADIDYMNEHGPLLDSKQNQELQDLKNHYKKKMEVMDLHRKVNEELEEALEACENARLKAQQIKEEIDKDIYQDEKTIEAYKREIYQLNSLFDHYSSSVINVNTNIEEKEEEVTEAIRETKSSKNELHSLSKMLEDLRRVYDQLTWKQKSHENQYLEAVNDFYAAKKTWDIELSDVAKDFSAISLACTKLTEDNKKLEIDINKITVKTNESIRKKSKYESEIKYLTIMKLKNDKHLKNIYKEAYRIGTLFHLTKHKTDEMEDKIAEVRRKFKGREEFLKKLTQGEVAAGMVLQKKLYSIYEVQALERKELIKNRAICAMSLAELQEPLLQLEDEAERIRSLDKEHSVSKRSAIFKDLEATKSKTMIFYAKINELNEELKAKEEEKKSFDQTLEILKNKFITMRFKREHAQTVFDHYMQEKKDCEERIFEEDQRFRVLLAVRQKTLQDTQKIIADSLEENLRLAQEYQQLQITFLKEKDNYFNIYDKQLSLDTSIRDKKQLCQLQRRMHTLWQEHFKLVVLFSQMRLANFQTDSQESIQKILAVQEESSNLMQHILGFFQTLTDGTCENDG

SEQ ID NO: 260851 - DNA, 3087 bp, Artificial Sequence
  derived and/or modified sequence
gaccgcagcagagccggaggggtgggcaggcgcgggtccgggagacgcgcggggaaacgcgcggagccgtgtctgctcaatcaagtcaaatactgaacaacttcctggcggagaggctgagaattttatacttgcttgctcgaaagcaccccaaataagatgatccacgccaacacctcccctttacaggttttaaaatattcttataactatgactgaaaacaagacagtttcctcttcttccactagagatgatcaaaccaatataggtttaacatgtcaggaagtaaaggctctcagagagaaggcatggtcaaggacaaatgaaggcaatgccatgtctcaaagtttggttctatatggagcctctaaggagaacagtgaaggttttcatgaaagtaaaatgacaaatactgaaggggtgaataaaggcatttactttagctacccatgtcgacgtcacagctgtgccgtagtaaatattccagcaccttgtgtcaacaaaatgatttcacacatccaagatgtggagtccaaaatacaggagcatttgaaaaggtttgaaacttcttttgaagaatggagcagaacttcttccacaaaagacctgaaagaagattggagtgtaactacaccagtgaaagaggtcaaaccaggagaaaagagagatgaaaagtgtccagagttaaagcaggaaatggaaacattgctctcagaggccattcgtctcattaaaagtctagaaactgaccgggcagacgctgaagaagctttaaaacaacagagatcaagaaagaatatgattaacatgaaaattgactcttggtcagtctggaaacttcaagaactcccattggctgtgcagaaagaacatgaggcctatttgagtgatgttatagaattacaatggcatcttgaagataaagctaatcaactacaacattttgaaaaacaaaagacagagttagaagaagcaaatgcaaagattcaagcagacatagactacatgaatgaacatggccctctactggactctaagcagaatcaggaacttcaagatctgaagaaccattataaaaaaaaaatggaggtaatggacctacacagaaaagttaatgaagaacttgaagaagctttagaagcctgtgaaaatgccagattgaaggctcagcaaattaaagaagagattgataaggatatttaccaggatgaaaaaaccatagaggcctacaagagagagatatatcaacttaacagtctatttgatcattactcttcatcagtgataaatgttaatactaatattgaggagaaggaagaggaagtgactgaagcaataagggaaacaaagtcatcaaaaaatgaattacattctctatcaaaaatgctggaagatttgagaagagtttatgaccaactaacctggaagcaaaaaagtcatgaaaatcagtatctggaagcagttaatgatttttatgctgcaaaaaaaacatgggatattgagctttctgatgttgcaaaagatttttcagctatttctttggcatgtacaaaactgacggaagacaataaaaaacttgagattgatattaacaaaataacagtaaaaaccaatgaaagcatacggaaaaaatcaaaatacgaatctgaaataaaatatttgacaataatgaagttaaagaatgataaacatctcaagaacatctataaggaggcttatcgcattggtactcttttccacctaaccaaacacaagacagatgaaatggaagataaaatagcagaagtgagaagaaagttcaagggtagagaagaattcctgaaaaaactcactcaaggtgaagtggctgctggaatggtgcttcagaaaaaactatattccatttacgaagtccaggcacttgagcggaaagagcttataaaaaatagagcaatatgtgccatgtcactggcagaactacaggaacctctgcttcaactagaagatgaagctgaaagaatcagaagtctcgacaaagaacattctgttagtaaacgctcagcaatttttaaagacctagaagcaactaaaagtaagacaatgattttttatgcaaaaataaatgaattgaatgaggaattaaaagcaaaagaagaagaaaagaaaagttttgatcagacacttgaaatattaaagaacaaatttataactatgagatttaaaagggaacatgcacaaactgtgtttgatcattatatgcaagagaaaaaagactgtgaagagagaatctttgaggaagatcagagatttagagtgctccttgctgtaagacaaaaaactcttcaagatacccaaaaaataatagctgattcacttgaagaaaatctgcgtttagctcaagagtatcaacagctacagattacattcttaaaagaaaaggacaattatttcaatatatatgataaacagctatcacttgatacttcaattagagataagaaacagctctgtcagctgcagagaaggatgcacacactgtggcaggagcacttcaaactggtggtcctcttcagccagatgaggctggccaacttccagacagactctcaggagagtattcagaaaatattagctgtgcaggaggaatcttcaaatttaatgcaacacatcttaggtttcttccagactttgacagatggcacatgcgaaaacgatggttaagcaaacaaccaatgtatcttggatgctgaaataaaagacaagaaaagtcacacagttcagataacagtgtaattggacattcacctgtttgccatttcacacttccatgaacgaaaaactcactcacctcccagcatgctttgccactcttttactcacagcaaatccataacaatgaaacaggtgactttcatgctgctgtcaggaacgatctaatttcagctctgggtgactgattgcaattggctttgcctcatctgataattaatctatgtcaccattaattggaagagagaataattactggcggtgttgacagtgactgttcgcttccccagatttccctatcgtcttggcccaaataaaggctttgccattcagtactt

SEQ ID NO: 260852 - DNA, 2490 bp, Artificial Sequence
  derived and/or modified sequence
atgaccgagaacaagaccgtgagcagcagcagcaccagagacgaccagaccaacatcggcctgacctgccaggaggtgaaggccctgagagagaaggcctggagcagaaccaacgagggcaacgccatgagccagagcctggtgctgtacggcgccagcaaggagaacagcgagggcttccacgagagcaagatgaccaacaccgagggcgtgaacaagggcatctacttcagctacccctgcagaagacacagctgcgccgtggtgaacatccccgccccctgcgtgaacaagatgatcagccacatccaggacgtggagagcaagatccaggagcacctgaagagattcgagaccagcttcgaggagtggagcagaaccagcagcaccaaggacctgaaggaggactggagcgtgaccacccccgtgaaggaggtgaagcccggcgagaagagagacgagaagtgccccgagctgaagcaggagatggagaccctgctgagcgaggccatcagactgatcaagagcctggagaccgacagagccgacgccgaggaggccctgaagcagcagagaagcagaaagaacatgatcaacatgaagatcgacagctggagcgtgtggaagctgcaggagctgcccctggccgtgcagaaggagcacgaggcctacctgagcgacgtgatcgagctgcagtggcacctggaggacaaggccaaccagctgcagcacttcgagaagcagaagaccgagctggaggaggccaacgccaagatccaggccgacatcgactacatgaacgagcacggccccctgctggacagcaagcagaaccaggagctgcaggacctgaagaaccactacaagaagaagatggaggtgatggacctgcacagaaaggtgaacgaggagctggaggaggccctggaggcctgcgagaacgccagactgaaggcccagcagatcaaggaggagatcgacaaggacatctaccaggacgagaagaccatcgaggcctacaagagagagatctaccagctgaacagcctgttcgaccactacagcagcagcgtgatcaacgtgaacaccaacatcgaggagaaggaggaggaggtgaccgaggccatcagagagaccaagagcagcaagaacgagctgcacagcctgagcaagatgctggaggacctgagaagagtgtacgaccagctgacctggaagcagaagagccacgagaaccagtacctggaggccgtgaacgacttctacgccgccaagaagacctgggacatcgagctgagcgacgtggccaaggacttcagcgccatcagcctggcctgcaccaagctgaccgaggacaacaagaagctggagatcgacatcaacaagatcaccgtgaagaccaacgagagcatcagaaagaagagcaagtacgagagcgagatcaagtacctgaccatcatgaagctgaagaacgacaagcacctgaagaacatctacaaggaggcctacagaatcggcaccctgttccacctgaccaagcacaagaccgacgagatggaggacaagatcgccgaggtgagaagaaagttcaagggcagagaggagttcctgaagaagctgacccagggcgaggtggccgccggcatggtgctgcagaagaagctgtacagcatctacgaggtgcaggccctggagagaaaggagctgatcaagaacagagccatctgcgccatgagcctggccgagctgcaggagcccctgctgcagctggaggacgaggccgagagaatcagaagcctggacaaggagcacagcgtgagcaagagaagcgccatcttcaaggacctggaggccaccaagagcaagaccatgatcttctacgccaagatcaacgagctgaacgaggagctgaaggccaaggaggaggagaagaagagcttcgaccagaccctggagatcctgaagaacaagttcatcaccatgagattcaagagagagcacgcccagaccgtgttcgaccactacatgcaggagaagaaggactgcgaggagagaatcttcgaggaggaccagagattcagagtgctgctggccgtgagacagaagaccctgcaggacacccagaagatcatcgccgacagcctggaggagaacctgagactggcccaggagtaccagcagctgcagatcaccttcctgaaggagaaggacaactacttcaacatctacgacaagcagctgagcctggacaccagcatcagagacaagaagcagctgtgccagctgcagagaagaatgcacaccctgtggcaggagcacttcaagctggtggtgctgttcagccagatgagactggccaacttccagaccgacagccaggagagcatccagaagatcctggccgtgcaggaggagagcagcaacctgatgcagcacatcctgggcttcttccagaccctgaccgacggcacctgcgagaacgacggctag

SEQ ID NO: 260853 - DNA, 2490 bp, Artificial Sequence
  derived and/or modified sequence
atgaccgagaataagactgtatcatcatcttcaactagagatgaccaaaccaatattggtctgacatgtcaggaagtgaaagcactcagagaaaaggcctggtcccggaccaacgaaggcaacgcaatgtcacagtccctggttctatacggggcttcaaaagaaaactctgagggcttccatgagtccaaaatgactaacaccgagggggtgaataagggcatctacttcagctacccgtgccggcgccactcatgtgcagtggtgaatataccggcgccctgtgtgaacaaaatgattagccatattcaagacgtagagtcaaagatccaagagcatctgaaacgatttgagacgtccttcgaagagtggtctcgcacttcctcaacaaaggatctgaaagaggattggagcgttaccacaccagtgaaggaagtcaagccgggagagaagagggacgaaaagtgtcccgaactgaagcaggagatggaaacactactgagtgaggcaattcgcctgatcaagtcacttgaaaccgaccgggccgatgctgaagaggcactgaagcagcagcgatcccgcaaaaacatgattaacatgaagatcgactcctggtcagtctggaagctccaggaacttccacttgctgtacagaaggagcatgaagcgtatctgtccgacgtcatagaactgcagtggcacttagaggataaagctaaccaactgcagcacttcgagaagcagaaaactgaactggaggaagcgaacgctaagatccaggctgacattgattatatgaatgagcacggacctctgctggattcaaaacagaaccaggaattacaggatctaaaaaaccattataaaaagaagatggaggtgatggacctgcatcggaaggtgaatgaggagctggaagaagcactggaagcctgcgagaatgcgcgtctaaaggcccagcagattaaagaggaaatcgataaagatatttatcaagacgaaaagactattgaggcatataagagagaaatctatcagctgaacagcctgtttgatcattattcttcctctgttatcaatgtcaacaccaacatagaggagaaggaagaagaggtgaccgaggcaatccgggaaacgaaatctagcaagaacgagctacattcgcttagcaagatgctcgaggatctacggcgtgtgtatgaccagctcacctggaaacaaaaatcgcacgaaaatcaatatctggaggctgtgaatgatttttatgcagctaaaaagacctgggacatagaactttcagatgtcgctaaagatttcagcgcaatctcccttgcttgtacgaagctgacagaagataacaaaaaattggagattgatatcaataaaataactgttaaaacaaatgaatcaattcgcaaaaagagtaaatacgaaagtgaaattaaatacctcacaatcatgaaactgaagaatgacaaacatctcaaaaatatctacaaagaggcgtaccggataggaaccctttttcatctgacgaagcacaagacagatgagatggaagacaagatcgcggaggtgcggaggaaatttaaagggagggaggaattcctgaaaaaactgacccagggagaggtggcagccggcatggtattgcaaaaaaaactatacagtatctacgaggtccaggctctggaaaggaaggaactgattaagaacagggcaatttgcgccatgtctctagccgaattgcaagagcccttactgcagctggaggacgaggccgagcgaatcaggtcactcgacaaagagcattcggtgtccaagaggtctgccatattcaaggacttagaggccaccaagagcaaaacaatgatcttctatgccaaaattaacgagctcaacgaagagttaaaagcaaaggaggaagagaagaagtcatttgaccaaactctcgagatcctgaaaaataaattcattaccatgaggttcaagcgcgagcacgctcagactgtatttgatcactatatgcaagaaaaaaaagactgtgaagagcggatctttgaagaggaccagcgattccgtgtcctgcttgccgtgcgacagaaaacactccaggacacccagaagataatcgctgacagcctcgaagagaatctgaggctcgctcaggagtatcaacagctccagatcacctttctgaaagagaaggataactactttaacatttacgataaacagctatcactggacacctctatccgggacaaaaaacaattatgccaactccagcgccggatgcacactctctggcaggagcacttcaagctggtggtgctctttagtcagatgcggctcgcaaacttccagactgactcccaggagtcaatacaaaaaattctggccgtgcaggaggagagttcaaatttaatgcagcacatcttagggttctttcagactcttaccgatggaacatgtgaaaacgacgggtag

SEQ ID NO: 260854 - DNA, 2490 bp, Artificial Sequence
  derived and/or modified sequence
atgacagagaacaagacagtgagcagcagcagcaccagagatgaccagaccaacatcggcctgacctgccaggaggtgaaggccctgcgggagaaggcctggagcaggaccaatgaaggaaatgccatgagccagagcctggtgctgtatggagccagcaaagaaaattctgagggcttccacgagagcaagatgaccaacacagagggcgtgaacaagggcatctacttctcctacccctgccgccgccacagctgtgctgtggtgaacatcccagccccctgtgtgaacaagatgatcagccacatccaggatgtggagagcaagatccaggagcacctgaagagatttgagaccagctttgaggagtggagcaggaccagcagcaccaaggacctgaaggaggactggagcgtgaccacccctgtgaaggaggtgaagccaggagagaagagagatgagaagtgcccagagctgaagcaggagatggagaccctgctgtctgaggccatccgcctcatcaagagcctggagacagacagagcagatgctgaggaggccctgaagcagcagaggagcaggaagaacatgatcaacatgaagattgacagctggagcgtgtggaagctgcaggagctgcccctggccgtgcagaaggagcacgaggcctacctgagtgatgtgattgagctgcagtggcacctggaggacaaggccaaccagctgcagcactttgagaagcagaagacagagctggaggaggccaatgccaagatccaggccgacatcgactacatgaatgaacatggccccctgctggacagcaagcagaaccaggagctgcaggacctgaagaaccactacaagaagaagatggaggtgatggacctgcacaggaaggtgaatgaggagctggaggaggccctggaggcctgtgaaaatgcccggctgaaggcccagcagatcaaggaggagattgacaaggacatctaccaggatgagaagaccatcgaggcctacaagcgggagatctaccagctgaacagcctgtttgaccactacagcagcagcgtcatcaacgtgaacaccaacatcgaggagaaggaggaggaggtgacagaggccatccgggagaccaagagcagcaagaatgagctgcacagcctgagcaagatgctggaggacctgcggcgggtgtatgaccagctgacctggaagcagaagagccatgagaaccagtacctggaggccgtgaatgacttctatgctgccaagaagacctgggacatcgagctgagtgatgtggccaaggacttcagcgccatcagcctggcctgcaccaagctgacagaggacaacaagaagctggagattgacatcaacaagatcaccgtgaagaccaatgaaagcatcaggaagaagagcaaatatgaaagtgagatcaagtacctgaccatcatgaagctgaagaatgacaagcacctgaagaacatctacaaggaggcctacagaattggcaccctcttccacctgaccaagcacaagacagatgagatggaggacaagattgctgaggtgcggaggaagttcaagggccgggaggagttcctgaagaagctgacccagggcgaggtggccgccggcatggtgctgcagaagaagctgtacagcatctatgaggtgcaggccctggagaggaaggagctgatcaagaacagagccatctgtgccatgagcctggccgagctgcaggagcccctgctgcagctggaggatgaggccgagcgcatccgcagcctggacaaggagcacagcgtgtccaagaggtctgccatcttcaaggacctggaggccaccaagagcaagaccatgatcttctacgccaagatcaatgagctgaatgaggagctgaaggccaaggaggaggagaagaagagctttgaccagaccctggagatcctgaagaacaagttcatcaccatgaggttcaagcgggagcacgcccagacagtgtttgaccactacatgcaggagaagaaggactgtgaggagcgcatctttgaggaggaccagcgcttccgggtgctgctggccgtgcggcagaagaccctgcaggacacccagaagatcatcgctgacagcctggaggagaacctgcggctggcccaggagtaccagcagctgcagatcaccttcctgaaggagaaggacaactacttcaacatctatgacaagcagctgagcctggacaccagcatccgggacaagaagcagctgtgccagctgcagaggaggatgcacaccctgtggcaggagcacttcaagctggtggtgctcttcagccagatgaggctggccaacttccagacagacagccaggagagcatccagaagatcctggccgtgcaggaggagagcagcaacctgatgcagcacatcctgggcttcttccagaccctgacagatggcacctgtgaaaatgatggatag

SEQ ID NO: 260855 - DNA, 2490 bp, Artificial Sequence
  derived and/or modified sequence
atgaccgagaacaagaccgtgagcagcagcagcacccgggacgaccaaaccaatatcggcctgacctgccaggaagtgaaggccctgagggagaaagcttggtccagaaccaatgaagggaatgctatgagtcagagtctggtcctctatggagcctcaaaggaaaactcggagggctttcacgaaagtaagatgactaacaccgagggcgttaacaaagggatctactttagctacccttgcaggcggcactcttgtgctgtcgtcaatatacctgccccttgcgtgaataagatgataagccacattcaggacgtggagagtaagatccaggaacacctcaagcggttcgagacgtcttttgaagaatggtctcgcacctcttccaccaaggacttgaaagaagattggtcggtaaccacacctgtgaaagaagtcaaaccaggggaaaaacgggatgagaagtgtcccgaacttaagcaggagatggaaaccctcctgagtgaagccatacggttgattaaatccctggaaactgatcgggcagatgccgaagaagcactcaaacagcagcgaagccggaagaacatgataaacatgaagattgactcctggtccgtgtggaaactccaagaactgcctctggccgtccaaaaagagcacgaggcatacctaagtgacgtgatcgaattgcagtggcacttagaggataaagcaaaccagctgcagcactttgagaagcagaagaccgaactcgaggaggccaacgccaagattcaggcggatattgactatatgaatgagcacgggcccctgttggactctaaacagaaccaggagctccaagaccttaaaaatcactacaagaaaaagatggaggtcatggaccttcatcgaaaagtgaacgaagagctggaagaagccctggaagcctgcgagaatgctaggttgaaagcgcagcagattaaggaggaaattgacaaagacatttatcaagatgaaaagaccatagaggcgtacaagagggagatctaccagctgaattcgctgttcgatcactactctagctcagtgatcaacgttaatactaacatcgaggaaaaggaggaggaagtgactgaggccatccgagaaacaaaatccagtaagaatgaactgcactccctgagtaagatgctagaggacctgcggcgtgtgtatgatcagctcacctggaaacaaaaatcccatgagaaccaatatctcgaagcagtcaatgatttctatgccgcaaaaaagacctgggacatcgagttgagcgacgtcgccaaagatttcagcgccataagtctcgcatgtacaaagctgaccgaagacaacaaaaaactcgaaatcgatataaataagatcactgttaaaaccaatgagtcaattaggaagaagtcgaaatacgagagtgagattaaatatctgaccattatgaaactcaagaatgacaaacacctcaagaatatttataaagaagcttatcgtattggaaccttatttcatttgaccaagcacaagaccgacgaaatggaagacaaaattgctgaggtcagacgaaagttcaagggacgtgaggagttcctgaagaaactgacccaaggggaggtggccgccggaatggtgttacagaaaaagctgtactctatatatgaagttcaggctcttgagcgtaaggagctgattaaaaaccgcgccatctgcgcaatgtctctggccgaactgcaggaacctctcctgcagctggaggacgaggccgaacgcatccgctcactggacaaagagcacagtgtgtccaagcgttccgctatctttaaggatcttgaggctactaaatctaagactatgatattttacgcaaagattaacgagctaaacgaagagctgaaagccaaagaagaggaaaagaaatcatttgaccagaccctcgagatcctcaagaataaatttattaccatgcgcttcaagcgggagcacgcccagactgtgttcgatcactacatgcaagagaaaaaggattgcgaggagcgaatcttcgaagaagaccagcgcttcagggttctgctggctgttcgccagaagaccctccaggatactcagaagattatagccgactccctcgaagagaatctgcgtctggcacaagaataccagcagctgcagataacttttctcaaggaaaaagacaactatttcaacatctatgacaaacaactgtccttggacacctcaattagagacaaaaagcagctttgtcagcttcagcgcagaatgcatacactgtggcaggaacatttcaaactcgtcgtgctgttctcgcaaatgaggcttgcaaacttccaaaccgactcccaggagtcaattcagaagattctggcagtccaagaggaatcttccaacctaatgcagcacattttgggattcttccagacactgaccgacgggacatgcgaaaacgacggctag

SEQ ID NO: 260856 - DNA, 2490 bp, Artificial Sequence
  derived and/or modified sequence
atgactgaaaacaagactgtgagctccagttccacacgcgacgatcaaaccaatatcggactcacttgccaggaagtgaaagccctcagggaaaaagcctggagccggaccaatgaaggcaatgcaatgtctcagtctttggtgctgtatggagcatctaaggagaatagcgagggctttcacgagtctaagatgaccaacaccgagggggtaaataagggaatttattttagctatccgtgtaggagacactcgtgcgccgtggtgaacatacccgctccctgcgtgaataagatgatatctcacattcaggacgtcgaaagtaagatccaagagcatctgaagcgttttgaaacgagtttcgaggagtggagccggacatctagtacgaaggacttaaaggaggattggtccgtaaccactcctgtgaaagaggttaagcccggtgagaagcgagatgaaaaatgcccggagctgaagcaggagatggagacactcctgtcagaagcaataagactgataaaaagcttggagaccgatcgcgctgacgcagaagaagccctgaagcaacaaaggtcacgcaaaaacatgatcaatatgaagattgatagctggtcagtatggaagttacaggagttgccgcttgcagtccagaaagagcatgaggcttacctcagcgacgttatcgagctccagtggcatctggaagataaagccaatcagcttcagcactttgaaaaacagaagactgagctagaagaggcgaacgcaaaaattcaagcagacatagactacatgaatgagcatgggcctctcctggactctaaacaaaatcaagagctgcaggatctgaaaaatcattataagaaaaaaatggaggtaatggacctacaccgcaaagttaatgaagagttggaggaggctctggaggcatgcgaaaacgcacggctgaaggctcagcagattaaggaggagattgacaaggatatctatcaggatgaaaaaaccattgaggcttataaacgggaaatataccagctgaactctctcttcgaccattactcttcaagcgtgataaacgtgaatacaaacattgaggaaaaagaggaagaggttactgaggcaattagagagaccaagtcttccaagaacgagctgcacagcctgtctaagatgctggaggatctccggcgtgtttacgaccaactgacatggaagcagaaaagccatgagaaccaatatcttgaggcggttaacgatttctacgcggcaaagaaaacttgggacattgaactcagcgatgtggccaaggacttttccgccatctctttggcctgcaccaagctcacagaggataacaaaaagctggagattgatataaacaaaattacagtaaagactaatgagtctatcagaaagaagtcaaaatacgagtctgaaatcaagtatttaaccataatgaagttgaaaaatgataagcatcttaagaacatttacaaagaggcctaccgtattggtactttattccaccttaccaagcacaagacagacgagatggaggacaaaattgcagaagtaagacggaagtttaaagggagggaggagtttctgaaaaaattaacacagggagaagtcgccgctggtatggttctccagaagaaactgtactctatctacgaggttcaggccctcgagcgcaaggagctgataaaaaatcgtgctatttgtgcgatgtctctagctgagctgcaggaacctctcctgcaactggaggatgaggcggaaaggatccgcagcctcgataaggagcactctgttagcaaacgctctgcgattttcaaggacttagaagcgaccaaaagcaagaccatgatcttttacgccaaaatcaacgagcttaacgaagagctgaaagcaaaggaggaggaaaaaaagtctttcgaccagacactcgaaattctgaaaaataaattcattacaatgaggtttaaacgggaacacgcacaaacagtgtttgaccactacatgcaggaaaagaaagactgtgaagaaagaatctttgaggaagatcaacggttccgtgtcctactggccgtgagacagaagacccttcaagacacacagaagatcatcgccgattccctggaagaaaatttacgcctggctcaggaataccagcagctgcaaatcacatttttgaaggagaaggataactactttaatatctacgacaaacaactgagccttgacacgtccattagggacaagaagcagctgtgccagctgcaacggagaatgcataccttatggcaggaacactttaagctcgtggtcctgtttagccagatgcgcctggctaacttccaaaccgactctcaggagtctattcaaaaaattctcgcagtacaggaagagagctctaatctgatgcagcatattctggggttcttccaaactctgacagatggaacttgtgaaaatgatggttag

SEQ ID NO: 260857 - protein, 481 aa, Artificial Sequence
  derived and/or modified sequence
MLLKCLHNNLCQKYSAHAFQFSPRNVLWLLVVCLRSDNKRPCLEFSQLSVKDSFRDLFIPRIETILMMYTRNNLNCAEPLFEQNNSLNVNFNTQKKTVWLIHGYRPVGSIPLWLQNFVRILLNEEDMNVIVVDWSRGATTFIYNRAVKNTRKVAVSLSVHIKNLLKHGASLDNFHFIGVSLGAHISGFVGKIFHGQLGRITGLDPAGPRFSRKPPYSRLDYTDAKFVDVIHSDSNGLGIQEPLGHIDFYPNGGNKQPGCPKSIFSGIQFIKCNHQRAVHLFMASLETNCNFISFPCRSYKDYKTSLCVDCDCFKEKSCPRLGYQAKLFKGVLKERMEGRPLRTTVFLDTSGTYPFCTYYFVLSIIVPDKTMMDGSFSFKLLNQLGMIEEPRLYEKNKPFYKLQEVKILAQFYNDFVNISSIGLTYFQSSNLQCSTCTYKIQRLMLKSLTYPERPPLCRYNIVLKDREEVFLNPNTCTPKNT

SEQ ID NO: 260858 - DNA, 1446 bp, Artificial Sequence
  derived and/or modified sequence
atgcttctgaagtgtttgcacaataatttatgccagaagtattcagcacacgcctttcaattctccccgagaaacgtgctgtggctgctggtggtatgccttcgcagcgataacaagagaccttgtctagaattctcacagttatccgtgaaggattccttccgcgatctattcattcccaggattgagactattctgatgatgtacacaaggaataacctgaattgcgcggagcccctctttgaacagaacaatagcctaaacgtcaatttcaacacgcagaaaaagaccgtctggttaatacacggataccgtccagtgggctctattcccctgtggctgcagaacttcgttaggattctgctcaacgaagaagacatgaacgtcatcgtcgtggattggtcacgaggcgcgaccacttttatctacaaccgggctgtgaaaaacacccgaaaggtggccgttagtttgagcgtacacattaaaaacttgctaaaacacggcgcctccctggacaattttcacttcatcggtgtttcattgggggcccatatttccggctttgtagggaagatattccatggccagcttggacggatcaccggcttggaccctgccggaccccgattctcaaggaaacctccttactcccgactggactatacagacgctaaatttgtagacgtgatacattcggacagcaacggactcggaattcaagagccattagggcacatagatttctatcccaacggagggaacaagcagcccggctgtccaaagagcattttttcaggaattcagttcatcaaatgcaaccaccaaagggctgtgcacctctttatggcctccttagagaccaactgcaactttatctcctttccatgccggtcttacaaggactataagactagcctctgcgttgactgcgactgttttaaagaaaagtcgtgtccccgattggggtaccaggcaaagctgttcaaaggggtgctgaaagaacggatggaagggcggcccctgaggaccaccgtcttcctggacacatcagggacgtaccctttctgcacgtattatttcgttctctcgattatagtgccagacaaaacaatgatggatggctcttttagcttcaaactgttgaatcagctggggatgatcgaggaacctagactctacgaaaagaacaagcccttctacaaacttcaagaagtaaaaatcctcgcccaattctacaatgactttgtcaatataagttctatcgggctgacttatttccaatcttccaatttgcagtgtagcacgtgtacctataagattcaaagactgatgcttaagtctttgacttatcccgaacgacccccgctgtgcagatataatatcgtgttgaaagaccgggaagaagtcttccttaatcccaatacctgcactccaaaaaatacatag

SEQ ID NO: 260859 - DNA, 1446 bp, Artificial Sequence
  derived and/or modified sequence
atgctgctgaagtgcctgcacaacaacctgtgccagaagtacagcgcccacgccttccagttcagccccagaaatgtgctgtggctgctggtggtgtgcctgcggagtgacaacaagaggccctgcctggagttcagccagctgtctgtgaaggacagcttccgggacctcttcatcccccgcatcgagaccatcctgatgatgtacaccaggaacaacctgaactgtgccgagcccctgtttgagcagaacaacagcctgaatgtgaacttcaacacccagaagaagacagtgtggctgatccacggctacagacctgtgggcagcatccccctgtggctgcagaactttgtgcgcatcctgctgaatgaggaggacatgaatgtcatcgtggtggactggagcagaggagccaccaccttcatctacaacagagctgtgaagaacaccaggaaggtggccgtgtccctgtctgtgcacatcaagaacctgctgaagcatggagccagcctggacaacttccacttcatcggcgtgtccctgggcgcccacatcagcggctttgtgggcaagatcttccacggccagctgggccgcatcaccggcctggaccctgctggcccccgcttcagcaggaagccaccctacagccggctggactacacagatgccaagtttgtggatgtgatccacagcgacagcaatggcctgggcatccaggagcccctgggccacatcgacttctacccaaatggaggcaacaagcagcccggctgccccaagagcatcttcagcggcatccagttcatcaagtgcaaccaccagagagctgtgcacctgttcatggccagcctggagaccaactgcaacttcatctccttcccctgccgcagctacaaggactacaagaccagcctgtgtgtggactgtgactgcttcaaggagaagagctgcccccggctgggctaccaggccaagctgttcaagggcgtgctgaaggagaggatggagggccggcccctgcggaccaccgtcttcctggacaccagcggcacctaccccttctgcacctactactttgtgctgagcatcatcgtgcctgacaagaccatgatggatggcagcttctccttcaagctgctgaaccagctgggcatgattgaggagccccggctgtatgagaagaacaagcccttctacaagctgcaggaggtgaagatcctggcccagttctacaatgactttgtgaacatcagcagcatcggcctgacctacttccagagcagcaacctgcagtgcagcacctgcacctacaagatccagaggctgatgctgaagagcctgacctacccagagcggccccccctgtgccgctacaacatcgtgctgaaggaccgggaggaggtgttcctgaaccccaacacctgcacccccaagaacacctag

SEQ ID NO: 260860 - DNA, 1652 bp, Artificial Sequence
  derived and/or modified sequence
agtgaacttctgatagggtcttatttatgttgctcaaatgtttacataataacttgtgccaaaaatatagtgctcatgcttttcagttctcacccagaaatgtcctgtggcttctagttgtgtgcctgagatcagataataaaagaccatgccttgaattctctcagctaagtgtaaaggattccttcagagatttatttattccgagaatagagaccattctgatgatgtatacaaggaacaacctaaactgtgctgagccactgtttgaacaaaataactcacttaatgttaatttcaacacacaaaagaaaacagtctggcttattcacggatacagaccagtaggctccatcccattatggcttcagaacttcgtaaggattttgctgaatgaagaagatatgaatgtaattgtagtagactggagccggggtgctacaacttttatttataatagagcagttaaaaacaccagaaaagttgctgtgagtttgagtgtgcacattaaaaatcttttgaagcatggtgcatctcttgacaattttcatttcataggtgtgagcttaggggctcatatcagtggatttgttggaaagatatttcatggtcaacttggaagaataacaggtcttgaccctgctgggccaaggttctccagaaaaccaccatatagcagattagattacacggatgcaaagtttgtggatgtcatccattctgactccaatggtttaggcattcaagagcccttgggacatatagatttttatccaaatggaggaaataaacaacctggctgtcctaaatcaattttctcaggaattcaattcattaaatgcaaccaccagagagcagttcacttgttcatggcatctttagaaacaaactgcaattttatttcatttccttgtcgttcatacaaagattacaagactagcttatgtgtggactgtgactgttttaaggaaaaatcatgtcctcggctgggttatcaagccaagctatttaaaggtgttttaaaagaaaggatggaaggaagacctcttaggaccactgtgtttttggatacaagtggtacatatccattctgtacctattattttgttctcagtataattgttccagataaaactatgatggatggctcgttttcatttaaattattaaatcagcttggaatgattgaagagccaaggctttatgaaaagaacaaaccattttataaacttcaagaagtcaagattcttgctcaattttataatgactttgtaaatatttcaagcattggtttgacatatttccagagctcaaatctgcagtgttccacatgcacatacaagatccagagactcatgttaaaatcacttacatacccagaaagaccaccactttgcaggtataatattgtacttaaagacagagaggaagtgtttcttaatccaaacacatgtacaccaaagaacacataagatgccttcttccatcaaatgcacttgcttgtgaattaatggacttgtaaatgaaacaatgcaatcagtcttttataatgcactgttcaatttgagattcaagtatttctatttcttggaaaaaattttaagaatcaaaaataaagaaaataaaaaatgcatacagttaaacattccaaa

SEQ ID NO: 260861 - DNA, 1546 bp, Artificial Sequence
  derived and/or modified sequence
ggtcttatttatgttgctcaaatgtttacataataacttgtgccaaaaatatagtgctcatgcttttcagttctcacccagaaatgtcctgtggcttctagttgtgtgcctgagatcagataataaaagaccatgccttgaattctctcagctaagtgtaaaggattccttcagagatttatttattccgagaatagagaccattctgatgatgtatacaaggaacaacctaaactgtgctgagccactgtttgaacaaaataactcacttaatgttaatttcaacacacaaaagaaaacagtctggcttattcacggatacagaccagtaggctccatcccattatggcttcagaacttcgtaaggattttgctgaatgaagaagatatgaatgtaattgtagtagactggagccggggtgctacaacttttatttataatagagcagttaaaaacaccagaaaagttgctgtgagtttgagtgtgcacattaaaaatcttttgaagcatggtgcatctcttgacaattttcatttcataggtgtgagcttaggggctcatatcagtggatttgttggaaagatatttcatggtcaacttggaagaataacaggtcttgaccctgctgggccaaggttctccagaaaaccaccatatagcagattagattacacggatgcaaagtttgtggatgtcatccattctgactccaatggaattcaattcattaaatgcaaccaccagagagcagttcacttgttcatggcatctttagaaacaaactgcaattttatttcatttccttgtcgttcatacaaagattacaagactagcttatgtgtggactgtgactgttttaaggaaaaatcatgtcctcggctgggttatcaagccaagctatttaaaggtgttttaaaagaaaggatggaaggaagacctcttaggaccactgtgtttttggatacaagtggtacatatccattctgtacctattattttgttctcagtataattgttccagataaaactatgatggatggctcgttttcatttaaattattaaatcagcttggaatgattgaagagccaaggctttatgaaaagaacaaaccattttataaacttcaagaagtcaagattcttgctcaattttataatgactttgtaaatatttcaagcattggtttgacatatttccagagctcaaatctgcagtgttccacatgcacatacaagatccagagactcatgttaaaatcacttacatacccagaaagaccaccactttgcaggtataatattgtacttaaagacagagaggaagtgtttcttaatccaaacacatgtacaccaaagaacacataagatgccttcttccatcaaatgcacttgcttgtgaattaatggacttgtaaatgaaacaatgcaatcagtcttttataatgcactgttcaatttgagattcaagtatttctatttcttggaaaaaattttaagaatcaaaaataaagaaaataaaaaatgcatacagttaaacattccaaa

SEQ ID NO: 260862 - DNA, 1446 bp, Artificial Sequence
  derived and/or modified sequence
atgctgctgaagtgcctgcacaacaacctgtgccagaagtacagcgcacacgcatttcagttttcaccacgcaacgtgctgtggctcctcgtggtgtgccttcgttcagataacaagcgcccatgtttagaattttcacagcttagtgtgaaagactcttttagagaccttttcatcccgcgtatcgagacaatcttgatgatgtatacccggaacaatcttaattgcgccgagcctttgttcgagcagaacaattctctgaacgtcaacttcaatactcaaaagaagaccgtttggctgattcatggttatcgaccagtggggagcattcctctatggcttcaaaatttcgtccggatcctattgaatgaggaagacatgaatgtgattgtggtggactggtcacgaggcgctactacctttatctacaatagagcagtgaagaacacacggaaggtggcagtgtccctaagcgtgcacataaagaatctgctcaagcatggagcctctctagataactttcactttatcggggtctccctcggggcccacatttcagggttcgtgggcaaaatctttcacgggcagctcggcagaattactgggctggatccggcaggaccgagattcagtaggaagcctccctacagtcgacttgattacacagatgctaaatttgtcgacgtcatacactccgactctaatggactcggcatacaagaacccctgggccatatagacttttatcctaatggcggcaataagcagccaggatgccccaagtctatcttctctggcattcagttcatcaagtgtaaccatcagagggctgtgcatctttttatggcctccctggaaaccaattgcaacttcatctcctttccatgcaggtcttataaagattacaagaccagcctgtgcgtggattgtgactgctttaaagaaaagtcttgtccacgcctgggctatcaggccaaactgttcaaaggcgttctgaaagaacgcatggagggaaggcctcttaggaccactgtgtttcttgacaccagtggaacgtaccctttttgcacatactatttcgtcttgagcattatcgtccccgacaagactatgatggatggcagtttttcattcaagcttctaaatcagctaggaatgattgaagaaccgaggctgtacgagaaaaacaagcccttctacaagctgcaggaagttaagatcctggctcagttctataacgacttcgtaaatattagtagcattggtctgacttacttccagagctcaaaccttcagtgctcaacatgcacctataaaatccagcggctcatgctgaaaagcctgacttatccagagaggcccccactgtgccggtacaacatcgtacttaaggatcgggaagaagtcttcctcaaccccaacacttgtacccctaagaatacctag

SEQ ID NO: 260863 - DNA, 1446 bp, Artificial Sequence
  derived and/or modified sequence
atgctactgaaatgtctgcataacaacctttgtcagaagtatagcgcccacgcgtttcaattctccccgaggaacgtgctatggctgctggtggtttgtctaagaagcgacaacaagagaccatgcctggagttttctcagctgtcagtgaaagattccttcagagatctctttataccccgtatcgaaaccatcctgatgatgtacacacgcaacaatctaaactgtgcggaacccctgtttgaacaaaataactccctgaatgtaaattttaacacgcagaagaagacggtgtggctcattcacggctataggccggtgggatccattccactgtggctgcagaattttgtgaggatcctcctgaatgaggaggacatgaatgtcatagtggtcgattggtctagaggcgctacgaccttcatctataaccgcgctgtcaagaacacccgcaaggttgccgtgtctctctcagtccacatcaagaaccttcttaaacacggagcctcgctggacaacttccatttcatcggggtatctctcggcgctcacatctccgggtttgtgggtaaaattttccatggtcaattgggcaggatcaccggacttgatccagctggccctcgcttcagccgaaaaccaccatacagtagactcgactacacagatgctaaattcgtggatgtaatccattccgactctaatggcctgggcattcaagagcctctgggtcacatcgatttttacccaaatggagggaataagcaacctggctgtccgaagtctatcttctcaggcatccaatttataaagtgcaaccatcaaagagccgtacacctcttcatggcatcattagagactaactgcaacttcatcagttttccctgccggagctataaagactacaagacttctctttgtgtggactgtgactgtttcaaagaaaaatcctgtcccaggttggggtatcaggcgaaactgtttaaaggagtgcttaaggagcggatggaaggtaggcccctgcgcactacggttttcttagataccagtggcacatacccgttttgtacatattatttcgttctctctattattgtgccagacaagacaatgatggacggaagcttttcgttcaagttgctgaaccagctaggtatgatcgaagagcctcgcctgtacgaaaagaataagcctttctataaactccaggaagttaaaatcctggcgcagttttacaacgatttcgtgaacatttctagcatcggcctcacatactttcagagctcaaaccttcagtgctcaacatgtacatacaaaatccagcgcctcatgcttaaatcactgacgtacccagagagaccaccactgtgtaggtataatatagtcctgaaggacagggaggaggtcttccttaatcctaatacttgcacgcccaagaatacctag

SEQ ID NO: 260864 - DNA, 1446 bp, Artificial Sequence
  derived and/or modified sequence
atgctgctgaagtgcctgcacaacaacctgtgccagaagtacagcgcccacgccttccagttcagccccagaaacgtgctgtggctgctggtggtgtgcctgagaagcgacaacaagagaccctgcctggagttcagccagctgagcgtgaaggacagcttcagagacctgttcatccccagaatcgagaccatcctgatgatgtacaccagaaacaacctgaactgcgccgagcccctgttcgagcagaacaacagcctgaacgtgaacttcaacacccagaagaagaccgtgtggctgatccacggctacagacccgtgggcagcatccccctgtggctgcagaacttcgtgagaatcctgctgaacgaggaggacatgaacgtgatcgtggtggactggagcagaggcgccaccaccttcatctacaacagagccgtgaagaacaccagaaaggtggccgtgagcctgagcgtgcacatcaagaacctgctgaagcacggcgccagcctggacaacttccacttcatcggcgtgagcctgggcgcccacatcagcggcttcgtgggcaagatcttccacggccagctgggcagaatcaccggcctggaccccgccggccccagattcagcagaaagcccccctacagcagactggactacaccgacgccaagttcgtggacgtgatccacagcgacagcaacggcctgggcatccaggagcccctgggccacatcgacttctaccccaacggcggcaacaagcagcccggctgccccaagagcatcttcagcggcatccagttcatcaagtgcaaccaccagagagccgtgcacctgttcatggccagcctggagaccaactgcaacttcatcagcttcccctgcagaagctacaaggactacaagaccagcctgtgcgtggactgcgactgcttcaaggagaagagctgccccagactgggctaccaggccaagctgttcaagggcgtgctgaaggagagaatggagggcagacccctgagaaccaccgtgttcctggacaccagcggcacctaccccttctgcacctactacttcgtgctgagcatcatcgtgcccgacaagaccatgatggacggcagcttcagcttcaagctgctgaaccagctgggcatgatcgaggagcccagactgtacgagaagaacaagcccttctacaagctgcaggaggtgaagatcctggcccagttctacaacgacttcgtgaacatcagcagcatcggcctgacctacttccagagcagcaacctgcagtgcagcacctgcacctacaagatccagagactgatgctgaagagcctgacctaccccgagagaccccccctgtgcagatacaacatcgtgctgaaggacagagaggaggtgttcctgaaccccaacacctgcacccccaagaacacctag

SEQ ID NO: 260865 - protein, 222 aa, Artificial Sequence
  derived and/or modified sequence
MLPAQEAAKLYHTNYVRNSRAIGVLWAIFTICFAIVNVVCFIQPYWIGDGVDTPQAGYFGLFHYCIGNGFSRELTCRGSFTDFSTLPSGAFKAASFFIGLSMMLIIACIICFTLFFFCNTATVYKICAWMQLTSAACLVLGCMIFPDGWDSDEVKRMCGEKTDKYTLGACSVRWAYILAIIGILDALILSFLAFVLGNRQDSLMAEELKAENKVLLSQYSLE

SEQ ID NO: 260866 - protein, 236 aa, Artificial Sequence
  derived and/or modified sequence
MPGAAAAAAAAAAAMLPAQEAAKLYHTNYVRNSRAIGVLWAIFTICFAIVNVVCFIQPYWIGDGVDTPQAGYFGLFHYCIGNGFSRELTCRGSFTDFSTLPSGAFKAASFFIGLSMMLIIACIICFTLFFFCNTATVYKICAWMQLTSGDCLVLFDLHFPDGWDSDEVKRMCGEKTDKYTLGACSVRWAYILAIIGILDALILSFLAFVLGNRQDSLMAEELKAENKVLLSQYSLE

SEQ ID NO: 260867 - DNA, 669 bp, Artificial Sequence
  derived and/or modified sequence
atgctacccgcacaagaagccgcaaaactctatcacaccaactatgtaaggaactcccgggctatcggcgttctgtgggcaatcttcacaatttgtttcgccatcgtcaacgtagtgtgtttcatccaaccttactggatcggagacggagtggataccccacaggcggggtactttgggttatttcattactgtatcggaaacggcttctccagggagctcacttgcagggggtccttcaccgattttagcacactgccaagcggggcttttaaggccgccagttttttcattggccttagcatgatgctcattatcgcttgtataatatgcttcactttattctttttctgtaatacggcaacggtctacaagatctgcgcatggatgcagcttacatccgcagcgtgccttgtgctcgggtgcatgatcttccctgacgggtgggattccgacgaggtcaaacgcatgtgcggcgaaaaaacagacaagtataccctgggggcctgctctgtgagatgggcttatatcctggctatcatagggatcctggatgccttgatactgtccttccttgccttcgtgctgggtaacagacaggactccctcatggcggaggagctcaaggccgagaacaaagtactgctttctcagtacagcctagaatag

SEQ ID NO: 260868 - DNA, 711 bp, Artificial Sequence
  derived and/or modified sequence
atgccaggagccgccgccgctgctgctgctgccgcagcagcaatgctccccgcacaggaggccgcaaagctctaccacaccaactatgttcggaacagccgcgctatcggagtactatgggcaatcttcaccatatgtttcgctatcgtcaacgtcgtgtgcttcatccaaccgtattggatcggagacggcgtggatactccccaagcgggatactttggcctgtttcactactgcataggcaatggcttttctagagagctcacctgccggggttcctttacagacttttcaacgctgcctagtggtgcttttaaggccgccagctttttcatcggactttctatgatgctgataatagcatgcatcatatgttttacactgttcttcttttgtaataccgcaaccgtttacaagatttgtgcctggatgcagcttacctctggggattgcctggtgttgtttgacttgcattttccagacgggtgggatagcgatgaggtgaagcgcatgtgcggtgagaagactgataagtacaccctgggggcttgctccgtgagatgggcctacatcctcgccataataggaattttagacgccttgatcctgtcttttctggccttcgtgctgggcaaccggcaagacagcctgatggcggaagagctgaaggccgaaaacaaagttctactatcccagtacagtctcgagtag

SEQ ID NO: 260869 - DNA, 669 bp, Artificial Sequence
  derived and/or modified sequence
atgctgcctgcccaggaggccgccaagctgtaccacaccaactacgtgaggaacagccgggccatcggcgtgctgtgggccatcttcaccatctgctttgccatcgtgaatgtggtgtgcttcatccagccctactggattggagatggagtggacaccccccaggccggctacttcggcctcttccactactgcattggaaatggcttcagccgggagctgacctgccggggcagcttcacagacttcagcaccctgcccagcggggccttcaaggccgccagcttcttcatcggcctgtccatgatgctgatcatcgcctgcatcatctgcttcaccctcttcttcttctgcaacacagccaccgtgtacaagatctgtgcctggatgcagctgaccagcgctgcctgcctggtgctgggctgcatgatcttcccagatggctgggacagtgatgaggtgaagaggatgtgtggggagaagacagacaagtacaccctgggcgcctgcagcgtgcgctgggcctacatcctggccatcatcggcatcctggatgccctgatcctgtccttcctggcctttgtgctgggcaaccggcaggacagcctgatggccgaggagctgaaggccgagaacaaggtgctgctgagccagtacagcctggagtag

SEQ ID NO: 260870 - DNA, 711 bp, Artificial Sequence
  derived and/or modified sequence
atgcctggagctgctgctgctgctgctgctgctgctgctgccatgctgcctgcccaggaggccgccaagctgtaccacaccaactacgtgaggaacagccgggccatcggcgtgctgtgggccatcttcaccatctgctttgccatcgtgaatgtggtgtgcttcatccagccctactggattggagatggagtggacaccccccaggccggctacttcggcctcttccactactgcattggaaatggcttcagccgggagctgacctgccggggcagcttcacagacttcagcaccctgcccagcggggccttcaaggccgccagcttcttcatcggcctgtccatgatgctgatcatcgcctgcatcatctgcttcaccctcttcttcttctgcaacacagccaccgtgtacaagatctgtgcctggatgcagctgaccagcggggactgcctggtgctgtttgacctgcacttcccagatggctgggacagtgatgaggtgaagaggatgtgtggggagaagacagacaagtacaccctgggcgcctgcagcgtgcgctgggcctacatcctggccatcatcggcatcctggatgccctgatcctgtccttcctggcctttgtgctgggcaaccggcaggacagcctgatggccgaggagctgaaggccgagaacaaggtgctgctgagccagtacagcctggagtag

SEQ ID NO: 260871 - DNA, 1852 bp, Artificial Sequence
  derived and/or modified sequence
ctgggctgaggcggaggcaggggagttgcagcgcgcgaggctccgtgagtgtgtctcctgcgcgctgagaggcggggggaggcggaggaccaggaggaggaggaggaggaggaggagggggagaatgcccggagccgccgccgctgccgccgccgccgccgccgcgatgctcccggctcaggaggctgccaagctgtaccacaccaactatgtgcggaactcgcgggccatcggcgtgctgtgggccatcttcaccatctgctttgccatcgtcaacgtggtgtgcttcatccagccctactggataggcgacggcgtggacaccccgcaagccggctatttcgggctcttccactactgcatcggcaacggcttctcccgggagctgacctgcaggggcagcttcacggacttctccacgctgccctcgggcgccttcaaagccgcctccttctttatcggcctctccatgatgctcatcattgcctgcatcatttgctttaccctcttcttcttctgcaacacggccactgtgtacaagatatgtgcctggatgcagctcacctccgctgcctgccttgtgcttggctgtatgattttccctgatggctgggactcagatgaagtaaaacggatgtgtggagaaaagacagacaagtacactcttggggcttgctcagtccgctgggcatacatcctggctattattggaattttggatgccctgatcctctcatttctagcatttgtgcttggtaatcgacaagacagcttgatggcagaggaactgaaggcagaaaacaaagttctgctaagccaatattctctagaatgagcacaaaacaaatcgaataacagctaaacaaatcgaataacagctaaacgaatcgaataacagcttttgtacatcaacatcaagaaggaatacgcctgagagagatcagagtatatagatgaatatgaacaagaatggaacattcacttgtcaacgcactttctaaatctagatcagcagagatgggagtgattttctggaaagagatgtgatcatggattaaacaccagctcattggaaactcattggatgagatcagaaaacgttcatgaaaaatcatattcaggaaataaggaagaggaatataaatgctctagagttaacatgtaaaatatatacgtactgaggtttgtaaactgtcctttttaaatcaaactgaaaacaaaaagctttaacctttcaacagaatttttaaaaaggcagttagttctaaattattcctatctcaatagccaagaggctgatcaagcgtcatttattgaggaagcatcttagaaaatgcctctgaatgttttcataggagccgtgacctttggttcttcatctctaccattcatttacttcactgtgtaattagttacaaccactcagttattaagagacgtaacgcttcaaactttttaccaagtctgtgttctgtttaatctgtccatacaagttattactgagaaagtgtttatgccatatactattactccatcaagctgtatattacaggaagtacatctttacatcataggttcccaagcaacatagatttccctatctttcaggaaacagcatcaaggaactctgaaaaatatagaaaaagttcattttcaccttggaagctcacgtgtaatattataggctactatcaaataaacactttttttctaattctccctagtatatgcataggaatttaatatactttataaataagtatctaaaatgtctcctacttttttcctatttctttgccatacatgttatcagaaatccatgtcttctatttcccttactgatgggcactca

SEQ ID NO: 260872 - DNA, 3174 bp, Artificial Sequence
  derived and/or modified sequence
ctgggctgaggcggaggcaggggagttgcagcgcgcgaggctccgtgagtgtgtctcctgcgcgctgagaggcggggggaggcggaggaccaggaggaggaggaggaggaggaggagggggagaatgcccggagccgccgccgctgccgccgccgccgccgccgcgatgctcccggctcaggaggctgccaagctgtaccacaccaactatgtgcggaactcgcgggccatcggcgtgctgtgggccatcttcaccatctgctttgccatcgtcaacgtggtgtgcttcatccagccctactggataggcgacggcgtggacaccccgcaagccggctatttcgggctcttccactactgcatcggcaacggcttctcccgggagctgacctgcaggggcagcttcacggacttctccacgctgccctcgggcgccttcaaagccgcctccttctttatcggcctctccatgatgctcatcattgcctgcatcatttgctttaccctcttcttcttctgcaacacggccactgtgtacaagatatgtgcctggatgcagctcacctccggtgactgccttgtgctttttgatttgcatttccctgatggctgggactcagatgaagtaaaacggatgtgtggagaaaagacagacaagtacactcttggggcttgctcagtccgctgggcatacatcctggctattattggaattttggatgccctgatcctctcatttctagcatttgtgcttggtaatcgacaagacagcttgatggcagaggaactgaaggcagaaaacaaagttctgctaagccaatattctctagaatgagcacaaaacaaatcgaataacagctaaacaaatcgaataacagctaaacgaatcgaataacagcttttgtacatcaacatcaagaaggaatacgcctgagagagatcagagtatatagatgaatatgaacaagaatggaacattcacttgtcaacgcactttctaaatctagatcagcagagatgggagtgattttctggaaagagatgtgatcatggattaaacaccagctcattggaaactcattggatgagatcagaaaacgttcatgaaaaatcatattcaggaaataaggaagaggaatataaatgctctagagttaacatgtaaaatatatacgtactgaggtttgtaaactgtcctttttaaatcaaactgaaaacaaaaagctttaacctttcaacagaatttttaaaaaggcagttagttctaaattattcctatctcaatagccaagaggctgatcaagcgtcatttattgaggaagcatcttagaaaatgcctctgaatgttttcataggagccgtgacctttggttcttcatctctaccattcatttacttcactgtgtaattagttacaaccactcagttattaagagacgtaacgcttcaaactttttaccaagtctgtgttctgtttaatctgtccatacaagttattactgagaaagtgtttatgccatatactattactccatcaagctgtatattacaggaagtacatctttacatcataggttcccaagcaacatagatttccctatctttcaggaaacagcatcaaggaactctgaaaaatatagaaaaagttcattttcaccttggaagctcacgtgtaatattataggctactatcaaataaacactttttttctaattctccctagtatatgcataggaatttaatatactttataaataagtatctaaaatgtctcctacttttttcctatttctttgccatacatgttatcagaaatccatgtcttctatttcccttactgatgggcactcatttttatttttttaaaaatcattccattaaacatatttctaaataatagtaagtggtactaacaaaataaataataatttaatagccttagaaataaatgactgtatacttatacaggttgaaaaaaactcggtaggaataagttacctttttgtttactaatgttggtttcaaaaatactcagattcattttagttggctgacatctggaagtagttaacaactaaccagtggacttcaacaatcatttgctcccaggcttcccccatcatcaccctcaccacatatcctgctaatatccaacaacaaacaaatatttaatattgaaatagcccattgcctgagaatgaacacaagctaaaatacatgcaagggtacttaatggaagccaaaccatgttctatacctaaggagaaaacatggacatgtagaatgcttttattcatgtattcaaaatcagaacaaatcagtgtatatcactagaacatcagatggaggataacacaagaagtgatacagatcagggttcacttctcttaccctctctctgttaggaccacattcctattttagccaaatgtttctggtacgggccatcttttcaccataaatggcattatgtttcaaatggctaaaagcatattatgggtatgctcaaaggagtaaaacccaattcacagagatgtggcttttctaaagaaccaaattaagggaatacttagtatctacaactaaagtattagtcattctgaggattatttgttgctttaagtattagctccctactacatccataacaccctacttactaaatttaattacacacaacttttcaagaattcgtattttatttgaagggaggtacctgtctactttatctacaataaaaacaaagggtattggctttctctaatccatgcaaactacaaattccatcgggagtcctacatcactaacagtggtatgaacaaaactaagaaagtacttcctatccacatgtgaatgttttaaaaaagtttttgccataaaacctaagtgtaatttagcataccacagtgctctgaagatgggtcattgacgatgtaccatttgtatataggtaatacacatgtaaatcactaattgttaattaaatataagaagtaggtttttatctttttaaaaaaaaaacaaaaaaggtgactccctttctcattctgttctgttgtattgcgtccaaaagttgtgtgtaatttttttaaggtccaagaaatgtaaagaaatttgttggaatacctgaatttctgtaaaaaaataaaaataaaaataagattttgttactt

SEQ ID NO: 260873 - DNA, 669 bp, Artificial Sequence
  derived and/or modified sequence
atgctgcccgcccaggaggccgccaagctgtaccacaccaactacgtgagaaacagcagagccattggggtactgtgggctatcttcaccatctgctttgccatagtcaatgtcgtgtgtttcatacagccctactggatcggagacggcgtagacacaccccaggctgggtactttggcctttttcattactgtatagggaacggattttcccgggaattgacttgcaggggcagctttactgacttcagtaccctgccctcaggagctttcaaggccgcttctttttttatcggactgtcaatgatgctgattatcgcttgcattatttgctttaccctctttttcttctgtaatacagcaacagtttacaaaatctgtgcgtggatgcagctcacctcagcggcgtgtcttgtgttggggtgcatgatcttccccgatggttgggacagtgatgaggtcaaacgaatgtgcggcgaaaagacagataagtacacactcggcgcctgcagcgtgagatgggcttacatcctggcaattatcggcatcctcgatgccctgatcttgagcttcctggcctttgtgctggggaatagacaagatagtctgatggccgaggagctaaaagctgagaataaagtgcttctgagccagtactcacttgagtag

SEQ ID NO: 260874 - DNA, 711 bp, Artificial Sequence
  derived and/or modified sequence
atgcccggcgccgccgccgccgccgccgccgccgccgccgccatgctgcctgcacaggaagccgccaagctgtaccataccaactacgtgcgaaatagccgcgctattggtgtactctgggccatcttcacaatctgttttgccatcgtgaatgtggtttgcttcatccagccgtattggattggtgacggtgtggacactccccaggcaggctatttcggtctgttccactactgtatcggcaacggcttttcccgcgagcttacttgccgtggctcctttacagatttctcgactctgccctccggtgcctttaaggcggccagcttcttcatcggtctcagtatgatgctcatcatcgcttgtatcatttgctttacattgttctttttctgtaacaccgccaccgtctataaaatttgcgcttggatgcaactcacttctggcgactgtttggttctttttgaccttcacttcccagacggttgggattctgatgaagtgaagcgtatgtgtggcgagaagacagacaagtatacgttgggggcttgctccgtacggtgggcgtatattctagctattatcggcattctggatgcactgattttatccttcctggcttttgttctgggtaatagacaggatagcctcatggccgaagaattgaaggctgaaaacaaagtgcttcttagccagtattctctcgagtag

SEQ ID NO: 260875 - DNA, 669 bp, Artificial Sequence
  derived and/or modified sequence
atgctgccggctcaagaagctgccaagctctatcacacgaattacgtgaggaactctagggctattggcgttttgtgggccatattcacgatttgttttgcgatcgtcaatgtggtgtgctttatccaaccctattggatcggcgatggcgtggacacaccccaggccggatactttggcttgttccactattgcatagggaatggcttttctcgcgaactgacttgccgcggaagttttactgatttctcaactctgccttcaggcgctttcaaggcggctagctttttcatcggacttagcatgatgcttattattgcgtgcattatttgcttcaccctcttctttttttgtaacactgcaactgtatacaagatttgtgcatggatgcagctgacttcagccgcttgcctcgttctgggatgtatgatattccccgacggatgggattcagatgaggtcaagagaatgtgtggcgaaaaaactgacaaatacactctgggcgcatgttctgttcggtgggcatacatcctggccattataggtattctggatgctctgattctgtctttcctcgctttcgtgctcggcaacagacaggactcactaatggccgaggagctcaaggccgaaaacaaagttcttctgtctcaatactccctggaatag

SEQ ID NO: 260876 - DNA, 711 bp, Artificial Sequence
  derived and/or modified sequence
atgccaggggctgccgcagccgctgccgcagccgctgctgccatgttgcccgctcaggaggcagcgaaactgtaccatactaactacgttcggaactctcgcgcaatcggcgtactttgggccatatttaccatctgctttgccattgtgaatgtggtttgcttcatccagccatattggattggagatggggtggacacccctcaagccggttattttgggctcttccactactgcataggcaacggcttttccagagagctcacttgccggggatcattcaccgactttagcaccctgccttctggagcctttaaggctgccagtttcttcatcggattgtccatgatgctgatcatcgcgtgtatcatttgcttcacccttttttttttctgcaacacagcaactgtgtataagatttgcgcatggatgcagctcacctctggagactgcctggtactgttcgatctgcacttccccgatggctgggattccgatgaagtcaaaagaatgtgtggggaaaagaccgataagtacaccttaggtgcctgctccgtccggtgggcctatattttggcaatcattggaatcctggacgccttgatactgagctttttggcctttgtgttaggcaaccgccaggatagcctaatggccgaggagctgaaggcagagaacaaggtgcttctgtcccagtactcactggaatag

SEQ ID NO: 260877 - DNA, 669 bp, Artificial Sequence
  derived and/or modified sequence
atgctgcccgcccaggaggccgccaagctgtaccacaccaactacgtgagaaacagcagagccatcggcgtgctgtgggccatcttcaccatctgcttcgccatcgtgaacgtggtgtgcttcatccagccctactggatcggcgacggcgtggacaccccccaggccggctacttcggcctgttccactactgcatcggcaacggcttcagcagagagctgacctgcagaggcagcttcaccgacttcagcaccctgcccagcggcgccttcaaggccgccagcttcttcatcggcctgagcatgatgctgatcatcgcctgcatcatctgcttcaccctgttcttcttctgcaacaccgccaccgtgtacaagatctgcgcctggatgcagctgaccagcgccgcctgcctggtgctgggctgcatgatcttccccgacggctgggacagcgacgaggtgaagagaatgtgcggcgagaagaccgacaagtacaccctgggcgcctgcagcgtgagatgggcctacatcctggccatcatcggcatcctggacgccctgatcctgagcttcctggccttcgtgctgggcaacagacaggacagcctgatggccgaggagctgaaggccgagaacaaggtgctgctgagccagtacagcctggagtag

SEQ ID NO: 260878 - DNA, 711 bp, Artificial Sequence
  derived and/or modified sequence
atgcccggcgccgccgccgccgccgccgccgccgccgccgccatgctgcccgcccaggaggccgccaagctgtaccacaccaactacgtgagaaacagcagagccatcggcgtgctgtgggccatcttcaccatctgcttcgccatcgtgaacgtggtgtgcttcatccagccctactggatcggcgacggcgtggacaccccccaggccggctacttcggcctgttccactactgcatcggcaacggcttcagcagagagctgacctgcagaggcagcttcaccgacttcagcaccctgcccagcggcgccttcaaggccgccagcttcttcatcggcctgagcatgatgctgatcatcgcctgcatcatctgcttcaccctgttcttcttctgcaacaccgccaccgtgtacaagatctgcgcctggatgcagctgaccagcggcgactgcctggtgctgttcgacctgcacttccccgacggctgggacagcgacgaggtgaagagaatgtgcggcgagaagaccgacaagtacaccctgggcgcctgcagcgtgagatgggcctacatcctggccatcatcggcatcctggacgccctgatcctgagcttcctggccttcgtgctgggcaacagacaggacagcctgatggccgaggagctgaaggccgagaacaaggtgctgctgagccagtacagcctggagtag

SEQ ID NO: 260879 - protein, 927 aa, Artificial Sequence
  derived and/or modified sequence
MASLSTWSSPAEPREMEDFARGAASPGPSRPGLVPVSIIGAEDEDFENELETNSEEQNSQFQSLEQVKRRPAHLMALLQHVALQFEPGPLLCCLHADMLGSLGPKEAKKAFLDFYHSFLEKTAVLRVPVPPNVAFELDRTRADLISEDVQRRFVQEVVQSQQVAVGRQLEDFRSKRLMGMTPWEQELAQLEAWVGRDRASYEARERHVAERLLMHLEEMQHTISTDEEKSAAVVNAIGLYMRHLGVRTKSGDKKSGRNFFRKKVMGNRRSDEPAKTKKGLSSILDAARWNRGEPQVPDFRHLKAEVDAEKPGATDRKGGVGMPSRDRNIGAPGQDTPGVSLHPLSLDSPDREPGADAPLELGDSSPQGPMSLESLAPPESTDEGAETESPEPGDEGEPGRSGLELEPEEPPGWRELVPPDTLHSLPKSQVKRQEVISELLVTEAAHVRMLRVLHDLFFQPMAECLFFPLEELQNIFPSLDELIEVHSLFLDRLMKRRQESGYLIEEIGDVLLARFDGAEGSWFQKISSRFCSRQSFALEQLKAKQRKDPRFCAFVQEAESRPRCRRLQLKDMIPTEMQRLTKYPLLLQSIGQNTEEPTEREKVELAAECCREILHHVNQAVRDMEDLLRLKDYQRRLDLSHLRQSSDPMLSEFKNLDITKKKLVHEGPLTWRVTKDKAVEVHVLLLDDLLLLLQRQDERLLLKSHSRTLTPTPDGKTMLRPVLRLTSAMTREVATDHKAFYVLFTWDQEAQIYELVAQTVSERKNWCALITETAGSLKVPAPASRPKPRPSPSSTREPLLSSSENGNGGRETSPADARTERILSDLLPFCRPGPEGQLAATALRKVLSLKQLLFPAEEDNGAGPPRDGDGVPGGGPLSPARTQEIQENLLSLEETMKQLEELEEEFCRLRPLLSQLGGNSVPQPGCT

SEQ ID NO: 260880 - protein, 912 aa, Artificial Sequence
  derived and/or modified sequence
MEDFARGAASPGPSRPGLVPVSIIGAEDEDFENELETNSEEQNSQFQSLEQVKRRPAHLMALLQHVALQFEPGPLLCCLHADMLGSLGPKEAKKAFLDFYHSFLEKTAVLRVPVPPNVAFELDRTRADLISEDVQRRFVQEVVQSQQVAVGRQLEDFRSKRLMGMTPWEQELAQLEAWVGRDRASYEARERHVAERLLMHLEEMQHTISTDEEKSAAVVNAIGLYMRHLGVRTKSGDKKSGRNFFRKKVMGNRRSDEPAKTKKGLSSILDAARWNRGEPQVPDFRHLKAEVDAEKPGATDRKGGVGMPSRDRNIGAPGQDTPGVSLHPLSLDSPDREPGADAPLELGDSSPQGPMSLESLAPPESTDEGAETESPEPGDEGEPGRSGLELEPEEPPGWRELVPPDTLHSLPKSQVKRQEVISELLVTEAAHVRMLRVLHDLFFQPMAECLFFPLEELQNIFPSLDELIEVHSLFLDRLMKRRQESGYLIEEIGDVLLARFDGAEGSWFQKISSRFCSRQSFALEQLKAKQRKDPRFCAFVQEAESRPRCRRLQLKDMIPTEMQRLTKYPLLLQSIGQNTEEPTEREKVELAAECCREILHHVNQAVRDMEDLLRLKDYQRRLDLSHLRQSSDPMLSEFKNLDITKKKLVHEGPLTWRVTKDKAVEVHVLLLDDLLLLLQRQDERLLLKSHSRTLTPTPDGKTMLRPVLRLTSAMTREVATDHKAFYVLFTWDQEAQIYELVAQTVSERKNWCALITETAGSLKVPAPASRPKPRPSPSSTREPLLSSSENGNGGRETSPADARTERILSDLLPFCRPGPEGQLAATALRKVLSLKQLLFPAEEDNGAGPPRDGDGVPGGGPLSPARTQEIQENLLSLEETMKQLEELEEEFCRLRPLLSQLGGNSVPQPGCT

SEQ ID NO: 260881 - DNA, 2784 bp, Artificial Sequence
  derived and/or modified sequence
atggcctccctgtcaacgtggagctccccggccgagcccagagaaatggaagattttgctaggggggctgcctcaccagggccctcccgaccaggactcgtgcccgtgtcaatcatcggggccgaggacgaagattttgagaatgagctggagactaactcggaagagcagaattcgcagtttcagagcttagagcaggtcaagcggcggcccgcacatttgatggctctcctgcaacatgtcgccttgcagtttgaacccggaccgctcctctgttgtctgcacgctgacatgctgggctcccttggccccaaggaagctaagaaggcttttcttgacttctaccactctttcctcgaaaagacagccgtcctaagggtaccagtccctccaaacgtagcctttgagcttgaccgaacacgagccgacctcatctctgaggacgtccagcgccgcttcgtgcaggaagtggttcaatcccaacaggtcgcagtgggacgacagttggaagacttccgcagcaagcgtttgatgggaatgaccccctgggagcaggaactagctcagctggaggcttgggtcgggagggacagggcctcatacgaagcacgcgaacgccacgtggcagagagacttctaatgcacctcgaggagatgcagcacactatatccaccgacgaggaaaagtccgctgctgtggttaatgccatcggactgtatatgcgtcacctgggagtcagaacaaagagtggagataagaaaagcggcaggaattttttccgtaaaaaagtgatgggaaataggcgcagcgatgagcctgccaaaacgaaaaaagggctctcaagcatccttgatgccgcccgatggaacaggggcgagcctcaggttccggacttccgccaccttaaggccgaggtcgatgcggagaagcccggggctacagaccggaaaggcggggttgggatgcccagccgggacagaaacatcggagctcccggacaggacacgccgggggtttctctgcatccgttgtctctggattcacccgaccgagagccaggagccgatgcaccactggagcttggggacagtagccctcagggcccgatgtccctggagagtctggctcccccagagtctactgacgagggagccgagacggagtcccccgaaccgggcgatgagggcgagcctgggcgcagtggtctggaacttgagcccgaggagcctccagggtggcgagaactggtaccccctgacaccctacatagccttcctaagagccaggtgaaaagacaggaggtaatttcagaactgctggttaccgaggccgctcatgtgcgcatgcttcgggttttgcatgacctcttttttcagccaatggctgaatgcctcttctttccactggaagagttacagaacatctttccttcactggatgagctcatcgaagttcattctctgttcctggaccggctcatgaagcgcaggcaggagtcgggatatcttatagaggaaatcggcgatgtcttgctagcacggttcgatggagcagaagggtcctggttccagaagatctcaagtaggttttgttcgcgtcagtcatttgccctggaacaattgaaggctaagcagcgtaaggaccccagattctgcgcctttgtccaggaggccgagtcccgccctcgatgtagacgtcttcagcttaaagacatgatcccaacagagatgcaacggctgacaaaatacccactgctgctccaaagtattggccagaacactgaagagccaaccgagcgcgagaaagtggagctcgctgctgagtgctgcagggaaattctgcatcacgtcaatcaggcggtgagggatatggaggatcttcttaggctaaaagactaccaacgcagactcgatctcagccatctcagacagtcctccgatcccatgctgtctgaattcaaaaatctggacatcacaaagaagaaattggtccatgaagggcctctcacctggcgtgtgacaaaagataaagctgtggaagtacatgttctcctcttggatgatctgctgctcttgcttcagagacaggacgagagacttctgttgaagtcacactctaggactctgacccctacgcccgacgggaagactatgctgcggcccgtcctgaggctcaccagcgccatgacaagagaggtcgctaccgaccataaagccttctatgttctgttcacctgggaccaagaggcccagatatacgagctcgtggctcagacagtcagtgaaaggaagaattggtgcgccctgattacagagacagcaggaagccttaaagtgccagcaccggcgagcagacccaagccccgcccatcaccaagctcaacacgcgagcctctcctaagttcatccgaaaacggcaacggagggagagagacatcacctgctgatgctagaactgaaagaatcctatccgacctcctacctttttgccgacccggccccgagggacagcttgctgcaactgctctgagaaaagtgttgagcttgaagcagctgctctttcctgctgaggaggacaacggtgcaggccccccgagggacggggacggagtgccggggggaggtccactttctcctgcgcgaacacaggagatccaagagaacctgttgtctctagaagagaccatgaaacagctggaagaactggaggaggagttttgcaggttacgcccattgctttcccaacttggcggcaatagtgtgccgcagcctggctgtacctag

SEQ ID NO: 260882 - DNA, 2739 bp, Artificial Sequence
  derived and/or modified sequence
atggaggacttcgctcgcggggctgcctcacccggaccaagccggccaggattagtgcccgtgtcaatcatcggggccgaagacgaggattttgagaacgaactcgagaccaattctgaggaacagaactcgcagttccagtcgctggagcaggtcaaaaggcgaccagcacaccttatggctctactgcaacatgtagccctacagtttgaacctggccccctgctttgctgtctacacgcagatatgcttggtagtctaggtccaaaggaagcaaagaaagcattcctcgacttttatcactcatttttagagaagactgcagtcctgcgggtaccagtgccccctaacgtggcattcgagctcgatcggacccgggccgacctgatcagcgaggatgtgcagaggcgctttgtccaggaggtggttcagagccagcaggttgcggtagggcgtcagctggaagatttccggtctaaacggctcatgggtatgactccatgggagcaggagctagcacagctcgaggcatgggtagggagggatagagcctcctatgaagctagggagcgccacgttgcagaacggctgttgatgcacctagaggagatgcaacacacaatatctacggatgaggaaaagtccgctgccgtggttaacgccataggcttatacatgagacaccttggtgtccggacaaaatcaggtgataagaaatccggccgcaattttttccgtaagaaggtgatgggaaatcggcgttcagatgagcccgccaagaccaagaagggtttgtcaagcattttggatgccgctcggtggaaccggggagagccccaagtgcctgattttcgccatctcaaagcggaggtcgacgctgaaaaacccggagcaaccgatcgaaagggtggcgtggggatgcccagtcgggatcgcaatatcggtgccccaggtcaggatactccaggggtttccttgcatcctctgtctttggactctccagatagagaaccaggggcagacgcccccttagagttgggagattcatcgccgcaaggacctatgagccttgagtctctggctcctccggagagtactgacgaaggagctgagacagaaagcccggagccgggagatgagggcgaaccgggaagaagtggcctggagctggagccggaggagccacccggctggcgtgaattggtgcccccagataccttgcacagcctgcctaaatctcaggtgaagcgacaagaagtgatttccgagcttctggtaaccgaggcagctcacgtgcgcatgttgcgcgtcctccacgatttgttcttccaacccatggcagagtgtttattcttcccactggaagaactccaaaacatattccctagtctggatgaattaattgaggtgcatagcttattcctcgaccggttgatgaaaagacggcaggagtccggatacctcatcgaggagataggggacgtgttgctggcacgattcgacggggccgaggggtcctggtttcagaaaatcagtagcagattttgtagccggcagtcctttgcactcgagcagctgaaggccaaacagcgcaaagacccaaggttctgcgccttcgtccaggaagcagagagtcgaccgcggtgcagacgcctgcagctgaaagatatgatacccaccgagatgcagcgattaactaagtatccattgctgctgcagtcaatcggacagaatacagaagagccaacagagcgcgagaaagttgagctggctgcagaatgctgccgggagattctccatcacgtcaaccaggccgttcgcgatatggaagatctgttgcgcttaaaagattatcaacggcgcctggatctttctcatttgagacaatccagcgacccaatgctcagcgagttcaagaaccttgacattaccaagaaaaaacttgtgcacgagggacccttgacttggcgggtcaccaaagacaaagcagtcgaggttcatgtattgctcttagatgatctcctgctcctacttcaaaggcaagacgagcggcttctgttgaagtcccactctaggactctgacccctacacctgatggcaaaacgatgctgaggccagtactacgcctcacctctgcaatgactcgcgaggtagcaaccgaccataaagctttttatgtgctgttcacctgggaccaggaagcccagatttatgaactggtggcacagaccgtcagcgagcgtaaaaattggtgtgccctgattacagagacagccggctctctgaaggttccagctcccgcctcaagacctaagcctcggcctagtcccagttctacgcgggaacccctactgtcatcttccgagaacggaaacgggggacgcgagacgtccccagccgacgctaggaccgaacgaatcttgagcgatttgctccctttttgtcgacctggtcccgaggggcagttagcggccaccgccctccgtaaggtgctgtctttaaaacagctgcttttccctgccgaagaggataacggggccggacctcctcgagatggagatggagtgccaggcggaggtcctttgagtcccgcacggactcaggagatccaggagaacctgctgagtctggaggagacaatgaagcagcttgaggagctcgaggaggaattctgccggctgcgccccctcttgtcacagctgggcggcaactccgtgccacaaccagggtgtacatag

SEQ ID NO: 260883 - DNA, 2784 bp, Artificial Sequence
  derived and/or modified sequence
atggccagcctgagcacctggagcagccctgctgagccccgggagatggaggactttgcccggggagctgccagccctggccccagcaggcctggcctggtgcctgtgtccatcattggagcagaagatgaggactttgaaaatgagctggagaccaacagcgaggagcagaacagccagttccagagcctggagcaggtgaagagaagacctgcccacctgatggccctgctgcagcacgtggccctgcagtttgagcccggccccctgctgtgctgcctgcacgccgacatgctgggcagcctgggccccaaggaggccaagaaggccttcctggacttctaccacagcttcctggagaagacagctgtgctgcgggtgcctgtgccccccaacgtggcctttgagctggacaggaccagggctgacctgatcagtgaagatgtgcagaggagatttgtgcaggaggtggtgcagagccagcaggtggccgtgggccggcagctggaggacttccgcagcaagaggctgatgggcatgaccccctgggagcaggagctggcccagctggaggcctgggtgggccgggaccgggccagctatgaggcccgggagagacatgtggccgagcggctgctgatgcacctggaggagatgcagcacaccatcagcacagatgaggagaagtctgctgctgtggtgaatgccatcggcctgtacatgaggcacctgggcgtgaggaccaagagcggggacaagaagtctggaagaaacttcttcaggaagaaggtgatgggcaacagaagaagtgatgagcccgccaagaccaagaagggcctgagcagcatcctggatgctgcccgctggaacagaggagagccccaggtgcctgacttccgccacctgaaggccgaggtggatgctgagaagccaggggccacagacagaaaaggaggagtgggcatgcccagccgggacagaaatattggagcccctggccaggacaccccaggagtgtccctgcaccccctgagcctggacagcccagaccgggagcctggagcagatgcccccctggagctgggggacagcagcccccagggccccatgagcctggagagcctggcccctcctgagagcacagatgagggcgctgagacagagagccctgagcctggagatgaaggagagcccggccgcagcggcctggagctggagcctgaggagcccccaggctggagggagctggtgcccccagacaccctgcacagcctgcccaagagccaggtgaagaggcaggaggtgatcagcgagctgctggtgacagaggccgcccacgtgaggatgctgcgggtgctgcatgacctcttcttccagcccatggctgaatgtctcttcttccccctggaggagctgcagaacatcttccccagcctggatgagctgattgaggtgcacagcctcttcctggaccggctgatgaagaggcggcaggagagcggctacctgattgaggagattggagatgtgctgctggccaggtttgatggagctgagggctcctggttccagaagatcagcagccgcttctgcagccggcagagctttgccctggagcagctgaaggccaagcagaggaaggacccccgcttctgtgcctttgtgcaggaggccgagagccggccccgctgccggcggctgcagctgaaggacatgatccccacagagatgcagaggctgaccaagtaccccctgctgctgcagagcatcggccagaacacagaggagcccacagagcgggagaaggtggagctggccgctgagtgctgccgggagatcctgcaccacgtgaaccaggccgtgcgggacatggaggacctgctgcggctgaaggactaccagaggcggctggacctgagccacctgcggcagagcagtgaccccatgctgtctgagttcaagaacctggacatcaccaagaagaagctggtgcatgagggccccctgacctggagggtgaccaaggacaaggctgtggaggtgcacgtgctgctgctggatgacctgctgctgctgctgcagaggcaggatgagcggctgctgctgaagagccacagcaggaccctgacccccaccccagatggcaagaccatgctgcggcctgtgctgcggctgaccagcgccatgacccgggaggtggccacagaccacaaggccttctacgtgctcttcacctgggaccaggaggcccagatctatgagctggtggcccagacagtgtctgagaggaagaactggtgtgccctgatcacagaaacagctggcagcctgaaggtgcctgccccagccagccggcccaagccccggcccagccccagcagcacccgggagcccctgctgagcagcagtgaaaatggaaatggaggccgggagaccagccctgcagatgccaggacagagcgcatcctgagtgacctgctgcccttctgccggcccggccctgagggccagctggccgccacagccctgaggaaggtgctgagcctgaagcagctgctcttccctgctgaggaggacaacggggccggccccccaagagatggagatggagtgcctgggggcggccccctgagccctgcccggacccaggagatccaggagaacctgctgagcctggaggagaccatgaagcagctggaggagctggaggaggagttctgccgcctgcggcccctgctgagccagctgggcggcaacagcgtgccccagcccggctgcacctag

SEQ ID NO: 260884 - DNA, 2739 bp, Artificial Sequence
  derived and/or modified sequence
atggaggactttgcccggggggccgccagccctggccccagccggcccggcctggtgcctgtgtccatcatcggggctgaagatgaagattttgaaaatgagctggagaccaacagcgaggagcagaacagccagttccagagcctggagcaggtgaagaggaggcctgcccacctgatggccctgctgcagcacgtggccctgcagtttgagcccggccccctgctgtgctgcctgcatgctgacatgctgggcagcctgggccccaaggaggccaagaaggccttcctggacttctaccacagcttcctggagaagacagctgtgctgcgggtgcctgtgcccccaaatgtggcctttgagctggacaggaccagggctgacctgatcagtgaagatgtgcagaggagatttgtgcaggaggtggtgcagagccagcaggtggccgtgggccggcagctggaggacttccgcagcaagaggctgatgggcatgaccccctgggagcaggagctggcccagctggaggcctgggtgggccgggaccgggccagctatgaggcccgggagcggcacgtggccgagcggctgctgatgcacctggaggagatgcagcacaccatcagcacagatgaggagaagtctgctgctgtggtgaatgccatcggcctgtacatgaggcacctgggcgtgaggaccaagagcggggacaagaagagcggcaggaacttcttcaggaagaaggtgatgggcaacagaagaagtgatgagcccgccaagaccaagaagggcctgagcagcatcctggatgctgcccgctggaacagaggagagccccaggtgcctgacttccgccacctgaaggccgaggtggatgctgagaagccaggggccacagacaggaagggcggcgtgggcatgcccagccgggacaggaacatcggggcccctggccaggacaccccaggagtgtccctgcaccccctgagcctggacagcccagaccgggagcccggggctgatgcccccctggagctgggggacagcagcccccagggccccatgagcctggagagcctggcccctcctgagagcacagatgaaggagctgagacagagagccctgagcctggagatgaaggagagcccggccgcagcggcctggagctggagcctgaggagcccccaggctggagggagctggtgcccccagacaccctgcacagcctgcccaagagccaggtgaagaggcaggaggtgatcagcgagctgctggtgacagaagctgcccacgtgaggatgctgcgggtgctgcatgacctcttcttccagcccatggccgagtgcctcttcttccccctggaggagctgcagaacatcttccccagcctggatgagctgattgaggtgcacagcctcttcctggaccggctgatgaagaggcggcaggagagcggctacctgattgaggagattggagatgtgctgctggccaggtttgatggagctgagggctcctggttccagaagatcagcagccgcttctgcagccggcagagctttgccctggagcagctgaaggccaagcagaggaaggacccccgcttctgtgcctttgtgcaggaggccgagagccggccccgctgccggcggctgcagctgaaggacatgatccccacagagatgcagaggctgaccaagtaccccctgctgctgcagagcatcggccagaacacagaggagcccacagagcgggagaaggtggagctggccgctgagtgctgccgggagatcctgcaccacgtgaaccaggccgtgcgggacatggaggacctgctgcggctgaaggactaccagaggcggctggacctgagccacctgcggcagagcagtgaccccatgctgtctgagttcaagaacctggacatcaccaagaagaagctggtgcatgagggccccctgacctggagggtgaccaaggacaaggctgtggaggtgcacgtgctgctgctggatgacctgctgctgctgctgcagaggcaggatgagcggctgctgctgaagagccacagcaggaccctgacccccaccccagatggcaagaccatgctgcggcctgtgctgcggctgaccagcgccatgacccgggaggtggccacagaccacaaggccttctacgtgctcttcacctgggaccaggaggcccagatctatgagctggtggcccagacagtgtctgagaggaagaactggtgtgccctgatcacagaaacagctggcagcctgaaggtgcctgccccagccagccggcccaagccccggcccagccccagcagcacccgggagcccctgctgagcagcagtgaaaatggaaatggaggccgggagaccagccctgcagatgccaggacagagcgcatcctgagtgacctgctgcccttctgcaggcctggccctgagggccagctggccgccacagccctgaggaaggtgctgagcctgaagcagctgctcttcccagcagaagaagataatggagctggccccccaagagatggagatggagtgcctgggggcggccccctgagccctgcccggacccaggagatccaggagaacctgctgagcctggaggagaccatgaagcagctggaggagctggaggaggagttctgccgcctgcggcccctgctgagccagctgggcggcaacagcgtgccccagcccggctgcacctag

SEQ ID NO: 260885 - DNA, 2784 bp, Artificial Sequence
  derived and/or modified sequence
atggccagcctgagcacctggagcagccccgccgagccccgggagatggaagacttcgcccgtggcgccgcttcaccaggacccagtcgcccaggcctcgtcccagtgtctatcataggcgcagaagacgaagacttcgagaatgagctagagaccaactcagaggaacagaattcacaattccaaagtctcgaacaggtcaagagacggccagcgcatcttatggctctgctccagcacgttgctcttcagttcgaacccggaccactcctgtgctgtctccatgcggacatgctgggctccttaggcccaaaagaggctaagaaggcatttctcgatttttaccactcttttctggagaaaaccgcagtgctgcgggttcccgtaccaccgaacgttgctttcgagctggacagaacccgggccgatctaatttccgaggatgtgcagagaaggtttgtgcaggaagtggtccaatcccagcaggtggcggtggggagacagctggaagatttccgctctaaaagattgatggggatgactccttgggaacaggaactggctcagctggaagcctgggtcggacgagatagagcctcctacgaagcaagagagaggcacgtcgccgagagactcctcatgcacctcgaggaaatgcagcacacaatcagtacagatgaggagaagtccgccgcagttgtcaacgcaatcggcctctacatgcggcatctcggggtccgaactaagtcaggcgacaagaagagtggcaggaatttcttccggaagaaagtgatgggaaaccgccgaagcgacgagcctgccaagaccaagaagggtcttagcagcatcctcgatgccgcgaggtggaaccggggagaaccccaggtccctgatttccgacatctgaaggccgaagtggacgccgaaaagccaggggcaacagacagaaaaggcggtgttggaatgccttcacgagacagaaacatcggggccccaggtcaggatacgccgggtgtatctctacacccgctctctctggattcacccgacagggaaccgggtgcagatgccccactggagctgggggacagcagccctcaggggcccatgtcactcgagagtctggccccccctgagagtacggatgaaggggccgagaccgaaagccccgaacccggcgatgagggagaaccaggaaggtccggtcttgagctagaacctgaagagccacccggttggcgggagcttgtgccaccggatacgttgcattctcttccaaagtcgcaggtgaagaggcaggaggtgatctctgagcttttggtcactgaagcagcccacgtaagaatgctgcgggtcctacacgacctgttctttcagccaatggctgaatgcttattcttcccacttgaggagctgcaaaatatatttccctccttggatgagctcatcgaggtccactcactctttcttgatcgcttgatgaaaagacgtcaagagtccgggtatcttatagaggagatcggagatgttcttctggcccgttttgacggagcagagggttcttggttccagaaaattagcagtagattctgcagccggcagtcttttgccttggaacagcttaaggcaaagcaaaggaaggaccccaggttctgcgctttcgtgcaagaggcggagagcagacccagatgtcgtaggctgcaactgaaggacatgatcccaacagagatgcaacggctgacaaagtaccctcttctacttcagagcataggacagaacactgaggaaccgaccgagagagagaaagtggagctggccgcggaatgttgccgtgagatcctccaccacgtgaaccaagccgtaagagacatggaggacctccttaggctcaaagactaccagcgccgtctggacctgtctcaccttagacaatcttccgaccccatgttgtctgagtttaaaaatcttgacattaccaaaaaaaaactggtccatgagggtcccctgacgtggcgtgtcaccaaagataaggccgtcgaagtgcacgtcctcctcctagacgatttgttattactcctgcaaagacaggacgagaggctccttttgaagtcccacagtcgcactctgacacccactccagatggtaaaaccatgctccgccccgtattgcgcctcacctccgcgatgacacgggaggtggcaacagaccacaaggccttctacgttctgttcacttgggaccaggaagcccagatctacgagctggtcgctcaaactgtctcagagcggaaaaactggtgcgcgcttattaccgaaacagctgggtccttgaaagtgcccgccccggcctcccgacccaaacccaggccttcgccctctagcactcgcgagccacttctctcctcttccgagaacggcaatgggggccgcgagactagccccgccgatgctaggaccgagcggattttgtccgatctgttacccttctgtcgtcctggcccagagggacagcttgctgcgacagccctcagaaaagttttgtccctgaaacagctgctgttccccgcggaagaagataatggcgccggaccacctagagacggcgacggtgtacctggcggaggcccactgagtccagcacggactcaggaaatccaggaaaacctgctgtccctcgaagagactatgaagcagctggaggaattggaggaagagttttgtcgattacggcctttactgagtcaactgggcggtaactcggtgccacagcctggatgtacttag

SEQ ID NO: 260886 - DNA, 2739 bp, Artificial Sequence
  derived and/or modified sequence
atggaggacttcgcccggggcgccgccagccccggccccagccggccgggtcttgtgccagtgagcatcatcggggctgaggacgaggacttcgagaatgagctggaaacaaactctgaggagcagaattcacaattccagagcttagagcaggtgaaacgacgtccggctcatctcatggccctcctgcagcatgtcgcgctacagtttgagccaggacctctactgtgttgcctgcacgcagatatgttgggatccctggggccgaaggaggctaagaaggcttttttggatttctatcactccttcctcgagaagacggccgtcttgagggttcccgtgccaccaaacgtagcatttgagctggataggactcgcgccgatctgatttccgaagatgttcagaggcgcttcgtgcaggaagtggtccagagccagcaggttgccgtgggccgccaacttgaggacttcaggagcaaaaggctgatggggatgactccttgggagcaagagctcgcacagctcgaggcctgggtgggccgtgatagagcttcgtacgaagcacgagaaaggcatgtggctgaacggctcttgatgcacctggaggagatgcagcacactatttcaacagacgaagaaaaaagtgcagctgtggtgaacgccattggactctatatgcgacaccttggcgtgagaactaaaagcggtgataaaaagagtggcaggaatttctttcgcaagaaggtgatgggcaacagaagaagtgatgagcccgcaaaaacgaagaagggcctgtccagcattttagacgcagcgaggtggaatagaggagagccccaggttccggatttccggcatctaaaggctgaggtggatgcggagaagcctggtgcgaccgacaggaaaggcggggtaggcatgccatctcgcgacaggaacatcggcgctcccggacaggatacgcccggagtttccctgcaccccctttctctggatagcccagacagagagcccggggccgatgcccccttagagctgggagattcctctccccagggccctatgagtctagagtctctcgcgccaccagaatcaactgatgagggggcggaaacagaaagtccagaaccgggtgatgagggcgagccaggacgatctggactggagctcgagccggaggagcccccaggatggagggagctggtgcctccagacactctgcactccctgccgaaaagccaggtcaagagacaggaagtaatttcagagctcctcgtgaccgaggccgctcacgttcggatgttgcgcgtgctccacgacctcttcttccaaccaatggctgaatgtctctttttccccttagaagagctgcagaacatttttccctctctggacgagctcatcgaagttcatagtctttttctggatcgcctgatgaaacgaaggcaggagtcaggatacttaattgaggagattggcgacgttctgctcgcccgatttgatggcgccgagggaagctggtttcagaagatcagtagcagattttgctccagacagtccttcgctctggagcaacttaaagccaaacagcggaaagaccctaggttctgtgcctttgtacaggaggctgagtccagacctcgctgtaggagactgcagctgaaagacatgatccccactgagatgcagagattgactaaatacccccttctgctgcagagcattggccaaaataccgaagagcctaccgagagggagaaggtggagttggccgccgaatgttgtagggaaatactccaccacgtaaatcaggccgtgcgcgatatggaggacctactcagactcaaagactaccagcgcaggcttgacctatcgcacctccggcagagtagtgatcctatgctgagcgaattcaagaatctggacatcactaaaaagaagctggtacacgagggccccctcacctggcgggttacgaaagacaaagcagtggaagtgcacgtgctattgctcgacgatctgctgctgttactgcagcgtcaagacgagcggctgttacttaaaagtcactcaaggacactcacgcccacccccgatggcaagaccatgcttaggccagttttgcgcttaacgtccgctatgacccgtgaagtagccaccgaccacaaggctttttacgtgttgtttacttgggaccaagaggcccaaatttatgagttagtcgcacaaaccgtgtccgaaaggaagaactggtgcgccctaatcacagaaacagctggatcactcaaggttcccgcacctgcgtctaggcctaagccaagacctagtcctagtagcactagagagccactcctcagttcttccgaaaacggcaatggagggcgggaaacaagccctgctgacgctcggaccgaaagaatactaagcgacctcctgcccttttgtcggcccggaccagaaggccagctggctgccacagctctgagaaaggtactctctttaaagcagctgcttttccctgccgaggaagataatggagctggccctcccagagacggggatggtgtaccggggggtgggccgttgagcccagctagaactcaggaaatccaggagaacctgctttcactggaggagaccatgaaacagttggaggaattggaagaagaattttgcagactccggcctctattgtctcaactcggtggtaattccgttccacaacctggatgtacctag

SEQ ID NO: 260887 - DNA, 2784 bp, Artificial Sequence
  derived and/or modified sequence
atggcttcactatctacgtggtcctctcctgctgaacctcgggagatggaagatttcgcgagaggtgcagcttctcccggaccttcaaggccaggcctggtgccagtgagtattatcggggcagaggatgaagacttcgaaaacgagctggagacaaatagtgaagaacaaaactcgcaattccagtccctcgagcaggtgaagagaaggccagctcacctcatggccttgctccagcatgtggccttgcaattcgaacccggtccacttctgtgctgtctgcacgccgacatgctcggcagcctgggtcccaaggaagccaagaaggccttcctggatttttatcatagtttccttgagaagaccgccgtcttacgagtgcctgtgcccccaaacgtcgcctttgaactggacagaactcgtgcagatcttatctcagaggatgttcagagacgattcgtacaggaggtcgtgcagtcacagcaggtggccgtgggaagacaactcgaagattttaggtctaaaaggttaatggggatgaccccatgggagcaggagcttgctcaacttgaggcttgggtgggtagggaccgggcatcctatgaagccagggagaggcatgtcgcagagcggttactgatgcacctggaggaaatgcagcacaccatcagcacggacgaggaaaagagcgccgctgtcgtgaacgcaattggtctgtatatgaggcacctcggagttaggactaagtccggcgataaaaagtcaggacgaaactttttccgaaagaaagtgatggggaatcgtaggagtgatgaacccgcaaagacaaaaaaaggcctgtccagcattctggacgctgccagatggaaccgaggggaacctcaggttcccgattttcggcacctcaaggcagaggtggacgctgaaaagcccggagcgaccgatcggaagggaggtgtgggaatgccttcacgggacagaaacatcggagcccctggacaggacacacccggtgtgtctctgcatcccctcagccttgactcccctgacagagagcccggtgctgatgccccacttgagcttggcgattctagtcctcagggacccatgagcctcgagagcctggccccacctgagtctaccgatgagggcgcagagactgagagcccagaacctggtgatgaaggtgagcctggccgttccggtttggagctggagcccgaggaaccgcctggctggagggaactggtgcccccagatactctgcactcactgccgaagtcccaagtgaaaagacaggaggtaatctccgaattgctcgtgacagaggctgctcacgtgcgcatgctgcgggtacttcacgacctattcttccagcctatggccgagtgtctcttttttccactcgaagagttacagaatatctttccttccctcgatgagttaatagaagtgcatagtctgtttctggatcggcttatgaaacgtcggcaggaatccggctacttaatcgaggaaattggagatgtccttctcgcccgtttcgatggcgctgagggcagctggttccaaaagatcagcagccgcttctgttctcgacaaagctttgctttagaacagctcaaggctaaacagcgcaaggatccaagattctgcgcattcgtacaggaggcagagtccagacctcgttgtcgcagactccagctgaaggatatgatcccaacagaaatgcaacgactgactaaataccctctcctcctccagagcattggtcaaaatactgaggaacccaccgagagggagaaggtggagctggctgccgagtgctgccgggagattctgcaccacgtgaaccaggctgttcgtgatatggaagacttactgcggcttaaagattaccagcgtagactggacctttcacacctgagacaaagcagcgatccaatgctcagcgagttcaaaaacctggatattaccaagaaaaagctcgtgcatgagggccctctcacttggagggttactaaggataaagcagtggaagtgcatgtgcttttattagatgatcttctgctgctcttacagcgccaagatgaacggttgcttctcaaaagccattcaagaacactgacgcctaccccagatggcaagaccatgctgcgacctgtccttagattaacctccgcaatgactcgcgaagttgccacggatcacaaagctttttatgtactgtttacctgggaccaggaggcccagatttatgagttggtggcccagaccgtgtcagaacgtaaaaactggtgcgcccttattaccgaaactgccggatcactgaaggtgcctgcacctgccagccggcctaaacctcggccatctccctcctccacccgagaaccacttctgtcatcaagcgagaatggcaatggcggacgcgagacttcaccagctgatgcacggactgagcgaattctttccgacctgctccccttctgtcgcccaggacctgaagggcagttggcagctacagctctccgaaaagttctaagtttaaaacaactgctcttccccgctgaggaagataacggcgctggccctccaagggatggagacggggtgccgggtggtggtcccctctcacccgctcgaacacaggaaatccaggaaaacctccttagcttagaagagaccatgaagcagctggaagagctcgaagaggaattttgccgtctgcgcccacttctgagtcagcttgggggaaactccgtgccccagccagggtgcacgtag

SEQ ID NO: 260888 - DNA, 2739 bp, Artificial Sequence
  derived and/or modified sequence
atggaggattttgcacggggagccgcatcacccggaccatcccggccagggcttgtgccagtctccataatcggcgcagaagatgaggacttcgaaaacgaattagagaccaatagcgaagagcagaactcccaatttcagagtttagagcaggtgaaaagaaggccagcccacctaatggccctgttacagcatgtggcactgcagttcgagcccggtcccctactgtgctgtctccacgccgacatgctgggctcacttgggcctaaagaagccaagaaagcctttctggatttttaccactcctttctggaaaagactgcggttttgcgtgtgccggtcccaccaaatgtcgcattcgaactcgataggacgagagccgacctgatctctgaagacgtgcagcgacggtttgttcaggaggtggtccagagccagcaggtcgctgtaggaaggcaattggaagacttcaggagcaagagattaatgggcatgacaccatgggagcaggaacttgcccagctggaggcttgggttggcagggatagggctagctacgaagcacgagagagacatgtggccgagagactcttgatgcacttggaagaaatgcaacatacaatcagcaccgacgaggaaaaaagcgctgctgtcgtcaatgctatagggctgtacatgcgtcatctcggggtgcggacgaaatccggcgataagaaaagtggccgaaatttcttccgaaagaaagtgatgggcaaccgtaggagtgatgagcctgccaagaccaaaaagggcctctcgtcaattcttgacgcagcccgttggaacagaggcgagccccaggttcctgacttcagacacctaaaagctgaagtcgacgccgaaaagcccggagcaactgatagaaaggggggagtggggatgccctctcgtgatagaaatattggtgcaccagggcaggatactcctggtgtgagcctgcacccgttgtctctggattcccctgaccgggaaccaggagcagatgctcccttagaattgggcgactcctccccccaaggtcctatgtcgctcgagagcttggctcctccagaaagcactgatgagggagctgaaaccgagagtcccgaacccggtgatgaaggcgagccgggacgctcgggcttagaactggaacctgaagagcctccaggttggcgggaactggtgccgcctgacaccctgcactcactgccaaagtcccaggtaaagcgccaggaggtcatttccgaacttctcgttactgaggcagcgcacgtcagaatgctccgggtcctgcacgacctgttctttcagccgatggctgagtgcctgtttttccctctcgaggagctgcaaaacatcttcccttcacttgacgagctaattgaggttcattctctgtttcttgacagactcatgaagcgtcgacaggagtctggatatctgattgaggagattggcgacgttcttcttgcccgatttgatggcgctgagggttcatggtttcaaaaaattagcagtcggttttgctctagacagtccttcgcactcgagcaactcaaggcgaagcagcggaaagacccaagattttgcgctttcgttcaagaggcggagagccgacctagatgtagacgcttacagttgaaggatatgattcctacggaaatgcaaagattgaccaagtacccactcttactccaatccattgggcagaacaccgaagaacccacagagcgtgaaaaagtggagctggcagcagaatgttgtcgtgagattctgcaccacgtcaatcaggccgttcgcgatatggaagatctgttaaggctgaaggactatcagcgccgattagacctcagtcatctaaggcaatcttcagacccaatgctctccgagtttaaaaacttagatatcactaaaaagaagttagtgcacgaggggcctttgacatggcgggtgaccaaagacaaggccgtcgaggtccatgtgttactgttggatgacctgctgctattgcttcagagacaagatgagagacttcttcttaaatctcacagtcgcacactcaccccgacaccagatggcaaaactatgctgagacccgtactgcgactgacttccgccatgacacgggaggtggctaccgatcacaaggcattctatgtactgttcacatgggatcaagaggcccagatctacgagctcgtcgcacagactgtttccgagcggaaaaactggtgcgcactcataaccgaaaccgccggatctctcaaagtgcccgctcctgcctccaggcctaagccccgtccctccccctcttctacacgagagccgctgctatcttcctctgagaacggcaacggaggcagggaaacgagcccggcagacgctagaaccgaacgcattcttagcgacctcctgccattctgtagaccaggaccagagggccagctcgctgccactgcactgcgcaaggtcttatccttaaagcagttgctattcccagccgaggaggacaatggggcaggtcccccacgtgacggcgacggtgtgcccggagggggtcccctttctcctgcacgaacacaagagattcaggagaacctcttgtctctcgaggaaaccatgaaacagctggaggaactggaggaggagttctgtagactccgcccacttctgtcgcaattagggggtaactccgttcctcagcccggatgcacgtag

SEQ ID NO: 260889 - DNA, 3231 bp, Artificial Sequence
  derived and/or modified sequence
ggtggactcagggcggctagagcgacgcggcggcaggggtggggagagtgcggagcccgagcgcggaggcttcggttccggtggcggcgatggcttctctttccacctggagcagccctgcagagcccagggagatggaagacttcgcccgaggggcggcctccccaggcccctcccggcctggcctggttcccgtcagcatcatcggggctgaggatgaggattttgagaacgagctggagacaaactcagaagagcaaaacagccagttccagagcctggagcaggtgaagcggcgcccagcccacctcatggccctcctgcagcacgtggccctgcagtttgagccaggacccctgctttgctgtctgcatgccgacatgctgggctcactgggccccaaggaggccaagaaggccttcctggacttctaccacagcttcctggagaagacagcggttctccgggtgccggtccctcccaacgtcgcctttgaacttgaccgcactagggctgacctcatctccgaggatgtccagcggcggttcgtgcaggaggtggtgcaaagccagcaggtagccgtgggccggcagctggaggacttccgttccaagcggctcatgggcatgacgccctgggagcaggagctggcccagctggaggcttgggttgggcgggaccgagccagctacgaggcccgggagcggcacgtggcggagcggctgctcatgcacctggaggagatgcaacataccatctctaccgacgaagaaaagagtgctgccgtggtcaacgccattggcctgtacatgcgccaccttggggtgcggaccaagagtggagacaagaagtcggggaggaacttcttccggaaaaaggtgatggggaaccggcggtcggacgagcctgccaagaccaagaaggggctgagcagcatcctggatgccgcccgctggaaccggggagagccccaggttccagattttcgacacctcaaagcagaggttgatgccgagaagccaggtgctacagaccggaagggaggcgtggggatgccctctcgggaccggaatatcggggctcctgggcaggacacccctggagtctctctgcaccctctgtccctggacagcccagaccgggaaccaggtgctgacgcccccctggagctgggggactcatccccgcagggcccaatgagcctggagtccttggcgcccccagagagtaccgacgagggggccgaaaccgagagccccgagcctggagatgagggggagccggggcggtcgggactggagcttgaaccagaagagcctcccggctggcgggaactcgtccccccagacaccctgcacagcctgcccaagagccaggtgaagcggcaggaggtcatcagcgagctgctggtgacagaggcggcccacgtgcgcatgctgcgggtgctgcacgacctcttcttccagcccatggcagaatgcctgttcttccccttggaggagctgcagaacatcttccccagcctggacgagctcatcgaggtgcattccctgttcctcgatcgcctgatgaagcggaggcaggagagtggctacctcatcgaggagatcggagacgtgctgctggcccggtttgatggtgctgagggctcctggttccagaaaatctcctcccgcttctgcagccgccagtcatttgccttagagcagctcaaagccaagcaacgcaaggaccctcggttctgtgccttcgtgcaggaagctgagagccgcccgcggtgccgccgcctgcagctgaaggacatgatccccacggagatgcagcggctgaccaagtaccccctgctcctgcagagcatcgggcagaacacagaagagcccacagaacgggagaaagtggagctggcagccgagtgctgccgggaaattctacaccacgtcaaccaagccgtgcgtgacatggaggacctgctgaggctcaaggactatcagcggcgcctggacttgtcccaccttcggcagagcagcgaccctatgctgagcgagttcaagaacctggacatcaccaagaagaaattggtccacgagggcccactgacgtggcgggtgactaaggacaaggcagtggaggtgcatgtgctgctgctggacgacctgctgctgctgctccagcgccaggacgagcggctgctgctcaagtcccatagccggacactgacgcccacgcccgatggcaagaccatgctgcggcccgtgctgcggctcacctccgccatgacccgcgaggtggccaccgatcacaaagccttctacgtcctttttacctgggaccaggaggcccagatatacgagctggtggcacagactgtgtcggagcggaaaaactggtgtgctctcatcactgagactgccggatccctgaaagtccctgcccctgcctctcgccctaagccccggcccagcccgagcagcacccgagaacccctcctcagcagctctgagaacggcaatggtggccgagagacgtctccagctgatgcccggaccgagagaatcctcagtgacctcctgcccttctgcagaccaggccccgagggccagctcgctgccacggcccttcggaaagtgctgtccctgaagcagcttctgtttccggcggaggaagacaatggggcggggcctcctcgagatggggatggggtcccagggggcggccccctgagcccagcacggacccaggaaatccaggagaacctgctcagcttggaggagaccatgaagcagctggaggagttggaggaggaattttgccgcctgagacccctcctgtctcagcttggggggaactctgtcccccagcctggctgcacttgaggttcccgcccaggaaggccttttgcaagaaggagaggaatgggggagaggacgtgagggaccacccccacccacacagctgccgcagcatctcacaccccgagggcctgaggagagggagctgtgggccacgcctgggaggggcccagctggggttactggccccgcatgagcctcggccatctctccctcctgccctctgcttgggggactcagggctccattctggagggcaccacggtgacccgggccatctcagtattgcctgtgggggccacccctccacccccacccccaagtgccttcgctctgtttttataccctgaattggaggtttattttttaatatatattatct

SEQ ID NO: 260890 - DNA, 3206 bp, Artificial Sequence
  derived and/or modified sequence
agagccaggaagcgggagccgggacccagggcccgggatcgccgagcccgacctcgggcgccccgccggtcacctccgcgcggacaccagccctgcagagcccagggagatggaagacttcgcccgaggggcggcctccccaggcccctcccggcctggcctggttcccgtcagcatcatcggggctgaggatgaggattttgagaacgagctggagacaaactcagaagagcaaaacagccagttccagagcctggagcaggtgaagcggcgcccagcccacctcatggccctcctgcagcacgtggccctgcagtttgagccaggacccctgctttgctgtctgcatgccgacatgctgggctcactgggccccaaggaggccaagaaggccttcctggacttctaccacagcttcctggagaagacagcggttctccgggtgccggtccctcccaacgtcgcctttgaacttgaccgcactagggctgacctcatctccgaggatgtccagcggcggttcgtgcaggaggtggtgcaaagccagcaggtagccgtgggccggcagctggaggacttccgttccaagcggctcatgggcatgacgccctgggagcaggagctggcccagctggaggcttgggttgggcgggaccgagccagctacgaggcccgggagcggcacgtggcggagcggctgctcatgcacctggaggagatgcaacataccatctctaccgacgaagaaaagagtgctgccgtggtcaacgccattggcctgtacatgcgccaccttggggtgcggaccaagagtggagacaagaagtcggggaggaacttcttccggaaaaaggtgatggggaaccggcggtcggacgagcctgccaagaccaagaaggggctgagcagcatcctggatgccgcccgctggaaccggggagagccccaggttccagattttcgacacctcaaagcagaggttgatgccgagaagccaggtgctacagaccggaagggaggcgtggggatgccctctcgggaccggaatatcggggctcctgggcaggacacccctggagtctctctgcaccctctgtccctggacagcccagaccgggaaccaggtgctgacgcccccctggagctgggggactcatccccgcagggcccaatgagcctggagtccttggcgcccccagagagtaccgacgagggggccgaaaccgagagccccgagcctggagatgagggggagccggggcggtcgggactggagcttgaaccagaagagcctcccggctggcgggaactcgtccccccagacaccctgcacagcctgcccaagagccaggtgaagcggcaggaggtcatcagcgagctgctggtgacagaggcggcccacgtgcgcatgctgcgggtgctgcacgacctcttcttccagcccatggcagaatgcctgttcttccccttggaggagctgcagaacatcttccccagcctggacgagctcatcgaggtgcattccctgttcctcgatcgcctgatgaagcggaggcaggagagtggctacctcatcgaggagatcggagacgtgctgctggcccggtttgatggtgctgagggctcctggttccagaaaatctcctcccgcttctgcagccgccagtcatttgccttagagcagctcaaagccaagcaacgcaaggaccctcggttctgtgccttcgtgcaggaagctgagagccgcccgcggtgccgccgcctgcagctgaaggacatgatccccacggagatgcagcggctgaccaagtaccccctgctcctgcagagcatcgggcagaacacagaagagcccacagaacgggagaaagtggagctggcagccgagtgctgccgggaaattctacaccacgtcaaccaagccgtgcgtgacatggaggacctgctgaggctcaaggactatcagcggcgcctggacttgtcccaccttcggcagagcagcgaccctatgctgagcgagttcaagaacctggacatcaccaagaagaaattggtccacgagggcccactgacgtggcgggtgactaaggacaaggcagtggaggtgcatgtgctgctgctggacgacctgctgctgctgctccagcgccaggacgagcggctgctgctcaagtcccatagccggacactgacgcccacgcccgatggcaagaccatgctgcggcccgtgctgcggctcacctccgccatgacccgcgaggtggccaccgatcacaaagccttctacgtcctttttacctgggaccaggaggcccagatatacgagctggtggcacagactgtgtcggagcggaaaaactggtgtgctctcatcactgagactgccggatccctgaaagtccctgcccctgcctctcgccctaagccccggcccagcccgagcagcacccgagaacccctcctcagcagctctgagaacggcaatggtggccgagagacgtctccagctgatgcccggaccgagagaatcctcagtgacctcctgcccttctgcagaccaggccccgagggccagctcgctgccacggcccttcggaaagtgctgtccctgaagcagcttctgtttccggcggaggaagacaatggggcggggcctcctcgagatggggatggggtcccagggggcggccccctgagcccagcacggacccaggaaatccaggagaacctgctcagcttggaggagaccatgaagcagctggaggagttggaggaggaattttgccgcctgagacccctcctgtctcagcttggggggaactctgtcccccagcctggctgcacttgaggttcccgcccaggaaggccttttgcaagaaggagaggaatgggggagaggacgtgagggaccacccccacccacacagctgccgcagcatctcacaccccgagggcctgaggagagggagctgtgggccacgcctgggaggggcccagctggggttactggccccgcatgagcctcggccatctctccctcctgccctctgcttgggggactcagggctccattctggagggcaccacggtgacccgggccatctcagtattgcctgtgggggccacccctccacccccacccccaagtgccttcgctctgtttttataccctgaattggaggtttattttttaatatatattatct

SEQ ID NO: 260891 - DNA, 2784 bp, Artificial Sequence
  derived and/or modified sequence
atggccagcctgagcacctggagcagccccgccgagcccagagagatggaggacttcgccagaggcgccgccagccccggccccagcagacccggcctggtgcccgtgagcatcatcggcgccgaggacgaggacttcgagaacgagctggagaccaacagcgaggagcagaacagccagttccagagcctggagcaggtgaagagaagacccgcccacctgatggccctgctgcagcacgtggccctgcagttcgagcccggccccctgctgtgctgcctgcacgccgacatgctgggcagcctgggccccaaggaggccaagaaggccttcctggacttctaccacagcttcctggagaagaccgccgtgctgagagtgcccgtgccccccaacgtggccttcgagctggacagaaccagagccgacctgatcagcgaggacgtgcagagaagattcgtgcaggaggtggtgcagagccagcaggtggccgtgggcagacagctggaggacttcagaagcaagagactgatgggcatgaccccctgggagcaggagctggcccagctggaggcctgggtgggcagagacagagccagctacgaggccagagagagacacgtggccgagagactgctgatgcacctggaggagatgcagcacaccatcagcaccgacgaggagaagagcgccgccgtggtgaacgccatcggcctgtacatgagacacctgggcgtgagaaccaagagcggcgacaagaagagcggcagaaacttcttcagaaagaaggtgatgggcaacagaagaagcgacgagcccgccaagaccaagaagggcctgagcagcatcctggacgccgccagatggaacagaggcgagccccaggtgcccgacttcagacacctgaaggccgaggtggacgccgagaagcccggcgccaccgacagaaagggcggcgtgggcatgcccagcagagacagaaacatcggcgcccccggccaggacacccccggcgtgagcctgcaccccctgagcctggacagccccgacagagagcccggcgccgacgcccccctggagctgggcgacagcagcccccagggccccatgagcctggagagcctggccccccccgagagcaccgacgagggcgccgagaccgagagccccgagcccggcgacgagggcgagcccggcagaagcggcctggagctggagcccgaggagccccccggctggagagagctggtgccccccgacaccctgcacagcctgcccaagagccaggtgaagagacaggaggtgatcagcgagctgctggtgaccgaggccgcccacgtgagaatgctgagagtgctgcacgacctgttcttccagcccatggccgagtgcctgttcttccccctggaggagctgcagaacatcttccccagcctggacgagctgatcgaggtgcacagcctgttcctggacagactgatgaagagaagacaggagagcggctacctgatcgaggagatcggcgacgtgctgctggccagattcgacggcgccgagggcagctggttccagaagatcagcagcagattctgcagcagacagagcttcgccctggagcagctgaaggccaagcagagaaaggaccccagattctgcgccttcgtgcaggaggccgagagcagacccagatgcagaagactgcagctgaaggacatgatccccaccgagatgcagagactgaccaagtaccccctgctgctgcagagcatcggccagaacaccgaggagcccaccgagagagagaaggtggagctggccgccgagtgctgcagagagatcctgcaccacgtgaaccaggccgtgagagacatggaggacctgctgagactgaaggactaccagagaagactggacctgagccacctgagacagagcagcgaccccatgctgagcgagttcaagaacctggacatcaccaagaagaagctggtgcacgagggccccctgacctggagagtgaccaaggacaaggccgtggaggtgcacgtgctgctgctggacgacctgctgctgctgctgcagagacaggacgagagactgctgctgaagagccacagcagaaccctgacccccacccccgacggcaagaccatgctgagacccgtgctgagactgaccagcgccatgaccagagaggtggccaccgaccacaaggccttctacgtgctgttcacctgggaccaggaggcccagatctacgagctggtggcccagaccgtgagcgagagaaagaactggtgcgccctgatcaccgagaccgccggcagcctgaaggtgcccgcccccgccagcagacccaagcccagacccagccccagcagcaccagagagcccctgctgagcagcagcgagaacggcaacggcggcagagagaccagccccgccgacgccagaaccgagagaatcctgagcgacctgctgcccttctgcagacccggccccgagggccagctggccgccaccgccctgagaaaggtgctgagcctgaagcagctgctgttccccgccgaggaggacaacggcgccggcccccccagagacggcgacggcgtgcccggcggcggccccctgagccccgccagaacccaggagatccaggagaacctgctgagcctggaggagaccatgaagcagctggaggagctggaggaggagttctgcagactgagacccctgctgagccagctgggcggcaacagcgtgccccagcccggctgcacctag

SEQ ID NO: 260892 - DNA, 2739 bp, Artificial Sequence
  derived and/or modified sequence
atggaggacttcgccagaggcgccgccagccccggccccagcagacccggcctggtgcccgtgagcatcatcggcgccgaggacgaggacttcgagaacgagctggagaccaacagcgaggagcagaacagccagttccagagcctggagcaggtgaagagaagacccgcccacctgatggccctgctgcagcacgtggccctgcagttcgagcccggccccctgctgtgctgcctgcacgccgacatgctgggcagcctgggccccaaggaggccaagaaggccttcctggacttctaccacagcttcctggagaagaccgccgtgctgagagtgcccgtgccccccaacgtggccttcgagctggacagaaccagagccgacctgatcagcgaggacgtgcagagaagattcgtgcaggaggtggtgcagagccagcaggtggccgtgggcagacagctggaggacttcagaagcaagagactgatgggcatgaccccctgggagcaggagctggcccagctggaggcctgggtgggcagagacagagccagctacgaggccagagagagacacgtggccgagagactgctgatgcacctggaggagatgcagcacaccatcagcaccgacgaggagaagagcgccgccgtggtgaacgccatcggcctgtacatgagacacctgggcgtgagaaccaagagcggcgacaagaagagcggcagaaacttcttcagaaagaaggtgatgggcaacagaagaagcgacgagcccgccaagaccaagaagggcctgagcagcatcctggacgccgccagatggaacagaggcgagccccaggtgcccgacttcagacacctgaaggccgaggtggacgccgagaagcccggcgccaccgacagaaagggcggcgtgggcatgcccagcagagacagaaacatcggcgcccccggccaggacacccccggcgtgagcctgcaccccctgagcctggacagccccgacagagagcccggcgccgacgcccccctggagctgggcgacagcagcccccagggccccatgagcctggagagcctggccccccccgagagcaccgacgagggcgccgagaccgagagccccgagcccggcgacgagggcgagcccggcagaagcggcctggagctggagcccgaggagccccccggctggagagagctggtgccccccgacaccctgcacagcctgcccaagagccaggtgaagagacaggaggtgatcagcgagctgctggtgaccgaggccgcccacgtgagaatgctgagagtgctgcacgacctgttcttccagcccatggccgagtgcctgttcttccccctggaggagctgcagaacatcttccccagcctggacgagctgatcgaggtgcacagcctgttcctggacagactgatgaagagaagacaggagagcggctacctgatcgaggagatcggcgacgtgctgctggccagattcgacggcgccgagggcagctggttccagaagatcagcagcagattctgcagcagacagagcttcgccctggagcagctgaaggccaagcagagaaaggaccccagattctgcgccttcgtgcaggaggccgagagcagacccagatgcagaagactgcagctgaaggacatgatccccaccgagatgcagagactgaccaagtaccccctgctgctgcagagcatcggccagaacaccgaggagcccaccgagagagagaaggtggagctggccgccgagtgctgcagagagatcctgcaccacgtgaaccaggccgtgagagacatggaggacctgctgagactgaaggactaccagagaagactggacctgagccacctgagacagagcagcgaccccatgctgagcgagttcaagaacctggacatcaccaagaagaagctggtgcacgagggccccctgacctggagagtgaccaaggacaaggccgtggaggtgcacgtgctgctgctggacgacctgctgctgctgctgcagagacaggacgagagactgctgctgaagagccacagcagaaccctgacccccacccccgacggcaagaccatgctgagacccgtgctgagactgaccagcgccatgaccagagaggtggccaccgaccacaaggccttctacgtgctgttcacctgggaccaggaggcccagatctacgagctggtggcccagaccgtgagcgagagaaagaactggtgcgccctgatcaccgagaccgccggcagcctgaaggtgcccgcccccgccagcagacccaagcccagacccagccccagcagcaccagagagcccctgctgagcagcagcgagaacggcaacggcggcagagagaccagccccgccgacgccagaaccgagagaatcctgagcgacctgctgcccttctgcagacccggccccgagggccagctggccgccaccgccctgagaaaggtgctgagcctgaagcagctgctgttccccgccgaggaggacaacggcgccggcccccccagagacggcgacggcgtgcccggcggcggccccctgagccccgccagaacccaggagatccaggagaacctgctgagcctggaggagaccatgaagcagctggaggagctggaggaggagttctgcagactgagacccctgctgagccagctgggcggcaacagcgtgccccagcccggctgcacctag

SEQ ID NO: 260893 - protein, 53 aa, Artificial Sequence
  derived and/or modified sequence
MVQSCSAYGCKNRYDKDKPVSFHKKKIFWSHRNSFPHLLYRLLFPRLMLLLDY

SEQ ID NO: 260894 - DNA, 162 bp, Artificial Sequence
  derived and/or modified sequence
atggtgcagagctgcagcgcctacggctgcaagaacagatacgacaaggacaagcccgtgagcttccacaagaagaagatcttctggagccacagaaacagcttcccccacctgctgtacagactgctgttccccagactgatgctgctgctggactactag

SEQ ID NO: 260895 - DNA, 162 bp, Artificial Sequence
  derived and/or modified sequence
atggtccaaagttgttctgcctatggctgcaaaaaccgctacgacaaggataaacccgtctccttccataagaagaaaattttttggtctcaccgcaactctttcccccacctcctttacagactgctgtttccgaggctgatgctgcttttggactactag

SEQ ID NO: 260896 - DNA, 162 bp, Artificial Sequence
  derived and/or modified sequence
atggtgcagagctgcagcgcctacggctgcaagaacagatatgacaaggacaagcctgtgtccttccacaagaagaagatcttctggagccacaggaacagcttcccccacctgctgtaccgcctgctcttcccccggctgatgctgctgctggactactag

SEQ ID NO: 260897 - DNA, 162 bp, Artificial Sequence
  derived and/or modified sequence
atggtgcagagctgcagcgcctacggctgcaagaaccggtacgacaaggataaaccagtatcctttcacaagaaaaaaatcttctggtcgcaccgtaattcatttccccatctcttgtacaggttgctgttcccacggttaatgctgctgctcgattactag

SEQ ID NO: 260898 - DNA, 162 bp, Artificial Sequence
  derived and/or modified sequence
atggtgcagtcttgttccgcgtacggctgcaaaaaccgctacgacaaggataaacccgtcagtttccataagaagaagatcttctggtcccaccgtaatagtttccctcacctcctctacagacttctgtttcccagactcatgctgctcctcgactactag

SEQ ID NO: 260899 - protein, 394 aa, Artificial Sequence
  derived and/or modified sequence
MGEKPGTRVFKKSSPNCKLTVYLGKRDFVDHLDKVDPVVFVTLTCAFRYGREDLDVLGLSFRKDLFIATYQAFPPVPNPPRPPTRLQDRLLRKLGQHAHPFFFTIPQNLPCSVTLQPGPEDTGKACGVDFEIRAFCAKSLEEKSHKRNSVRLVIRKVQFAPEKPGPQPSAETTRHFLMSDRSLHLEASLDKELYYHGEPLNVNVHVTNNSTKTVKKIKVSVRQYADICLFSTAQYKCPVAQLEQDDQVSPSSTFCKVYTITPLLSDNREKRGLALDGKLKHEDTNLASSTIVKEGANKEVLGILVSYRVKVKLVVSRGGDVSVELPFVLMHPKPHDHIPLPRPQSAAPETDVPVDTNLIEFDTNYATDDDIVFEDFARLRLKGMKDDDYDDQLC

SEQ ID NO: 260900 - DNA, 1185 bp, Artificial Sequence
  derived and/or modified sequence
atgggggaaaaacccgggaccagagtgtttaaaaagtcaagtcccaactgcaaactcacagtttacctgggcaagcgggacttcgtggaccatttagataaagttgacccagtcgtctttgtaactctgacctgcgcttttcgttatggaagggaagacttagacgtcctaggactttcttttaggaaggatctttttatagctacttaccaggctttccctccggtgcctaatccacctagacctcctacgcgcctacaggacaggctgctgcggaaattgggacagcacgctcaccccttcttcttcactataccacagaacctgccctgctcagtgacgcttcagcccgggccagaagatacgggtaaagcttgtggcgtggacttcgaaatacgtgcgttctgcgctaaaagcctggaggaaaaatcacacaagcgaaatagcgtgcggctagttatcaggaaagtgcagttcgctccggaaaagcccgggccccaaccctcagctgagacgactaggcacttcctaatgagtgaccgcagcctacacctggaggcaagcctggacaaagagctctactaccacggggaaccactcaacgtgaatgtccacgtcactaacaactcaaccaagacagtgaagaagattaaagtcagcgtgagacagtatgcggacatctgcctcttttccacggcccaatataaatgccctgtggctcagctagaacaagatgaccaggtctctccatcctccactttttgcaaagtctataccataacacctctgttgtctgataatagggaaaagcgcggcctggccttagacggaaagcttaaacatgaagacactaatctcgcttcatccaccatcgtgaaagagggtgctaacaaggaggtgctcgggatcttagtgtcttatagggtgaaggtgaagttagttgtgagcaggggtggagatgtgagcgttgagctgcctttcgtgttgatgcatcccaaaccccatgaccacatccctctgcccaggcctcaatctgccgcgccagaaaccgatgttccagttgataccaatttaatagagtttgacacaaactatgctacagacgatgacatcgtattcgaagatttcgccagactgcgcctgaagggcatgaaggatgatgactatgatgaccagctatgctag

SEQ ID NO: 260901 - DNA, 1185 bp, Artificial Sequence
  derived and/or modified sequence
atgggagagaagccaggcaccagggtcttcaagaagagcagccccaactgcaagctgactgtgtacctgggcaagagggactttgtggaccacctggacaaggtggaccctgtggtgtttgtgaccctgacctgtgccttccgctatggccgggaggacctggatgtgctgggcctgtccttcaggaaggacctcttcatcgccacctaccaggccttcccccctgtgcccaaccccccccggccccccacccggctgcaggaccggctgctgaggaagctgggccagcacgcccaccccttcttcttcaccatcccccagaacctgccctgcagcgtgaccctgcagcccggccctgaggacaccgggaaggcctgtggggtggactttgagatccgggccttctgtgccaagagcctggaggagaagagccacaagagaaattctgtgcggctggtgatcaggaaggtgcagtttgcccctgagaagccaggcccccagcccagcgctgagaccaccaggcacttcctgatgtctgacaggagcctgcacctggaggccagcctggacaaggagctgtactaccacggggagcccctgaatgtgaatgtgcacgtgaccaacaacagcaccaagacagtgaagaagatcaaggtgtctgtgcggcagtatgctgacatctgcctcttcagcacagcccagtacaagtgccctgtggcccagctggagcaggatgaccaggtgagccccagcagcaccttctgcaaggtgtacaccatcacccccctgctgagtgacaaccgggagaagaggggcctggccctggatggcaagctgaagcatgaggacaccaacctggccagcagcaccatcgtgaaggagggcgccaacaaggaggtgctgggcatcctggtgtcctacagagtgaaggtgaagctggtggtgtccagaggaggagatgtgtctgtggagctgccctttgtgctgatgcaccccaagccccatgaccacatccccctgccccggccccagagcgctgcccctgagacagatgtgcctgtggacaccaacctgattgaatttgacaccaactatgccacagatgatgacatcgtgtttgaggactttgcccggctgcggctgaagggcatgaaggatgatgattatgatgaccagctgtgctag

SEQ ID NO: 260902 - DNA, 1185 bp, Artificial Sequence
  derived and/or modified sequence
atgggcgagaagcccggcacccgggtgttcaagaagagcagccccaactgtaagctcacagtatatctcggcaagcgagacttcgtagatcatttagataaagttgatcctgttgtcttcgtcacactgacttgcgcgttcagatacggacgggaagacttggatgtgctgggactcagctttcgaaaggacctctttatagcaacttaccaggcctttccgcccgtgccgaatcctcccagaccccctacacgactgcaggacaggttgctgaggaagctcggccaacacgcacacccgttttttttcaccattccccagaacttgccttgtagcgttaccctccagccagggcccgaggacaccggaaaggcgtgcggcgttgactttgagatccgcgcgttctgtgccaagagcctagaggagaagtcacataaacgcaactccgtgcgactggtgatcagaaaagtgcagtttgctcctgagaagccagggccccagccttctgccgaaaccactcgtcacttcttaatgtcagaccgttccctccacctagaggccagcctggacaaagagttgtactaccacggagagcctttgaatgtcaacgtgcatgtgactaacaacagtactaagactgtgaagaaaataaaagttagtgtgcggcagtacgctgacatttgtcttttctcaactgcccagtacaaatgtccagtcgcccaactcgagcaggacgatcaggtgtctccatcctcaactttttgcaaagtctacactataacccctttgcttagcgacaatcgagagaagaggggcctggccttggacggtaagctcaagcacgaggacaccaatcttgcctcgagcacaattgttaaagagggagccaataaagaggtcctcggtatcctggtgagctatagagtcaaagtgaaactggtcgtgtctcgcggcggcgacgtgtccgtggaactgcccttcgtactcatgcaccccaagcctcatgatcacatacctttgcctcgaccccagtcggcggcacccgagacagacgtgcctgttgacactaacctcattgagtttgacactaactatgccacagacgacgatatagtttttgaggattttgcgagactgaggctgaaagggatgaaagatgacgattacgacgatcagctgtgttag

SEQ ID NO: 260903 - DNA, 1185 bp, Artificial Sequence
  derived and/or modified sequence
atgggcgagaaacccggaaccagggtttttaaaaagtcctctcccaactgtaaactaaccgtgtatctcggcaaaagagacttcgtcgatcatctggacaaagtggaccctgttgttttcgtgacactgacatgtgcttttaggtatggaagagaggacttagatgtactaggactctcttttaggaaagacctgttcattgcaacctatcaggctttccccccagtgccaaatcctccgcgacctcctactagactgcaggaccgtctgctgaggaaactggggcagcatgcccatccttttttcttcacaattccccagaacctcccctgttccgtcacgttgcagccaggacctgaagataccgggaaagcctgcggcgtcgacttcgaaattcgcgcattttgtgccaaaagtctagaggagaagtctcataagcgcaactccgttagactggtgattaggaaggtgcaattcgcgccagaaaaacctggtccacaaccaagcgccgaaacaacgaggcactttctgatgtctgatcgctctctgcatctggaggcttcccttgacaaggaactctattatcatggcgagcccctgaatgtgaacgtccatgtgaccaataacagcactaagactgtgaagaagattaaggtgtcggtacgtcagtatgccgacatctgcctgttctccacagcacagtacaagtgtccagtcgcgcaactggaacaagacgaccaagtgagtccctccagtactttctgcaaagtttataccattacaccactgctatccgataaccgtgagaaacggggtcttgccctagatggcaagctgaagcacgaggacacaaatcttgcatcatcaaccatagtgaaggaaggagccaataaggaagtgcttggcatactggtctcttatagggtaaaggtgaaactcgtggtgtcgagagggggtgatgtttctgttgagctgccgtttgtgctcatgcaccccaaaccccatgaccatatccccctacccagaccccagtcagcagcgcctgagacagatgtaccagtggatacaaacttgattgaatttgataccaattacgccactgatgatgatatcgtattcgaggactttgcccgacttagactaaagggaatgaaggatgatgattacgacgaccaactgtgttag

SEQ ID NO: 260904 - DNA, 1873 bp, Artificial Sequence
  derived and/or modified sequence
ccccgcgtgtctgctaggagagggcgggcagcgccgcggcgcgcgcgatccggctgacgcatctggccccggttccccaagaccagagcggggccgggagggagggggaagaggcgagagcgcggagggcgcgcgtgcgcattggcgcggggaggagcagggatcttggcagcgggcgaggaggctgcgagcgagccgcgaaccgagcgggcggcgggcgcgcgcaccatgggggagaaacccgggaccagggtcttcaagaagtcgagccctaactgcaagctcaccgtgtacttgggcaagcgggacttcgtagatcacctggacaaagtggaccctgtagtgtttgtgaccctcacctgcgccttccgctatggccgtgaagacctggatgtgctgggcttgtccttccgcaaagacctgttcatcgccacctaccaggccttccccccggtgcccaacccaccccggccccccacccgcctgcaggaccggctgctgaggaagctgggccagcatgcccaccccttcttcttcaccataccccagaatcttccatgctccgtcacactgcagccaggcccagaggatacaggaaaggcctgcggcgtagactttgagattcgagccttctgtgctaaatcactagaagagaaaagccacaaaaggaactctgtgcggctggtgatccgaaaggtgcagttcgccccggagaaacccggcccccagccttcagccgaaaccacacgccacttcctcatgtctgaccggtccctgcacctcgaggcttccctggacaaggagctgtactaccatggggagcccctcaatgtaaatgtccacgtcaccaacaactccaccaagaccgtcaagaagatcaaagtctctgtgagacagtacgccgacatctgcctcttcagcaccgcccagtacaagtgtcctgtggctcaactcgaacaagatgaccaggtatctcccagctccacattctgtaaggtgtacaccataaccccactgctcagcgacaaccgggagaagcggggtctcgccctggatgggaaactcaagcacgaggacaccaacctggcttccagcaccatcgtgaaggagggtgccaacaaggaggtgctgggaatcctggtgtcctacagggtcaaggtgaagctggtggtgtctcgaggcggggatgtctctgtggagctgccttttgttcttatgcaccccaagccccacgaccacatccccctccccagaccccagtcagccgctccggagacagatgtccctgtggacaccaacctcattgaatttgataccaactatgccacagatgatgacattgtgtttgaggactttgcccggcttcggctgaaggggatgaaggatgacgactatgatgatcaactctgctaggaagcggggtgggaagaagggaggggatggggttgggagaggtgagggcaggattaagatccccactgtcaatgggggattgtcccagcccctcttcccttcccctcacctggaagcttcttcaaccaatcccttcacactctctcccccatccccccaagatacacactggaccctctcttgctgaatgtgggcattaattttttgactgcagctctgcttctccagccccgccgtgggtggcaagctgtgttcatacctaaattttctggaaggggacagtgaaaagaggagtgacaggagggaaagggggagacaaaactcctactctcaacctcacaccaacacctcccattatcactctctctgcccccattccttcaagaggagaccctttggggacaaggccgtttctttgtttctgagcataaagaagaaaataaatcttttactaagcatg

SEQ ID NO: 260905 - DNA, 1185 bp, Artificial Sequence
  derived and/or modified sequence
atgggcgagaagcccggcaccagagtgttcaagaagagcagccccaactgcaagctgaccgtgtacctgggcaagagagacttcgtggaccacctggacaaggtggaccccgtggtgttcgtgaccctgacctgcgccttcagatacggcagagaggacctggacgtgctgggcctgagcttcagaaaggacctgttcatcgccacctaccaggccttcccccccgtgcccaacccccccagaccccccaccagactgcaggacagactgctgagaaagctgggccagcacgcccaccccttcttcttcaccatcccccagaacctgccctgcagcgtgaccctgcagcccggccccgaggacaccggcaaggcctgcggcgtggacttcgagatcagagccttctgcgccaagagcctggaggagaagagccacaagagaaacagcgtgagactggtgatcagaaaggtgcagttcgcccccgagaagcccggcccccagcccagcgccgagaccaccagacacttcctgatgagcgacagaagcctgcacctggaggccagcctggacaaggagctgtactaccacggcgagcccctgaacgtgaacgtgcacgtgaccaacaacagcaccaagaccgtgaagaagatcaaggtgagcgtgagacagtacgccgacatctgcctgttcagcaccgcccagtacaagtgccccgtggcccagctggagcaggacgaccaggtgagccccagcagcaccttctgcaaggtgtacaccatcacccccctgctgagcgacaacagagagaagagaggcctggccctggacggcaagctgaagcacgaggacaccaacctggccagcagcaccatcgtgaaggagggcgccaacaaggaggtgctgggcatcctggtgagctacagagtgaaggtgaagctggtggtgagcagaggcggcgacgtgagcgtggagctgcccttcgtgctgatgcaccccaagccccacgaccacatccccctgcccagaccccagagcgccgcccccgagaccgacgtgcccgtggacaccaacctgatcgagttcgacaccaactacgccaccgacgacgacatcgtgttcgaggacttcgccagactgagactgaagggcatgaaggacgacgactacgacgaccagctgtgctag

SEQ ID NO: 260906 - protein, 268 aa, Artificial Sequence
  derived and/or modified sequence
MGRLLALVVGAALVSSACGGCVEVDSETEAVYGMTFKILCISCKRRSETNAETFTEWTFRQKGTEEFVKILRYENEVLQLEEDERFEGRVVWNGSRGTKDLQDLSIFITNVTYNHSGDYECHVYRLLFFENYEHNTSVVKKIHIEVVDKGESGAACPFTVTHRRARWRDRWQAVDRTGWLCAWPANRPQQRAEGEGSSPSCPLQLWPLFLSSPRRGQSMPVPHRRSGYRTQLCHLCCMTSGRCLLSLSQRVVLGLPGIIIRCVSRGVV

SEQ ID NO: 260907 - DNA, 1112 bp, Artificial Sequence
  derived and/or modified sequence
ccggtcccagagccgcagctgctgcgcccgcgcgctcccggggacattctaaccgccgccaggtcccgccgcctctcgccccgctattaataccggcggcccgggaggggggcgcagcacgcgccgcgcagccatggggaggctgctggccttagtggtcggcgcggcactggtgtcctcagcctgcgggggctgcgtggaggtggactcggagaccgaggccgtgtatgggatgaccttcaaaattctttgcatctcctgcaagcgccgcagcgagaccaacgctgagaccttcaccgagtggaccttccgccagaagggcactgaggagtttgtcaagatcctgcgctatgagaatgaggtgttgcagctggaggaggatgagcgcttcgagggccgcgtggtgtggaatggcagccggggcaccaaagacctgcaggatctgtctatcttcatcaccaatgtcacctacaaccactcgggcgactacgagtgccacgtctaccgcctgctcttcttcgaaaactacgagcacaacaccagcgtcgtcaagaagatccacattgaggtagtggacaaaggtgagtcgggtgctgcctgcccctttaccgtcacccaccggagagccagatggagggacagatggcaggcagtggacaggacaggctggctctgtgcctggccagccaaccgcccacagcagcgggctgagggggaggggagcagcccctcctgcccactccagctctggcctctgtttctctccagcccacggagaggtcaaagcatgcctgtcccccacagacgctccgggtacagaacccagctctgtcacctgtgctgtatgacctctggcaggtgccttctgtctctgagccaaagggttgtcctgggcttgcccgggataataatccgatgtgtttctcggggtgtggtttgagccattcttccatcatggggttcatgaggattgagcagctgcaggcacacgcctggcttccagcagagccttgcaggtggtggcgagggtggcggttcttactgttcgagtagctcagccctgctgccctctgtggtgatgaggcaagagagcgtgccacctagagcagagt

SEQ ID NO: 260908 - DNA, 807 bp, Artificial Sequence
  derived and/or modified sequence
atgggcaggctgctggcactagtcgtcggtgctgctttagtctccagcgcctgcggcggctgcgtcgaagtggattcagaaacagaagcagtgtatggcatgacttttaagattctgtgtatcagttgcaaacgaagaagcgagaccaacgctgagaccttcactgagtggacttttcgtcagaaaggcactgaagaatttgtgaaaatcctgaggtacgaaaatgaggtcctccagctggaagaagacgaaaggtttgagggaagagtggtatggaacgggagccgtggaaccaaggatctccaggacttatcaattttcattacaaatgtgacctataaccactccggggactatgagtgccacgtatataggctgctttttttcgagaattacgaacataatacctccgttgtgaaaaaaatccacattgaggtcgttgacaagggtgaatcgggcgcagcttgtcccttcactgtgacccaccgcagggcccggtggcgagatcgctggcaggccgtagaccgcacagggtggctgtgcgcctggccagccaacagaccacaacagagagccgagggcgagggctcctccccctcctgcccgctgcaactttggccgttatttctgtcttcacctcgcaggggacagagcatgccagtaccccatcggcgctctgggtatcgcacacagttgtgtcatctgtgctgcatgacctcaggcagatgcttgctctctctcagccagcgcgttgtgttaggtctgcccggtattatcattcgatgtgtgtctcgcggcgttgtgtag

SEQ ID NO: 260909 - DNA, 807 bp, Artificial Sequence
  derived and/or modified sequence
atgggccgcctgctggccctggtggtgggcgccgccctggtgagcagcgcctgtggcggctgtgtggaggtggacagcgagacagaggccgtgtatggcatgaccttcaagatcctgtgcatcagctgcaagagaagaagtgagaccaatgctgagaccttcacagagtggaccttccggcagaagggcacagaggagtttgtgaagatcctgcgctatgaaaatgaggtgctgcagctggaggaggatgaaagatttgagggccgggtggtgtggaatggcagccggggcaccaaggacctgcaggacctgagcatcttcatcaccaacgtgacctacaaccacagcggggactatgagtgccacgtgtaccgcctgctcttctttgagaactatgagcacaacacctctgtggtgaagaagatccacatcgaggtggtggacaagggggagagcggggccgcctgccccttcaccgtgacccacagaagagcccgctggagggaccgctggcaggccgtggacagaacaggctggctgtgtgcctggccagccaaccggccccagcagagagctgagggggagggcagcagccccagctgccccctgcagctgtggcccctcttcctgagcagcccccggcggggccagagcatgcctgtgccccaccggcgcagcggctaccgcacccagctgtgccacctgtgctgcatgaccagcggccgctgcctgctgagcctgagccagagggtggtgctgggcctgcccggcatcatcatccgctgtgtgtcccggggcgtggtgtag

SEQ ID NO: 260910 - DNA, 807 bp, Artificial Sequence
  derived and/or modified sequence
atgggccggctgctggccctggtggtgggcgccgccctggtgagctccgcgtgcggcggatgcgttgaggtcgacagcgaaacggaggctgtgtatgggatgacatttaagatcctgtgcataagttgtaaaaggagatccgagacaaatgccgaaactttcaccgagtggacctttaggcaaaagggaaccgaagaatttgtgaagattctcaggtacgaaaatgaagtgttgcagcttgaggaggacgagaggttcgaagggagggtggtctggaacgggtctcgaggaactaaggatctgcaggatctctccatttttatcaccaatgttacgtacaaccattcgggggactacgagtgccatgtatacaggctcctgttctttgagaactatgagcacaacactagcgttgtgaaaaagatccatattgaagtagtcgataagggagaatctggggctgcatgcccctttacagtgacccaccgccgtgcccgctggagggacagatggcaagcggtggacaggactggctggttgtgtgcctggcccgcgaatcgaccccagcagagagccgagggggaaggaagctcccccagctgcccactccagctttggccgttgtttctgtccagcccaagacggggtcagagcatgccagtgcctcacaggcgctcaggatataggacccagctgtgccacctctgctgcatgactagtgggcggtgcctcttgagtttgtcccagagagtagttttgggtttacctggcatcatcatccggtgtgtatctcgcggtgtggtgtag

SEQ ID NO: 260911 - DNA, 807 bp, Artificial Sequence
  derived and/or modified sequence
atgggcaggttgctggcgttggtcgttggcgcagctttggtatcttcggcgtgcggtgggtgtgtagaggtggatagcgaaaccgaggccgtctacggaatgactttcaagattctctgcatcagctgcaagcgaaggtcagaaactaatgccgagacttttactgaatggaccttcaggcagaaaggcaccgaggaatttgttaaaatcctgcgatatgagaacgaggtgttgcagcttgaggaggacgaacgtttcgagggacgggtagtatggaatggctccaggggcacgaaggacctgcaggatctgtcgatttttattactaatgttacatataatcactccggcgactatgagtgtcacgtgtatcgcctgctgttcttcgaaaattacgaacataatacgtctgtagtgaagaagatccatatcgaagtggtggataaaggggaaagcggcgctgcctgccccttcactgtgacccacagacgcgctcgatggcgtgatcgctggcaggccgtggacaggaccggctggctgtgtgcatggccagccaacaggcctcaacaaagggcagagggtgaaggaagctcaccctcctgccctctgcaattgtggcccctgttcctaagttcaccccgaagggggcaatcgatgcctgtaccccaccggaggtcgggctatcggacgcagctgtgccatctgtgttgcatgactagcggtcggtgccttctgtctctgtcacaacgcgttgtactgggccttcccggaattataatcagatgcgtgagcaggggggtggtgtag

SEQ ID NO: 260912 - DNA, 807 bp, Artificial Sequence
  derived and/or modified sequence
atgggcagactgctggccctggtggtgggcgccgccctggtgagcagcgcctgcggcggctgcgtggaggtggacagcgagaccgaggccgtgtacggcatgaccttcaagatcctgtgcatcagctgcaagagaagaagcgagaccaacgccgagaccttcaccgagtggaccttcagacagaagggcaccgaggagttcgtgaagatcctgagatacgagaacgaggtgctgcagctggaggaggacgagagattcgagggcagagtggtgtggaacggcagcagaggcaccaaggacctgcaggacctgagcatcttcatcaccaacgtgacctacaaccacagcggcgactacgagtgccacgtgtacagactgctgttcttcgagaactacgagcacaacaccagcgtggtgaagaagatccacatcgaggtggtggacaagggcgagagcggcgccgcctgccccttcaccgtgacccacagaagagccagatggagagacagatggcaggccgtggacagaaccggctggctgtgcgcctggcccgccaacagaccccagcagagagccgagggcgagggcagcagccccagctgccccctgcagctgtggcccctgttcctgagcagccccagaagaggccagagcatgcccgtgccccacagaagaagcggctacagaacccagctgtgccacctgtgctgcatgaccagcggcagatgcctgctgagcctgagccagagagtggtgctgggcctgcccggcatcatcatcagatgcgtgagcagaggcgtggtgtag

SEQ ID NO: 260913 - protein, 694 aa, Artificial Sequence
  derived and/or modified sequence
MNVIYFPLHIFVVYSRAYTSLVLVGCTNLCAVLFARCLDDHLVSLRMSGSRKEFDVKQILKIRWRWFGHQASSPNSTVDSQQGEFWNRGQTGANGGRKFLDPCSLQLPLASIGYRRSSQLDFQNSPSWPMASTSEVPAFEFTAEDCGGAHWLDRPEVDDGTSEEENESDSSSCRLVLSSVSDYFAAMFTNDVREARQEEIKMEGVEPNSLWSLIQYAYTGRLELKEDNIECLLSTACLLQLSQVVEACCKFLMKQLHPSNCLGIRSFADAQGCTDLHKVAHNYTMEHFMEVIRNQEFVLLPASEIAKLLASDDMNIPNEETILNALLTWVRHDLEQRRKDLSKLLAYIRLPLLAPQFLADMENNVLFRDDIECQKLIMEAMKYHLLPERRPMLQSPRTKPRKSTVGTLFAVGGMDSTKGATSIEKYDLRTNMWTPVANMNGRRLQFGVAVLDDKLYVVGGRDGLKTLNTVECYNPKTKTWSVMPPMSTHRHGLGVAVLEGPMYAVGGHDGWSYLNTVERWDPQARQWNFVATMSTPRSTVGVAVLSGKLYAVGGRDGSSCLKSVECFDPHTNKWTLCAQMSKRRGGVGVTTWNGLLYAIGGHDAPASNLTSRLSDCVERYDPKTDMWTAVASMSISRDAVGVCLLGDKLYAVGGYDGQAYLNTVEAYDPQTNEWTQVAPLCLGRAGACVVTVKL

SEQ ID NO: 260914 - DNA, 2085 bp, Artificial Sequence
  derived and/or modified sequence
atgaatgtcatttatttccccttgcatatctttgtggtatactcccgtgcctacacatcactcgtcctagttggctgtaccaacttgtgcgctgttttgtttgcccgctgcctggatgaccatctcgtgtcactgaggatgagcggctcccgaaaggagtttgatgtcaaacagattttgaaaattcgctggagatggtttggacaccaagcatcttccccgaattccaccgtggattctcaacaaggcgaattttggaatagaggtcagaccggagctaacggggggcgaaagtttcttgatccttgctctttacaactgcctctcgcctcgatcggctacaggagatctagtcaactggactttcagaactcccctagttggccaatggcctctacgagcgaggtaccagctttcgaattcaccgccgaggactgcgggggcgcccattggcttgataggccggaagtcgacgacggcacatccgaagaggaaaacgagagcgattcctctagctgtcgactggtcctgagctccgtgtccgattatttcgctgccatgttcaccaacgacgtcagggaagcacggcaggaggaaattaagatggagggggttgaacctaacagcctctggagcctcattcagtatgcatatacagggcgactcgaattgaaggaggataacatcgaatgtttgctatctaccgcatgcctccttcagctatcccaagtcgttgaagcttgctgtaaattcttaatgaagcaactgcatccctctaattgccttggaatcaggtccttcgccgacgctcaaggctgcacagacctccacaaggtggctcacaattatacgatggaacatttcatggaggtaatccggaatcaggagtttgtgcttttgcccgcgagcgagattgccaagctgctggcctccgatgatatgaacatccctaacgaggagacaatcttgaatgctttacttacatgggtaagacatgacttagaacagaggcgcaaggatctctcaaagctgttggcgtatattcgcctgccactgttggccccccaatttctggccgacatggagaacaacgtgctgttcagggacgacatagagtgccagaagctcataatggaggcaatgaagtaccacctattacctgaacggcgccccatgttgcaaagccctcgcacaaaacctcgtaaatccacggttggtaccttgtttgccgtgggcggcatggacagtactaagggagcgacttctatcgaaaaatatgatctgagaaccaacatgtggacccccgtggccaacatgaacggcaggcggctccaatttggagtggccgtcttagatgataaactttacgtggtcggcggccgggatggcctgaagactctgaataccgtcgaatgctataacccaaagacgaagacatggtctgtcatgccaccaatgagcacacaccgccacgggctgggcgtggcagtgctggaggggcctatgtatgcagtgggtggacacgatggttggagctatttaaatacggtggagcgctgggatccacaggcccggcagtggaacttcgtcgcaaccatgtctaccccacgatcaacggtcggagtagccgtgctctccgggaagctctatgctgttggcggcagggatggaagtagttgcctgaaatccgttgagtgcttcgacccccataccaacaaatggacgctatgtgcacagatgagtaagagaaggggtggggttggtgtgaccacgtggaacggcctgctatacgccattggggggcacgatgcgcctgctagtaacctgaccagcagactttccgactgtgtggagagatacgatccaaaaactgacatgtggaccgcggtggccagtatgagtatcagcagggacgctgtcggggtttgcctgttgggcgataagttgtacgcggtaggcggctacgacggtcaagcctacctcaataccgtggaagcctacgacccacagaccaacgagtggacccaggtcgcaccactgtgtctggggcgggcaggtgcctgtgttgttacagtgaaactgtag

SEQ ID NO: 260915 - DNA, 3300 bp, Artificial Sequence
  derived and/or modified sequence
tgtttcatctttattcattatcctttgttctttaaaatctgatatattggcataaaagtaattgtagatatatatatgaatgtgatttattttcctttacatatttttgttgtgtacagcagggcatatacttctcttgtcttggttggatgcacaaatctgtgtgcagtgctttttgcccgttgcctagacgatcacttggtttctctgaggatgtctggttctcgtaaagagtttgatgtgaaacagattttgaaaatcagatggaggtggtttggtcatcaagcatcatctcctaattctacagttgacagccagcagggagaattttggaaccgaggacagactggagcaaacggtgggagaaagtttttagatccatgtagcctacaattgcctttggcttcaattggttaccgaaggtccagccaactggattttcagaattcaccttcttggccaatggcatccacctctgaagtccctgcatttgagtttacagcagaagattgtggcggtgcacattggctggatagaccagaagtggatgatggcactagtgaagaagaaaatgaatctgattccagttcatgcagattggtgctctcctctgtctcagactattttgctgccatgtttactaatgatgtcagagaggcaagacaagaagaaataaaaatggaaggtgtagaaccaaattcgttgtggtccttgatccagtatgcttatacaggccgccttgaattaaaagaagataatattgagtgcctgttatctacagcttgccttcttcagctttcacaggttgtagaagcatgctgtaagtttttaatgaaacagcttcatccatccaactgtcttggaattcgttcttttgctgatgcccaaggttgtacagatttgcataaagtggctcacaattatactatggagcatttcatggaagtaatcagaaaccaggaatttgtattattaccagccagcgaaattgcaaagctcttggctagtgatgacatgaacattcctaatgaggagacaatattgaatgcacttcttacttgggtccgtcatgatttggaacagagacggaaagatctaagtaaacttttggcttatattaggctacctcttcttgcaccacagttcctggcagacatggaaaataatgtactttttcgggatgatatagaatgtcagaaactcattatggaagcaatgaagtaccatttattaccagagagacgacccatgttacaaagtcctcggacaaaacctaggaagtcaactgttggtacattatttgcagttgggggaatggattcaacaaaaggagcaacaagcattgaaaagtatgatctccgtacaaatatgtggactccagtagcaaatatgaatgggaggaggctacagttcggtgttgcagtgctagatgacaaactgtatgtggttggaggaagagatggactgaagactttgaatactgtagagtgctacaaccccaaaacaaaaacttggagtgtgatgccacctatgtccacacatagacatggccttggtgtggctgtactggaaggtcccatgtatgccgtaggaggacatgatggctggagctatctgaacacagtggaaagatgggaccctcaggctcgccagtggaattttgttgccactatgtctacccctaggagtacagtaggtgtggcagtactaagtggaaaactttatgcagttggtggtcgtgatggaagttcttgtctcaaatcagtagaatgttttgatcctcatactaataagtggacactgtgtgcacagatgtcaaaaaggagaggtggcgtaggagtgacgacctggaatggactgctgtatgctataggggggcacgatgctcccgcatccaacttgacttccagactctcagactgtgtggaaagatatgatcccaaaacagacatgtggactgcagtagcatccatgagcatcagcagagatgcagtgggggtctgtttacttggtgataagttatatgctgttggggggtatgatggacaggcataccttaatactgtggaggcttatgatccccagacaaatgagtggacccaggttgctccactgtgcctaggaagagctggagcttgtgttgtgactgtaaaattataatttagtgccccgttttctacatgaagacaccgtcttcctttattaatttagtataattattctatcaatggatacatttttagtaaatgtgcattgtcacaatcctgggcacaaagtgcctgatgtcaaaatgaagatagtaaaacaagggaggaagcagtggatggaccaggattaattcctttcatttcttagtaaattaaaacctgcagctggtggattgtgatcacacattcccgaagtaataagtgaggacgaatgcactgctctggaacataacccagtgctaactgggggtttcatttattcagtcaagcacatcttactcacatccagatttattttcctacagtgcaaacacaccagatgaaactttaaaatgttactttttgtaagcttatcataaatgagttgcagtaatttgtttgcttgtttgtttaaccacaaccactattttaatgatatactaaagataacactatttagttttttcagaaacatctgcattatatgtgtgttggttgtggattttgtttctaaaattggcttagtccaataaataaagaaaagcattaaggacttaaagcaacaataaccaaataaaaacttgataggatctttgaagtctatttaaatattcattccattacatctagactcaccaagaactacatgttatgatgttaagttgaagttgaaacatgatgttttgcattaaatttaagatatgcaaatttatgtagagaaaataaatgttatataccctataatctttcacctaattagtatttaattatatggatttgttttatattataaaagatgttttgattttgtcttttgatattgacaaaattgtttggatatccttatgttctcaagtctgtatctgcctcccctgccttatttcttatgttttgccacagttaacccattgtgcttctttgtaatcaaacagtttgtgggagaatgggcttattgaatgtctaaaaaataagtttaaagtgtttgttaccctaagttttttacatttttaaactctaattacatatgtgaatgttattactctcagtgaattgttattgtttgcaaaaatgcactgggcagtaacattttgtgataaatcctataagatataag

SEQ ID NO: 260916 - DNA, 2085 bp, Artificial Sequence
  derived and/or modified sequence
atgaatgtcatctacttccccctgcacatctttgtggtgtacagccgggcctacaccagcctggtgctggtgggctgcaccaacctgtgtgctgtgctgtttgcccgctgcctggatgaccacctggtgtccctgaggatgagcggcagcaggaaggagtttgatgtgaagcagatcctgaagatccgctggcgctggtttggccaccaggccagcagccccaacagcacagtggacagccagcagggcgagttctggaacagaggccagacaggagccaacggcggcaggaagttcctggacccctgcagcctgcagctgcccctggccagcatcggctacagaagaagcagccagctggacttccagaacagccccagctggcccatggccagcaccagcgaggtgcctgcctttgagttcaccgctgaggactgtggcggggcccactggctggacaggcctgaggtggatgatggcaccagcgaggaggagaatgaaagtgacagcagcagctgccgcctggtgctgagctctgtgtctgactactttgctgccatgttcaccaatgatgtgcgggaggcccggcaggaggagatcaagatggagggcgtggagcccaacagcctgtggagcctcatccagtatgcctacacaggccgcctggagctgaaggaggacaacatcgagtgcctgctgagcacagcctgcctgctgcagctgagccaggtggtggaggcctgctgcaagttcctgatgaagcagctgcaccccagcaactgcctgggcatccgcagctttgctgatgcccagggctgcacagacctgcacaaggtggcccacaactacaccatggagcacttcatggaggtgatccggaaccaggagtttgtgctgctgcctgccagcgagatcgccaagctgctggccagtgatgacatgaacatccccaatgaggagaccatcctgaatgccctgctgacctgggtgagacatgacctggagcagaggaggaaggacctgagcaagctgctggcctacatccggctgcccctgctggccccccagttcctggccgacatggagaacaacgtgctcttcagagatgacatcgagtgccagaagctgatcatggaggccatgaagtaccacctgctgcctgagcggcggcccatgctgcagagccccaggaccaagcccaggaagagcacagtgggcaccctgtttgctgtgggcggcatggacagcaccaagggggccaccagcattgagaagtatgacctgcggaccaacatgtggacccctgtggccaacatgaatggccggcggctgcagtttggagtggccgtgctggatgacaagctgtatgtggtgggcggcagagatggcctgaagaccctgaacacagtggagtgctacaaccccaagaccaagacctggagcgtgatgccacccatgagcacccacagacatggcctgggcgtggccgtgctggagggccccatgtatgctgtgggcggccatgatggctggagctacctgaacacagtggagcgctgggacccccaggcccggcagtggaactttgtggccaccatgagcacccccaggagcacagtgggcgtggccgtgctgagcggcaagctgtatgctgtgggcggcagagatggcagcagctgcctgaagtctgtggagtgctttgacccccacaccaacaagtggaccctgtgtgcccagatgagcaagagaagaggaggagtgggcgtgaccacctggaatggcctgctgtatgccatcggcggccatgatgccccagccagcaacctgaccagccggctgagtgactgtgtggagagatatgaccccaagacagacatgtggacagctgtggcctccatgagcatcagcagagatgctgtgggcgtgtgcctgctgggggacaagctgtatgctgtgggcggctatgatggccaggcctacctgaacacagtggaggcctatgacccccagaccaatgagtggacccaggtggcccccctgtgcctgggccgggccggggcctgtgtggtgacagtgaagctgtag

SEQ ID NO: 260917 - DNA, 2085 bp, Artificial Sequence
  derived and/or modified sequence
atgaacgtgatctacttccccctgcacatcttcgtggtgtacagccgtgcatacacaagtctggtcctggttggctgtacaaatctgtgcgccgtcctgttcgctagatgcttggacgatcacttggtcagcttgagaatgtcagggagcaggaaagagtttgatgtgaagcagattttgaaaatacggtggcggtggttcggccaccaagccagttcaccaaactccaccgtagactcacagcagggagagttttggaatcgggggcagacaggcgccaacggcggtcgaaagttcctcgatccctgttctctgcagctgcctctggcgagcatcggatacagaaggtccagtcagctggattttcagaattcaccctcgtggcctatggcctcaacttctgaagtgccagcattcgaatttacagcagaagactgcggaggggcccattggctggacagacccgaggttgatgacggcactagtgaggaggagaacgagtccgattcgtcttcctgcagactggttttatcctccgttagtgactatttcgctgcaatgttcaccaacgatgtccgggaggcaagacaggaggagatcaaaatggagggggtcgagcctaacagtttgtggagtctcatccaatacgcctacaccggacggcttgagctgaaggaggataacattgagtgcctgctgtctacagcttgtcttttacaactgtctcaggtggttgaagcttgttgcaaattcctgatgaaacagcttcacccctctaattgtctcggaatacgttccttcgccgacgcccaggggtgcactgatttgcacaaggtcgcccacaactataccatggagcacttcatggaggtaatacgaaaccaagaatttgttcttctccctgcgagcgaaattgcgaagttgttggcctctgatgacatgaatatccccaatgaggagacaattctgaacgcactgctgacctgggtgcggcacgatctggagcagcggaggaaggatttgagcaaattgctcgcctacattcggctacctctgttagcaccccagttcttagctgacatggagaacaacgtcctatttcgagatgacatcgagtgtcagaaactcatcatggaggctatgaagtaccatctcctgcccgaacgacgccccatgctccagtcccctagaacaaaaccaagaaagtcaactgtgggtactctgtttgctgttgggggcatggacagtaccaaaggagccacttccatcgagaaatacgatcttagaacgaacatgtggactcccgtagctaacatgaacggtagacggctgcagtttggcgttgctgtactagacgacaagctctacgttgtgggcggtcgagacggtctaaagacactgaatacggtggagtgttacaatcccaagaccaagacatggagcgtcatgccccccatgtccacacaccggcacggtctcggagtggccgtgctggagggtcctatgtacgctgtcggtggacatgacggctggtcttacctgaacaccgtggaacgctgggatccacaggctcggcagtggaactttgtcgccacaatgtccactccaaggtccaccgttggggtcgccgtcctgtcaggcaaactgtatgccgtcggcggtagggacggttcctcgtgtctgaagtcagtggaatgcttcgaccctcatacaaataagtggaccctgtgcgcccagatgtcgaaaaggcgtgggggcgtcggtgttactacatggaacggactcctctacgctattgggggccatgacgcacctgcctcaaatctgacatctagactcagcgactgcgtggaaagatatgaccccaagacagacatgtggactgcagtggcgtccatgtctatcagccgtgatgccgtcggtgtctgtctactgggggacaaactgtatgccgtgggcgggtatgacgggcaagcctatcttaacaccgtcgaggcatatgatcctcagactaacgagtggacccaggttgcacccctttgcctggggcgggccggagcatgcgtggtgacagtcaaactttag

SEQ ID NO: 260918 - DNA, 2085 bp, Artificial Sequence
  derived and/or modified sequence
atgaatgtgatatatttccctcttcacattttcgttgtctactccagagcttatacctccctggttttggtcggctgcaccaatctctgtgccgtgctgtttgcaagatgcttggatgatcacctcgtgtcattgcggatgtccggctcgcgcaaagaatttgatgtcaagcagatactcaagattagatggaggtggttcggacaccaagcttcgtccccaaattctacagtcgatagtcaacagggcgaattctggaacaggggccagaccggggctaatggcggaagaaagttcctggacccatgcagcctgcagcttcctctcgcttcaattggttaccggaggtcatctcaacttgatttccagaatagcccctcctggcccatggcctctacctcagaggttccagccttcgagtttaccgctgaggactgtggtggcgctcactggctcgataggcctgaggtggacgatggcacatcagaggaggagaatgaaagcgacagcagcagttgcaggctggtgctttcgtcagtcagcgactacttcgccgcaatgttcaccaatgatgtgcgggaggcccgacaggaagaaattaagatggaaggagttgagccaaactccctgtggagccttatccagtacgcatatactgggaggctggagcttaaagaggataacattgaatgcttgttgtctaccgcttgtctccttcaattgtcccaagtggtcgaggcctgttgcaagtttctaatgaagcagctgcacccaagcaactgcttgggcataaggagcttcgctgatgcgcagggttgcacggatctacataaggttgcacataattacactatggagcacttcatggaagtgattaggaaccaagagttcgtactgctgcccgcatccgagattgcaaagcttctggcaagtgacgatatgaatatacctaatgaggaaaccatattaaatgccctcctcacctgggtccgtcacgatctcgagcagcggaggaaggacttgagcaaacttttggcctacatccggctgcctctccttgcaccgcagttcctagccgatatggaaaataatgttctgttccgtgacgacattgaatgtcagaaattaatcatggaagctatgaaatatcatctgctccccgaacgccgtcctatgctgcagtcaccaaggactaaacctcgcaagagcaccgtggggaccctgtttgcggtggggggaatggacagcaccaaaggagccactagcatagagaagtatgatctgagaacaaatatgtggacacccgtggcaaatatgaacggccgacgcctgcagtttggcgtcgcagtcttagatgacaagctgtatgtcgtcgggggaagagatggactgaagacactaaataccgtcgagtgctacaacccaaagaccaagacctggtcggtgatgcctcccatgagcacacatcgccacgggctgggtgtcgccgtcctggagggccctatgtatgctgtgggaggccacgacgggtggagctatctgaataccgtagagagatgggatccccaggctagacaatggaactttgtcgctactatgagcaccccgagatccactgtcggcgtggcggtgctaagcggcaagttgtatgccgtaggcggtagagacgggtcttcttgtctgaagtcagtagagtgttttgatcctcacacgaacaagtggaccctctgtgcgcagatgagcaaacggcgtgggggagtgggtgttactacatggaacggattattatacgctatcggagggcacgacgcccctgcaagtaacttgacctctcgactctctgattgtgtcgagaggtacgatcctaagacagacatgtggacagcagtcgcttcaatgtctataagccgcgatgctgtcggcgtttgtctgctgggagataagctatacgcggtaggaggctacgatgggcaggcttacctgaacactgtggaggcgtatgatccgcagacaaacgagtggacacaggtagccccactgtgtctggggagagcaggcgcatgtgtcgtgaccgtaaaactgtag

SEQ ID NO: 260919 - DNA, 2085 bp, Artificial Sequence
  derived and/or modified sequence
atgaacgtgatctacttccccctgcacatcttcgtggtgtacagcagagcctacaccagcctggtgctggtgggctgcaccaacctgtgcgccgtgctgttcgccagatgcctggacgaccacctggtgagcctgagaatgagcggcagcagaaaggagttcgacgtgaagcagatcctgaagatcagatggagatggttcggccaccaggccagcagccccaacagcaccgtggacagccagcagggcgagttctggaacagaggccagaccggcgccaacggcggcagaaagttcctggacccctgcagcctgcagctgcccctggccagcatcggctacagaagaagcagccagctggacttccagaacagccccagctggcccatggccagcaccagcgaggtgcccgccttcgagttcaccgccgaggactgcggcggcgcccactggctggacagacccgaggtggacgacggcaccagcgaggaggagaacgagagcgacagcagcagctgcagactggtgctgagcagcgtgagcgactacttcgccgccatgttcaccaacgacgtgagagaggccagacaggaggagatcaagatggagggcgtggagcccaacagcctgtggagcctgatccagtacgcctacaccggcagactggagctgaaggaggacaacatcgagtgcctgctgagcaccgcctgcctgctgcagctgagccaggtggtggaggcctgctgcaagttcctgatgaagcagctgcaccccagcaactgcctgggcatcagaagcttcgccgacgcccagggctgcaccgacctgcacaaggtggcccacaactacaccatggagcacttcatggaggtgatcagaaaccaggagttcgtgctgctgcccgccagcgagatcgccaagctgctggccagcgacgacatgaacatccccaacgaggagaccatcctgaacgccctgctgacctgggtgagacacgacctggagcagagaagaaaggacctgagcaagctgctggcctacatcagactgcccctgctggccccccagttcctggccgacatggagaacaacgtgctgttcagagacgacatcgagtgccagaagctgatcatggaggccatgaagtaccacctgctgcccgagagaagacccatgctgcagagccccagaaccaagcccagaaagagcaccgtgggcaccctgttcgccgtgggcggcatggacagcaccaagggcgccaccagcatcgagaagtacgacctgagaaccaacatgtggacccccgtggccaacatgaacggcagaagactgcagttcggcgtggccgtgctggacgacaagctgtacgtggtgggcggcagagacggcctgaagaccctgaacaccgtggagtgctacaaccccaagaccaagacctggagcgtgatgccccccatgagcacccacagacacggcctgggcgtggccgtgctggagggccccatgtacgccgtgggcggccacgacggctggagctacctgaacaccgtggagagatgggacccccaggccagacagtggaacttcgtggccaccatgagcacccccagaagcaccgtgggcgtggccgtgctgagcggcaagctgtacgccgtgggcggcagagacggcagcagctgcctgaagagcgtggagtgcttcgacccccacaccaacaagtggaccctgtgcgcccagatgagcaagagaagaggcggcgtgggcgtgaccacctggaacggcctgctgtacgccatcggcggccacgacgcccccgccagcaacctgaccagcagactgagcgactgcgtggagagatacgaccccaagaccgacatgtggaccgccgtggccagcatgagcatcagcagagacgccgtgggcgtgtgcctgctgggcgacaagctgtacgccgtgggcggctacgacggccaggcctacctgaacaccgtggaggcctacgacccccagaccaacgagtggacccaggtggcccccctgtgcctgggcagagccggcgcctgcgtggtgaccgtgaagctgtag

SEQ ID NO: 260920 - protein, 298 aa, Artificial Sequence
  derived and/or modified sequence
MGIVCAQCSFILLLSIIRARPPPFLFCPLSSQRTESPYKPVHLGLGPTDKVAAIAMARIIDLVPWDDGSTHVYASPAILLPMERQRNQLAGVKQQLYHPALPTLRHMDRDTVKACLPDEHCQSTTYCRKDEFDNAHFTLLGVPNKPLQCLDITATGQKLRNRYHEGKLAPIAPGINRVDWPCFTRAIEDWSHFVSSAGEFKLPCLRKRAEGLSGYAVRYLKPDVTQTWRQEALCGAWAGRPCSPDSPRPYPCCPPQYCLSQNPSLDRYGQKPLPFDSLNTFRSFGSSYSRVNYLTPWH

SEQ ID NO: 260921 - DNA, 897 bp, Artificial Sequence
  derived and/or modified sequence
atgggcatcgtgtgcgcacaatgttctttcatcctgctgctttccatcattagagctcggccaccaccattcctgttttgtcctttatcctcccagcggactgaatcgccttataaaccagtgcacttgggcctgggaccaaccgataaggttgccgctatagcgatggccaggattatcgacctggttccctgggatgatgggtcaactcacgtatatgccagcccagccattctgctgccgatggaaagacaaaggaatcagctcgctggggtaaaacagcagctgtatcatccagcactccccacactgaggcacatggatcgggataccgtgaaagcgtgtttgcctgacgaacactgtcaatcaacaacgtactgtcggaaagatgaatttgacaatgcccattttacattgttaggagttcccaacaagcccctgcagtgtctggacatcactgcgacgggtcagaagcttcggaatcgatatcatgagggcaaattagcaccaattgccccaggtatcaaccgggtagattggccttgcttcacccgagccatagaggactggagtcatttcgtgtcttcggccggagaatttaagttgccctgcctgagaaaacgggctgagggcctgagtggctatgccgtgaggtaccttaagccagatgtgactcagacgtggaggcaggaagccctgtgtggggcatgggctggacgcccatgttccccagatagcccacggccttatccctgttgccccccacagtactgtctaagtcagaacccctccttagataggtatgggcagaagccgctgccatttgacagtctcaacaccttcaggtctttcggatcctcttatagtcgcgttaactatctgacaccatggcattag

SEQ ID NO: 260922 - DNA, 897 bp, Artificial Sequence
  derived and/or modified sequence
atgggtattgtgtgcgctcagtgttcctttatcctgctccttagtatcattcgagcccgccctccgccatttctgttctgtcctctgagtagccagcggaccgagagtccctacaagcctgtgcaccttggactaggaccaaccgacaaggtagctgctatagcgatggctcgcattatcgaccttgtgccttgggatgatggatctactcatgtatacgcttctcccgcaatcctcctgcccatggaacgacagaggaaccagctcgccggagtcaagcaacaactgtatcatccagcactccctaccctgcgtcatatggaccgagatactgtaaaggcatgtctgccagatgagcactgtcaaagcacaacctactgccggaaggacgagtttgataatgctcatttcacattgctgggtgtacccaataaacccctgcaatgcctggacatcaccgcgactggtcaaaagttaaggaatagatatcatgagggaaaactggccccaattgcacccgggattaatcgtgtagactggccttgcttcacacgagctattgaggattggtcacatttcgtgtcttccgccggtgaatttaaactgccctgcctgagaaaacgggctgagggattgtccggatacgcagtgagatacctgaagcccgatgtgacccagacgtggcggcaggaagctttatgcggcgcctgggccggcaggccatgcagcccagacagcccccgtccttacccatgctgcccaccgcagtactgtttatcgcaaaacccctcactcgatcggtacggacagaagcctttgccattcgacagcttaaacacattcaggtctttcggatcttcttacagcagagtgaactaccttacgccatggcattag

SEQ ID NO: 260923 - DNA, 897 bp, Artificial Sequence
  derived and/or modified sequence
atgggtattgtgtgcgctcagtgttcctttatcctgctccttagtatcattcgagcccgccctccgccatttctgttctgtcctctgagtagccagcggaccgagagtccctacaagcctgtgcaccttggactaggaccaaccgacaaggtagctgctatagcgatggctcgcattatcgaccttgtgccttgggatgatggatctactcatgtatacgcttctcccgcaatcctcctgcccatggaacgacagaggaaccagctcgccggagtcaagcaacaactgtatcatccagcacttcccacactgaggcacatggatagagatacagtcaaagcatgtctgccagacgaacactgccagagtactacctactgtcgaaaagatgaattcgataacgcccacttcactctgctgggagtccccaacaaaccactccagtgcctggatattacggcaacaggacagaagttacggaatcgctaccacgaaggaaagctggcacccatcgcaccgggcattaaccgcgtagattggccctgcttcacccgggctatcgaggactggagccacttcgttagttctgctggtgaattcaagctgccgtgtctgcgaaaaagggcagagggacttagtggctacgccgtccgttatctgaagccagacgtcactcaaacttggcgccaggaagctttatgcggagcatgggctggacggccttgttcgccagactctcccagaccttatccatgttgtccaccgcaatactgtctcagccagaatcctagcctagatcgttacggccagaaacctctcccctttgacagcttgaacacctttcggtccttcggttcctcctattcacgtgtcaattacctgactccttggcactag

SEQ ID NO: 260924 - DNA, 1079 bp, Artificial Sequence
  derived and/or modified sequence
ggttgctaaggagtgggtgcctcagaatcaggctgcaatgggcattgtctgtgcacaatgttcctttattctgctgctgtccataataagggctcgtccacctcccttcctcttctgcccattgagcagtcaaagaactgaaagtccttataagcctgtgcacctgggcctgggccctacagataaggtagctgctattgctatggcccgcatcattgacctggtgccctgggacgatggctccacacatgtgtatgcctccccggccatcctgcttcccatggagcggcagcgcaaccagctggcgggcgtgaagcagcagctctaccacccagccctgcccaccctgcgccacatggacagggacaccgtcaaggcctgccttcctgatgagcactgccagtccaccacctactgccgcaaagatgaatttgacaacgcccattttacactccttggggtccccaacaaacccctgcagtgtttggacatcaccgccacaggccagaagcttcgcaacaggtaccacgagggaaagctggcgcccatcgcgccaggcatcaaccgagtggactggccctgcttcacgcgcgccatcgaggactggtcccacttcgtgtcctcggccggggagttcaagctgccttgcctgaggaagcgagcggagggtctcagcggctacgcggtgcggtacttgaagcccgacgtgacccagacctggcggcaggaagccctgtgtggggcgtgggcagggcgtccgtgctcccccgactcaccgcgcccctatccctgctgcccgcctcagtactgcctcagccagaaccccagcctggaccgctacggacagaagcccctgcctttcgactccctgaacactttccgaagcttcggctccagctacagtcgtgtcaactacctgaccccctggcattaatctctggaaaggaggctgactcccaggctgccggacggtgccacctcaggtcccctggccagacagaggacttatggtggcaccagccatctccccaggagttcagcctaactagaaataaacctaatgctcccttagagacaca

SEQ ID NO: 260925 - DNA, 897 bp, Artificial Sequence
  derived and/or modified sequence
atgggcatcgtgtgcgcccagtgcagcttcatcctgctgctgagcatcatcagagccagacccccccccttcctgttctgccccctgagcagccagagaaccgagagcccctacaagcccgtgcacctgggcctgggccccaccgacaaggtggccgccatcgccatggccagaatcatcgacctggtgccctgggacgacggcagcacccacgtgtacgccagccccgccatcctgctgcccatggagagacagagaaaccagctggccggcgtgaagcagcagctgtaccaccccgccctgcccaccctgagacacatggacagagacaccgtgaaggcctgcctgcccgacgagcactgccagagcaccacctactgcagaaaggacgagttcgacaacgcccacttcaccctgctgggcgtgcccaacaagcccctgcagtgcctggacatcaccgccaccggccagaagctgagaaacagataccacgagggcaagctggcccccatcgcccccggcatcaacagagtggactggccctgcttcaccagagccatcgaggactggagccacttcgtgagcagcgccggcgagttcaagctgccctgcctgagaaagagagccgagggcctgagcggctacgccgtgagatacctgaagcccgacgtgacccagacctggagacaggaggccctgtgcggcgcctgggccggcagaccctgcagccccgacagccccagaccctacccctgctgccccccccagtactgcctgagccagaaccccagcctggacagatacggccagaagcccctgcccttcgacagcctgaacaccttcagaagcttcggcagcagctacagcagagtgaactacctgaccccctggcactag

SEQ ID NO: 260926 - DNA, 897 bp, Artificial Sequence
  derived and/or modified sequence
atggggatcgtgtgtgctcagtgtagtttcatactcctgctgtccatcattagggcgagaccaccccccttccttttctgtcccctgtcttcacaacgaactgaaagcccgtataagcctgtgcacctaggacttggcccgaccgacaaggttgctgctatcgccatggctcgcatcatcgaccttgtaccatgggatgatggctccactcacgtatatgcttccccagctatactgctcccaatggagagacagcggaatcagttagcaggggtgaaacaacaactgtaccatccggcgttgcccacccttaggcacatggacagggataccgtcaaggcctgcctaccagatgagcactgccagagcaccacatattgtcgtaaggatgagttcgacaatgcacatttcaccctcctcggcgtcccaaacaaaccccttcagtgcctcgatatcacagccactggacagaagctgagaaaccgataccatgagggcaagcttgccccaatcgcgcctggcatcaaccgggtggattggccctgttttacgagagctattgaggattggtcccattttgtgagttccgctggcgagttcaagttaccatgtctgaggaagcgcgctgaggggctgagtggttatgctgtcagatatctaaaacccgatgtgacgcagacttggaggcaggaagcgctatgtggggcgtgggccggccgcccctgctcacccgactctccaagaccttacccctgttgccccccccaatattgtctttcacaaaatccttcgctggaccggtacggccagaagcctttgccgtttgacagtctgaacactttccgcagcttcggaagctcttatagtagagtaaactacctgactccgtggcattag

SEQ ID NO: 260927 - DNA, 897 bp, Artificial Sequence
  derived and/or modified sequence
atgggcatcgtgtgtgcccagtgcagcttcatcctgctgctgagcatcatccgggcccggcccccacccttcctgttctgccccctgagcagccagaggacagagagcccctacaagcctgtgcacctgggcctgggccccacagacaaggtggccgccatcgccatggcccgcatcatcgacctggtgccctgggatgatggcagcacccacgtgtatgccagccctgccatcctgctgcccatggagcggcagaggaaccagctggccggcgtgaagcagcagctgtaccacccagccctgcccaccctgcggcacatggaccgggacacagtgaaggcctgcctgcctgatgagcactgccagagcaccacctactgcaggaaggatgaatttgacaatgcccacttcaccctgctgggcgtgcccaacaagcccctgcagtgcctggacatcacagccaccggccagaagctgaggaaccgctaccacgagggcaagctggcccccatcgcccctggcatcaacagagtggactggccctgcttcacccgggccatcgaggactggagccactttgtgagcagcgctggggagttcaagctgccctgcctgaggaagagagctgagggcctgagcggctatgctgtgcgctacctgaagccagatgtgacccagacctggaggcaggaggccctgtgtggggcctgggccggccggccctgcagcccagacagcccccggccctacccctgctgccccccccagtactgcctgagccagaaccccagcctggacagatatggccagaagcccctgccctttgacagcctgaacaccttccgcagctttggcagcagctacagccgggtgaactacctgaccccctggcactag

SEQ ID NO: 260928 - DNA, 897 bp, Artificial Sequence
  derived and/or modified sequence
atgggcatcgtgtgcgcccagtgcagcttcatcctgctgctgagcatcattagagcaaggcccccaccgtttctcttctgccctctcagttcacagaggaccgaaagcccctataagcccgtccacttgggactcggccctactgacaaagtggccgcgatcgccatggcaagaataatagacttggttccgtgggatgacggttcaacccatgtctatgccagtcctgcaatcttgcttccaatggagcgccagcgcaaccaacttgctggtgtgaaacagcaactgtaccaccctgccctgcccactttgagacacatggaccgcgacacagtcaaagcatgtctgccagatgagcattgtcagtctacaacgtattgccggaaggacgaattcgataatgcacattttactctgctcggtgttccgaacaaacccctgcagtgtctggacatcaccgccacgggacagaagctgcgaaatcgataccatgaagggaaacttgctcccatcgccccaggcattaaccgagtcgactggccctgctttacccgcgcaatcgaagactggtcccatttcgtgagctctgcaggtgagttcaagcttccatgccttaggaagcgggccgaagggctcagcggctacgccgtacggtatctgaagccagatgtgacacaaacttggcgccaagaggctctttgcggggcgtgggccggccgcccttgttctcccgattctcccagaccgtacccctgctgcccaccccagtactgcctgagtcagaacccttcactggataggtacggccagaaacccttgccttttgacagtctgaacacatttagatcattcggttcctcctactctcgggtcaactacctgaccccatggcattag

SEQ ID NO: 260929 - RNA, 897 nt, Artificial Sequence
  derived and/or modified sequence
auggguauugugugcgcucaguguuccuuuauccugcuccuuaguaucauucgagcccgcccuccgccauuucuguucuguccucugaguagccagcggaccgagagucccuacaagccugugcaccuuggacuaggaccaaccgacaagguagcugcuauagcgauggcucgcauuaucgaccuugugccuugggaugauggaucuacucauguauacgcuucucccgcaauccuccugcccauggaacgacagaggaaccagcucgccggagucaagcaacaacuguaucauccagcacucccuacccugcgucauauggaccgagauacuguaaaggcaugucugccagaugagcacugucaaagcacaaccuacugccggaaggacgaguuugauaaugcucauuucacauugcuggguguacccaauaaaccccugcaaugccuggacaucaccgcgacuggucaaaaguuaaggaauagauaucaugagggaaaacuggccccaauugcacccgggauuaaucguguagacuggccuugcuucacacgagcuauugaggauuggucacauuucgugucuuccgccggugaauuuaaacugcccugccugagaaaacgggcugagggauuguccggauacgcagugagauaccugaagcccgaugugacccagacguggcggcaggaagcuuuaugcggcgccugggccggcaggccaugcagcccagacagcccccguccuuacccaugcugcccaccgcaguacuguuuaucgcaaaaccccucacucgaucgguacggacagaagccuuugccauucgacagcuuaaacacauucaggucuuucggaucuucuuacagcagagugaacuaccuuacgccauggcauuag

SEQ ID NO: 260930 - RNA, 897 nt, Artificial Sequence
  derived and/or modified sequence
auggguauugugugcgcucaguguuccuuuauccugcuccuuaguaucauucgagcccgcccuccgccauuucuguucuguccucugaguagccagcggaccgagagucccuacaagccugugcaccuuggacuaggaccaaccgacaagguagcugcuauagcgauggcucgcauuaucgaccuugugccuugggaugauggaucuacucauguauacgcuucucccgcaauccuccugcccauggaacgacagaggaaccagcucgccggagucaagcaacaacuguaucauccagcacuucccacacugaggcacauggauagagauacagucaaagcaugucugccagacgaacacugccagaguacuaccuacugucgaaaagaugaauucgauaacgcccacuucacucugcugggaguccccaacaaaccacuccagugccuggauauuacggcaacaggacagaaguuacggaaucgcuaccacgaaggaaagcuggcacccaucgcaccgggcauuaaccgcguagauuggcccugcuucacccgggcuaucgaggacuggagccacuucguuaguucugcuggugaauucaagcugccgugucugcgaaaaagggcagagggacuuaguggcuacgccguccguuaucugaagccagacgucacucaaacuuggcgccaggaagcuuuaugcggagcaugggcuggacggccuuguucgccagacucucccagaccuuauccauguuguccaccgcaauacugucucagccagaauccuagccuagaucguuacggccagaaaccucuccccuuugacagcuugaacaccuuucgguccuucgguuccuccuauucacgugucaauuaccugacuccuuggcacuag

SEQ ID NO: 260931 - protein, 375 aa, Artificial Sequence
  derived and/or modified sequence
MASAPWPERVPRLLAPRLPSYPPPPPTVGLRSMEQEETYLELYLDQCAAQDGLAPPRSPLFSPVVPYDMYILNASNPDTAFNSNPEVKETSGDFSSVDLSFLPDEVTQENKDQPVISKHETEENSESQSPQSRLPSPSEQDVGLGLNSSSLSNSHSQLHPGDTDSVQPSPEKPNSDSLSLASITPMTPMTPISECCGIVPQLQNIVSTVNLACKLDLKKIALHAKNAEYNPKRFAAVIMRIREPRTTALIFSSGKMVCTGAKSEEQSRLAARKYARVVQKLGFPARFLDFKIQNMVGSCDVRFPIRLEGLVLTHQQFSSYEPELFPGLIYRMVKPRIVLLIFVSGKVVLTGAKERSEIYEAFENIYPILKGFKKA

SEQ ID NO: 260932 - DNA, 1128 bp, Artificial Sequence
  derived and/or modified sequence
atggccagtgccccatggccagagagggtgccccggctattagctccacggctgcctagctatccacccccccctccaacggttggtttgaggtcaatggaacaggaggagacatacctggagttataccttgaccaatgtgccgcccaggacggcctcgccccaccaaggagccccttattctctcccgtggtgccttacgacatgtatattctcaatgcgtccaaccccgacacagcattcaactctaatccagaagtgaaggagacatccggcgattttagttctgtcgacttgtcgttcctaccagatgaggttacacaagagaacaaagaccaaccagtaatctctaagcatgagacagaggagaattccgagagtcagtctccccagtcgcgactcccttctccatccgaacaggatgtgggccttgggctgaactccagtagcctgtccaattctcactcacagctgcaccccggcgataccgatagcgtgcagccatcaccagaaaaaccaaacagcgatagcctgtccctcgcttcgattacccctatgacccccatgacccctatctctgagtgttgtggaatcgtccctcagctgcagaacattgtttcaacagtcaatctggcgtgtaagcttgatctgaagaaaatcgctctccacgcgaagaatgctgaatacaaccctaaaaggtttgctgctgtcatcatgcgaatccgcgagcctcgcaccaccgccttgatcttctctagcggcaagatggtgtgcactggagccaaatccgaggaacagtctcggctagccgctagaaaatacgcacgcgtcgttcagaagctcggcttccccgccagattcctggatttcaagatccagaatatggtcggctcctgtgacgtgcgttttcccatccgtctggaagggctcgtgttgacgcaccagcaattctccagctatgagcccgagctgttcccaggcctgatttatcgtatggtcaagccgagaattgttttgcttatattcgtatcaggaaaggtggtgctgaccggcgccaaggaacggtccgaaatctacgaggcatttgaaaacatatatcctattttgaaaggctttaagaaggcatag

SEQ ID NO: 260933 - DNA, 1128 bp, Artificial Sequence
  derived and/or modified sequence
atggccagcgccccctggccagagcgggtgccccggctgctggccccccggctgcccagctacccacctcctccacccaccgtgggcctgcgctccatggagcaggaggagacctacctggagctgtacctggaccagtgtgccgcccaggacggcctggccccacccaggagccccctcttcagccctgtggtgccctatgacatgtacatcctgaatgccagcaacccagacacagccttcaacagcaaccctgaggtgaaggagaccagcggggacttcagctctgtggacctgtccttcctgcctgatgaggtgacccaggagaacaaggaccagcccgtcatcagcaagcatgaaacagaagaaaattctgagagccagagcccccagagccggctgcccagccccagcgagcaggatgtgggcctgggcctgaacagcagcagcctgagcaacagccacagccagctgcaccctggggacacagattctgtgcagcccagccctgagaagcccaacagcgacagcctgagcctggccagcatcacccccatgacccccatgacccccatcagcgagtgctgcggcatcgtgccccagctgcagaacatcgtgtccacagtgaacctggcctgcaagctggacctgaagaagatcgccctgcacgccaagaatgctgagtacaaccccaagagatttgctgctgtgatcatgaggatccgggagcccaggaccacagccctgatcttcagcagcggcaagatggtgtgcacaggagccaagtctgaggagcagagccggctggccgccaggaaatatgcccgggtggtgcagaagctgggcttccctgcccgcttcctggacttcaagatccagaacatggtgggcagctgtgatgtgcgcttccccatccggctggagggcctggtgctgacccaccagcagttcagcagctatgagcctgagctgtttcctggcctcatctacaggatggtgaagcccagaattgtgctgctgatctttgtgtctgggaaggtggtgctgaccggggccaaggagaggtctgagatctatgaggcctttgagaacatctaccccatcctgaagggcttcaagaaggcctag

SEQ ID NO: 260934 - DNA, 1128 bp, Artificial Sequence
  derived and/or modified sequence
atggccagcgccccctggcccgagcgggtgccccggctgctggcccctaggttgccttcttatccacctcctcctcctaccgtgggcctgcggtctatggagcaggaggaaacttatctggagctatacctggatcagtgtgccgcccaggacgggctggcaccgccgagaagccccttattctcccccgtcgtgccgtacgatatgtatatactgaatgcttccaacccagataccgctttcaactctaatcccgaggtcaaagaaacaagtggagatttcagttctgtggacctctctttcctccctgatgaagtcactcaggagaataaagaccagccagtgatcagtaagcacgagacggaggaaaattcggagtctcagtcgccacaatctcggctgcccagcccttcagaacaagacgttggactgggcttaaactctagctccctgtccaattcccatagtcagctccacccaggagacacagattccgttcagcctagccccgaaaaacccaattcagatagcctttcactggcctcgattacgcctatgacaccaatgacccccatctcagaatgttgtggtatcgttccacagctccagaacatcgtcagtacagtaaaccttgcctgcaagctggacctcaagaagatcgctttgcatgccaaaaatgccgagtataacccaaagcgcttcgctgcggtcatcatgagaatcagggaaccacgaacgacagcccttatatttagctcaggtaaaatggtgtgcacgggagcaaagagcgaggaacagtctcgcctcgcagcgcgcaagtacgcccgcgtagtgcagaaacttggcttcccagccaggtttctggattttaagattcagaacatggtgggctcctgtgatgtccgttttcctattcgactggaggggttagtgttaacacatcaacagttcagttcctacgagccagaactgtttccaggtctcatctatcggatggtgaagccccggattgtcttacttatctttgtatcaggcaaagtggtcctgaccggggctaaggaacgttccgagatatacgaggcttttgaaaacatctatcccatccttaaaggtttcaagaaagcatag

SEQ ID NO: 260935 - DNA, 1128 bp, Artificial Sequence
  derived and/or modified sequence
atggcttctgcaccctggccagaaagggttcctcgcttgctagcaccccgactgccatcctaccctccgccacctcccactgtaggactacggtctatggaacaggaggagacataccttgagctttatctggatcagtgtgccgctcaagacggactggccccaccacggagtcccttgttctctcctgtggtcccttacgatatgtatattctgaatgccagtaatcctgacaccgcctttaatagcaacccggaagtaaaagagaccagcggggacttctccagcgtggacctgtctttcttgcctgatgaggttactcaagagaataaagatcagcccgtaatttccaagcatgagacagaagagaatagcgagtcacagagtcctcagtcccggctccctagccccagcgagcaggatgtaggcctgggactcaattcatcgtcactgtccaatagccacagccagctgcaccctggggataccgactcagtccagccgagtccggagaaacccaactcggactcattatcccttgccagcatcacgccaatgaccccaatgacccccatctctgagtgttgcgggatcgtgccccaactccagaacatcgtttccacggtaaatttggcttgcaagctcgacctcaaaaagattgctctccatgcaaagaatgctgagtacaaccctaaaaggttcgccgcagttatcatgcggattagagaacccagaacaaccgcgctgatcttctcttccggcaagatggtctgcactggggctaaatccgaggagcagtcacgattggctgctagaaaatacgctagagtggtccagaagctcggatttccggctcgcttcctggacttcaaaatccagaacatggtcggcagctgcgatgtgaggtttcccatccgtctggaggggcttgtcttgacacatcagcagttttcctcctacgagccagaactcttcccgggtctgatctacaggatggtgaagcccaggatcgtactcctgatttttgtctccggaaaagtggtgctcactggcgcaaaagaacgatcagaaatctatgaagccttcgaaaacatttaccctatcctgaaaggcttcaagaaagcatag

SEQ ID NO: 260936 - DNA, 2037 bp, Artificial Sequence
  derived and/or modified sequence
acgcttctctcgcgccctctgcaggaacctgggccgagggccgccccgcctcgctgcccccaggctcataaatggcctctgcgccctggccggagcgggttccgaggctgctcgctccgcgcttaccctcttacccgcccccacccccaacagtgggattacggtccatggagcaggaggagacctacctggagctctacctggaccagtgcgccgctcaggatggccttgccccacccaggtctcccctgttcagcccagttgtaccttatgatatgtacatactgaatgcatccaatccggatactgcatttaattcgaaccctgaagtcaaagaaacatctggtgatttctcatctgtggatcttagcttcctaccagatgaagttacccaggaaaataaagaccagcctgtcattagcaaacacgaaactgaagaaaattctgaaagccaaagtccacaaagtaggttgccatcacccagcgaacaggacgttgggctgggcttaaacagcagcagtttgtcaaattcccattcacagctgcaccctggtgatactgactcagtccagccctctcctgagaaaccaaactccgactccttgtctctggcatccataactcccatgacaccaatgacccctatttcagaatgttgtggaattgtacctcaactacagaatatagtttccactgtaaacctggcctgtaagttggatctgaagaaaatagctttgcatgcaaaaaatgcagaatataacccaaagaggtttgctgctgtcataatgaggatccgagagcccaggacaacagcccttatatttagctctgggaagatggtctgcacgggagccaaaagtgaagagcagtctcgacttgcagcaagaaaatatgctcgtgtggtgcagaagcttgggttccctgccagattcctcgattttaaaattcagaacatggttggaagctgtgatgtgagatttcccatcaggctggaaggtttggtgctaacccatcagcagttcagtagttacgagcctgaactgtttcctggtcttatttatagaatggtaaaaccacgaattgtgttgcttatctttgtatctggaaaagttgtgttgacaggtgccaaagaacgttctgagatctatgaagcatttgaaaacatctatcctattctaaaaggttttaaaaaagcctgagcatatcattcagcatctcacattattctggtttgaatatgtccataagcccagcacagaaacagctggattcttctacgtttaattgtagatgttacaagtacgttacttattaaagggcgactctgtgtaagtaacctaagaaacgaagaaaaattcttattcaaaatgactccttttgtgttattttaaaaactgaacaagtaaacatttcaaaatttgagagatttagggtctcactagaatgatattgtagcatcatgaagactcaatgcgtttccttttagccggaagggccatcttccagtaatttgccaaaatgacgaacacaaagggaaagaggtgaggcacctgatacatgttctctaggccttttagaaaagatggagttgttcctttggccacatacatgcgaatctacgaaaaaggtgatattgtagacatcaagggaatggctgcttttcaaaaaggagtgctccgcaaatgttaccacagcaaagctggaagagtctacagtgttacccagcatgctgttggcattgtaaacaagggcaagatttttgccaagagaatgaatgtgcttactgagccaggctggtcttgaactcctgacctcagttgatccatctgcctgggccttggcactctaagagccaagtaagtttcctgaaacgcgtgaaggtaaataatcagaaaaagacgtcaaagggagaggtgtctgagttcaactgaagcgccagcctgctccacccagacaagcacttagaaccaatggagggagcctgggctgctggaacctattccctatgagttcatggcataataggtgtcaaaaaaa

SEQ ID NO: 260937 - DNA, 1128 bp, Artificial Sequence
  derived and/or modified sequence
atggccagcgccccctggcccgagagagtgcccagactgctggcccccagactgcccagctaccccccccccccccccaccgtgggcctgagaagcatggagcaggaggagacctacctggagctgtacctggaccagtgcgccgcccaggacggcctggccccccccagaagccccctgttcagccccgtggtgccctacgacatgtacatcctgaacgccagcaaccccgacaccgccttcaacagcaaccccgaggtgaaggagaccagcggcgacttcagcagcgtggacctgagcttcctgcccgacgaggtgacccaggagaacaaggaccagcccgtgatcagcaagcacgagaccgaggagaacagcgagagccagagcccccagagcagactgcccagccccagcgagcaggacgtgggcctgggcctgaacagcagcagcctgagcaacagccacagccagctgcaccccggcgacaccgacagcgtgcagcccagccccgagaagcccaacagcgacagcctgagcctggccagcatcacccccatgacccccatgacccccatcagcgagtgctgcggcatcgtgccccagctgcagaacatcgtgagcaccgtgaacctggcctgcaagctggacctgaagaagatcgccctgcacgccaagaacgccgagtacaaccccaagagattcgccgccgtgatcatgagaatcagagagcccagaaccaccgccctgatcttcagcagcggcaagatggtgtgcaccggcgccaagagcgaggagcagagcagactggccgccagaaagtacgccagagtggtgcagaagctgggcttccccgccagattcctggacttcaagatccagaacatggtgggcagctgcgacgtgagattccccatcagactggagggcctggtgctgacccaccagcagttcagcagctacgagcccgagctgttccccggcctgatctacagaatggtgaagcccagaatcgtgctgctgatcttcgtgagcggcaaggtggtgctgaccggcgccaaggagagaagcgagatctacgaggccttcgagaacatctaccccatcctgaagggcttcaagaaggcctag

SEQ ID NO: 260938 - protein, 766 aa, Artificial Sequence
  derived and/or modified sequence
MIWRSRAGAELFSLMALWEWIALSLHCWVLAVAAVSDQHATSPFDWLLSDKGPFHRSQEYTDFVDRSRQGFSTRYKIYREFGRWKVNNLAVERRNFLGSPLPLAPEFFRNIRLLGRRPTLQQITENLIKKYGTHFLLSATLGGEESLTIFVDKRKLSKRAEGSDSTTNSSSVTLETLHQLAASYFIDRDSTLRRLHHIQIASTAIKVTETRTGPLGCSNYDNLDSVSSVLVQSPENKIQLQGLQVLLPDYLQERFVQAALSYIACNSEGEFICKENDCWCHCGPKFPECNCPSMDIQAMEENLLRITETWKAYNSDFEESDEFKLFMKRLPMNYFLNTSTIMHLWTMDSNFQRRYEQLENSMKQLFLKAQKIVHKLFSLSKRCHKQPLISLPRQRTSTYWLTRIQSFLYCNENGLLGSFSEETHSCTCPNDQVVCTAFLPCTVGDASACLTCAPDNRTRCGTCNTGYMLSQGLCKPEVAESTDHYIGFETDLQDLEMKYLLQKTDRRIEVHAIFISNDMRLNSWFDPSWRKRMLLTLKSNKYKSSLVHMILGLSLQICLTKNSTLEPVLAVYVNPFGGSHSESWFMPVNENSFPDWERTKLDLPLQCYNWTLTLGNKWKTFFETVHIYLRSRIKSNGPNGNESIYYEPLEFIDPSRNLGYMKINNIQVFGYSMHFDPEAIRDLILQLDYPYTQGSQDSALLQLLEIRDRVNKLSPPGQRRLDLFSCLLRHRLKLSTSEVVRIQSALQAFNAKLPNTMDYDTTKLCS

SEQ ID NO: 260939 - protein, 92 aa, Artificial Sequence
  derived and/or modified sequence
MIWRSRAGAELFSLMALWEWIALSLHCWVLAVAAVSDQHATSPFDWLLSDKGPFHRSQEYTDFVDRSRQGFSTRYKIYRNMGHISCYLLLWE

SEQ ID NO: 260940 - DNA, 2301 bp, Artificial Sequence
  derived and/or modified sequence
atgatttggagaagccgggctggagccgaactttttagtttgatggccctatgggagtggatcgccctgtcattgcattgctgggtcctggccgtcgcggctgtttccgaccagcacgctaccagtccttttgactggctgctaagcgacaaaggcccatttcatcgttctcaggaatatacggactttgttgaccgttcgcggcagggattctccacccgctacaaaatttatagggaatttggtcgttggaaggtgaataatctggccgtagagaggaggaacttcctcggcagtccgctgccgctggcacctgagtttttccgtaatatacgactgctgggcagacggccaacactgcagcaaataacagaaaacctcataaagaaatatggcacgcactttctgctgtccgcaactcttggcggagaggagagcctcacaatctttgtggataagaggaaactcagtaagcgcgcagagggcagcgactccaccaccaactcttctagcgtgacccttgagaccctgcatcagctagcagcgagttattttattgatagggacagtacgctacgtcgacttcatcatatacagatcgcttccacggccatcaaagtgacagagacccggactgggccacttggctgcagtaattacgacaacttagactccgtctctagtgtcctagttcaatctcctgaaaataaaattcagctgcaagggctgcaagtgctcctccccgattatttacaggagcgcttcgtccaggctgcgctgtcttatatagcttgtaattcagaaggggagttcatatgcaaagaaaacgactgttggtgccactgtggacccaagtttcctgagtgtaactgccctagcatggacatccaggccatggaagagaatttgttgcgtattaccgaaacttggaaggcctataatagtgacttcgaggagtccgacgaattcaaactgtttatgaaacggttgcctatgaattacttcctaaatacctctacaattatgcatctctggaccatggactcaaatttccaacgcaggtacgagcagctggaaaattctatgaagcagctcttcctcaaagctcagaagatcgtgcacaaactgttctcgctgtctaagcggtgtcacaagcaaccactgatatcactcccccgtcagaggacatcaacatactggttgacccgcattcagtccttcctttattgcaatgagaacgggctgctgggttcttttagtgaagaaacacatagctgtacctgccccaacgaccaggttgtctgtaccgccttcctgccatgcaccgtgggggacgctagtgcttgcctgacatgcgcacccgataatagaacccggtgtgggacctgtaacaccggatatatgctgagccagggtctgtgtaagccagaggtcgctgaatctaccgatcattacattgggttcgagacggacctccaggacctcgaaatgaaatacctgctccagaagactgatcggaggatagaggtgcacgctatatttatctcgaacgatatgcggctgaattcctggttcgatccttcctggcgcaagaggatgttgctgacattgaagtccaacaagtacaaatcttctctagtgcatatgatactgggtcttagtctccagatttgcctgactaagaactccaccctcgaacccgtgctggccgtgtatgtgaatcctttcggtgggagccattctgaatcctggtttatgccggttaatgagaattccttccctgactgggaacggactaagctggacttgcctttgcaatgctataattggacccttacattaggcaacaagtggaagaccttcttcgagaccgttcatatctacttacgcagtcggattaagagcaatggaccgaatgggaatgaaagcatctactacgagcctctggagttcatagatcccagtagaaacctgggatatatgaagatcaataacattcaggtgtttggatattccatgcattttgatcccgaggcaatccgggacttgattttgcagctcgattatccatatactcagggcagccaggacagcgccctactccagctcctcgagatcagagacagagttaacaagctttctcccccaggccaaagacgactggacctattttcctgtctgctgcggcaccgtctcaagctgtccacctccgaggtggtcagaattcagagtgcactccaggcctttaatgcaaagcttcctaataccatggactatgacaccacaaagctatgcagttag

SEQ ID NO: 260941 - DNA, 279 bp, Artificial Sequence
  derived and/or modified sequence
atgatctggcggtcacgtgctggcgcagaactgttttctctgatggctctgtgggagtggattgccctgtcactgcattgctgggtccttgcagtggcagccgtgtccgaccaacacgctacttcccctttcgattggctactgagcgacaaagggccattccatcggtctcaggaatataccgactttgtggatcggtccaggcagggattttctacacgctacaagatttaccgcaacatgggtcacatcagttgttatttactcctgtgggagtag

SEQ ID NO: 260942 - DNA, 2301 bp, Artificial Sequence
  derived and/or modified sequence
atgatctggaggagtcgtgccggtgccgaactgttctcattgatggccctatgggaatggattgccctaagtttgcactgttgggtcctcgctgtggccgccgtgagtgatcagcacgctacatctcctttcgactggctactgtccgacaaagggcccttccaccggagtcaggaatatactgattttgtggaccgctctaggcaggggttttccaccaggtacaagatttaccgcgagtttggacggtggaaagtgaataatctggctgtcgagaggcgtaatttcttagggtcccccctgcccctcgcaccagaattcttccgcaatatcaggctcctaggccgccgaccaacgttacaacagatcaccgaaaatctgattaagaaatacggaacacatttcctgctctctgctactctgggaggagaagaatcattgaccattttcgtcgataagaggaaactttctaagagggccgagggatctgattctaccacaaactctagctcagtgacccttgagacacttcatcagttagccgccagctacttcattgacagagacagtacgctgagaagattgcaccatattcagatcgcctctacagccattaaagtcaccgaaacccggacgggtccactagggtgctccaactacgataatttggactctgtgtcctctgttcttgtgcagtctcccgagaataaaatacagctacaaggcctgcaggtcctccttcccgattatttgcaggaacgtttcgtgcaggcggctctctcgtatatcgcatgcaacagcgagggtgaattcatatgtaaagaaaacgattgttggtgtcattgcggcccaaagttccccgagtgcaactgtccgtcaatggacatccaggcaatggaggagaatctccttaggattacagaaacatggaaggcttacaattccgatttcgaagaatccgatgagttcaagctgttcatgaaacgtctgccaatgaactactttctgaacacctctaccataatgcacctatggacgatggattccaacttccagcgcagatatgagcaattggagaattcaatgaaacagttattcctgaaagcccagaagattgtgcacaagttattctccctttccaagcgatgccacaagcaacccctcatttccttaccccgccaacgaacttcaacatactggcttacccgtatccaatcattcctctactgcaatgagaatgggctgctgggttctttcagcgaagagacccattcttgtacctgccccaatgatcaagttgtgtgcacggctttccttccttgcaccgtgggggacgccagtgcttgtcttacctgtgcccccgacaatcgaactaggtgcggaacttgcaacactggctacatgctgagccaaggtctttgcaagcccgaggtggcagaatcgacagatcattacatcgggttcgagaccgacctccaggatcttgaaatgaaatatctattgcagaaaacagaccgtcgcattgaagtccacgccatctttatctctaatgatatgaggctaaattcctggttcgatccaagctggcgaaagcgaatgctacttacactcaaatctaataaatacaaatcttctctggtgcatatgattctaggactgagcctgcagatatgtctcactaaaaattctaccctggaacctgtgctcgctgtgtacgtgaatccttttggcggctcacactctgagtcctggtttatgcctgtgaacgagaattcattcccagactgggagcgaaccaagctggatttgccccttcagtgttataattggacgttgacccttgggaataagtggaaaactttcttcgagactgttcacatatatctcagaagccgtatcaagtcaaatggccccaatggaaatgagtctatctactacgagcctctggaattcatcgacccatccaggaacctgggttatatgaagattaataatatccaggtgtttggctactctatgcatttcgaccctgaagccatccgcgacttaattctgcagctggattatccgtacacccaaggatcccaagattcagcactcctgcagctgctggagattcgtgacagagtcaacaaactgtcaccccccggccagaggcggctggacttattctcttgcttactccgtcacagacttaaattatcaactagcgaagtggtgcgaatccaatcagccctccaggcttttaatgccaaacttcccaacacaatggattatgatactaccaaactgtgttcttag

SEQ ID NO: 260943 - DNA, 279 bp, Artificial Sequence
  derived and/or modified sequence
atgatctggaggtcacgcgcaggggctgaacttttctctctgatggccttgtgggaatggattgccctgagcttacactgttgggtgctggccgttgccgccgtgagtgatcaacatgctacctcccccttcgattggctcttgtcagacaaaggtccgtttcatagatcccaggagtataccgatttcgttgatcggtcacgtcagggtttttctaccagatataagatttatcgcaacatgggacacatcagttgctacttgctgctttgggaatag

SEQ ID NO: 260944 - DNA, 720 bp, Artificial Sequence
  derived and/or modified sequence
ctgatggctgttctcctagtccccaagagttgaaccggagaggcttttactttgcaccaggtcgagaacgtgatcagccctttagagaaggaacctccttgtaacaggaattctgctgggaaacgccgtgtaggcactacctccgaagataagatgcatgtttggagctgtgtaaaatgcccactggctgtttgaaagaaggaaaaggtgactagggttgcaaattaaccttagtatcacttaaaaatattctatctagtcaaatgtacgtaagcaaagaagagagcaccaggatataaaactgccacagcagcttggaagacagatgattcagattttggggactttcttttgcgtgttacatagatttgtttgtcatcatgcagttaagcaggtgttgagggaaagctgagagaatgaaggctctaaatccccagtggaagcatgatatggcgaagcagagctggtgctgaattgttctctctgatggctctatgggagtggatagcactgagtcttcattgctgggttttagcggttgctgctgtttcggatcagcatgccacaagccccttcgactggctcctctctgataagggacccttccatcgctcacaggaatacacagattttgtggacagaagccggcagggatttagcacaagatacaagatatacagaaatatgggacacatttcttgctatctgctactctgggag

SEQ ID NO: 260945 - DNA, 2301 bp, Artificial Sequence
  derived and/or modified sequence
atgatctggcgatccagggcgggagctgaacttttttcgttaatggcgttgtgggaatggattgcactttctctccactgctgggtgcttgccgtggccgccgtttcagaccagcacgcgacttcccccttcgattggctcctttcagacaagggcccattccacaggtctcaggagtacacagatttcgtcgaccggtctaggcaagggttctcaaccaggtataaaatctatcgcgagtttggtcgctggaaagtgaataatctggcagttgagcgcaggaactttttgggatcacccctccccctcgctccagaatttttccgtaacatccgattattgggccgccgacctaccctgcagcagatcaccgaaaatctcataaagaaatatggaacccattttctccttagcgctaccctcggcggcgaagagagcctcactatattcgtggacaaacggaaactttcaaaacgagccgaagggtctgattcaaccactaactcaagcagcgtgacactagaaaccctgcaccagctggccgctagttatttcatagaccgcgactccacattgaggcgacttcatcatattcagatagccagcacagcaattaaagttactgagacccgaaccggtccattaggatgttccaattacgataacctggacagcgtgtcttccgttctggtacagagtcccgagaacaaaatccagttacaagggcttcaggttctgttaccggactatttgcaggaacgattcgtgcaggccgccctcagctatatagcttgtaactcagaaggtgagtttatttgtaaagagaacgattgttggtgtcattgcggtccgaaatttcccgaatgtaattgcccttctatggacatccaggcaatggaggagaatctccttaggattacagaaacatggaaggcttacaattccgatttcgaagaatccgatgagttcaagctgttcatgaaacgtctgccaatgaactactttctgaacacctctaccataatgcacctatggacgatggattccaacttccagcgcagatatgagcaattggagaattcaatgaaacagttattcctgaaagcccagaagattgtgcacaagttattctccctttccaagcgatgccacaagcaacccctcatttccttaccccgccaacgaacttcaacatactggcttacgaggatccaatccttcctatattgtaatgagaatggcctgttgggctccttcagcgaagaaactcatagctgcacctgccctaacgatcaagtagtgtgcactgccttccttccctgcactgtgggagatgcttcagcctgccttacatgcgcccccgacaacagaacccggtgtggaacttgtaatactggctacatgctttcccaaggcctctgcaagcctgaagtagctgagtccactgaccattacattggtttcgaaaccgatctgcaagatctagaaatgaagtacctgttgcagaaaacagaccgtcgcattgaagtccacgccatctttatctctaatgatatgaggctaaattcctggttcgatccaagctggcgaaagcgaatgctacttacactcaaatctaataaatacaaatcttctctggtgcatatgattctaggactgagcctgcagatatgtctcactaaaaattctaccctggaacctgtgctcgctgtgtacgtgaatccttttggcggctcacactctgagtcctggtttatgcctgtgaacgagaattcattcccagactgggagcgaaccaagctcgacctcccactgcagtgttacaactggaccctcactctaggaaataaatggaaaaccttctttgagacagtccatatctacctcagaagcagaatcaaaagcaacggcccaaacggaaacgagtccatttactacgaacctcttgagtttatcgatccttctcggaacctcggttatatgaaaataaacaacattcaagtatttggatattctatgcattttgacccagaggcaattcgggatcttatccttcagcttgactacccatatactcaagggtcacaggattcagccctgttgcaactgttggaaattcgggaccgcgtgaataaattaagcccccccggtcagcgcagactcgatctcttttcatgcttactacggcataggctaaaactttctacctcggaagtggtgcgcatacagagcgccctgcaggcattcaatgcaaaactgcctaacaccatggattacgacaccactaagctctgctcatag

SEQ ID NO: 260946 - DNA, 2301 bp, Artificial Sequence
  derived and/or modified sequence
atgatctggagaagcagagccggcgccgagctgttcagcctgatggccctgtgggagtggatcgccctgagcctgcactgctgggtgctggccgtggccgccgtgagcgaccagcacgccaccagccccttcgactggctgctgagcgacaagggccccttccacagaagccaggagtacaccgacttcgtggacagaagcagacagggcttcagcaccagatacaagatctacagagagttcggcagatggaaggtgaacaacctggccgtggagagaagaaacttcctgggcagccccctgcccctggcccccgagttcttcagaaacatcagactgctgggcagaagacccaccctgcagcagatcaccgagaacctgatcaagaagtacggcacccacttcctgctgagcgccaccctgggcggcgaggagagcctgaccatcttcgtggacaagagaaagctgagcaagagagccgagggcagcgacagcaccaccaacagcagcagcgtgaccctggagaccctgcaccagctggccgccagctacttcatcgacagagacagcaccctgagaagactgcaccacatccagatcgccagcaccgccatcaaggtgaccgagaccagaaccggccccctgggctgcagcaactacgacaacctggacagcgtgagcagcgtgctggtgcagagccccgagaacaagatccagctgcagggcctgcaggtgctgctgcccgactacctgcaggagagattcgtgcaggccgccctgagctacatcgcctgcaacagcgagggcgagttcatctgcaaggagaacgactgctggtgccactgcggccccaagttccccgagtgcaactgccccagcatggacatccaggccatggaggagaacctgctgagaatcaccgagacctggaaggcctacaacagcgacttcgaggagagcgacgagttcaagctgttcatgaagagactgcccatgaactacttcctgaacaccagcaccatcatgcacctgtggaccatggacagcaacttccagagaagatacgagcagctggagaacagcatgaagcagctgttcctgaaggcccagaagatcgtgcacaagctgttcagcctgagcaagagatgccacaagcagcccctgatcagcctgcccagacagagaaccagcacctactggctgaccagaatccagagcttcctgtactgcaacgagaacggcctgctgggcagcttcagcgaggagacccacagctgcacctgccccaacgaccaggtggtgtgcaccgccttcctgccctgcaccgtgggcgacgccagcgcctgcctgacctgcgcccccgacaacagaaccagatgcggcacctgcaacaccggctacatgctgagccagggcctgtgcaagcccgaggtggccgagagcaccgaccactacatcggcttcgagaccgacctgcaggacctggagatgaagtacctgctgcagaagaccgacagaagaatcgaggtgcacgccatcttcatcagcaacgacatgagactgaacagctggttcgaccccagctggagaaagagaatgctgctgaccctgaagagcaacaagtacaagagcagcctggtgcacatgatcctgggcctgagcctgcagatctgcctgaccaagaacagcaccctggagcccgtgctggccgtgtacgtgaaccccttcggcggcagccacagcgagagctggttcatgcccgtgaacgagaacagcttccccgactgggagagaaccaagctggacctgcccctgcagtgctacaactggaccctgaccctgggcaacaagtggaagaccttcttcgagaccgtgcacatctacctgagaagcagaatcaagagcaacggccccaacggcaacgagagcatctactacgagcccctggagttcatcgaccccagcagaaacctgggctacatgaagatcaacaacatccaggtgttcggctacagcatgcacttcgaccccgaggccatcagagacctgatcctgcagctggactacccctacacccagggcagccaggacagcgccctgctgcagctgctggagatcagagacagagtgaacaagctgagcccccccggccagagaagactggacctgttcagctgcctgctgagacacagactgaagctgagcaccagcgaggtggtgagaatccagagcgccctgcaggccttcaacgccaagctgcccaacaccatggactacgacaccaccaagctgtgcagctag

SEQ ID NO: 260947 - DNA, 279 bp, Artificial Sequence
  derived and/or modified sequence
atgatctggagaagcagagccggcgccgagctgttcagcctgatggccctgtgggagtggatcgccctgagcctgcactgctgggtgctggccgtggccgccgtgagcgaccagcacgccaccagccccttcgactggctgctgagcgacaagggccccttccacagaagccaggagtacaccgacttcgtggacagaagcagacagggcttcagcaccagatacaagatctacagaaacatgggccacatcagctgctacctgctgctgtgggagtag

SEQ ID NO: 260948 - DNA, 2301 bp, Artificial Sequence
  derived and/or modified sequence
atgatctggaggtctagagcaggtgccgaacttttctctttgatggcactctgggagtggatcgccctgtcattgcattgctgggtgctcgctgtagccgcggtctcggaccagcacgcgaccagcccgtttgattggttgctcagcgacaaaggcccattccacagaagtcaggagtacacagactttgtagaccgatccagacaaggatttagcacgaggtacaagatctaccgagagttcgggcgttggaaagtaaataatctagccgtcgagcggcgtaacttcctaggtagccccctgcctttagccccagaattcttccggaacatccgattgctggggagaagacctacgctgcagcagattaccgaaaatctcatcaagaagtatgggacacacttcctgctatcggccacattaggcggtgaggagtcactgactatcttcgtcgacaagagaaaactgagcaagcgcgctgaaggatctgatagcactacgaactcttcttcggtcaccttagaaaccctccaccagctcgccgcctcctacttcatcgacagagactcaaccttgagaaggctgcaccatattcagattgcaagtaccgctatcaaggtgaccgagacccgcaccggccccctcgggtgcagcaactatgacaatctggattcagtgtcgtcagtccttgttcagtcccccgaaaataaaattcaactccagggactgcaggtcctcctccctgattatttacaggaaaggttcgtccaagcagcacttagttacattgcttgtaattcagagggcgagtttatttgtaaggagaacgactgctggtgccactgtgggcctaagttcccggagtgcaactgtccgagcatggatatacaggccatggaggagaatctgctgagaattacagaaacatggaaagcatataactccgatttcgaagagtccgatgagtttaaactgttcatgaagcggcttccaatgaattacttcctaaatacctccaccattatgcacttgtggaccatggacagcaattttcagaggaggtatgaacagctcgagaatagtatgaagcaactgtttcttaaagcccagaagattgtgcacaagctgttttcactctcaaaaagatgtcacaagcaacccctaatctccttgccccggcagcgaacctccacatactggttgacacggatccagagctttttgtactgtaatgagaacggactgcttggcagcttctctgaggagacgcacagctgtacatgccctaacgaccaggtggtctgtactgctttcctgccttgtactgttggagatgcatctgcgtgcttgacttgcgctccagataataggaccagatgcggaacctgcaacacaggctatatgctaagtcagggattatgcaagccagaagtggccgaatccacagaccattatattggctttgagactgatctccaggacctggaaatgaagtacttgttacagaagacagacaggcggatcgaagttcacgccatctttatatctaacgatatgcgcttaaactcatggttcgatccatcctggcgaaagaggatgctccttacacttaagtcaaacaaatacaaaagcagtctggtgcacatgatcctggggttgtctttacagatctgcctcaccaaaaattctactcttgagcctgttctcgccgtgtacgttaaccctttcggagggtcccacagcgagtcctggttcatgcccgttaatgagaacagcttccccgattgggaaagaactaagctggatctccctctccagtgctacaactggaccttaacacttggcaataagtggaaaaccttttttgagacggtgcacatatacctgcgaagtcggatcaagtctaacggtcccaatgggaacgagtccatctactatgagccacttgagttcattgacccctccagaaacctcggatacatgaagattaataacatccaggtgttcggttacagcatgcattttgatcctgaggcaatccgagacctgattctgcagctggattatccctacacccagggctcgcaagattctgcgctactccaactgctcgagataagggaccgagtcaataagctgagccccccgggtcaacgcagactagacttgttttcatgtctgttgcgacacagattaaaactgtctacttctgaagtagtccgcatacagagcgcactgcaggcgtttaacgcaaagctgccgaatacgatggattacgacaccacgaagctctgctcttag

SEQ ID NO: 260949 - DNA, 279 bp, Artificial Sequence
  derived and/or modified sequence
atgatttggaggtccagggcaggagcggagcttttctccctgatggcgctgtgggaatggatcgccctcagcttacactgctgggttctggcagtcgcggcagtgagcgatcaacacgcaacatctccgtttgactggctcctcagtgataaggggccctttcaccggtcccaggagtataccgactttgtcgacaggagtaggcaggggttcagcacgcgttacaagatttatcgtaacatgggtcacatctcatgttaccttctgctctgggaatag

SEQ ID NO: 260950 - DNA, 2889 bp, Artificial Sequence
  derived and/or modified sequence
ttcgtggctctctgtgtaactggtttttacttggttacatgccaccaggaactgctgattattttaaagtcctactaccctgcagctcactactttaccttgatttggaagatcatggaatatctatttgaatcctggatgtatttttctcacagtcttcttgcttcctgaaatttcctctggtgttgagggaaagctgagagaatgaaggctctaaatccccagtggaagcatgatatggcgaagcagagctggtgctgaattgttctctctgatggctctatgggagtggatagcactgagtcttcattgctgggttttagcggttgctgctgtttcggatcagcatgccacaagccccttcgactggctcctctctgataagggacccttccatcgctcacaggaatacacagattttgtggacagaagccggcagggatttagcacaagatacaagatatacagggagtttggccgctggaaagtaaataaccttgcagttgagagaagaaatttccttggctctcctctgcctcttgcccctgaattcttccgcaacataagacttttgggacgtcgacctacccttcagcaaatcacagaaaaccttatcaagaaatatgggacacatttcttgctatctgctactctgggaggagaggagtcactcacaatttttgtggacaagcggaagttgagcaaacgagctgaaggaagtgattccaccaccaatagctcttcggtcactctggagacgctacatcagctagccgcttcttatttcattgacagggacagcacccttcggagacttcaccacattcaaattgcatccactgccataaaggtaacagaaacacggactggtcctcttggctgcagtaactatgacaacctagattctgtcagttctgttctggttcagagtcctgagaataagattcagttgcaagggcttcaagtacttctcccagactatcttcaggaacgttttgtacaagcagctttgagctacattgcttgcaattcagagggagagtttatctgcaaggaaaatgactgctggtgtcactgtggtcccaaatttccagaatgcaactgcccctccatggacattcaagccatggaagagaatcttcttcgaataactgaaacctggaaagcttacaacagtgactttgaggaatcagatgaattcaagttatttatgaaaaggctacctatgaattatttcctcaacacatctactataatgcatttgtggacaatggattctaattttcagcgccgttatgaacaactggagaacagcatgaaacaacttttcctaaaggcgcagaaaattgtacacaagctttttagccttagcaagaggtgtcataaacaacccctcatcagcctgccaagacaaagaacctcaacctactggcttactcgcatccagtcttttctctactgcaatgagaacggcctcctaggcagcttttcagaagagacgcactcgtgcacgtgtccgaatgaccaggtggtctgcaccgcgttcctgccctgcacagtgggagacgcctctgcctgcctgacatgcgcaccagacaaccgcacccgctgcggcacctgcaacaccggctacatgctcagccaggggctctgcaagcctgaagtcgccgagtccaccgatcactatattggctttgaaactgacctgcaagatctcgagatgaaatatctgctgcagaaaacggacagacgaatagaagtccatgccatttttatcagcaatgacatgcgcctcaatagctggtttgatccctcctggcgtaagcggatgctcctcaccttgaagagcaataagtacaagtcaagtctggtccatatgattttgggtctctctttacagatttgcttaactaaaaacagcaccttggagccagtgttggctgtttatgtcaatcccttcggaggcagccactctgagagctggtttatgcctgtgaatgaaaacagctttccagactgggagcggactaagttggacctacccctgcagtgttataactggacattaactctggggaacaaatggaagacattttttgagacagtacacatctacctgagaagtcgcatcaagtccaatggtcccaatggtaatgagagcatttactatgaacctctggagtttattgacccttcccggaacctgggctatatgaaaatcaataacattcaagtgtttggctacagcatgcactttgaccctgaagcaattcgggacctgattttgcagctggactacccctatactcagggatcccaggattcagcacttttgcaactactagagatcagagaccgtgtaaataaactctccccacctggtcagcgtcgtctagatcttttctcttgcttgcttcgtcatagactcaagctgtctactagtgaggtggtgaggatccaatctgctctgcaggcgtttaatgccaaattgccaaacacaatggattatgacacgaccaaattatgtagttaaccataaatgtcaagcacaacccaaaatcttgaaggagtttttacagtgcttttgtggaacagtttatgtttggaagagtaaatttaaattgtcttttcaatatctgtcttatatcagtcaataacattggatggcaatttacacacatgaacttgctgacaatgaatatattatacagcagttttggtttatgaatgacataaatactgacaccagtctagaagacattctactttttacaataaatttcatttgtaattttatatgttccgtggcaatgcttttgtgcattacatcctctagagggaacataaaaagataccaataaaattttgtagctgaacagttattaaaaa

SEQ ID NO: 260951 - DNA, 2301 bp, Artificial Sequence
  derived and/or modified sequence
atgatctggaggagcagagctggagctgagctgttcagcctgatggccctgtgggagtggatcgccctgagcctgcactgctgggtgctggccgtggccgctgtgtctgaccagcacgccaccagcccctttgactggctgctgagtgacaagggccccttccacaggagccaggagtacacagactttgtggacaggagccggcagggcttcagcacccgctacaagatctaccgggagtttggccgctggaaggtgaacaacctggccgtggagaggaggaacttcctgggcagccccctgcccctggcccctgagttcttcaggaacatccggctgctgggccggcggcccaccctgcagcagatcacagaaaatctcatcaagaagtatggcacccacttcctgctgagcgccaccctgggcggggaggagagcctgaccatctttgtggacaagaggaagctgagcaagagagctgagggcagtgacagcaccaccaacagcagctctgtgaccctggagaccctgcaccagctggccgccagctacttcatcgaccgggacagcaccctgcggcggctgcaccacatccagatcgccagcacagccatcaaggtgacagagaccaggacaggccccctgggctgcagcaactatgacaacctggacagcgtgtcctctgtgctggtgcagagccctgagaacaagatccagctgcagggcctgcaggtgctgctgcctgactacctgcaggagagatttgtgcaggccgccctgagctacatcgcctgcaacagcgagggggagttcatctgcaaggaaaatgactgctggtgccactgcggccccaagtttcctgagtgcaactgccccagcatggacatccaggccatggaggagaacctgctgcgcatcacagagacctggaaggcctacaacagcgactttgaggagagtgatgagttcaagctgttcatgaagaggctgcccatgaactacttcctgaacaccagcaccatcatgcacctgtggaccatggacagcaacttccagaggagatatgagcagctggagaacagcatgaagcagctgttcctgaaggcccagaagatcgtgcacaagctgttcagcctgagcaagcgctgccacaagcagcccctcatcagcctgccccggcagaggaccagcacctactggctgacccgcatccagagcttcctgtactgcaatgaaaatggcctgctgggcagcttcagcgaggagacccacagctgcacctgccccaatgaccaggtggtgtgcacagccttcctgccctgcaccgtgggagatgccagcgcctgcctgacctgtgccccagacaacagaacccgctgtggcacctgcaacacaggctacatgctgagccagggcctgtgcaagccagaggtggccgagagcacagaccactacatcggctttgaaacagacctgcaggacctggagatgaagtacctgctgcagaagacagaccggcgcatcgaggtgcacgccatcttcatcagcaatgacatgaggctgaacagctggtttgaccccagctggaggaagaggatgctgctgaccctgaagagcaacaagtacaagagcagcctggtgcacatgatcctgggcctgagcctgcagatctgcctgaccaagaacagcaccctggagcctgtgctggccgtgtatgtgaacccctttggaggcagccacagcgagagctggttcatgcctgtgaatgaaaacagcttcccagactgggagaggaccaagctggacctgcccctgcagtgctacaactggaccctgaccctgggcaacaagtggaagaccttctttgagaccgtgcacatctacctgcggagccgcatcaagagcaatggccccaatggaaatgaaagcatctactatgagcccctggagttcatcgaccccagcaggaacctgggctacatgaagatcaacaacatccaggtgtttggctacagcatgcactttgatcctgaggccatccgggacctgatcctgcagctggactacccctacacccagggcagccaggacagcgccctgctgcagctgctggagatccgggacagagtgaacaagctgagccccccaggccagaggcggctggacctcttcagctgcctgctgcggcaccggctgaagctgagcaccagcgaggtggtgcgcatccagagcgccctgcaggccttcaatgccaagctgcccaacaccatggactatgacaccaccaagctgtgcagctag

SEQ ID NO: 260952 - DNA, 279 bp, Artificial Sequence
  derived and/or modified sequence
atgatctggaggagcagagctggagctgagctgttcagcctgatggccctgtgggagtggatcgccctgagcctgcactgctgggtgctggccgtggccgctgtgtctgaccagcacgccaccagcccctttgactggctgctgagtgacaagggccccttccacaggagccaggagtacacagactttgtggacaggagccggcagggcttcagcacccgctacaagatctacagaaacatgggccacatcagctgctacctgctgctgtgggagtag

SEQ ID NO: 260953 - DNA, 2301 bp, Artificial Sequence
  derived and/or modified sequence
atgatctggcggagccgggccggcgccgagctgttcagcctgatggccttatgggaatggattgctttatccctccactgttgggttctagccgtggccgcagtttccgaccagcatgcaacctcgccttttgattggctgctctctgataagggtccctttcacaggagccaggagtacaccgattttgtcgaccggagccggcaggggttctccacccggtataagatttacagggagttcggcaggtggaaagttaacaatctggcagttgaacgccgaaattttctgggctctcctcttccactcgccccagaattctttagaaacattcgcctgctcgggcgaagacctactctgcagcaaatcaccgagaatctaatcaaaaaatatgggacacattttctgctgtctgctacccttggaggtgaggagagtttgactatcttcgtcgataagcggaagctgagtaagcgcgctgagggtagcgactccactacaaatagctcatcagtaacactggaaactctacatcagctggctgcatcatatttcattgaccgagattctacactgcggagactgcaccatattcaaatcgcctctaccgctatcaaagtgactgaaacccgaacaggaccgctgggttgcagcaactatgataacttggactctgtctcgagtgtgctcgtacagagcccagagaacaagatacagttgcagggactccaggtgttgctgcccgattacctgcaggagcgcttcgtgcaggcagcattatcctacattgcatgtaactcagaaggggaatttatttgcaaagagaacgactgctggtgccactgcggtccaaagttcccggaatgcaactgccctagcatggacattcaggctatggaagagaacctgttgcggatcacagaaacatggaaagcctacaactccgacttcgaagaaagcgatgaattcaaactgtttatgaagaggctcccgatgaactacttcttaaacacaagtacaattatgcacctgtggactatggatagtaacttccaacgccggtacgaacaattagagaactcaatgaagcaactcttcctcaaggcccagaaaattgtgcataagctgttctccctttctaaaaggtgccacaaacaaccgcttatttctttgccccggcagaggacctctacctactggctgactcggatccagtccttcctctactgtaatgaaaatgggctgcttggctcattcagtgaggagactcatagctgtacatgtccgaacgaccaagtggtgtgtaccgcattcctaccctgtaccgtcggcgatgctagcgcatgcctgacttgtgcccctgacaaccgcacccggtgcggcacgtgtaacacaggatatatgctatcgcagggcctgtgtaaacccgaagtcgcagaatccacagatcattacatagggttcgagactgacttgcaggacctcgagatgaaatacttgctgcagaagacagatagaaggattgaagttcacgccatcttcatctcaaacgacatgagattgaatagttggtttgaccccagttggaggaaacggatgcttctgacacttaaaagtaacaagtataaatccagccttgtgcacatgatcctcgggctgagcttgcagatctgcctcactaagaattccaccctcgaaccagtcttggctgtgtacgtgaacccttttggaggtagtcactctgagagctggttcatgcccgttaacgaaaactcttttcccgactgggagcggacaaagctggatctgcctctccagtgctacaactggactctgactctgggcaataagtggaagaccttttttgagacagtgcatatttatctgcgcagtcgcatcaagtctaatggccctaatggcaatgaatcgatctattacgagccactggagttcatcgacccatcaagaaatctcgggtacatgaaaataaacaacattcaggtgttcggctactctatgcattttgatcctgaggctattcgcgatctcattctccagctggattacccttacacccaagggtcgcaggacagtgctctgctgcaactgctcgaaatcagagaccgcgtaaacaagctgtccccacccggacagaggcgcttggatcttttcagctgcctgctgagacacagactgaagttaagtactagtgaggtggtcagaattcagtccgccctacaggcatttaacgcgaagctgcctaataccatggactacgacacaactaagctctgttcttag

SEQ ID NO: 260954 - DNA, 279 bp, Artificial Sequence
  derived and/or modified sequence
atgatctggcggagccgggccggcgccgagctgttcagcctgatggctctgtgggagtggattgccttgagtctccactgctgggttctcgccgtggcggccgtcagcgatcagcacgcgaccagtccttttgattggctcctctctgataaaggtccattccatcggagccaggaatatactgattttgttgatcgctcacgccaaggtttctccacacgatataaaatttatcgcaatatggggcatatttcttgctaccttctgctttgggaatag

SEQ ID NO: 260955 - RNA, 2301 nt, Artificial Sequence
  derived and/or modified sequence
augaucuggaggagucgugccggugccgaacuguucucauugauggcccuaugggaauggauugcccuaaguuugcacuguuggguccucgcuguggccgccgugagugaucagcacgcuacaucuccuuucgacuggcuacuguccgacaaagggcccuuccaccggagucaggaauauacugauuuuguggaccgcucuaggcagggguuuuccaccagguacaagauuuaccgcgaguuuggacgguggaaagugaauaaucuggcugucgagaggcguaauuucuuaggguccccccugccccucgcaccagaauucuuccgcaauaucaggcuccuaggccgccgaccaacguuacaacagaucaccgaaaaucugauuaagaaauacggaacacauuuccugcucucugcuacucugggaggagaagaaucauugaccauuuucgucgauaagaggaaacuuucuaagagggccgagggaucugauucuaccacaaacucuagcucagugacccuugagacacuucaucaguuagccgccagcuacuucauugacagagacaguacgcugagaagauugcaccauauucagaucgccucuacagccauuaaagucaccgaaacccggacggguccacuagggugcuccaacuacgauaauuuggacucuguguccucuguucuugugcagucucccgagaauaaaauacagcuacaaggccugcagguccuccuucccgauuauuugcaggaacguuucgugcaggcggcucucucguauaucgcaugcaacagcgagggugaauucauauguaaagaaaacgauuguuggugucauugcggcccaaaguuccccgagugcaacuguccgucaauggacauccaggcaauggaggagaaucuccuuaggauuacagaaacauggaaggcuuacaauuccgauuucgaagaauccgaugaguucaagcuguucaugaaacgucugccaaugaacuacuuucugaacaccucuaccauaaugcaccuauggacgauggauuccaacuuccagcgcagauaugagcaauuggagaauucaaugaaacaguuauuccugaaagcccagaagauugugcacaaguuauucucccuuuccaagcgaugccacaagcaaccccucauuuccuuaccccgccaacgaacuucaacauacuggcuuacccguauccaaucauuccucuacugcaaugagaaugggcugcuggguucuuucagcgaagagacccauucuuguaccugccccaaugaucaaguugugugcacggcuuuccuuccuugcaccgugggggacgccagugcuugucuuaccugugcccccgacaaucgaacuaggugcggaacuugcaacacuggcuacaugcugagccaaggucuuugcaagcccgagguggcagaaucgacagaucauuacaucggguucgagaccgaccuccaggaucuugaaaugaaauaucuauugcagaaaacagaccgucgcauugaaguccacgccaucuuuaucucuaaugauaugaggcuaaauuccugguucgauccaagcuggcgaaagcgaaugcuacuuacacucaaaucuaauaaauacaaaucuucucuggugcauaugauucuaggacugagccugcagauaugucucacuaaaaauucuacccuggaaccugugcucgcuguguacgugaauccuuuuggcggcucacacucugaguccugguuuaugccugugaacgagaauucauucccagacugggagcgaaccaagcuggauuugccccuucaguguuauaauuggacguugacccuugggaauaaguggaaaacuuucuucgagacuguucacauauaucucagaagccguaucaagucaaauggccccaauggaaaugagucuaucuacuacgagccucuggaauucaucgacccauccaggaaccuggguuauaugaagauuaauaauauccagguguuuggcuacucuaugcauuucgacccugaagccauccgcgacuuaauucugcagcuggauuauccguacacccaaggaucccaagauucagcacuccugcagcugcuggagauucgugacagagucaacaaacugucaccccccggccagaggcggcuggacuuauucucuugcuuacuccgucacagacuuaaauuaucaacuagcgaaguggugcgaauccaaucagcccuccaggcuuuuaaugccaaacuucccaacacaauggauuaugauacuaccaaacuguguucuuag

SEQ ID NO: 260956 - RNA, 279 nt, Artificial Sequence
  derived and/or modified sequence
augaucuggaggucacgcgcaggggcugaacuuuucucucugauggccuugugggaauggauugcccugagcuuacacuguugggugcuggccguugccgccgugagugaucaacaugcuaccucccccuucgauuggcucuugucagacaaagguccguuucauagaucccaggaguauaccgauuucguugaucggucacgucaggguuuuucuaccagauauaagauuuaucgcaacaugggacacaucaguugcuacuugcugcuuugggaauag

SEQ ID NO: 260957 - RNA, 2301 nt, Artificial Sequence
  derived and/or modified sequence
augaucuggcgauccagggcgggagcugaacuuuuuucguuaauggcguugugggaauggauugcacuuucucuccacugcugggugcuugccguggccgccguuucagaccagcacgcgacuucccccuucgauuggcuccuuucagacaagggcccauuccacaggucucaggaguacacagauuucgucgaccggucuaggcaaggguucucaaccagguauaaaaucuaucgcgaguuuggucgcuggaaagugaauaaucuggcaguugagcgcaggaacuuuuugggaucaccccucccccucgcuccagaauuuuuccguaacauccgauuauugggccgccgaccuacccugcagcagaucaccgaaaaucucauaaagaaauauggaacccauuuucuccuuagcgcuacccucggcggcgaagagagccucacuauauucguggacaaacggaaacuuucaaaacgagccgaagggucugauucaaccacuaacucaagcagcgugacacuagaaacccugcaccagcuggccgcuaguuauuucauagaccgcgacuccacauugaggcgacuucaucauauucagauagccagcacagcaauuaaaguuacugagacccgaaccgguccauuaggauguuccaauuacgauaaccuggacagcgugucuuccguucugguacagagucccgagaacaaaauccaguuacaagggcuucagguucuguuaccggacuauuugcaggaacgauucgugcaggccgcccucagcuauauagcuuguaacucagaaggugaguuuauuuguaaagagaacgauuguuggugucauugcgguccgaaauuucccgaauguaauugcccuucuauggacauccaggcaauggaggagaaucuccuuaggauuacagaaacauggaaggcuuacaauuccgauuucgaagaauccgaugaguucaagcuguucaugaaacgucugccaaugaacuacuuucugaacaccucuaccauaaugcaccuauggacgauggauuccaacuuccagcgcagauaugagcaauuggagaauucaaugaaacaguuauuccugaaagcccagaagauugugcacaaguuauucucccuuuccaagcgaugccacaagcaaccccucauuuccuuaccccgccaacgaacuucaacauacuggcuuacgaggauccaauccuuccuauauuguaaugagaauggccuguugggcuccuucagcgaagaaacucauagcugcaccugcccuaacgaucaaguagugugcacugccuuccuucccugcacugugggagaugcuucagccugccuuacaugcgcccccgacaacagaacccgguguggaacuuguaauacuggcuacaugcuuucccaaggccucugcaagccugaaguagcugaguccacugaccauuacauugguuucgaaaccgaucugcaagaucuagaaaugaaguaccuguugcagaaaacagaccgucgcauugaaguccacgccaucuuuaucucuaaugauaugaggcuaaauuccugguucgauccaagcuggcgaaagcgaaugcuacuuacacucaaaucuaauaaauacaaaucuucucuggugcauaugauucuaggacugagccugcagauaugucucacuaaaaauucuacccuggaaccugugcucgcuguguacgugaauccuuuuggcggcucacacucugaguccugguuuaugccugugaacgagaauucauucccagacugggagcgaaccaagcucgaccucccacugcaguguuacaacuggacccucacucuaggaaauaaauggaaaaccuucuuugagacaguccauaucuaccucagaagcagaaucaaaagcaacggcccaaacggaaacgaguccauuuacuacgaaccucuugaguuuaucgauccuucucggaaccucgguuauaugaaaauaaacaacauucaaguauuuggauauucuaugcauuuugacccagaggcaauucgggaucuuauccuucagcuugacuacccauauacucaagggucacaggauucagcccuguugcaacuguuggaaauucgggaccgcgugaauaaauuaagcccccccggucagcgcagacucgaucucuuuucaugcuuacuacggcauaggcuaaaacuuucuaccucggaaguggugcgcauacagagcgcccugcaggcauucaaugcaaaacugccuaacaccauggauuacgacaccacuaagcucugcucauag

SEQ ID NO: 260958 - protein, 1086 aa, Artificial Sequence
  derived and/or modified sequence
MSPTQWDFPVELCCRPMAFVTLTGLDVVYNAVHRAVWDAFCANRRADRVPISFKVLPGDHEYPKCRPKRTSYEWYIPKGILKTGWMNKHLNLVPALVVVFYELDWDEPQWKEKQSECATRVEIVRQSLQGRNTKVAVVLIQKKTPLPPGEDVIASERAAALCNACELSGKSLFVLPHTDHLVGYIIRLENAFYEHAQTYYYTEIRRVKSHKEFLNKTTHQLLFVRHQFKIAFFSELKQDTQNALKNYRTAYNLVHELRAHETNILEIKTMAGFINYKICRLCFQHNTPLDAIAQFRKHIDLCKKKIGSAELSFEHDAWMSKQFQAFGDLFDEAIKLGLTAIQTQNPGFYYQQAAYYAQERKQLAKTLCNHEASVMYPNPDPLETQTGVLDFYGQRSWRQGILSFDLSDPEKEKVGILAIQLKERNVVHSEIIITLLSNAVAQFKKYKCPRMKSHLMVQMGEEYYYAKDYTKALKLLDYVMCDYRSEGWWTLLTSVLTTALKCSYLMAQLKDYITYSLELLGRASTLKDDQKSRIEKNLINVLMNESPDPEPDCDILAVKTAQKLWADRISLAGSNIFTIGVQDFVPFVQCKAKFHAPSFHVDVPVQFDIYLKADCPHPIRFSKLCVSFNNQEYNQFCVIEEASKANEVLENLTQGKMCLVPGKTRKLLFKFVAKTEDVGKKIEITSVDLALGNETGRCVVLNWQGGGGDAASSQEALQAARSFKRRPKLPDNEVHWDSIIIQASTMIISRVPNISVHLLHEPPALTNEMYCLVVTVQSHEKTQIRDVKLTAGLKPGQDANLTQKTHVTLHGTELCDESYPALLTDIPVGDLHPGEQLEKMLYVRCGTVGSRMFLVYVSYLINTTVEEKEIVCKCHKDETVTIETVFPFDVAVKFVSTKFEHLERVYADIPFLLMTDLLSASPWALTIVSSELQLAPSMTTVDQLESQVDNVILQTGESASECFCLQCPSLGNIEGGVATGHYIISWKRTSAMENIPIITTVITLPHVIVENIPLHVNADLPSFGRVRESLPVKYHLQNKTDLVQDVEISVEPSDAFMFSGLKQIRLPAQAFYTYQYFCQATGSTHG

SEQ ID NO: 260959 - DNA, 3261 bp, Artificial Sequence
  derived and/or modified sequence
atgagccccacccagtgggacttccccgtggagctgtgctgcagacccatggccttcgtgaccctgaccggcctggacgtggtgtacaacgccgtgcacagagccgtgtgggacgccttctgcgccaacagaagagccgacagagtgcccatcagcttcaaggtgctgcccggcgaccacgagtaccccaagtgcagacccaagagaaccagctacgagtggtacatccccaagggcatcctgaagaccggctggatgaacaagcacctgaacctggtgcccgccctggtggtggtgttctacgagctggactgggacgagccccagtggaaggagaagcagagcgagtgcgccaccagagtggagatcgtgagacagagcctgcagggcagaaacaccaaggtggccgtggtgctgatccagaagaagacccccctgccccccggcgaggacgtgatcgccagcgagagagccgccgccctgtgcaacgcctgcgagctgagcggcaagagcctgttcgtgctgccccacaccgaccacctggtgggctacatcatcagactggagaacgccttctacgagcacgcccagacctactactacaccgagatcagaagagtgaagagccacaaggagttcctgaacaagaccacccaccagctgctgttcgtgagacaccagttcaagatcgccttcttcagcgagctgaagcaggacacccagaacgccctgaagaactacagaaccgcctacaacctggtgcacgagctgagagcccacgagaccaacatcctggagatcaagaccatggccggcttcatcaactacaagatctgcagactgtgcttccagcacaacacccccctggacgccatcgcccagttcagaaagcacatcgacctgtgcaagaagaagatcggcagcgccgagctgagcttcgagcacgacgcctggatgagcaagcagttccaggccttcggcgacctgttcgacgaggccatcaagctgggcctgaccgccatccagacccagaaccccggcttctactaccagcaggccgcctactacgcccaggagagaaagcagctggccaagaccctgtgcaaccacgaggccagcgtgatgtaccccaaccccgaccccctggagacccagaccggcgtgctggacttctacggccagagaagctggagacagggcatcctgagcttcgacctgagcgaccccgagaaggagaaggtgggcatcctggccatccagctgaaggagagaaacgtggtgcacagcgagatcatcatcaccctgctgagcaacgccgtggcccagttcaagaagtacaagtgccccagaatgaagagccacctgatggtgcagatgggcgaggagtactactacgccaaggactacaccaaggccctgaagctgctggactacgtgatgtgcgactacagaagcgagggctggtggaccctgctgaccagcgtgctgaccaccgccctgaagtgcagctacctgatggcccagctgaaggactacatcacctacagcctggagctgctgggcagagccagcaccctgaaggacgaccagaagagcagaatcgagaagaacctgatcaacgtgctgatgaacgagagccccgaccccgagcccgactgcgacatcctggccgtgaagaccgcccagaagctgtgggccgacagaatcagcctggccggcagcaacatcttcaccatcggcgtgcaggacttcgtgcccttcgtgcagtgcaaggccaagttccacgcccccagcttccacgtggacgtgcccgtgcagttcgacatctacctgaaggccgactgcccccaccccatcagattcagcaagctgtgcgtgagcttcaacaaccaggagtacaaccagttctgcgtgatcgaggaggccagcaaggccaacgaggtgctggagaacctgacccagggcaagatgtgcctggtgcccggcaagaccagaaagctgctgttcaagttcgtggccaagaccgaggacgtgggcaagaagatcgagatcaccagcgtggacctggccctgggcaacgagaccggcagatgcgtggtgctgaactggcagggcggcggcggcgacgccgccagcagccaggaggccctgcaggccgccagaagcttcaagagaagacccaagctgcccgacaacgaggtgcactgggacagcatcatcatccaggccagcaccatgatcatcagcagagtgcccaacatcagcgtgcacctgctgcacgagccccccgccctgaccaacgagatgtactgcctggtggtgaccgtgcagagccacgagaagacccagatcagagacgtgaagctgaccgccggcctgaagcccggccaggacgccaacctgacccagaagacccacgtgaccctgcacggcaccgagctgtgcgacgagagctaccccgccctgctgaccgacatccccgtgggcgacctgcaccccggcgagcagctggagaagatgctgtacgtgagatgcggcaccgtgggcagcagaatgttcctggtgtacgtgagctacctgatcaacaccaccgtggaggagaaggagatcgtgtgcaagtgccacaaggacgagaccgtgaccatcgagaccgtgttccccttcgacgtggccgtgaagttcgtgagcaccaagttcgagcacctggagagagtgtacgccgacatccccttcctgctgatgaccgacctgctgagcgccagcccctgggccctgaccatcgtgagcagcgagctgcagctggcccccagcatgaccaccgtggaccagctggagagccaggtggacaacgtgatcctgcagaccggcgagagcgccagcgagtgcttctgcctgcagtgccccagcctgggcaacatcgagggcggcgtggccaccggccactacatcatcagctggaagagaaccagcgccatggagaacatccccatcatcaccaccgtgatcaccctgccccacgtgatcgtggagaacatccccctgcacgtgaacgccgacctgcccagcttcggcagagtgagagagagcctgcccgtgaagtaccacctgcagaacaagaccgacctggtgcaggacgtggagatcagcgtggagcccagcgacgccttcatgttcagcggcctgaagcagatcagactgcccgcccaggccttctacacctaccagtacttctgccaggccaccggcagcacccacggctag

SEQ ID NO: 260960 - DNA, 3261 bp, Artificial Sequence
  derived and/or modified sequence
atgagccctactcagtgggactttcctgtggagctctgctgccgacccatggcttttgtcaccctgaccggcctggacgtcgtctataacgcggtccacagggcggtttgggacgcattctgcgccaatagacgggccgacagagttcctatatctttcaaagtgcttcccggtgaccatgaataccctaaatgcagacctaagaggacctcttatgagtggtacatccctaagggtatcttgaagaccgggtggatgaacaagcaccttaatctcgtacccgcactcgttgtggtgttttatgaactggattgggatgagcctcagtggaaagaaaaacaatctgagtgtgcgacgcgtgtggaaatcgtacggcagtcactccagggaaggaacaccaaggtggcagtggtgctcatccagaaaaagacgccgcttcctcccggggaggacgtcatcgcctctgagcgggctgcagccctctgtaatgcttgcgagcttagcgggaaatccttgtttgtccttccacatacagatcatctcgtcggctatattattcgacttgagaatgccttctacgaacatgcccagacatattactacacagaaatccgcagagtcaagagccacaaggaattcctgaataagactactcatcagctactgtttgtgcgacatcagtttaaaattgcctttttctcagagctgaaacaggacacccaaaatgcattaaaaaattataggacagcctataacctggtacacgagcttcgcgctcatgaaactaatatactggaaattaaaaccatggccggattcatcaattataagatctgtcgactctgcttccagcacaatactcccctcgacgctatcgcacagtttcgtaagcatattgatctttgtaagaaaaagattggctcagccgagctttcttttgagcacgacgcatggatgtctaagcagtttcaggccttcggcgatctcttcgacgaagctataaagctcggcctgacggcgatacagacccagaatccaggattctactaccagcaggcagcctactatgcgcaggaacggaagcaactggccaagactctgtgcaaccacgaggcgtccgttatgtacccgaatccagaccccctggagactcaaactggcgtcctggatttctacgggcagcgctcttggcgtcagggaatactgagttttgatctgtcagaccccgagaaggagaaggtgggtatcctggcgattcagttaaaagaacggaacgtggtgcattctgagatcatcatcaccctcttaagcaacgccgtggctcaattcaaaaaatacaagtgcccccggatgaagtcccacctcatggttcaaatgggagaagagtattattacgccaaggactacaccaaggcactcaaactgcttgattatgtgatgtgtgattaccgtagcgagggctggtggaccctgctgacgtctgtgttgaccactgccctcaaatgctcatacctgatggctcagctgaaagattacatcacatacagcctcgagcttcttggtagggcctcaacgctcaaggacgatcagaagagtagaatcgaaaaaaacctgataaatgtgctcatgaatgagagcccagatcctgagccagattgcgacatcctggcagtgaagactgcgcaaaagttgtgggctgatagaatcagcctcgcaggaagcaacatcttcacgattggcgtacaagattttgtgccattcgtccagtgtaaggctaagttccacgcaccatcatttcatgtcgatgtgcctgtgcagtttgatatttatctcaaagccgattgtccccaccctattagattcagcaagctgtgtgtttcgttcaataaccaagaatacaaccagttttgcgtcatagaagaggcctccaaggccaacgaagttttagaaaatctcactcagggtaaaatgtgtctggtcccgggcaaaacccgtaagctgctttttaaattcgtagcaaaaacagaagacgtaggcaaaaagatcgagatcacctcggtggatctagcccttggtaatgaaaccggacggtgcgtggtcctcaattggcaaggtggcggtggggacgcagcatcatcccaggaggccctccaggcagcaaggtctttcaagcgcagacctaaactcccagacaatgaagtacattgggattccatcattatccaggcaagcacaatgatcatcagtagggtcccaaacatctctgtgcatctgctgcacgagccgcctgctttgactaacgaaatgtattgcctggtagtaaccgttcagagtcacgaaaaaacacaaataagggacgtaaagctgacagcaggtctgaagcctgggcaagacgccaacctaacccaaaagacgcacgtgactcttcatggcaccgaactgtgcgatgagtcctatcctgcactgctgactgatattccagtcggtgatctccatccaggcgagcagctcgagaagatgctctacgttagatgtggcactgttggctctagaatgttcctggtctacgtgtcatacctgatcaacacgacggtagaagaaaaggagatagtatgtaaatgccacaaggatgagactgtgacaatcgaaaccgtctttccattcgacgtggctgtcaagttcgtgtccaccaagttcgaacatctcgagcgtgtctacgcagacattcctttcctactcatgacagacctactgtctgcatcaccctgggcccttaccatcgtgtcctctgaactgcagctagcaccgagtatgacgactgtggatcaactggaatcacaggtggacaacgttatactgcagactggggagtccgcttcagaatgtttctgcctacagtgtcctagcttggggaatatcgaggggggagttgcgacaggccactacataatttcctggaaacgaacatcggcaatggaaaacatcccaattataactactgttattacactgccccatgtgattgtggaaaatattccccttcacgtaaatgccgacctacctagcttcgggcgggttcgagaaagtcttcccgtgaagtaccatctgcagaataagacagatctggtacaggacgtggaaatcagcgtggaaccctctgatgcattcatgttctctggtctgaagcaaatccggctgcctgctcaggcattttacacttaccagtacttctgccaggcaactggctctacccatgggtag

SEQ ID NO: 260961 - DNA, 3261 bp, Artificial Sequence
  derived and/or modified sequence
atgagccccacccagtgggacttccctgtggagctgtgctgccggcccatggcctttgtgaccctgaccggcctggatgtggtgtacaatgctgtgcacagagctgtgtgggatgccttctgtgccaacagaagagctgacagagtgcccatctccttcaaggtgctgcccggggaccacgagtaccccaagtgccggcccaagaggaccagctatgagtggtacatccccaagggcatcctgaagacaggctggatgaacaagcacctgaacctggtgcctgccctggtggtggtgttctatgagctggactgggatgagccccagtggaaggagaagcagagtgaatgtgccaccagggtggagatcgtgcggcagagcctgcagggcaggaacaccaaggtggccgtggtgctgatccagaagaagacccccctgcccccaggagaagatgtgattgccagcgagagagctgctgccctgtgcaatgcctgtgagctgagcggcaagagcctgtttgtgctgccccacacagaccacctggtgggctacatcatccggctggagaatgccttctatgaacatgcccagacctactactacacagagatcagaagagtgaagagccacaaggagttcctgaacaagaccacccaccagctgctgtttgtgcgccaccagttcaagatcgccttcttcagcgagctgaagcaggacacccagaatgccctgaagaactacagaacagcctacaacctggtgcatgagctgcgggcccacgagaccaacatcctggagatcaagaccatggccggcttcatcaactacaagatctgccgcctgtgcttccagcacaacacccccctggatgccatcgcccagttcaggaagcacatcgacctgtgcaagaagaagattggcagcgctgagctgagctttgaacatgatgcctggatgagcaagcagttccaggccttcggggacctgtttgatgaggccatcaagctgggcctgacagccatccagacccagaaccctggcttctactaccagcaggccgcctactatgcccaggagaggaagcagctggccaagaccctgtgcaaccacgaggcctctgtgatgtaccccaacccagaccccctggagacccagacaggagtgctggacttctacggccagaggtcctggaggcagggcatcctgagctttgacctgagtgaccctgagaaggagaaggtgggcatcctggccatccagctgaaggagagaaatgtggtgcacagcgagatcatcatcaccctgctgagcaatgctgtggcccagttcaagaagtacaagtgccccaggatgaagagccacctgatggtgcagatgggagaggagtactactatgccaaggactacaccaaggccctgaagctgctggactatgtgatgtgtgactacagaagtgagggctggtggaccctgctgacctctgtgctgaccacagccctgaagtgcagctacctgatggcccagctgaaggactacatcacctacagcctggagctgctgggccgggccagcaccctgaaggatgaccagaagagccgcatcgagaagaacctgatcaacgtgctgatgaatgaatctccagaccctgagccagactgtgacatcctggccgtgaagacagcccagaagctgtgggccgaccgcatcagcctggccggcagcaacatcttcaccatcggcgtgcaggactttgtgccctttgtgcagtgcaaggccaagttccacgcccccagcttccacgtggatgtgcctgtgcagtttgacatctacctgaaggctgactgcccccaccccatccgcttcagcaagctgtgtgtgtccttcaacaaccaggagtacaaccagttctgtgtgattgaggaggccagcaaggccaatgaggtgctggagaacctgacccagggcaagatgtgcctggtgcctgggaagaccaggaagctgctcttcaagtttgtggccaagacagaagatgtgggcaagaagattgagatcacctctgtggacctggccctgggcaatgaaacaggccgctgtgtggtgctgaactggcagggcggcggcggagatgctgccagcagccaggaggccctgcaggccgcccggagcttcaagagaagacccaagctgcctgacaatgaggtgcactgggacagcatcatcatccaggccagcaccatgatcatcagccgggtgcccaacatctctgtgcacctgctgcacgagcccccagccctgaccaatgagatgtactgcctggtggtgacagtgcagagccatgagaagacccagatcagagatgtgaagctgacagctggcctgaagccaggccaggatgccaacctgacccagaagacccacgtgaccctgcacggcacagagctgtgtgatgagagctacccagccctgctgacagacatccctgtgggggacctgcaccctggagagcagctggagaagatgctgtatgtgcgctgtggcaccgtgggcagcaggatgttcctggtgtatgtgtcctacctgatcaacaccaccgtggaggagaaggagatcgtgtgcaagtgccacaaggatgaaacagtgaccatcgagaccgtcttcccctttgatgtggccgtgaagtttgtgtccaccaagtttgagcacctggagcgggtgtatgctgacatccccttcctgctgatgacagacctgctgagcgccagcccctgggccctgaccatcgtgagcagcgagctgcagctggcccccagcatgaccaccgtggaccagctggagagccaggtggacaacgtcatcctgcagacaggagagagcgccagcgagtgcttctgcctgcagtgccccagcctgggcaacattgaaggaggagtggccaccggccactacatcatctcctggaagaggaccagcgccatggagaacatccccatcatcaccaccgtcatcaccctgccccacgtgattgtggagaacatccccctgcacgtgaatgctgacctgcccagctttggccgggtgcgggagagcctgcctgtgaagtaccacctgcagaacaagacagacctggtgcaggatgtggagatctctgtggagcccagtgatgccttcatgttttctggcctgaagcagatccggctgcctgcccaggccttctacacctaccagtacttctgccaggccaccggcagcacccatggatag

SEQ ID NO: 260962 - DNA, 3261 bp, Artificial Sequence
  derived and/or modified sequence
atgagccccacccagtgggacttccccgtggagctgtgctgccggccaatggcatttgtgacactgactggcctggatgttgtgtacaatgccgtccacagagccgtgtgggacgctttttgcgccaaccggagggcagacagggttccgatctctttcaaagtccttcctggcgatcatgagtatcctaaatgcaggccaaagaggacctcatacgaatggtatatccctaaggggattctgaagactggctggatgaacaagcacctgaacttagtgcccgccctggtcgtggtgttttatgagcttgactgggatgaacctcagtggaaagaaaaacagagtgagtgtgccacgagagtcgagatagtaagacagtcactccagggaagaaacacgaaagtggcagtggtccttatccagaagaagaccccactgccccccggcgaagacgtgatcgctagcgaacgggctgccgctctctgcaatgcatgtgaactcagtggcaaaagcctgtttgtactccctcacaccgatcatctggtcggatacatcattcgcctggaaaacgcgttttatgaacatgcccagacctactactacacagaaatacgccgcgtaaaatcccataaagaattcttgaataagacaacgcaccagctgctgtttgtccgacatcagttcaaaatcgcctttttctctgagttgaagcaggacactcagaatgcactgaaaaactatagaaccgcttacaacctggtccatgagctgagagcccatgagaccaacatactggagattaagacaatggctgggtttatcaattacaaaatatgcagattgtgtttccagcataatactcccctggatgctatcgcccaatttcgcaagcacatcgatctgtgtaagaaaaagatcggatctgccgagcttagctttgaacacgacgcctggatgagcaagcagttccaggcgtttggcgacctgtttgacgaggcaatcaaactcgggctgaccgcaatccagacccagaaccctgggttctattaccaacaggcagcctactatgcccaggagcgaaagcaactggcgaagactctgtgtaaccatgaggcatccgtgatgtatccaaatccagaccctttggaaacccagaccggagtgctcgatttctacggacagcgaagctggaggcagggaatactgagctttgacctgtctgatcctgaaaaggagaaggttggcattttggcgattcagctcaaggaacgaaacgttgtgcactctgagatcatcatcaccctgctctccaacgccgtggctcagttcaaaaaatacaagtgtcctagaatgaaatcccatctcatggtgcagatgggagaagagtactattacgctaaggactacaccaaagccctcaagcttttagactacgtcatgtgtgattacagatctgaaggttggtggaccctgcttacatctgtgcttactacagctttgaagtgctcctatctaatggcccaactgaaagattacattacctactctctcgaactgctaggcagagcgagtacactgaaagatgaccaaaaaagtcggatagagaagaatcttatcaacgtgctcatgaacgagtccccagaccccgaacccgactgcgacatcctcgccgtgaaaaccgcgcagaagttgtgggcagaccgcatcagtctcgctgggtcaaatatcttcaccattggagtacaggatttcgtgcccttcgttcagtgcaaggctaaatttcatgccccttctttccacgtggacgtgcccgtacagtttgatatttacttgaaagcagattgcccccaccccattcggttcagcaagctttgcgtgagttttaacaatcaggaatataaccagttctgcgtgatcgaggaagccagcaaggccaatgaagttttagagaacctgacccaggggaagatgtgcttggttccaggcaagacacgcaagctcctgttcaaatttgtggccaagacagaagacgtgggaaagaagatcgaaattacaagcgtcgacctcgccttgggaaatgaaacaggtagatgcgtggttttgaattggcaaggtggagggggagacgcggcctcttcacaggaggccctgcaggctgcacgctcattcaagcgtcgaccgaagctccctgataacgaggtgcactgggactctatcattatacaagcaagcaccatgattatctctagggttcccaacatatctgtgcacctgctccatgagccacctgccttgacaaatgaaatgtactgcctagtagtgacggtacaaagccacgagaagactcagattagagatgttaaactgacagcaggactgaagccaggccaagatgcaaacctgacacaaaagacacatgtgacactgcacgggactgaactgtgcgatgaatcttacccggctctgctcacagacatccctgtgggcgatctgcatcccggcgaacagttagagaaaatgctttacgtcagatgtggcacagtaggaagcaggatgttcttagtctacgttagttatctcatcaacaccaccgtggaagaaaaagagatagtctgtaagtgtcacaaagatgaaactgtgaccattgagaccgttttcccctttgacgtggccgtgaagttcgtatctacaaagttcgagcacctggagagggtgtatgccgatatcccatttttgctcatgaccgatctgctctctgcctcaccatgggctctgacaatcgtctcaagcgaactgcaactcgcaccttccatgacaacagtggaccaactggaatcgcaggtggataacgtgattttgcagaccggcgaatctgcatccgagtgtttttgtctgcaatgtccgagtttagggaacatcgaaggcggtgtggccaccggacactacattatttcctggaagcggaccagtgcgatggagaacattcctattataaccaccgtgatcacccttcctcacgtgatagtggaaaatattcctttgcacgtgaatgccgaccttccgagcttcgggcgggtgcgcgaaagtctccccgtcaaataccatttgcagaacaaaacggacctggtgcaggatgtcgagatctccgtcgagccatcagatgccttcatgttcagtggtcttaaacagatccgcttaccagcccaagcattttatacttatcagtacttctgccaagccaccgggtctacccacgggtag

SEQ ID NO: 260963 - DNA, 3261 bp, Artificial Sequence
  derived and/or modified sequence
atgtcccccactcaatgggatttccccgtggagctgtgctgccggcctatggcgttcgtcacccttacaggccttgatgtagtgtacaacgccgtgcatagagccgtgtgggatgccttctgcgcaaaccgtcgtgccgaccgcgtccctattagctttaaagtgctccccggtgaccatgaatatcccaagtgtcgcccaaaacgtacctcctacgaatggtatatccccaaagggatactgaaaactggttggatgaataagcacctgaacctggtacctgccttagtagtcgtattttatgaactggactgggatgagccacagtggaaggagaaacaaagcgaatgtgccacccgcgtggaaatagtgcggcaaagcttgcaggggaggaacactaaagtggctgtagttttaatccagaaaaaaactcctctgcccccaggggaagatgtgattgcatccgagagggcagcggcactgtgtaatgcttgtgagctgagtggtaagagccttttcgtcctgcctcatactgaccatcttgtcggctacattatcagattagaaaatgccttctacgaacatgcgcagacctactattacaccgagatcaggagggtgaagagccacaaggagttcttgaacaagactacccaccaattgctttttgtaagacaccagttcaagatcgcctttttttccgagttgaaacaggacacccaaaatgcgctcaagaactaccgaacagcttataatttagtacacgagctccgcgctcacgagaccaacattctcgagatcaagacaatggcgggattcatcaactataaaatctgtcgcctctgtttccaacacaacacccccttagacgctatcgcacagtttaggaagcatatagacctctgtaagaagaaaattgggtcggccgagcttagctttgagcatgatgcttggatgagcaaacaatttcaggctttcggtgacctgttcgacgaggccataaaactggggctgactgctatccagacacagaacccagggttctattaccagcaggccgcatattacgctcaggagcgcaagcagctcgccaaaacactttgtaatcatgaggcatctgtcatgtaccctaaccctgaccctttggagactcagaccggggtgctggatttctacggacaacggtcttggcggcagggtattctctcctttgatcttagcgatccagaaaaggaaaaggtggggattctagccatacagctgaaagaaagaaatgtagtgcattcggagattatcatcaccctcctctcaaatgcagtggctcagttcaagaaatataagtgccctagaatgaaatcgcacctgatggtgcagatgggggaggagtactattacgcaaaagactatacaaaggccttgaagctactggactacgttatgtgtgattaccgctccgaaggatggtggacactgctaacatccgtcctcaccaccgcccttaaatgttcctatttgatggcacagctgaaagactacatcacatactcgctcgagttgctgggccgagcctccacgttaaaagatgaccagaagagtcgcatagaaaaaaatctaatcaatgtgctgatgaatgagtctcccgaccccgagcccgactgtgacatcctggccgtcaagacggcgcagaagctttgggcagatcggattagcctcgccggtagcaacatttttaccatcggagtgcaggattttgtgccatttgtgcagtgtaaggctaagttccacgctccttctttccacgtagatgtccctgtgcagtttgatatctatctgaaggccgactgcccgcaccccattcgcttttcaaagctttgtgtaagtttcaataatcaagagtataaccaattctgtgtgatcgaggaagcatccaaggcaaacgaagtcctcgagaatctcacccagggcaaaatgtgtttggtaccaggcaaaactcgcaaactgttatttaagttcgtggctaaaactgaagatgtaggcaaaaaaatcgagataacttcagtggaccttgccttagggaacgaaaccgggagatgcgtggtgctaaactggcagggtgggggaggagacgctgcatccagtcaggaggctctgcaggctgccagaagcttcaaacgacgccctaagctccctgataatgaagtccactgggattccattataatccaggcctcaactatgattatttctagagtcccaaacatctccgtgcaccttttacacgagccacctgctttaaccaatgaaatgtactgcctcgtggtgactgtgcaaagccacgaaaagacgcagatcagggacgtcaaactgaccgccggactcaagccaggccaggatgccaatctgacacagaaaacacacgtgacccttcatggaaccgagctttgcgacgaatcctaccccgctcttcttacagatataccagtcggtgatttacacccaggcgaacagctggaaaaaatgctatacgtccggtgtggcacggttgggtccagaatgttcctggtctacgtctcttacctgataaatacgacagtggaggagaaagagatcgtgtgcaaatgccacaaagatgagaccgtgaccatcgaaaccgtgtttccattcgacgtcgcagtgaagtttgtgagcactaagttcgagcacttagagagagtgtatgcggatattccattcctccttatgacagacctgctgagcgcgtccccttgggctcttactatagtttctagcgaactgcagctggccccaagtatgacaacggtggatcagctggaatctcaggtggataatgtgattctacagaccggagagtctgcctctgagtgtttctgcctgcaatgccctagcctcggaaatattgaagggggagtagcgaccgggcactatatcatcagctggaagcggacttcagccatggagaacataccaatcattacaacggtgatcactttgccacacgtgattgtggagaatatccctctccacgtgaatgcagatctgcccagtttcggccgagtgcgggagagtctaccagttaagtaccatctgcagaacaagactgatctggttcaggatgtggagatttccgttgagcccagtgacgccttcatgtttagcggactgaaacaaatccgactgcccgcacaggcattctatacctaccagtacttttgtcaggcgaccggctccacacacggatag

SEQ ID NO: 260964 - DNA, 4406 bp, Artificial Sequence
  derived and/or modified sequence
gggtacagggaagtctcgcctgttggaactggctgtggggctgcggcggtggggacgggccacggcgttctgtgacatccccccgcctcccctcgtcttctcccggctggcggcgaccggcctcagctgcagcgggcccggggcgtggggcctgggttttttgtgacatcgtaaacatgagccccacacagtgggacttccctgtggaattatgttgccggcctatggcctttgttactctaacgggcctggatgtagtttataatgcagtccatcgagctgtctgggacgccttctgtgcaaatcggagagctgatcgagtaccaatttctttcaaggtgctcccaggtgaccatgagtatcccaaatgtagacccaagagaacttcatatgagtggtacattcctaaagggatcttaaagactggctggatgaataagcatctgaatctggtgccagccctggtggttgtgttctatgaactggactgggatgagcctcagtggaaagaaaagcagtctgagtgcgccaccagagtggaaatagtcaggcaaagtttacaaggaagaaacacaaaagttgcagtggttctgattcagaagaaaacccctttgcccccaggagaagatgtcattgcttcagaaagggctgcagctttatgcaatgcatgtgaactctcaggaaagtctttgtttgtactgccgcacactgaccaccttgtgggttatattataagattggaaaatgccttttatgaacatgcacagacttattactacactgagatcagaagagtgaaatctcataaagaatttttgaataaaacaacacaccagcttttatttgttaggcatcagttcaaaatagctttcttcagtgagttgaaacaagatacacaaaatgcgctgaagaattataggaccgcctataatcttgtacacgaattgagagcccatgaaactaatattctggaaattaagactatggcaggatttataaactacaagatctgtaggctgtgttttcaacacaacaccccattggatgcaattgctcagttccgaaaacacatcgacttgtgtaagaaaaagattggaagtgcagagctgtcttttgagcatgatgcatggatgtctaaacaattccaggcctttggagatttatttgatgaagctattaagttagggttaacagctattcaaactcagaatcctggtttctattaccagcaggcagcatactatgcccaggagcggaaacagcttgcaaaaaccctctgtaaccacgaagcttctgtaatgtatcccaatcctgatcccttagaaacacaaacaggcgttcttgacttttatggacaaagatcatggcgacaaggaatactaagttttgatctttctgatcctgaaaaagaaaaggtgggaattcttgccattcagctgaaggagagaaatgttgttcactctgagataatcataactcttctgagcaatgctgttgcacagttcaagaagtataagtgcccgcgaatgaaaagtcacctaatggttcagatgggagaggaatattattacgcaaaggattataccaaagctttgaagttgctggattatgtgatgtgtgattatcggagtgaaggatggtggactctgctcacttctgtattaactacagctctgaagtgctcctacctcatggcccaattaaaggattacattacttactccctagaactccttggtagagcttcaactctgaaagatgaccagaagtctcggatagaaaagaacctcataaatgttttaatgaatgaaagtcctgatccagaacccgactgtgatatcttagctgtgaaaactgctcagaagctgtgggcagaccgaatttctctggctggcagcaatattttcacaataggagtacaggactttgtgccatttgtgcagtgcaaagccaagtttcatgccccaagttttcatgttgatgttcctgttcagtttgatatttatctgaaggctgattgtccacatcccattaggttttccaagctctgtgtcagctttaataatcaggaatacaaccagttctgtgtaatagaagaagcatccaaagcaaatgaagttttagaaaatctgactcaaggaaagatgtgcctagttcctggcaaaacaagaaaactgttatttaagtttgttgcaaaaactgaagatgtgggaaagaaaattgagattacttcagtggatcttgctctgggcaatgagacgggaagatgtgtggttttaaattggcagggaggaggaggagatgctgcttcctcccaagaagccttacaggcagctcggtctttcaaaaggcgacctaagctacctgacaatgaagttcactgggacagcattataattcaggcaagcacaatgatcatatccagagtcccaaacatttctgtacatctgctacatgaaccccctgcactgactaatgaaatgtattgtttggttgtgactgttcagtcccatgaaaagacccaaatcagagatgtgaagctcaccgctggcttaaaaccaggacaggatgccaatttaactcagaagactcacgtgactcttcatggaacagaactgtgtgatgaatcctacccggctttactcactgacattcctgttggagacttacatccaggggaacagctggaaaaaatgttgtatgttcgctgtggaacagtgggttccagaatgtttcttgtatatgtttcttacctgataaatacaaccgttgaagaaaaagaaattgtttgcaagtgtcacaaggatgaaactgtaacaattgaaacagtctttccatttgatgttgcggttaaatttgtttctaccaagtttgagcacctggaaagggtttatgctgacatcccctttctgttgatgacggacctcttaagtgcctcaccctgggccctcactattgtttccagtgagctccagcttgctccatccatgaccacagtggaccagctcgagtctcaagtggacaatgttatcttacagactggagagagtgctagtgaatgcttttgtcttcaatgcccatctcttggaaatattgaaggtggagtagcaaccgggcattatattatctcttggaaaaggacctcagcaatggagaatatccccatcatcacaactgtcatcactctgccgcacgtgattgtggagaatatccctctccatgtgaatgcagatctgccgtcatttgggcgtgtcagagagtcgttacctgtcaagtatcacctacagaataagaccgacttagttcaagatgtagaaatttctgtggagcccagtgatgccttcatgttctcaggtctcaaacagattcgattacctgctcaggcgttttatacctaccagtatttttgtcaagccacagggtcgactcatggatgatacctctattgctgctgcatgatgttcaagaccggcccttggctgttgttacagagatgttgggcagagctatgcaggtgtttcattgtgaactctagctttgatcatggtaaaaagttaaccttttctattttttaatggatgttataccaactattcagaggaactcatacttcaaaaatattaggaaaatctgtcttatagtttctctaataaatatctgaaatctcagtacgacatgaaagaatgtcagaccattgttattgttgaaagtcatttgatgaatggtaaattctatgaaaagtaagtgatttgcatgtataatatcaggaaaattaagcatcccaagtgtgactggacaaagagagcagatgcaccagtgcctgtgccataaagttccgaatcccccatgtgtctctttcagagctggccagaccggaaataaatcattctcataaattcagtgtgtactcagaacacatacacaacaacatagggagttgtatgactgatacggaaaacttccagaaagttttaatcaaagcagtttaattaaggtatcaaaaatatctttgcttactatcaagaagtgtcaaataggttcagcttgctgccaaaatatggatcatttatgaagcaggttcatattttagaggtgttaataaaatcctcatcggaaaagatccaaagtgcaaggatttgattataaacataatttcctagactgaaagtttttggaaaagatgcagggtctgagtcaggccttctggttatattgtgcagtttcaaaagaactatttaaaactcttgaaaactcatgtaaataaaaatcatagggtgaaaattgtatttgttaaaataccttaataatttaaaatgacctgatttcctggaaaattttattattcaaaaggtggaggcattgtaaaaaggaaatagtgatgtaaataaacatgttctctttcaagt

SEQ ID NO: 260965 - protein, 465 aa, Artificial Sequence
  derived and/or modified sequence
MVQKKPAELQGFHRSFKGQNPFELAFSLDQPDHGDSDFGLQCSARPDMPASQPIDIPDAKKRGKKKKRGRATDSFSGRFEDVYQLQEDVLGEGAHARVQTCINLITSQEYAVKIIEKQPGHIRSRVFREVEMLYQCQGHRNVLELIEFFEEEDRFYLVFEKMRGGSILSHIHKRRHFNELEASVVVQDVASALDFLHNKGIAHRDLKPENILCEHPNQVSPVKICDFDLGSGIKLNGDCSPISTPELLTPCGSAEYMAPEVVEAFSEEASIYDKRCDLWSLGVILYILLSGYPPFVGRCGSDCGWDRGEACPACQNMLFESIQEGKYEFPDKDWAHISCAAKDLISKLLVRDAKQRLSAAQVLQHPWVQGCAPENTLPTPMVLQRNSCAKDLTSFAAEAIAMNRQLAQHDEDLAEEEAAGQGQPVLVRATSRCLQLSPPSQSKLAQRRQRASLSSAPVVLVGDHA

SEQ ID NO: 260966 - protein, 334 aa, Artificial Sequence
  derived and/or modified sequence
MLYQCQGHRNVLELIEFFEEEDRFYLVFEKMRGGSILSHIHKRRHFNELEASVVVQDVASALDFLHNKGIAHRDLKPENILCEHPNQVSPVKICDFDLGSGIKLNGDCSPISTPELLTPCGSAEYMAPEVVEAFSEEASIYDKRCDLWSLGVILYILLSGYPPFVGRCGSDCGWDRGEACPACQNMLFESIQEGKYEFPDKDWAHISCAAKDLISKLLVRDAKQRLSAAQVLQHPWVQGCAPENTLPTPMVLQRNSCAKDLTSFAAEAIAMNRQLAQHDEDLAEEEAAGQGQPVLVRATSRCLQLSPPSQSKLAQRRQRASLSSAPVVLVGDHA

SEQ ID NO: 260967 - protein, 405 aa, Artificial Sequence
  derived and/or modified sequence
MPASQPIDIPDAKKRGKKKKRGRATDSFSGRFEDVYQLQEDVLGEGAHARVQTCINLITSQEYAVKIIEKQPGHIRSRVFREVEMLYQCQGHRNVLELIEKMRGGSILSHIHKRRHFNELEASVVVQDVASALDFLHNKGIAHRDLKPENILCEHPNQVSPVKICDFDLGSGIKLNGDCSPISTPELLTPCGSAEYMAPEVVEAFSEEASIYDKRCDLWSLGVILYILLSGYPPFVGRCGSDCGWDRGEACPACQNMLFESIQEGKYEFPDKDWAHISCAAKDLISKLLVRDAKQRLSAAQVLQHPWVQGCAPENTLPTPMVLQRNSCAKDLTSFAAEAIAMNRQLAQHDEDLAEEEAAGQGQPVLVRATSRCLQLSPPSQSKLAQRRQRASLSSAPVVLVGDHA

SEQ ID NO: 260968 - DNA, 1398 bp, Artificial Sequence
  derived and/or modified sequence
atggtgcagaaaaaaccagcggagctccagggcttccaccgtagttttaaggggcagaacccctttgagctcgccttttcgttggaccagccggatcacggcgacagcgatttcggcctccagtgttccgcccgccctgatatgcctgcttcccaaccgatagatatccctgacgccaagaagcgaggtaagaaaaagaaacggggccgagccactgactccttcagcggacgcttcgaagacgtttatcagctgcaggaggatgtgctgggcgaaggcgcgcacgctagagtccaaacatgcatcaacttaattactagccaggaatacgcggtaaagatcatcgagaagcagcccggtcacatacgctccagggtctttagagaagttgagatgctatatcaatgtcagggccaccgtaacgtcctggagctgatagaattctttgaagaggaggaccgcttctatctagtgttcgagaaaatgagaggcggtagcatcctaagtcacatccataagagacggcattttaatgaattggaagctagcgtcgttgttcaagacgtcgcgtccgccctagacttcctccacaacaaaggcatcgctcatcgggacttgaagcccgagaacatcctttgcgaacacccaaaccaggtgtcgcccgtgaaaatatgcgactttgacctcggttctggaataaagcttaatggggactgtagtccaatttcaacaccagagcttctgaccccttgcggaagcgccgagtacatggcccctgaagttgtcgaagcgttttccgaagaagcttccatctatgacaaaagatgcgacttgtggtctctgggagtcatcctctacattctactgtccggttaccccccatttgttggcagatgtggatcagactgtggctgggaccgcggcgaagcctgccccgcatgtcagaatatgcttttcgaatctatccaggaaggcaagtatgagtttcctgataaggattgggctcacatctcttgtgcagctaaggatctgatttcaaaactgctcgtgagggacgccaagcagcgtctgagcgccgcacaagttcttcagcacccctgggtccagggctgcgcacccgagaataccctgccaacccccatggtcctccaacggaacagttgcgcgaaagatctgacgtcatttgctgccgaggccattgctatgaataggcagctggctcagcacgacgaagatctggcagaagaagaggctgcagggcagggacaacctgtgctagtccgtgcgaccagcagatgcctgcagctgtctccccccagccagagcaagctcgcgcaacgtcggcagcgcgccagcctgtcatccgctcctgtagttttagttggtgatcacgcatag

SEQ ID NO: 260969 - DNA, 1005 bp, Artificial Sequence
  derived and/or modified sequence
atgctgtaccagtgtcaaggccatcgcaatgtccttgagcttatcgagtttttcgaagaagaggatcgtttttacctagtgtttgagaagatgcgcggaggctccatcctcagccacattcataagcggcgccactttaatgaactcgaggcgagcgtggtggttcaggacgtcgcctccgctctcgatttcttacataacaagggaatcgcacaccgagatcttaagcccgaaaatattctgtgcgaacaccctaaccaagtgagtccggtgaagatttgtgactttgatcttggctcagggattaaacttaatggagattgttctcccatttccacgcctgaactccttaccccttgcggatctgcagagtacatggcaccggaagtggtcgaggccttctcagaagaggctagtatttacgacaagcggtgtgatctctggagcctgggcgtaatcctgtacatattattgtcgggctatcctccatttgtggggcgctgcggttccgactgcgggtgggacagaggcgaggcttgtcctgcctgccagaacatgctctttgagtccatacaggaaggtaaatacgagttcccagacaaagactgggcacacattagttgtgccgcgaaagatttgatttctaagctgctggtgagggacgctaagcagcggttgtcagctgctcaggtactgcagcacccctgggtgcaggggtgtgctccagaaaacacgctgcccacccctatggttcttcaaagaaattcttgcgcgaaagatctgacgtcttttgcggccgaagccattgcaatgaaccgccaactggctcagcacgacgaggacctcgcagaggaagaagcagctgggcagggacagccagtactggtgcgcgcaacatctcggtgcttgcaattatctcctcctagccagtccaaacttgcccagcgacggcagcgtgctagcctctccagtgcgcccgtggtcctcgtgggagaccacgcttag

SEQ ID NO: 260970 - DNA, 1218 bp, Artificial Sequence
  derived and/or modified sequence
atgcccgcctcacagccaattgatattccggacgccaaaaaacgggggaagaagaaaaagcgcggtcgggcgacagattccttcagcggccgattcgaagatgtttatcagctgcaggaggacgttctgggggaaggtgctcatgcccgggtgcagacatgtattaacctcatcacatctcaggagtacgccgtcaaaataatcgagaagcagcctggccatattcgcagccgcgtgtttagggaagtcgaaatgctgtaccagtgtcagggccataggaatgtcctagagttaatagaaaagatgaggggtggcagcatactttcccacattcataaaaggaggcattttaatgagctggaggccagtgtcgtggtccaagacgtggccagcgctctggattttttgcacaacaaagggatcgctcacagggatctaaaacccgagaatattttgtgtgaacaccccaaccaggtcagcccggtgaaaatatgtgactttgatctggggtctggtatcaaactgaatggagactgtagtccaatatctacccctgaattgctcaccccctgcggatcggccgaatatatggcccctgaggtggttgaagctttttcggaagaggcctcaatttacgacaaaagatgcgatctatggtctcttggcgtgatcttatatattctcctgtccggatatcccccattcgtgggacgctgcggctcggactgtggctgggatcggggcgaggcatgcccggcctgccagaatatgctgtttgagagcattcaagagggcaaatatgaattccctgacaaagactgggcccacattagttgcgctgcaaaagacctcatcagcaagctgttagtgagggatgccaagcagagactctcagccgcacaggtcctgcagcacccttgggtccaggggtgtgctcctgaaaataccctaccgaccccgatggtcctgcaacgaaatagctgtgccaaagatctcacttcttttgcagctgaagccatcgccatgaacagacagctggcccaacatgacgaggatctggcagaagaagaggcggccggacagggccagcctgtgctcgtcagggcaacctcccggtgcttgcagttatctcccccttcacagagcaaacttgctcagcggagacagcgagcttctctttcctccgccccagttgttcttgtgggcgaccacgcctag

SEQ ID NO: 260971 - DNA, 1398 bp, Artificial Sequence
  derived and/or modified sequence
atggtgcagaagaagccagctgagctgcagggcttccaccgctccttcaagggccagaacccctttgagctggccttcagcctggaccagcctgaccatggagacagcgactttggcctgcagtgcagcgcccggccagacatgcctgccagccagcccatcgacatcccagatgccaagaagaggggcaagaagaagaagaggggccgggccacagacagcttcagcggccgctttgaagatgtgtaccagctgcaggaggatgtgctgggggagggcgcccacgcccgggtgcagacctgcatcaacctgatcaccagccaggagtatgctgtgaagatcatcgagaagcagcccggccacatccgcagcagggtcttccgggaggtggagatgctgtaccagtgccagggccacagaaatgtgctggagctgattgagttctttgaggaggaggaccgcttctacctggtgtttgagaagatgaggggcggcagcatcctgagccacatccacaagaggaggcacttcaatgagctggaggcctctgtggtggtgcaggatgtggccagcgccctggacttcctgcacaacaagggcatcgcccaccgggacctgaagccagagaacatcctgtgtgagcaccccaaccaggtgtcccctgtgaagatctgtgactttgacctgggcagcggcatcaagctgaatggagactgcagccccatcagcaccccagagctgctgaccccctgtggcagcgctgagtacatggcccctgaggtggtggaggccttcagcgaggaggccagcatctatgacaagagatgtgacctgtggagcctgggcgtcatcctgtacatcctgctgagcggctaccccccatttgtgggccgctgtggcagtgactgtggctgggacagaggagaggcctgcccagcctgccagaacatgctgtttgagagcatccaggagggcaagtatgagttcccagacaaggactgggcccacatcagctgtgccgccaaggacctgatcagcaagctgctggtgagagatgccaagcagaggctgtctgctgcccaggtgctgcagcacccctgggtgcagggctgtgcccctgagaacaccctgcccacccccatggtgctgcagaggaacagctgtgccaaggacctgaccagctttgctgctgaggccatcgccatgaaccggcagctggcccagcatgatgaggacctggccgaggaggaggccgccggccagggccagcctgtgctggtgcgggccaccagccgctgcctgcagctgagcccccccagccagagcaagctggcccagaggcggcagagggccagcctgagcagcgcccctgtggtgctggtgggggaccacgcctag

SEQ ID NO: 260972 - DNA, 1005 bp, Artificial Sequence
  derived and/or modified sequence
atgctgtaccagtgccagggccacagaaatgtgctggagctgattgagttctttgaggaggaggaccgcttctacctggtgtttgagaagatgagaggaggcagcatcctgagccacatccacaagagaagacacttcaatgagctggaggcctctgtggtggtgcaggatgtggccagcgccctggacttcctgcacaacaagggcatcgcccaccgggacctgaagccagagaacatcctgtgtgagcaccccaaccaggtgtcccctgtgaagatctgtgactttgacctgggcagcggcatcaagctgaatggagactgcagccccatcagcaccccagagctgctgaccccctgtggcagcgctgagtacatggcccctgaggtggtggaggccttcagcgaggaggccagcatctatgacaagagatgtgacctgtggagcctgggcgtcatcctgtacatcctgctgagcggctaccccccatttgtgggccgctgtggcagtgactgtggctgggacagaggagaggcctgcccagcctgccagaacatgctgtttgagagcatccaggagggcaagtatgagttcccagacaaggactgggcccacatcagctgtgccgccaaggacctgatcagcaagctgctggtgagagatgccaagcagaggctgtctgctgcccaggtgctgcagcacccctgggtgcagggctgtgcccctgagaacaccctgcccacccccatggtgctgcagaggaacagctgtgccaaggacctgaccagctttgctgctgaggccatcgccatgaaccggcagctggcccagcatgatgaggacctggccgaggaggaggccgccggccagggccagcctgtgctggtgcgggccaccagccgctgcctgcagctgagcccccccagccagagcaagctggcccagaggcggcagagggccagcctgagcagcgcccctgtggtgctggtgggggaccacgcctag

SEQ ID NO: 260973 - DNA, 1218 bp, Artificial Sequence
  derived and/or modified sequence
atgcctgccagccagcccatcgacatcccagatgccaagaagaggggcaagaagaagaagaggggccgggccacagacagcttcagcggccgctttgaagatgtgtaccagctgcaggaggatgtgctgggggagggcgcccacgcccgggtgcagacctgcatcaacctgatcaccagccaggagtatgctgtgaagatcatcgagaagcagcccggccacatccgcagcagggtcttccgggaggtggagatgctgtaccagtgccagggccacagaaatgtgctggagctgattgagaagatgaggggcggcagcatcctgagccacatccacaagaggaggcacttcaatgagctggaggcctctgtggtggtgcaggatgtggccagcgccctggacttcctgcacaacaagggcatcgcccaccgggacctgaagccagagaacatcctgtgtgagcaccccaaccaggtgtcccctgtgaagatctgtgactttgacctgggcagcggcatcaagctgaatggagactgcagccccatcagcaccccagagctgctgaccccctgtggcagcgctgagtacatggcccctgaggtggtggaggccttcagcgaggaggccagcatctatgacaagagatgtgacctgtggagcctgggcgtcatcctgtacatcctgctgagcggctaccccccatttgtgggccgctgtggcagtgactgtggctgggacagaggagaggcctgcccagcctgccagaacatgctgtttgagagcatccaggagggcaagtatgagttcccagacaaggactgggcccacatcagctgtgccgccaaggacctgatcagcaagctgctggtgagagatgccaagcagaggctgtctgctgcccaggtgctgcagcacccctgggtgcagggctgtgcccctgagaacaccctgcccacccccatggtgctgcagaggaacagctgtgccaaggacctgaccagctttgctgctgaggccatcgccatgaaccggcagctggcccagcatgatgaggacctggccgaggaggaggccgccggccagggccagcctgtgctggtgcgggccaccagccgctgcctgcagctgagcccccccagccagagcaagctggcccagaggcggcagagggccagcctgagcagcgcccctgtggtgctggtgggggaccacgcctag

SEQ ID NO: 260974 - DNA, 3774 bp, Artificial Sequence
  derived and/or modified sequence
cggctcctctcagcggcggtggcccaggtagaggggtccgcgctggcggcggcggcggcgctgttccccgcgcggtccgcggagcggggtccgggctgcgcgacgtggggcggcggcggcactgcggccccggcccaagcccgaccccgggtcccctcctcggccgccccccgcccggccgcccgccctcgggcctccccccgggccctcggtcccctcccccgctggcggggcccggacagaagatggtgcagaagaaaccagccgaacttcagggtttccaccgttcgttcaaggggcagaaccccttcgagctggccttctccctagaccagcccgaccacggagactctgactttggcctgcagtgctcagcccgccctgacatgcccgccagccagcccattgacatcccggacgccaagaagaggggcaagaagaagaagcgcggccgggccaccgacagcttctcgggcaggtttgaagacgtctaccagctgcaggaagatgtgctgggggagggcgctcatgcccgagtgcagacctgcatcaacctgatcaccagccaggagtacgccgtcaagatcattgagaagcagccaggccacattcggagcagggttttcagggaggtggagatgctgtaccagtgccagggacacaggaacgtcctagagctgattgagttcttcgaggaggaggaccgcttctacctggtgtttgagaagatgcggggaggctccatcctgagccacatccacaagcgccggcacttcaacgagctggaggccagcgtggtggtgcaggacgtggccagcgccttggactttctgcataacaaaggcatcgcccacagggacctaaagccggaaaacatcctctgtgagcaccccaaccaggtctcccccgtgaagatctgtgacttcgacctgggcagcggcatcaaactcaacggggactgctcccctatctccaccccggagctgctcactccgtgcggctcggcggagtacatggccccggaggtagtggaggccttcagcgaggaggctagcatctacgacaagcgctgcgacctgtggagcctgggcgtcatcttgtatatcctactcagcggctacccgcccttcgtgggccgctgtggcagcgactgcggctgggaccgcggcgaggcctgccctgcctgccagaacatgctgtttgagagcatccaggagggcaagtacgagttccccgacaaggactgggcccacatctcctgcgctgccaaagacctcatctccaagctgctggtccgtgacgccaagcagaggctgagtgccgcccaagtcctgcagcacccctgggttcaggggtgcgccccggagaacaccttgcccactcccatggtcctgcagaggaacagctgtgccaaagacctcacgtccttcgcggctgaggccattgccatgaaccggcagctggcccagcacgacgaggacctggctgaggaggaggccgcggggcagggccagcccgtcctggtccgagctacctcacgctgcctgcagctgtctccaccctcccagtccaagctggcgcagcggcggcaaagggccagtctgtcctcggccccagtggtcctggtgggagaccacgcctgaccctcccatctcccctctgtacataggtcacccgtcccccaatcaaatctaaaggttttttaagctatcgccagccggtgtccagcgggctgcccctcctctgcctggattcccaggcactaagctcagctgaggggggtgttttatagaaggtttttgcttttgggttttttttttcctgtttccacccctccccgttattttttcctttggatggttaaaagcattgcaggcacccgggaaggtgagcagagggtaggtgggtgggcttgtcccctccccggtcccccgccctgctcacctctactatgaaggtgcccccaggtcacctgtgctgcccgccatctgcccacgtggcttgcagtgactcaggagagcaggcccacagcgtttgccatcttgcagagctggggaggggcacaggaccctgccctcgtgttccctcccagcccgcagtatttcagggacaggctcttcccctctatccctcaccctgagagcacccctggtggcttggttggggaagggaggggctgcctgtctctggaggtgtcaggcaggcaggtggcaggcagctcacccacccaccccatgggatcccccagcccttcacccgcgcctgccttgtccccatgatagttgacaatcggggcttcctgcaaggcccgtctgtctgtccaggactcctggtggccagattcggcctccgaccttgaccttaaactgcagctgaccccaggggctcgccgctgcccctcccctccacaccaaggcctgagacagcaggagccccgcctggcccgaagccgtttccaccgcagcaggcagaggggctggacaggcactgtcagccaatgtggggggtcctgaagacacccccttggggcacccgagtgccccttctcagggctcagtctgaccgtagccacgtcctgcctcgcgccgcccctcgggcctgacctggaagctccgtcagctccgtccttgtccttagagctgagcccagaccccggggtctggccgaatcctcacccccagggcagtgtttttggtctgccaccttcaggaaaacggctgcggcctcggcctcccttcgggcacccaggaatgcgggggtctgctcagtccccccaccctccatgctccaacccccgggggctgcggagcctgctgccccctccccgcgggtggggacgttctatgcaatacagggttccactttagaagtgcgcgcggctagggtcaccgcccgcccttcccggcgcagcccccgagctccacagctggggcagcccctctggcttctaaatccgcggtcgggattcttcctcctgtttagttttttagtttttccttaaaaaaaaacaacacatcgatggactttgcttccctgttcttgaagaatacttgaatgtcggggggcctgggggtgggggcctcggagaccgtctgcctggccctgctgcccctcctgaatctcgtatgatggtcacagtccggtggccgtgggggtgctctgccttccctggtccccactgcccatatctgtggactgccccttccaaagacccctggggggggtggggcattccgcccacccctttcccccatcacttctcgcctgtcagtgattccatgtttcgtaacgggggattctctgcctttttgtatcaaagaacaagcaaatggacccccgcccgctgcaggcgcccatagccatcgggtctctaaagctgagtggctagcagcgtttgtttgtttgtttttttttttttttctgaaggtgggacagtcacttcctcctccctccccacccctgtcgcatccacgtgcgacctggaggactggtcagaaccgttactgtgaatgagtgaagatcctggaggaccctgggccccaggccagctcccatcgctgggggacggtgaacggccatgtgttaatgttacgatgtttttaaaagacaaaaaaaaaaaaaaaacctcaaaagtttttttaaagtgggggaaaaacatccaagcactttaattccaatgtaccaggtgaactgacggagctcagaagttttcctttacaccaactgtcaatgccggaattttgtattctgttttgtaaagatttaataaaagtc

SEQ ID NO: 260975 - DNA, 1503 bp, Artificial Sequence
  derived and/or modified sequence
agatggtgcagaagaaaccagccgaacttcagggtttccaccgttcgttcaaggggcagaaccccttcgagctggccttctccctagaccagcccgaccacggagactctgactttggcctgcagtgctcagcccgccctgacatgcccgccagccagcccattgacatcccggacgccaagaagaggggcaagaagaagaagcgcggccgggccaccgacagcttctcgggcaggtttgaagatcattgagaagcagccaggccacattcggagcagggttttcagggaggtggagatgctgtaccagtgccagggacacaggaacgtcctagagctgattgagttcttcgaggaggaggaccgcttctacctggtgtttgagaagatgcggggaggctccatcctgagccacatccacaagcgccggcacttcaacgagctggaggccagcgtggtggtgcaggacgtggccagcgccttggactttctgcataacaaaggcatcgcccacagggacctaaagccggaaaacatcctctgtgagcaccccaaccaggtctcccccgtgaagatctgtgacttcgacctgggcagcggcatcaaactcaacggggactgctcccctatctccaccccggagctgctcactccgtgcggctcggcggagtacatggccccggaggtagtggaggccttcagcgaggaggctagcatctacgacaagcgctgcgacctgtggagcctgggcgtcatcttgtatatcctactcagcggctacccgcccttcgtgggccgctgtggcagcgactgcggctgggaccgcggcgaggcctgccctgcctgccagaacatgctgtttgagagcatccaggagggcaagtacgagttccccgacaaggactgggcccacatctcctgcgctgccaaagacctcatctccaagctgctggtccgtgacgccaagcagaggctgagtgccgcccaagtcctgcagcacccctgggttcaggggtgcgccccggagaacaccttgcccactcccatggtcctgcagaggaacagctgtgccaaagacctcacgtccttcgcggctgaggccattgccatgaaccggcagctggcccagcacgacgaggacctggctgaggaggaggccgcggggcagggccagcccgtcctggtccgagctacctcacgctgcctgcagctgtctccaccctcccagtccaagctggcgcagcggcggcaaagggccagtctgtcctcggccccagtggtcctggtgggagaccacgcctgaccctcccatctcccctctgtacataggtcacccgtcccccaatcaaatctaaaggttttttaagctatcgccagccggtgtccagcgggctgcccctcctctgcctggattcccaggcactaagctcagctgaggggggtgttttatagaaggtttttgcttttgggttttttttttcctgtttccacccctccccgttat

SEQ ID NO: 260976 - DNA, 1425 bp, Artificial Sequence
  derived and/or modified sequence
aggggcagaaccccttcgagctggccttctccctagaccagcccgaccacggagactctgactttggcctgcagtgctcagcccgccctgacatgcccgccagccagcccattgacatcccggacgccaagaagaggggcaagaagaagaagcgcggccgggccaccgacagcttctcgggcaggtttgaagacgtctaccagctgcaggaagatgtgctgggggagggcgctcatgcccgagtgcagacctgcatcaacctgatcaccagccaggagtacgccgtcaagatcattgagaagcagccaggccacattcggagcagggttttcagggaggtggagatgctgtaccagtgccagggacacaggaacgtcctagagctgattgagaagatgcggggaggctccatcctgagccacatccacaagcgccggcacttcaacgagctggaggccagcgtggtggtgcaggacgtggccagcgccttggactttctgcataacaaaggcatcgcccacagggacctaaagccggaaaacatcctctgtgagcaccccaaccaggtctcccccgtgaagatctgtgacttcgacctgggcagcggcatcaaactcaacggggactgctcccctatctccaccccggagctgctcactccgtgcggctcggcggagtacatggccccggaggtagtggaggccttcagcgaggaggctagcatctacgacaagcgctgcgacctgtggagcctgggcgtcatcttgtatatcctactcagcggctacccgcccttcgtgggccgctgtggcagcgactgcggctgggaccgcggcgaggcctgccctgcctgccagaacatgctgtttgagagcatccaggagggcaagtacgagttccccgacaaggactgggcccacatctcctgcgctgccaaagacctcatctccaagctgctggtccgtgacgccaagcagaggctgagtgccgcccaagtcctgcagcacccctgggttcaggggtgcgccccggagaacaccttgcccactcccatggtcctgcagaggaacagctgtgccaaagacctcacgtccttcgcggctgaggccattgccatgaaccggcagctggcccagcacgacgaggacctggctgaggaggaggccgcggggcagggccagcccgtcctggtccgagctacctcacgctgcctgcagctgtctccaccctcccagtccaagctggcgcagcggcggcaaagggccagtctgtcctcggccccagtggtcctggtgggagaccacgcctgaccctcccatctcccctctgtacataggtcacccgtcccccaatcaaatctaaaggttttttaagctatcgccagccggtgtccagcgggctgcccctcctctgcctggattccca

SEQ ID NO: 260977 - DNA, 1398 bp, Artificial Sequence
  derived and/or modified sequence
atggtgcagaagaagcccgccgagctgcagggcttccaccggagcttcaaaggccagaatcctttcgagctggcattcagcctggatcagcctgaccacggggacagcgacttcggcttgcaatgcagcgcgcgcccagacatgcctgcctcgcagcccattgacattccggatgcaaagaagagggggaaaaaaaaaaagaggggcagggccaccgattctttctcgggccggtttgaggacgtgtaccagttgcaggaggacgttctgggcgaaggcgcacacgcaagagtgcagacatgcatcaacctgataactagccaggaatacgccgttaagatcattgaaaaacagcccgggcatatccggtctagggtgttcagggaagttgaaatgttatatcagtgccaaggtcatagaaacgtgctggagctgatagaattttttgaggaggaggaccgcttttacctggtatttgaaaagatgcggggtggatccattctgagtcatattcacaaacggcgccattttaacgaactcgaggcttctgtggtcgtacaggatgttgcaagcgccctggacttcctgcacaacaagggaatcgcccaccgggacctgaaacccgagaacattttgtgcgagcaccccaaccaggttagccctgttaagatctgcgatttcgatctcggttcaggaattaaactgaacggagattgttcaccaatctccacaccagagctgctgaccccttgtggatcggccgagtacatggctcccgaggtcgtagaagcattctctgaggaggcctccatctacgacaaaaggtgtgacctgtggtctctcggagttattctatatatactcttgagcggatacccaccttttgtgggcagatgcgggtctgattgcggatgggatagaggggaggcctgcccggcttgtcaaaatatgctatttgagtcgattcaggagggaaagtacgagttccctgacaaggactgggcacacatctcttgcgccgctaaggacttgatatctaagttactggtcagggatgcgaaacaacggctttcggcagctcaggtgttacaacacccctgggtacagggctgtgctcccgagaacacactgcccacaccgatggttttacagcgaaacagctgcgcaaaggatctgaccagttttgcagcggaggcaattgccatgaatcggcaactggctcagcacgacgaggatctggccgaagaggaagcggcgggacagggtcagccagtgctcgtgcgggcaacttctcgatgtctccagctttcacccccctcacagagcaagttagctcagaggagacagcgtgcctccctcagctccgcccctgtagtgctcgtcggcgatcatgcctag

SEQ ID NO: 260978 - DNA, 1005 bp, Artificial Sequence
  derived and/or modified sequence
atgctgtaccagtgccagggccaccggaacgtgctggagctgatcgagtttttcgaggaggaagatcggttttatctcgtgtttgagaagatgcgcggcggaagcatcctctcccatatccataaacggcgacatttcaacgaactagaagcaagcgtggttgtccaggatgtcgcttctgcactggacttcctccacaacaaaggcattgcccaccgggatttgaagcccgagaatatcctgtgcgagcacccgaatcaggttagtccagtgaaaatctgcgactttgacttagggtcagggataaagcttaacggcgattgctcaccaatttcgactcccgagttgctgacgccttgcggcagcgccgagtacatggcacctgaggtggtggaggcattctccgaggaggcttccatctatgataagcgttgcgacctctggtcacttggagtgatcctttacatattgctcagcgggtatcccccatttgtggggcggtgcggctctgactgtgggtgggatcgcggggaggcctgtccagcttgtcaaaacatgctttttgaaagcattcaggaaggtaaatatgaatttcccgacaaggactgggcacacattagctgcgccgcgaaggatctgattagtaagctcttggtacgcgatgctaagcagagactttcagccgcacaggtcctgcagcatccttgggtacagggttgtgctccagaaaacacactgccaacccctatggtactccaaaggaactcatgcgccaaggatttgacgagcttcgctgccgaggccattgccatgaataggcaacttgcccagcacgatgaggatttggcagaggaggaagcagccggccagggacagcctgtgcttgtgagggccacatctaggtgcttgcagctgtctcctccttcacagtccaagttagcccaaagacggcaacgcgcgtcactctcatccgctccggtggtactggtgggagaccacgcctag

SEQ ID NO: 260979 - DNA, 1218 bp, Artificial Sequence
  derived and/or modified sequence
atgcccgccagccagcccatcgacatccccgacgccaagaagcgggggaagaagaagaagagaggtcgcgcaacagacagcttttcaggtcgcttcgaagacgtgtaccagctgcaggaggatgtcctgggcgaaggggcccacgcgagagttcagacctgcattaaccttatcacaagccaggagtacgctgtcaaaattatagagaagcagcctggacatatccggagccgtgtctttagggaggtcgaaatgctctaccagtgtcaggggcatagaaatgtgctcgaactaatcgaaaagatgcggggtggctccattctctcccacattcataaaaggcgccactttaacgagttagaggccagcgtggtcgttcaggatgtggcctctgcgcttgacttcctccacaataaagggattgcacatagagatctgaagcccgagaacattctgtgtgagcacccaaatcaggtgtcacccgttaagatctgcgactttgatctaggatctggaatcaaactcaatggggattgcagtccaatatctacccccgaacttctgacaccttgtggcagcgccgagtatatggcaccagaggtggtagaggctttctcagaagaggcctcaatctacgataagaggtgtgacctgtggtcactgggagttatactctatatcctcttatccggatatccccctttcgttgggcggtgtggtagcgactgcgggtgggatcgaggggaggcttgcccagcgtgccagaacatgctgtttgagtcaatccaggagggcaaatatgaatttcctgacaaggactgggcccacatcagctgtgcagctaaggaccttattagcaaattgctcgtgagggatgctaagcagaggcttagtgctgcccaggtgctgcagcatccctgggtgcagggctgcgcccctgagaacacacttcctactcccatggttctgcagaggaatagttgtgccaaagatctgacctcctttgctgccgaagcaatcgctatgaaccgacagttagcgcaacacgacgaggacctggccgaggaggaagccgcaggtcaagggcagcctgtcctcgtccgggccacctctaggtgcctgcaactaagtcctcccagtcagtccaaacttgcacagagacgccagagggcctcactttctagcgcccccgtcgtactggtaggtgaccatgcgtag

SEQ ID NO: 260980 - DNA, 1398 bp, Artificial Sequence
  derived and/or modified sequence
atggtgcaaaaaaaacccgcagagcttcagggctttcaccgatcatttaagggtcagaatcctttcgagctcgcgttttccctcgatcaacctgatcacggcgacagtgacttcggtctacagtgcagcgctcgacccgacatgccagctagtcagcctatagacattcctgacgctaaaaagcggggtaagaagaagaaaagagggagggcgactgatagctttagcggccgatttgaggacgtctatcagctgcaggaggatgtgctgggtgagggggctcacgctcgcgtccagacatgcatcaatctgattacgagccaggaatacgctgtgaaaattattgaaaagcagcccggacatatcagatcaagggtgttcagggaagtagaaatgctttaccagtgccagggccatcgcaatgtactggagctgatagaattcttcgaagaggaggaccgcttctatctcgtgtttgagaagatgagaggcggtagtattttgagccacatccacaagcggaggcacttcaatgaacttgaagcctccgttgttgttcaggatgttgcctctgcactggactttctacataataagggcatcgcccacagagatttgaagcctgaaaatatactctgtgagcatccaaaccaggtgtcacctgtgaagatttgcgacttcgacttgggaagtggtataaagctcaatggagactgcagtcctatctctacgcctgagcttctgacaccatgcggatccgcagaatatatggctcccgaagtggtagaggcttttagcgaggaagccagcatttatgacaagcggtgcgatctctggagcctcggtgtcatactgtatattttgctcagcggctatccaccatttgtaggacggtgcggctccgattgtggatgggatcggggagaagcctgccctgcctgtcagaatatgttgttcgaaagcatacaagagggcaaatacgagttcccagacaaagattgggcacatatctcttgcgcagctaaagacttgatctcaaagctgctggttagggacgccaaacagcggctgagtgccgctcaggtgctccagcatccttgggtccaaggttgtgccccagagaatacattgcctactccaatggtcctgcaaaggaacagttgcgccaaggacctcaccagcttcgccgcagaagctatcgccatgaatagacagctcgcgcagcatgacgaggatctggccgaagaggaggcagccggacagggccaacccgtcctcgtgcgggctacgtctaggtgcctccagctgagcccgccaagccaatccaagctcgctcagaggcggcagcgcgcaagcctgtcctcagctccagtggttctcgtgggcgatcatgcctag

SEQ ID NO: 260981 - DNA, 1005 bp, Artificial Sequence
  derived and/or modified sequence
atgctgtaccagtgccagggtcatcggaatgtcttggagttgatagagttcttcgaagaggaagatcgtttctatcttgtttttgaaaaaatgaggggagggagtatcctgagccatatccacaaacggagacattttaatgaactcgaggcttccgtggtggttcaggacgtggcctcggccctggacttcctccacaacaaaggcatcgcgcaccgagacttgaaaccagaaaatatcctgtgtgagcaccctaaccaagtcagccccgtaaaaatctgcgactttgatttggggtcgggtattaagctgaacggcgattgctccccaatcagcacaccggagctcttgaccccctgtggatccgctgagtacatggcacccgaagtggtggaagccttttccgaagaggcatctatttacgataaaaggtgcgacctgtggagtctgggtgttatcctgtacattctgttgagtggataccctcctttcgtgggtcgctgcggatcagactgcggctgggacagaggtgaggcctgccctgcatgccagaatatgctgtttgaatccatacaggaaggcaaatacgagttcccagataaggactgggcccacatcagctgtgccgcaaaggacctgatctcaaaattactggtcagagatgccaagcagagattaagtgcagcccaggtgttacaacacccttgggtccagggatgtgcacctgagaatacactgcctacccccatggtgctccagagaaactcgtgtgcaaaggatcttacctcatttgccgctgaggcaatcgccatgaacaggcagcttgcgcaacacgacgaggacctggcagaagaagaggcagccggacagggacagcccgtactggtgcgggcaacctctcggtgcttacagcttagcccgccaagtcaaagcaagctcgctcagcgcaggcagcgcgcatctttatcctcggcgccagtggttctagtgggggatcacgcatag

SEQ ID NO: 260982 - DNA, 1218 bp, Artificial Sequence
  derived and/or modified sequence
atgccagcttcacagcctattgatatccctgatgccaagaaaagaggtaagaaaaagaagcggggacgggcaaccgactccttttcaggtcgctttgaagacgtctaccagttgcaggaggacgtcctaggggagggcgcacacgccagggtgcagacctgtattaatctgattacaagtcaggaatacgccgtgaaaattatcgagaagcagccgggtcatataaggtcccgcgtctttagagaagttgagatgctctaccagtgtcagggccaccgcaacgttttggagctgattgaaaagatgagaggtggttccattttgagccatatccataaacgtcgacacttcaatgaacttgaggcttcagtggtggttcaagatgtggcctctgcattagacttccttcacaacaaggggatcgcacacagagatttgaagcccgagaacatactttgcgaacatccaaaccaggtgagtcccgtaaagatttgtgattttgacctgggcagtggcatcaagctgaatggcgactgctctcccatatcaacaccggaactgctgaccccttgtggctccgcagagtatatggctcccgaagtggtggaggccttcagcgaggaagcatccatctacgataaaagatgcgacctttggtccctcggcgttatactctacatcctgctgagcggctatcccccttttgtcggcagatgtggttccgattgtggctgggataggggagaggcttgccccgcatgtcagaatatgctgtttgagtctatacaggaggggaagtatgagttcccagacaaggactgggctcacattagctgcgccgcaaaggacttgatctcgaagctcctcgtgcgcgatgctaaacagaggttaagcgctgcgcaagtcctgcaacatccttgggtccagggatgtgccccagaaaacacgttacctaccccgatggtgctgcaaaggaactcatgcgccaaggacctaacttcctttgctgccgaggctatagccatgaatcgtcagttggcccagcatgatgaggacttggcagaagaggaggccgcaggacagggccagcctgtcctcgtgcgggcaacctcaagatgcctgcagctgagtccgccttcccagagcaagttagcccagaggagacagcgggcaagtctgagctctgcgccagtcgtgttggtgggagatcatgcttag

SEQ ID NO: 260983 - DNA, 1398 bp, Artificial Sequence
  derived and/or modified sequence
atggtgcagaagaagcccgccgagctgcagggcttccacagaagcttcaagggccagaaccccttcgagctggccttcagcctggaccagcccgaccacggcgacagcgacttcggcctgcagtgcagcgccagacccgacatgcccgccagccagcccatcgacatccccgacgccaagaagagaggcaagaagaagaagagaggcagagccaccgacagcttcagcggcagattcgaggacgtgtaccagctgcaggaggacgtgctgggcgagggcgcccacgccagagtgcagacctgcatcaacctgatcaccagccaggagtacgccgtgaagatcatcgagaagcagcccggccacatcagaagcagagtgttcagagaggtggagatgctgtaccagtgccagggccacagaaacgtgctggagctgatcgagttcttcgaggaggaggacagattctacctggtgttcgagaagatgagaggcggcagcatcctgagccacatccacaagagaagacacttcaacgagctggaggccagcgtggtggtgcaggacgtggccagcgccctggacttcctgcacaacaagggcatcgcccacagagacctgaagcccgagaacatcctgtgcgagcaccccaaccaggtgagccccgtgaagatctgcgacttcgacctgggcagcggcatcaagctgaacggcgactgcagccccatcagcacccccgagctgctgaccccctgcggcagcgccgagtacatggcccccgaggtggtggaggccttcagcgaggaggccagcatctacgacaagagatgcgacctgtggagcctgggcgtgatcctgtacatcctgctgagcggctacccccccttcgtgggcagatgcggcagcgactgcggctgggacagaggcgaggcctgccccgcctgccagaacatgctgttcgagagcatccaggagggcaagtacgagttccccgacaaggactgggcccacatcagctgcgccgccaaggacctgatcagcaagctgctggtgagagacgccaagcagagactgagcgccgcccaggtgctgcagcacccctgggtgcagggctgcgcccccgagaacaccctgcccacccccatggtgctgcagagaaacagctgcgccaaggacctgaccagcttcgccgccgaggccatcgccatgaacagacagctggcccagcacgacgaggacctggccgaggaggaggccgccggccagggccagcccgtgctggtgagagccaccagcagatgcctgcagctgagcccccccagccagagcaagctggcccagagaagacagagagccagcctgagcagcgcccccgtggtgctggtgggcgaccacgcctag

SEQ ID NO: 260984 - DNA, 1005 bp, Artificial Sequence
  derived and/or modified sequence
atgctgtaccagtgccagggccacagaaacgtgctggagctgatcgagttcttcgaggaggaggacagattctacctggtgttcgagaagatgagaggcggcagcatcctgagccacatccacaagagaagacacttcaacgagctggaggccagcgtggtggtgcaggacgtggccagcgccctggacttcctgcacaacaagggcatcgcccacagagacctgaagcccgagaacatcctgtgcgagcaccccaaccaggtgagccccgtgaagatctgcgacttcgacctgggcagcggcatcaagctgaacggcgactgcagccccatcagcacccccgagctgctgaccccctgcggcagcgccgagtacatggcccccgaggtggtggaggccttcagcgaggaggccagcatctacgacaagagatgcgacctgtggagcctgggcgtgatcctgtacatcctgctgagcggctacccccccttcgtgggcagatgcggcagcgactgcggctgggacagaggcgaggcctgccccgcctgccagaacatgctgttcgagagcatccaggagggcaagtacgagttccccgacaaggactgggcccacatcagctgcgccgccaaggacctgatcagcaagctgctggtgagagacgccaagcagagactgagcgccgcccaggtgctgcagcacccctgggtgcagggctgcgcccccgagaacaccctgcccacccccatggtgctgcagagaaacagctgcgccaaggacctgaccagcttcgccgccgaggccatcgccatgaacagacagctggcccagcacgacgaggacctggccgaggaggaggccgccggccagggccagcccgtgctggtgagagccaccagcagatgcctgcagctgagcccccccagccagagcaagctggcccagagaagacagagagccagcctgagcagcgcccccgtggtgctggtgggcgaccacgcctag

SEQ ID NO: 260985 - DNA, 1218 bp, Artificial Sequence
  derived and/or modified sequence
atgcccgccagccagcccatcgacatccccgacgccaagaagagaggcaagaagaagaagagaggcagagccaccgacagcttcagcggcagattcgaggacgtgtaccagctgcaggaggacgtgctgggcgagggcgcccacgccagagtgcagacctgcatcaacctgatcaccagccaggagtacgccgtgaagatcatcgagaagcagcccggccacatcagaagcagagtgttcagagaggtggagatgctgtaccagtgccagggccacagaaacgtgctggagctgatcgagaagatgagaggcggcagcatcctgagccacatccacaagagaagacacttcaacgagctggaggccagcgtggtggtgcaggacgtggccagcgccctggacttcctgcacaacaagggcatcgcccacagagacctgaagcccgagaacatcctgtgcgagcaccccaaccaggtgagccccgtgaagatctgcgacttcgacctgggcagcggcatcaagctgaacggcgactgcagccccatcagcacccccgagctgctgaccccctgcggcagcgccgagtacatggcccccgaggtggtggaggccttcagcgaggaggccagcatctacgacaagagatgcgacctgtggagcctgggcgtgatcctgtacatcctgctgagcggctacccccccttcgtgggcagatgcggcagcgactgcggctgggacagaggcgaggcctgccccgcctgccagaacatgctgttcgagagcatccaggagggcaagtacgagttccccgacaaggactgggcccacatcagctgcgccgccaaggacctgatcagcaagctgctggtgagagacgccaagcagagactgagcgccgcccaggtgctgcagcacccctgggtgcagggctgcgcccccgagaacaccctgcccacccccatggtgctgcagagaaacagctgcgccaaggacctgaccagcttcgccgccgaggccatcgccatgaacagacagctggcccagcacgacgaggacctggccgaggaggaggccgccggccagggccagcccgtgctggtgagagccaccagcagatgcctgcagctgagcccccccagccagagcaagctggcccagagaagacagagagccagcctgagcagcgcccccgtggtgctggtgggcgaccacgcctag

SEQ ID NO: 260986 - protein, 127 aa, Artificial Sequence
  derived and/or modified sequence
MYIDSYNSRGFMINGNRVLGPCALLPHSVVQWNVGSHQDITEDSFSLFWLLEPRIEIVVVGTGDRTERLQSQVLQAMRQRGIAVEVQDTPNACATFNFLCHEGRVTGAALIPPPGGTSLTSLGQAAQ

SEQ ID NO: 260987 - protein, 184 aa, Artificial Sequence
  derived and/or modified sequence
MATALALRSLYRARPSLRCPPVELPWAPRRGHRLSPADDELYQRTRISLLQREAAQAMYIDSYNSRGFMINGNRVLGPCALLPHSVVQWNVGSHQDITEDSFSLFWLLEPRIEIVVVGTGDRTERLQSQVLQAMRQRGIAVEVQDTPNACATFNFLCHEGRVTGAALIPPPGGTSLTSLGQAAQ

SEQ ID NO: 260988 - DNA, 555 bp, Artificial Sequence
  derived and/or modified sequence
atggccactgccctggcacttcgaagcctctatagggcccggcctagcttgaggtgtccgcctgtggaactgccctgggcacctaggagaggacaccggctcagccctgccgatgacgaactctatcaacgcacccggatctctctcctccaaagggaggccgcgcaagctatgtatatcgattcttacaattctaggggctttatgattaacggtaatagagttctgggtccatgcgccctcttgccacacagcgtcgtccagtggaacgttggttcccatcaggacattacggaggactcttttagtttgttctggctgttagagcctcgcatcgaaatagttgtggtgggcaccggcgaccgaacagaaagactgcaatcccaggtgctgcaagctatgcgacaacggggaatcgcagtcgaggtgcaggatacccctaacgcctgcgctaccttcaacttcctttgtcacgagggtagagttacaggtgccgccctgatcccccccccgggaggaacgtctctgacatcattgggccaggcggcacagtag

SEQ ID NO: 260989 - DNA, 555 bp, Artificial Sequence
  derived and/or modified sequence
atggccacagccctggccctgcggagcctgtaccgggcccggcccagcctgcgctgcccccctgtggagctgccctgggccccccggcggggccaccggctgagccctgcagatgatgagctgtaccagaggacccgcatcagcctgctgcagcgggaggccgcccaggccatgtacatcgacagctacaacagccggggcttcatgatcaatggaaacagagtgctgggcccctgtgccctgctgccccacagcgtggtgcagtggaatgtgggcagccaccaggacatcacagaagattccttcagcctcttctggctgctggagccccgcatcgagatcgtggtggtgggcactggagacagaacagagcggctgcagagccaggtgctgcaggccatgaggcagaggggcattgctgtggaggtgcaggacaccccaaatgcctgtgccaccttcaacttcctgtgccacgagggccgggtgactggagctgccctgatccccccacctgggggcaccagcctgaccagcctgggccaggccgcccagtag

SEQ ID NO: 260990 - DNA, 705 bp, Artificial Sequence
  derived and/or modified sequence
ctccccagggttccagagatggccaccagcctcggctctcccacgtctacacccatcacctccagcctgagggcgcaactgagaggaactgagacccaagcagctcagtaaaggccccgcggcgagggcatcggctctcgccggcggatgacgagctgtatcagcggacgcgcatctctctgctgcaacgcgaggccgctcaggcaatgtacatcgacagctacaacagccgcggcttcatgataaacggaaaccgcgtgctcggcccctgcgctctgctcccgcactcggtggtgcagtggaacgtgggatcccaccaggacatcaccgaagacagcttttccctcttctggttgctggagccccggatagagatcgtggtggtggggactggagaccggaccgagaggctgcagtcccaggtgcttcaagccatgaggcagcggggcattgctgtggaagtgcaggacacgcccaatgcctgtgccaccttcaacttcctgtgtcatgaaggccgagtaactggagctgctctcatccctccaccaggagggacttcacttacatctttgggccaagctgctcaatgaaccgccaggaactgacctgctgactgcactctgccaggcttcccaatgctttcactcttatctaccctttggcacttatcttgcttatcaacataataatttatacacttctccc

SEQ ID NO: 260991 - DNA, 1989 bp, Artificial Sequence
  derived and/or modified sequence
cgcgcccgtggggccggagaggaagtaaacccgcgcgtccacctcggggacacccccgcgctcggtggcctttgtccggtgacgctgccagcgcccggagcaccaggggccgaaggggtccacagagcagccgcgggacccccggaaacccattgcgaccggccccaggagacccaccaccaggctcccactgtgccgagcttcccgctcgcccggccccgcgggtagcgaaagcgacaatgttcccctgaggccacgacagagccggcgtgccgagatgcccaaaccccgcgcgggggccagcgactctcgcgccagtaggcccttgacttggatcaagacgggggacgggggactcccaggacgcgagcagagtgaacgaggacaaggtgatgctccacgcgcttctacttcaagtctggtccggttcggcctggtctgggccagccgaacagccacccaaacactatcacagcttgcccttccgcttgctctggctgcctgcagacttggagccattttaaggagaaaccacctggccacgccccctagagaacccgagaagccaatccacgctcggccacgcccctctccgcgcgctgcggagaggccaacggtcgcgcgggtgacggttagggcggggcgtgcttccgcgtctagccggagaaacttgagccggctgccccgcccacggtgcccgaagccccaaaggctggaattaggggctagaagtctggcacccaccgcctggccaggtgttcgggacgcgaccaggtgggcggtcgccccgccccgggagcgcggcttaatagctgagagcccgggggccaggccgcggctgcggcccaggcaacgccctgagggtggccacgctgccaggtgttccactcccccgggactatgggcaagggcccggggcggggagggcggcaggtgctgacactggagctgcgccggaggtcggggaactcggcctcctaagactgaggacactcgcctgctgggccggtcgagctgtgcggtgccctccgggacgcagggggcgctgcagccacgctgggtcaggctccgcagggccctcccaacccggggactaacggcgccggtgacgacttcgccgcgcgttggtcagccatggccaccgctctcgcgctacgtagcttgtaccgagcgcgaccctcgctgcgctgtccgcccgttgagcttccctgggccccgcggcgagggcatcggctctcgccggcggatgacgagctgtatcagcggacgcgcatctctctgctgcaacgcgaggccgctcaggcaatgtacatcgacagctacaacagccgcggcttcatgataaacggaaaccgcgtgctcggcccctgcgctctgctcccgcactcggtggtgcagtggaacgtgggatcccaccaggacatcaccgaagacagcttttccctcttctggttgctggagccccggatagagatcgtggtggtggggactggagaccggaccgagaggctgcagtcccaggtgcttcaagccatgaggcagcggggcattgctgtggaagtgcaggacacgcccaatgcctgtgccaccttcaacttcctgtgtcatgaaggccgagtaactggagctgctctcatccctccaccaggagggacttcacttacatctttgggccaagctgctcaatgaaccgccaggaactgacctgctgactgcactctgccaggcttcccaatgctttcactcttatctaccctttggcacttatcttgcttatcaacataataatttatacacttctcccattttgtatcaggtgtgttgctggccaggagctgatggctcactgggctcttggaggggaatgtgaagaaaccaaggagtcactttttcatctagattacttaggattccttgacttttcagaagtcgggaagcagtatgtttgcctgttgtagacctacttgctcacatgcagatttgagagga

SEQ ID NO: 260992 - DNA, 808 bp, Artificial Sequence
  derived and/or modified sequence
caccaccaggctcccactgtgccgagcttcccgctcgcccggccccgcgggtagcgaaagcgacaatgttcccctgaggccacgacagagccggcgtgccgagatgcccaaaccccgcgcgggggccagcgactctcgcgccagtaggcccttgacttggatcaagacgggggacgggggactcccaggacgcgagcagagtgaacgaggacaagggccccgcggcgagggcatcggctctcgccggcggatgacgagctgtatcagcggacgcgcatctctctgctgcaacgcgaggccgctcaggcaatgtacatcgacagctacaacagccgcggcttcatgataaacggaaaccgcgtgctcggcccctgcgctctgctcccgcactcggtggtgcagtggaacgtgggatcccaccaggacatcaccgaagacagcttttccctcttctggttgctggagccccggatagagatcgtggtggtggggactggagaccggaccgagaggctgcagtcccaggtgcttcaagccatgaggcagcggggcattgctgtggaagtgcaggacacgcccaatgcctgtgccaccttcaacttcctgtgtcatgaaggccgagtaactggagctgctctcatccctccaccaggagggacttcacttacatctttgggccaagctgctcaatgaaccgccaggaactgacctgctgactgcactctgccaggcttcccaatgctttcactcttatctaccctttggcacttatcttgcttatcaacataataatttatacacttctccc

SEQ ID NO: 260993 - DNA, 774 bp, Artificial Sequence
  derived and/or modified sequence
gcgcgctgcggagaggccaacggtcgcgcgggtgacggttagggcggggcgtgcttccgcgtctagccggagaaacttgagccggctgccccgcccacggtgcccgaagccccaaaggctggaattaggggctagaagtctggcacccaccgcctggccaggtgttcgggacgcgaccagggccccgcggcgagggcatcggctctcgccggcggatgacgagctgtatcagcggacgcgcatctctctgctgcaacgcgaggccgctcaggcaatgtacatcgacagctacaacagccgcggcttcatgataaacggaaaccgcgtgctcggcccctgcgctctgctcccgcactcggtggtgcagtggaacgtgggatcccaccaggacatcaccgaagacagcttttccctcttctggttgctggagccccggatagagatcgtggtggtggggactggagaccggaccgagaggctgcagtcccaggtgcttcaagccatgaggcagcggggcattgctgtggaagtgcaggacacgcccaatgcctgtgccaccttcaacttcctgtgtcatgaaggccgagtaactggagctgctctcatccctccaccaggagggacttcacttacatctttgggccaagctgctcaatgaaccgccaggaactgacctgctgactgcactctgccaggcttcccaatgctttcactcttatctaccctttggcacttatcttgcttatcaacataataatttatacacttctccca

SEQ ID NO: 260994 - DNA, 555 bp, Artificial Sequence
  derived and/or modified sequence
atggccaccgccctggccctgcggagcctgtaccgggcccggcccagcctaaggtgtcccccggtggagttgccttgggcacccaggcgtggacacagactcagtccagccgatgacgaactgtaccagcgcactcggatctccctgctgcagagagaagccgctcaggcaatgtacatagacagctacaactcccgcggcttcatgatcaatggaaacagggtgctgggcccttgcgcactactcccccactcggtggtccaatggaacgtcggctctcatcaggatattactgaagacagcttttctcttttttggctcctggagccacgcattgagattgtggtggtgggcactggcgatcgcacagagaggttgcagtctcaggtgctgcaggcaatgcgacagcgcggaatcgcagttgaagtacaggacacccccaatgcatgtgccacgtttaattttttatgccacgaaggcagagtgacaggtgccgcacttattccacccccgggtggcacaagcttgacatccctcggccaggccgcacagtag

SEQ ID NO: 260995 - DNA, 555 bp, Artificial Sequence
  derived and/or modified sequence
atggccacagccttagcactgagatctctgtaccgtgctaggcctagcttgcgttgtccacctgtcgaactcccgtgggcccctcgccgtggccacaggctgtcaccagccgatgacgaactctaccaacggaccagaatttcactgctccaaagggaggctgcacaagcaatgtatatcgactcatacaattccagggggtttatgattaacgggaatcgggttctgggtccttgcgctctgttgccgcatagtgtggttcagtggaatgtaggctcacatcaggatattacggaagactctttcagcctgttctggctgctcgaacctcgaattgagatcgttgtggtgggaaccggcgatcggactgaacggctgcagtcccaggtcctccaggccatgcgacagagggggatcgcggttgaagtacaagatacacccaatgcatgcgccaccttcaatttcctgtgccatgaaggccgagtgacaggcgctgctctaattccaccaccaggcggtacctccctcactagccttggccaagcagcacagtag

SEQ ID NO: 260996 - DNA, 555 bp, Artificial Sequence
  derived and/or modified sequence
atggccaccgccctggccctgagaagcctgtacagagccagacccagcctgagatgcccccccgtggagctgccctgggcccccagaagaggccacagactgagccccgccgacgacgagctgtaccagagaaccagaatcagcctgctgcagagagaggccgcccaggccatgtacatcgacagctacaacagcagaggcttcatgatcaacggcaacagagtgctgggcccctgcgccctgctgccccacagcgtggtgcagtggaacgtgggcagccaccaggacatcaccgaggacagcttcagcctgttctggctgctggagcccagaatcgagatcgtggtggtgggcaccggcgacagaaccgagagactgcagagccaggtgctgcaggccatgagacagagaggcatcgccgtggaggtgcaggacacccccaacgcctgcgccaccttcaacttcctgtgccacgagggcagagtgaccggcgccgccctgatccccccccccggcggcaccagcctgaccagcctgggccaggccgcccagtag

SEQ ID NO: 260997 - DNA, 384 bp, Artificial Sequence
  derived and/or modified sequence
atgtacatcgactcctacaattctcggggtttcatgatcaatggcaacagagtgcttggtccttgcgcgctgctgccacatagcgttgtgcaatggaacgtggggtcccatcaggatatcacagaagactctttctccctcttttggcttctggagccccgcatcgaaatcgtcgttgtgggtaccggagatagaacagaaaggctgcagtctcaggtcctccaggccatgcgtcaacgggggatagccgtggaagttcaggacacgcccaacgcatgtgcaacttttaacttcctgtgccacgaggggagggtcactggagcagccctcatcccaccccccgggggcacttcattaacttccctgggtcaggcggcgcagtag

SEQ ID NO: 260998 - DNA, 384 bp, Artificial Sequence
  derived and/or modified sequence
atgtatattgactcatataattctagaggttttatgatcaacgggaatagggtgcttggtccttgtgctttgctgccccattctgtcgtccaatggaacgtgggaagccaccaggatattacggaggatagtttttcactcttttggctactggagccacgcattgaaatcgtggttgtgggcactggtgataggacagaacggctccagtcacaggtactgcaagcaatgcggcagcgaggcattgctgtggaggttcaagatacccccaacgcatgcgccacgttcaacttcctgtgtcacgagggacgggtgaccggggccgcacttattccacctccaggagggaccagtcttaccagtcttggccaagcagcccagtag

SEQ ID NO: 260999 - DNA, 384 bp, Artificial Sequence
  derived and/or modified sequence
atgtacattgactcctataacagccgggggttcatgatcaatggaaatagagtgttgggcccgtgtgccttactccctcatagcgtagtacaatggaatgtggggtcccatcaagatataaccgaggatagcttcagtctcttctggctgttggagccccggattgaaatagtagtggtaggcactggagataggacagagcggctccagtcccaagtactgcaagcaatgcgacagaggggcatcgcggttgaagttcaagacaccccaaatgcatgcgctacctttaacttcctgtgccatgaaggccgagtgactggagcagctttgattcctccccctgggggcaccagcttgacttccttgggccaagccgctcagtag

SEQ ID NO: 261000 - DNA, 384 bp, Artificial Sequence
  derived and/or modified sequence
atgtacatcgacagctacaacagccggggcttcatgatcaatggaaacagagtgctgggcccctgtgccctgctgccccacagcgtggtgcagtggaatgtgggcagccaccaggacatcacagaggacagcttcagcctcttctggctgctggagcccagaattgaaattgtggtggtgggcaccggggacagaacagagcggctgcagagccaggtgctgcaggccatgaggcagaggggcattgctgtggaggtgcaggacaccccaaatgcctgtgccaccttcaacttcctgtgccacgagggccgggtgactggagctgccctgatccccccacctgggggcaccagcctgaccagcctgggccaggccgcccagtag

SEQ ID NO: 261001 - DNA, 384 bp, Artificial Sequence
  derived and/or modified sequence
atgtacatcgacagctacaacagccggggcttcatgatcaacggcaaccgcgtcctgggtccttgcgccttgctgccacatagcgttgtacaatggaatgtcgggagccatcaagacattactgaagattcattttcactcttttggctcctcgaacctagaatcgagattgtggttgtgggcaccggcgatcgaaccgagaggctgcagtctcaggtcttgcaggctatgcgccagcgaggaattgctgtggaggtgcaggacacacccaatgcttgcgccacattcaatttcttgtgtcacgaggggagggtgaccggagcggccctaatcccaccaccgggcggaacttcactcacgtctctcggccaggcagcccagtag

SEQ ID NO: 261002 - DNA, 384 bp, Artificial Sequence
  derived and/or modified sequence
atgtacatcgacagctacaacagccggggcttcatgatcaacggcaaccgtgtgctgggcccatgtgcactgcttccccacagcgtggtccagtggaatgttgggtcccaccaggacatcaccgaggactcattcagtttgttctggctgctggagccccgtattgaaatcgtcgtggttggcactggggaccgcaccgaacgcctgcagagtcaagtactgcaggccatgcggcagcgtggtatcgcagttgaggtgcaagacactccgaacgcgtgcgcaacttttaactttctatgccatgaggggcgagtgaccggagcagctttgatcccgcctccgggagggacatcgcttactagtcttggacaggccgcccagtag

SEQ ID NO: 261003 - DNA, 384 bp, Artificial Sequence
  derived and/or modified sequence
atgtacatcgacagctacaacagccggggcttcatgatcaacggcaatagggttctcggtccatgcgccctgttaccccattctgtagttcagtggaatgttggatcacatcaggatattactgaggacagctttagcctcttctggctgctcgaacccagaatcgagattgtggtcgtgggcaccggggaccgcacggagagactccagtcccaggtgctgcaagctatgcgccagcgcggtatagccgttgaagtccaagatacacctaatgcctgtgccacttttaactttttgtgtcacgagggacgggttaccggggccgccctgatccctccgccgggtggtacatctttgacctctctcggccaagctgcacaatag

SEQ ID NO: 261004 - DNA, 384 bp, Artificial Sequence
  derived and/or modified sequence
atgtatatcgacagctataacagccgtggatttatgattaatggcaatagggttcttggtccttgcgccctactcccccattcggtcgtccaatggaacgtcggatcccaccaagacataaccgaagactctttcagcttattctggctattagagccaagaatcgagattgttgtcgtgggtaccggagatcgtaccgagaggttacaaagccaagtcttgcaggccatgcgacagaggggcattgccgtcgaagtgcaggacaccccaaacgcctgtgcaactttcaacttcctgtgccacgaggggagagtgacaggggctgctctgataccccctcccggtggaacctcgctcacaagcctgggacaagcggctcagtag

SEQ ID NO: 261005 - DNA, 384 bp, Artificial Sequence
  derived and/or modified sequence
atgtatatagattcctacaacagccgcggatttatgataaatggaaaccgcgtccttggtccatgtgccttgctgccgcacagtgttgtacaatggaatgtaggatcccatcaggacatcactgaggattcattcagcctattttggcttttagagccgagaatcgagattgtcgtggtaggcacgggtgatcgcacagaacgccttcagagtcaggttcttcaagcgatgcggcaacggggaatcgccgtcgaggtgcaggacacaccaaacgcctgtgccacgttcaacttcctgtgccatgaggggagggtaaccggcgctgccctgattcccccacccggtggtaccagcctgacatcgcttggacaggccgctcagtag

SEQ ID NO: 261006 - DNA, 384 bp, Artificial Sequence
  derived and/or modified sequence
atgtacattgatagctataactcaaggggcttcatgataaatggaaatagagttctgggcccatgtgcactcctgccccattcggtcgtgcagtggaatgtcggatctcaccaggacattaccgaggattcgttttctctattctggctcctggaaccacgtatagaaatcgtcgtggtgggcaccggggatagaaccgagagactccagagtcaggtgctgcaagcaatgaggcagcgaggaatagccgttgaggtccaggacacgcccaatgcatgcgctaccttcaacttcctgtgtcacgagggcagggtgaccggcgcagcactgattccccctccaggcggaaccagcctgacgtcccttggtcaggcagcccagtag

SEQ ID NO: 261007 - DNA, 384 bp, Artificial Sequence
  derived and/or modified sequence
atgtacatcgacagctacaacagcagaggcttcatgatcaacggcaacagagtgctgggcccctgcgccctgctgccccacagcgtggtgcagtggaacgtgggcagccaccaggacatcaccgaggacagcttcagcctgttctggctgctggagcccagaatcgagatcgtggtggtgggcaccggcgacagaaccgagagactgcagagccaggtgctgcaggccatgagacagagaggcatcgccgtggaggtgcaggacacccccaacgcctgcgccaccttcaacttcctgtgccacgagggcagagtgaccggcgccgccctgatccccccccccggcggcaccagcctgaccagcctgggccaggccgcccagtag

SEQ ID NO: 261008 - protein, 355 aa, Artificial Sequence
  derived and/or modified sequence
VRGVRAATAAAVAATAASGLSRREAGGRAGAAAAVVRPPGRKCGRCRRLANFPGRKRRRRRRKGLGATTGGCGEAVSSLHPAPHSPSSVRPAGRRARRQRRGAGSAERPMSGAGEALAPGPVGPQRVAEAGGGQLGSTAQGKCDKDNTEKDITQATNSHFTHGEMQDQSIWGNPSDGELIRTQPQRLPQLQTSAQVPSGEEIGKIKNGHTGLSNGNGIHHGAKHGSADNRKLSAPVSQKMHRKIQSSLSVNSDISKKSKVNAVFSQKTGSSPEDCCVHCILACLFCEFLTLCNIVLGQASCGICTSEACCCCCGDEMGDDCNCPCDMDCGIMDACCESSDCLEICMECCGICFPS

SEQ ID NO: 261009 - protein, 246 aa, Artificial Sequence
  derived and/or modified sequence
MSGAGEALAPGPVGPQRVAEAGGGQLGSTAQGKCDKDNTEKDITQATNSHFTHGEMQDQSIWGNPSDGELIRTQPQRLPQLQTSAQVPSGEEIGKIKNGHTGLSNGNGIHHGAKHGSADNRKLSAPVSQKMHRKIQSSLSVNSDISKKSKVNAVFSQKTGSSPEDCCVHCILACLFCEFLTLCNIVLGQASCGICTSEACCCCCGDEMGDDCNCPCDMDCGIMDACCESSDCLEICMECCGICFPS

SEQ ID NO: 261010 - DNA, 1068 bp, Artificial Sequence
  derived and/or modified sequence
gtgcgaggtgtccgcgcggccactgcggctgctgtcgctgccaccgcagctagcgggctttctaggagggaagccggaggccgagctggagcagcagccgccgtggtgaggcctccaggtaggaaatgcggcaggtgcagaaggcttgcaaactttccaggccggaaacgtcggcgtcgccgtcggaagggccttggggcaacgactggaggctgcggcgaagcagtgagttctctccatcctgctccacactctccttccagcgtgcgaccagccggacgacgcgccagacgccagagacggggagcgggaagcgcagagcggccaatgtctggggctggtgaggctctcgccccagggcccgttggtccccaaagagtcgctgaggccgggggcgggcagctgggatcaaccgcccaaggcaaatgcgataaggacaataccgaaaaagacatcacccaggcaacaaattcccactttacgcacggcgagatgcaggaccagtcaatctggggaaatccaagcgatggagaactaatcagaacacaaccacaaaggttgccgcagctgcaaaccagcgcacaggtacccagcggggaggagataggcaagattaaaaatggccatactggcctttctaacggcaatggtattcatcacggcgcaaagcacgggagcgccgacaatcggaagttgagcgcgccagtgtcccaaaaaatgcaccgtaagatccagtctagcctgagcgtgaactcagacatctccaagaagtctaaagtaaacgcggtgttttctcagaagaccgggtcctcccctgaggactgctgcgttcattgcatcttggcctgtctcttttgcgaattcttgaccctgtgcaatattgttttgggacaggcttcttgtggcatctgcacaagcgaggcttgctgctgttgctgcggagatgaaatgggcgacgactgtaactgcccgtgtgatatggattgtgggataatggatgcatgttgcgagtcctctgattgtctggagatttgcatggagtgttgcggaatttgctttccatcctag

SEQ ID NO: 261011 - DNA, 1068 bp, Artificial Sequence
  derived and/or modified sequence
gtgcggggcgtgcgggccgccacagctgctgctgtggccgccacagctgccagcggcctgagccggcgggaggccggcggccgggccggggctgctgctgctgtggtgcggcccccaggcaggaaatgtggccgctgccggcggctggccaacttccctggcaggaagagaagaagaagaagaaggaagggcctgggcgccaccactggaggctgtggggaggccgtgagcagcctgcacccagccccccacagccccagctctgtgcggcctgctggccggcgggcccggcggcagaggagaggagctggcagcgctgagcggcccatgtctggagctggggaggccctggcccctggccctgtgggcccccagagggtggccgaggccggcggcggccagctgggcagcacagcccagggcaaatgtgacaaggacaacacagagaaggacatcacccaggccaccaacagccacttcacccacggggagatgcaggaccagagcatctggggcaaccccagtgatggagagctgatccgcacccagccccagaggctgccccagctgcagaccagcgcccaggtgcccagcggggaggagatcggcaagatcaagaatggccacacaggcctgagcaatggaaatggcatccaccacggggccaagcacggcagcgctgacaacaggaagctgagcgcccctgtgtcccagaagatgcacaggaagatccagagcagcctgtctgtgaacagcgacatcagcaagaagagcaaggtgaatgctgtgttcagccagaagacaggcagcagccctgaggactgctgcgtgcactgcatcctggcctgcctcttctgtgagttcctgaccctgtgcaacatcgtgctgggccaggccagctgtggcatctgcaccagcgaggcctgctgctgctgctgcggagatgagatgggagatgactgcaactgcccctgtgacatggactgtggcatcatggatgcctgctgtgagagcagtgactgcctggagatctgcatggagtgctgcggcatctgcttccccagctag

SEQ ID NO: 261012 - DNA, 1068 bp, Artificial Sequence
  derived and/or modified sequence
gtgcggggcgtgcgggccgccaccgccgccgccgtggccgccaccgccgcaagcggtctgtccagacgcgaggctggtggtagagcaggagccgctgccgcggtggtccgcccacccggcagaaagtgtgggcgctgtcgacggctggccaatttccctggtcgcaagcggcggcgacgccgccggaaagggttgggggcgacgaccggtgggtgtggtgaagccgtctcgtccctgcacccggctccccattcacccagttcagtgcgcccagcgggcagaagagcccgccgccagagacgcggtgctggctctgctgagcgccctatgagtggagccggcgaagcactcgccccagggccagttggcccccagcgggtggctgaggccggcggcggtcagcttggctccacggcccaggggaaatgtgataaagataacactgagaaggatataacccaggctactaatagccacttcacccacggagagatgcaggatcagtctatttggggaaatccatcagacggcgaactcatcaggacccagccacagaggctaccccagttgcagacatctgcgcaggttcccagcggggaggagataggaaaaatcaagaacggccataccgggctttccaatggtaacggcatccaccatggggccaagcacgggagcgcagataaccgtaagcttagtgctccggtttcccagaaaatgcatcggaaaatccaatcttccctgagtgtgaattctgatatcagcaagaagtcaaaagtcaatgccgtattctctcagaaaaccgggtcatcacccgaggattgttgcgtgcactgtatcctcgcatgcctgttttgcgagttcctcacattgtgcaacatcgtcctgggacaggctagttgtgggatttgcactagcgaggcctgctgttgctgttgcggagatgaaatgggagacgattgtaactgtccctgcgatatggactgcggcattatggacgcatgctgcgaatcctccgattgcctggagatttgtatggagtgttgtggcatttgtttcccctcttag

SEQ ID NO: 261013 - DNA, 1068 bp, Artificial Sequence
  derived and/or modified sequence
gtgagaggcgttagggctgctaccgctgctgccgtcgcagccacagctgcttcagggctaagccgcagagaggcaggcggacgggctggagcagctgccgctgtcgtaaggccacctgggagaaagtgtggcagatgccggaggctcgccaattttcccggacgaaagcggaggcgacgtagaaggaagggattgggagccactaccggaggttgtggagaagccgtctcgtctctccacccagcccctcacagccctagctccgtcagacctgccggaaggcgtgcgagaaggcaacgccgaggggcaggcagtgctgagcggccaatgtcaggggcaggggaagctctggcccctgggccagtcggcccacaaagagtggcagaagcagggggaggacaactgggctccaccgcacagggaaagtgtgataaagataacacggagaaagacataacccaggccaccaatagtcacttcacacacggagaaatgcaggatcaatcgatctggggcaatccctctgatggtgaactcatcagaactcagccgcagagactgccacagttacagacctctgcgcaggtcccctcgggcgaggaaataggcaaaataaaaaatggtcatacgggactgtccaacggcaacggcattcaccacggcgctaaacacggaagcgctgacaatcgcaagctgagcgcacctgtctcccaaaaaatgcatagaaaaatccagtcttccctgtccgtgaactctgacatcagcaaaaaaagtaaagtgaacgctgtgttttctcaaaagactggtagctcccctgaagattgttgcgtccactgcatcctcgcctgccttttttgtgaattcctgaccctttgtaatatagtgttgggacaagcaagctgcgggatttgcacatccgaggcttgttgttgctgctgtggggatgagatgggggacgactgcaactgcccgtgtgacatggactgtggtatcatggatgcctgctgcgaatcgagtgattgcctggaaatttgtatggaatgctgcggcatttgcttccctagctag

SEQ ID NO: 261014 - DNA, 4598 bp, Artificial Sequence
  derived and/or modified sequence
cccaggccggctctggcctcctgacccagacagcgcagggcgcgagggatcgcgcggccgagcccgggtcgcgccgctcccagcatcggggccgctagccaagagttcgaggccttcccgatccggatgtgatgaaaaagagcaacagagggagaagtgtttcaggattgtaggagtggaagaggggaaagagaggcagagagggggaaggccccctcgcaggggagccggctggagtgagctggctggaaagagggggcggagtgcgcggagtcagagccgccaccgctgccgcagttgccgccactgcggcgtctgggctgagccggagggaggcgggaggacgcgcaggggcggccgccgccgtcgtcaggccaccggggcgaaaatgcggccgctgccggaggctcgctaactttccggggcggaagaggaggaggaggaggaggaaggggcttggagcgactacggggggatgcggagaagcagtcagttccctgcacccagcacctcacagcccttcctccgtgcgccctgccgggcggcgagctaggcggcagcggcgcggcgcgggctcggcggagcggcccatgtccggcgcgggcgaagccctcgctcccgggcccgtggggccgcagcgcgtggccgaggcgggcggcggccagctgggctccacagcccagggaaaatgtgataaagacaatactgagaaagatataactcaagctaccaatagccacttcacacatggagagatgcaagaccagtccatttggggaaatccttcggatggtgaactcattagaacccaacctcagcgcttgcctcagcttcagacttcagcccaggtgccaagtggtgaggaaataggcaagataaagaacggccacacaggtctgagcaatggaaatggaattcaccacggggccaaacacggatccgcagataatcgcaaactttcagcacctgtttctcaaaaaatgcatagaaaaattcagtccagcttgtctgtaaacagcgatatcagtaagaagagcaaagtaaatgctgtcttttcccaaaagacaggctcttcacctgaagattgttgtgtccactgtatcctggcttgcttgttctgcgaattcctgaccctttgcaacattgtcctgggacaagcgtcatgtggcatctgcacctcagaagcctgctgctgttgctgtggtgacgagatgggggatgattgtaactgcccttgtgatatggactgtggcatcatggatgcctgttgtgaatcatcagactgcttggaaatctgtatggaatgctgtggaatttgttttccttcataaatatttatcttttgtttgtgttaaaactggagagtgtttaaaaatttccttttggggggaagaaaagcacattgtaagattctcatgaaacaacatggaatttgcactgttaactcattattgtaagtaatctctgaaagcctttttactttaaccaaatctacatggtttaatatgtgaaattttaactactttaactagttttataaatttcttaatatgttacaataacttagggacattttgacaccccccttcccaaatgttaaatgccttctcctttttaccgatatttctgtttcttttaaccgttctcaggagcactttgctccaaatatattatttttcagtgtgtatttaaacgaggcagtttattttgatatgtatctattcatgattgaaaggaagcagtcttggccaggcacggtggcttacacctgtaaccctggcattttgggaggccaaggtgggcagattgcctgagctcaggagttcgagaccagccagggcaacatggtgaaaccccatctctactaaaatacaaaaagttagctgggcttggcggtgtgcgcctgtagtcccagctactcaggaggctgaggcaggagaattgcttgaacccgagaggcggaagttgcagtgagccgagattgtgccactgaactccaacctgcactccagcctgggcaacagagcgagactccatctctaaataaataaataaataaataaataaataaataaataaataaacaaaccagtctttattttaaaagaaactttaggaaacaaacccacataatagttgggaaccagtgttgatctctctcccttaccttctccacttgttcaacagactctgaatgccgactgtgtggactctcttcctcagactgtggggacagatacaattccactcctgtccacaggaacatgagatttagcagactaaggagatctgtaaagaatgaaccataccacaaggcatactgaagtgaggattataagagaaataaactcaaaatgctgttggaatatgcagagaattgctaccagaatattcagtaaggtttcagggagaatgtggcatttgaggactctcttagaatgagtgattcacctgctatttaaatgaattatttagatttttgacaaagatttaggtggacaccctaaactgtgtgtgcctttaaccagttaaaagaacagtgccttcagcatacttttttattagttgtaggaatacagctttttgaaaaagctataaagtttaaattaactaaaaatatgcattttcttacacataatttaaatgttatcatacttttttgatgaaaacataatgccttagtaaaatagctctatttaataaagaagattgagtactctgacacatttcatttaaattaggaaatttttaatattaaaatcccagtgttctgagttattgaaaggctttcttttattttgagagctttaggtctttttgggatgagaacattttagttgtttagtttgtttcttaagcagtgctattttttgtaaacacagataaatggaaaccattcttttcaatgcagaagaaatctagatatcccctactgtgaccaaatttctgtattacgattttatgttaaattaaactaatatggcaggttataatgatccttaagtgtaaagaaatcagtcaattacaagagtaattgtatagttattgagacctatagtgtgtggcttagatgaaagggagagtaaattttcataccatgctctctcctactcagtttgatctctctaaaattgtagtttggtttgatttaatataattcttagtagaaattttgaaagtatgctttgggattaataattatttttaatttttctggctgaatatcaaattgatagtaacaacagaagcataattttaggaaggctttcgcaaacctagccttttaagagaggtttttaacctgaagcatgagaatatatcacctgtggtttttcctttgagatgaaacgtagtttctagttatatcattacttaaagggcttaaaaagaaaaaacttagcaaacttttgaatctttcttttattgctatttacacatacatacacacatacaaaacctttaaattttgggatctgaatataattctggtaaacagctgtcttcatttttctcctctaaagaacttaattcatttgttacataaaatataaggaaatctttatactattttacagtaaccacaatctaaatatttacatatacccaaaattaacttatgctcatatattaggatgtgagaatatcatctgtttatggacacatgaaacctcctaatgacctggaattgttagaatatttgactttttatatgcaaagtttttcaaccaagtggtttgtctaatatttaaacatgtactggcacaatttgtgatgaaaatattagcacatttgcaataatgtttctccataacagagaatgttaatggataccagaattttatttttgtatttatgttcatagtacttttcctcttgtctactccagacagttattccataaagcatttgtataattaaaaggaaaacagaaaaaggaaaagtaggcaaatgtgaaaatagtttcaatatatcttatgatttcttaatgtaaaatgttttgttgaagtatatggctatcatgactaagtgctagaatttatagttacaggcggtgtccttttaaatgtggaaaggcttttaaaatattttaaaactggacctgtattatcctgaatacactattttgaaaatttttaaaaatgacttctttattttgctttaccgtatgtttatatctaattgacatattgactaatgtttgaaagaattcaaccataagttaaaatctgaaggttatctttatcatgtttcatccctgtctgaagatttcctagtcttcttatgtaaatcacatgactcatgtccgtaaatgaactatgaaagatatcgatcagtttatgatcattgacatgtgatttcaaaacacagtgttcttttaaaaatctataatatgtcaaaatacaagttttttttttttacatcgttttagtaagttaatttcatttatttactttggagctatatttccacttagaaaaactaaggtaattttacaatatatgctgagattaaaaaccaaggtaaaaatgatcaaacatatatgaaattgagtcttagatttaatgaatttcactcgaaaataaatgatcagaagaatt

SEQ ID NO: 261015 - DNA, 1068 bp, Artificial Sequence
  derived and/or modified sequence
gtgagaggcgtgagagccgccaccgccgccgccgtggccgccaccgccgccagcggcctgagcagaagagaggccggcggcagagccggcgccgccgccgccgtggtgagaccccccggcagaaagtgcggcagatgcagaagactggccaacttccccggcagaaagagaagaagaagaagaagaaagggcctgggcgccaccaccggcggctgcggcgaggccgtgagcagcctgcaccccgccccccacagccccagcagcgtgagacccgccggcagaagagccagaagacagagaagaggcgccggcagcgccgagagacccatgagcggcgccggcgaggccctggcccccggccccgtgggcccccagagagtggccgaggccggcggcggccagctgggcagcaccgcccagggcaagtgcgacaaggacaacaccgagaaggacatcacccaggccaccaacagccacttcacccacggcgagatgcaggaccagagcatctggggcaaccccagcgacggcgagctgatcagaacccagccccagagactgccccagctgcagaccagcgcccaggtgcccagcggcgaggagatcggcaagatcaagaacggccacaccggcctgagcaacggcaacggcatccaccacggcgccaagcacggcagcgccgacaacagaaagctgagcgcccccgtgagccagaagatgcacagaaagatccagagcagcctgagcgtgaacagcgacatcagcaagaagagcaaggtgaacgccgtgttcagccagaagaccggcagcagccccgaggactgctgcgtgcactgcatcctggcctgcctgttctgcgagttcctgaccctgtgcaacatcgtgctgggccaggccagctgcggcatctgcaccagcgaggcctgctgctgctgctgcggcgacgagatgggcgacgactgcaactgcccctgcgacatggactgcggcatcatggacgcctgctgcgagagcagcgactgcctggagatctgcatggagtgctgcggcatctgcttccccagctag

SEQ ID NO: 261016 - protein, 853 aa, Artificial Sequence
  derived and/or modified sequence
MIGCGACEPKVKMAGGQAAAALPTWKMAARRSLSARGRGILQAAAGRLLPLLLLSCCCGAGGCAAVGENEETVIIGLRLEDTNDVSFMEGGALRVSERTRVKLRVYGQNINNETWSRIAFTEHERRRHSPGERGLGGPAPPEPDSGPQRCGIRTSDIIILPHIILNRRTSGIIEIEIKPLRKMEKSKSYYLCTSLSTPALGAGGSGSTGGAVGGKGGSGVAGLPPPPWAETTWIYHDGEDTKMIVGEEKKFLLPFWLQVIFISLLLCLSGMFSGLNLGLMALDPMELRIVQNCGTEKEKNYAKRIEPVRRQGNYLLCSLLLGNVLVNTTLTILLDDIAGSGLVAVVVSTIGIVIFGEIVPQAICSRHGLAVGANTIFLTKFFMMMTFPASYPVSKLLDCVLGQEIGTVYNREKLLEMLRVTDPYNDLVKEELNIIQGALELRTKTVEDVMTPLRDCFMITGEAILDFNTMSEIMESGYTRIPVFEGERSNIVDLLFVKDLAFVDPDDCTPLKTITKFYNHPLHFVFNDTKLDAMLEEFKKGKSHLAIVQRVNNEGEGDPFYEVLGIVTLEDVIEEIIKSEILDETDLYTDNRTKKKVAHRERKQDFSAFKQTDSEMKVKISPQLLLAMHRFLATEVEAFSPSQMSEKILLRLLKHPNVIQELKYDEKNKKAPEYYLYQRNKPVDYFVLILQGKVEVEAGKEGMKFEASAFSYYGVMALTASPGENKSPPRPCGLNHSDSLSRSDRIDAVTPTLGSSNNQLNSSLLQVYIPDYSVRALSDLQFVKISRQQYQNALMASRMDKTPQSSDSENTKIELTLTELHDGLPDETANLLNEQNCVTHSKANHSLHNEGAI

SEQ ID NO: 261017 - protein, 854 aa, Artificial Sequence [sequence omitted]

SEQ ID NO: 261018 - DNA, 2562 bp, Artificial Sequence
  derived and/or modified sequence
atgattggatgcggcgcctgtgaacccaaggttaagatggctggcggtcaggctgctgcggcattgcctacatggaagatggccgcccggcggtctttgtctgcaagaggtcgaggaatcctccaggccgctgcaggtcggctcctgcccctgctgctgttgtcatgttgttgtggtgccggaggctgtgcagcagtcggagagaatgaggagacggtcattattggactgcgcctggaagacacaaatgacgtgtctttcatggaagggggcgccctccgcgtgagtgagagaacacgtgtcaaactgcgggtttatgggcagaatatcaacaatgagacttggtcacggatcgccttcacagagcacgaacgccggaggcactctcccggagagagagggctgggagggcctgctccaccggaaccagacagtgggccgcaaagatgtggcatcagaacctccgacattatcattctaccgcacatcatccttaacagacgcacgagcggcataattgagattgagataaaaccactgcgcaaaatggagaagagcaagagctactatttgtgtacatccctgtccaccccagccctaggtgccggcgggtcaggcagtactggcggggctgtgggggggaaaggcgggtccggcgtcgccggcctgccccctccgccttgggccgaaacgacctggatctatcacgatggcgaggatacaaagatgatcgtgggcgaggagaagaagttcctgctgcctttttggttgcaggtaatttttattagcctactcctttgtctttcaggcatgttctctggcctgaacttggggttaatggctcttgatcctatggagctccggatcgtgcagaattgtgggacggagaaggagaagaactatgccaagcgaatagaacctgtgagacggcaaggtaactatctgctttgcagcctgctactcggcaatgttctcgtgaacacaactctgacaatcctcctggatgatattgcaggctccgggctcgtggcagtggttgtgtccaccattggcattgtgatcttcggagaaattgttccacaggcgatatgcagtaggcacggtctggctgtgggcgcaaacacaatctttcttaccaagtttttcatgatgatgacattccctgccagttaccccgtgtctaagctgttggactgtgtactcggccaggagattggtaccgtgtataatcgagagaagctgcttgagatgctccgagtcacggatccgtacaacgatctcgtcaaggaggagctgaacattattcaaggtgccctcgagctgcgcacaaagaccgtggaggacgtgatgacccccctgcgagattgtttcatgatcaccggcgaggctatattagatttcaataccatgtcagagatcatggagtccggctacactagaatacccgtgttcgagggcgagaggagtaatatcgtagatctgctgttcgtgaaagacttagctttcgtcgacccagacgattgtacaccactcaaaacaatcacaaaattttataaccacccactgcattttgtgttcaacgacacaaaactggatgccatgttagaagaatttaagaaggggaagagccatcttgctatcgtgcagcgtgtgaataacgaaggagagggcgaccccttttacgaagtgctggggatcgtgactctcgaagacgtaatagaggagataatcaagtcggagatcctggacgagaccgacctgtacaccgataacagaactaagaaaaaggtggcccaccgggaaagaaagcaagacttcagcgccttcaagcagactgatagtgaaatgaaggttaagatatctccccagctgttgttggccatgcatcggtttctggctaccgaggttgaagccttttccccatcccagatgtcagagaagattttacttcgcctcctcaagcaccctaatgtcatccaggaacttaaatacgatgaaaagaacaagaaagccccagagtattacttatatcagcgaaacaagccggttgactatttcgtactcattctgcaggggaaagtcgaggtggaagctggaaaagagggcatgaaatttgaagcaagtgctttctcctattatggcgtgatggccttaaccgcaagtccaggggagaataagtcacctcctagaccctgtggtttgaatcactccgattctttatccaggagcgaccggatcgatgcggtgactcccactcttggatcatcaaacaaccagcttaattcatccttactgcaggtgtacattcctgattacagcgtccgcgccctcagtgatctccagttcgttaaaatctcccggcagcagtaccagaatgctctgatggcttccagaatggacaaaacaccccaatcctccgactccgagaatacgaaaattgagctgactctgaccgaactacatgacggattgcccgacgaaacggcgaatttactgaacgaacagaactgcgtgacccactctaaagcgaatcactctctccacaacgaaggtgccatttag

SEQ ID NO: 261019 - DNA, 2565 bp, Artificial Sequence
  derived and/or modified sequence
atgatcggttgtggggcttgtgaaccgaaagtgaaaatggcaggggggcaggctgccgccgcgttgcccacatggaagatggccgccaggagatcactttccgctagagggagaggtattctgcaggcagctgccggtcgactgctcccgctactgctcctcagctgttgttgcggcgccggcggctgcgccgccgtgggagaaaatgaggagaccgtcattatcggcctgcgcctcgaagacacaaacgatgtgagcttcatggagggtggtgctctgagagtgtctgagcggaccagggtaaagctgagggtgtatgggcagaatataaacaatgagacctggtccagaattgcatttacagagcatgagagacggaggcactctcccggtgagcggggcctcggtggacccgctccacctgagccggattccggtccccaacggtgcggcatcagaacctccgacatcataatcctcccccacatcattctgaataggaggacttcgggaatcatcgagatagaaattaaacccctaaggaaaatggagaaatccaagtcctactacctgtgcacatcactttccacaccagccttgggcgcaggtggcagcggctcaacagggggggccgtcgggggtaaagggggtagtggcgtagcaggactcccacccccgccttgggctgagacaacctggatttaccacgacggggaagacactaagatgatcgtgggcgaagaaaagaagttcctgctgcccttttggttacaggtgatttttataagcttgctgctatgtctgtccgggatgttcagcgggctgaaccttggactgatggctctagacccaatggaattgaggatcgtgcagaattgcggaactgaaaaagagaagaactacgcaaaacgcattgaacccgttcgaaggcaaggaaattatctgttatgctcccttcttctcggcaatgtactggtaaacacaacactcacaattctgttagatgacatcgccgggtctgggctggtagccgtcgtggtgtcaacaattgggatagtgatcttcggggagatagtgccccaggctatatgttctaggcacgggttagccgtcggtgctaacacaatcttcttgaccaagttttttatgatgatgacattccctgctagctacccagtcagtaagctcctcgattgtgtgcttgggcaggagatagggaccgtctacaatcgagagaagttgcttgagatgctgagagtgaccgatccttacaatgacctcgtgaaggaggagctcaacatcatccagggcgctctggaattgaggaccaaaaccgtcgaggacgtcatgactccgctgcgggactgctttatgattacgggtgaggccatcctcgactttaacaccatgagtgagatcatggaaagcggctacacacgaatccccgtttttgagggagagcggtctaatatagtcgatcttctctttgtgaaggatctggcattcgttgatcccgacgactgtactcccttaaaaactatcacaaaattttacaatcatcccttgcatttcgtgtttaatgataccaaactggacgccatgttggaagaatttaaaaaaggaaagagccatctggcaatcgtacaacgcgttaacaacgagggagagggagaccctttctatgaagttctcggaatagtcaccctcgaggatgtcatcgaggaaattatcaagtccgaaatcttagatgagacagacctgtatactgacaaccggacgaagaagaaagtggcacatagagaacggaaacaggacttttcagcctttaagcagacagactccgaaatgaaggtaaaaatctcccctcaactcttattggccatgcaccttgttttcatttccattgaagtagaagccttttccccatcccagatgtcggaaaagatcctcctgcgtctgctgaagcaccctaatgtcatccaagagctgaaatatgacgaaaaaaacaagaaggcaccagaatattatctatatcaacgaaacaagcccgtggactatttcgtcctcatcttgcaggggaaagtggaggtagaggcaggcaaggaaggcatgaagtttgaggccagtgcattcagctattatggtgtcatggctctgaccgcaagtccaggcgaaaacaagtcccccccacgaccgtgtggcctgaatcacagcgattcactgtcccgctctgataggatcgatgctgtcacacctacccttgggtctagcaacaaccagctgaacagttcactgctgcaggtgtacattccagattattctgtccgggccctgagtgatctgcagttcgttaaaatctctaggcagcaatatcaaaacgcgcttatggccagccgcatggacaaaacacctcaatctagtgactcagaaaacacaaagatcgagctgaccttaacagagctgcatgacggtctacctgacgagactgccaatctgctgaatgagcaaaactgcgtaacccattcaaaggccaatcatagccttcacaatgagggggctatatag

SEQ ID NO: 261020 - DNA, 2562 bp, Artificial Sequence
  derived and/or modified sequence
atgattggctgtggggcctgtgagcccaaggtgaagatggccggcggccaggccgccgccgccctgcccacctggaagatggccgcccggcgcagcctgagcgcccggggccggggcatcctgcaggccgctgctggccgcctgctgcccctgctgctgctgagctgctgctgcggggccggcggctgtgccgctgtgggggagaatgaggagaccgtcatcatcggcctgcggctggaggacaccaatgatgtgtccttcatggagggcggggccctgcgggtgtctgagaggaccagggtgaagctgcgggtgtatggccagaacatcaacaatgagacctggagccgcatcgccttcacagaacatgaaagaagaagacacagccctggagagcggggcctgggcggccctgcccctcctgagccagattctggcccccagagatgtggcatccgcaccagtgacatcatcatcctgccccacatcatcctgaacagaaggaccagcggcatcattgaaattgagatcaagcccctgaggaagatggagaagagcaagagctactacctgtgcaccagcctgagcaccccagccctgggcgctgggggcagcggcagcactggaggagctgtgggcggcaaaggaggcagcggcgtggccggcctgcccccaccaccctgggccgagaccacctggatctaccatgatggagaggacaccaagatgattgtgggggaggagaagaagttcctgctgcccttctggctgcaggtgatcttcatcagcctgctgctgtgcctgagcggcatgttttctggcctgaacctgggcctgatggccctggaccccatggagctgagaattgtgcagaactgtggcacagagaaggagaagaactatgccaagagaattgagcctgtgcggcggcagggcaactacctgctgtgcagcctgctgctgggcaatgtgctggtgaacaccaccctgaccatcctgctggatgacattgctggcagcggcctggtggccgtggtggtgtccaccatcggcatcgtcatctttggagagatcgtgccccaggccatctgcagcagacatggcctggccgtgggcgccaacaccatcttcctgaccaagttcttcatgatgatgaccttccctgccagctaccctgtgtccaagctgctggactgtgtgctgggccaggagattggaacagtgtacaaccgggagaagctgctggagatgctgcgggtgacagacccctacaatgacctggtgaaggaggagctgaacatcatccagggcgccctggagctgcggaccaagacagtggaggatgtgatgacccccctgcgggactgcttcatgatcaccggggaggccatcctggacttcaacaccatgtctgagatcatggagagcggctacacccgcatccctgtgtttgaaggagagaggagcaacatcgtggacctgctgtttgtgaaggacctggcctttgtggaccctgatgactgcacccccctgaagaccatcaccaagttctacaaccaccccctgcactttgtgttcaatgacaccaagctggatgccatgctggaggagttcaagaagggcaagagccacctggccatcgtgcagagggtgaacaatgaaggagagggggaccccttctatgaggtgctgggcatcgtgaccctggaggatgtgattgaggagatcatcaagtctgagatcctggatgaaacagacctgtacacagacaacagaaccaagaagaaggtggcccaccgggagaggaagcaggacttcagcgccttcaagcagacagacagcgagatgaaggtgaagatcagcccccagctgctgctggccatgcaccgcttcctggccacagaggtggaggccttcagccccagccagatgtctgagaagatcctgctgcggctgctgaagcaccccaacgtcatccaggagctgaagtatgatgagaagaacaagaaggcccctgagtactacctgtaccagaggaacaagcctgtggactactttgtgctgatcctgcagggcaaggtggaggtggaggccggcaaggagggcatgaagtttgaggccagcgccttctcctactatggagtgatggccctgacagccagccctggagagaacaagagccccccccggccctgtggcctgaaccacagcgacagcctgagcagaagtgacagaattgatgctgtgacccccaccctgggcagcagcaacaaccagctgaacagcagcctgctgcaggtgtacatcccagactacagcgtgcgggccctgagtgacctgcagtttgtgaagatcagccggcagcagtaccagaatgccctgatggccagcaggatggacaagaccccccagagcagtgacagcgagaacaccaagattgagctgaccctgacagagctgcatgatggcctgcctgatgaaacagccaacctgctgaatgagcagaactgtgtgacccacagcaaggccaaccacagcctgcacaatgaaggagccatctag

SEQ ID NO: 261021 - DNA, 2565 bp, Artificial Sequence
  derived and/or modified sequence
atgattggctgtggggcctgtgagcccaaggtgaagatggccggcggccaggccgccgccgccctgcccacctggaagatggccgcccggcgcagcctgagcgcccggggccggggcatcctgcaggccgctgctggccgcctgctgcccctgctgctgctgagctgctgctgcggggccggcggctgtgccgctgtgggggagaatgaggagaccgtcatcatcggcctgcggctggaggacaccaatgatgtgtccttcatggagggcggggccctgcgggtgtctgagaggaccagggtgaagctgcgggtgtatggccagaacatcaacaatgagacctggagccgcatcgccttcacagaacatgaaagaagaagacacagccctggagagcggggcctgggcggccctgcccctcctgagccagattctggcccccagagatgtggcatccgcaccagtgacatcatcatcctgccccacatcatcctgaacagaaggaccagcggcatcattgaaattgagatcaagcccctgaggaagatggagaagagcaagagctactacctgtgcaccagcctgagcaccccagccctgggcgctgggggcagcggcagcactggaggagctgtgggcggcaaaggaggcagcggcgtggccggcctgcccccaccaccctgggccgagaccacctggatctaccatgatggagaggacaccaagatgattgtgggggaggagaagaagttcctgctgcccttctggctgcaggtgatcttcatcagcctgctgctgtgcctgagcggcatgttttctggcctgaacctgggcctgatggccctggaccccatggagctgagaattgtgcagaactgtggcacagagaaggagaagaactatgccaagagaattgagcctgtgcggcggcagggcaactacctgctgtgcagcctgctgctgggcaatgtgctggtgaacaccaccctgaccatcctgctggatgacattgctggcagcggcctggtggccgtggtggtgtccaccatcggcatcgtcatctttggagagatcgtgccccaggccatctgcagcagacatggcctggccgtgggcgccaacaccatcttcctgaccaagttcttcatgatgatgaccttccctgccagctaccctgtgtccaagctgctggactgtgtgctgggccaggagattggaacagtgtacaaccgggagaagctgctggagatgctgcgggtgacagacccctacaatgacctggtgaaggaggagctgaacatcatccagggcgccctggagctgcggaccaagacagtggaggatgtgatgacccccctgcgggactgcttcatgatcaccggggaggccatcctggacttcaacaccatgtctgagatcatggagagcggctacacccgcatccctgtgtttgaaggagagaggagcaacatcgtggacctgctgtttgtgaaggacctggcctttgtggaccctgatgactgcacccccctgaagaccatcaccaagttctacaaccaccccctgcactttgtgttcaatgacaccaagctggatgccatgctggaggagttcaagaagggcaagagccacctggccatcgtgcagagggtgaacaatgaaggagagggggaccccttctatgaggtgctgggcatcgtgaccctggaggatgtgattgaggagatcatcaagtctgagatcctggatgaaacagacctgtacacagacaacagaaccaagaagaaggtggcccaccgggagaggaagcaggacttcagcgccttcaagcagacagacagcgagatgaaggtgaagatcagcccccagctgctgctggccatgcacctggtgttcatcagcattgaggtggaggccttcagccccagccagatgtctgagaagatcctgctgcggctgctgaagcaccccaacgtcatccaggagctgaagtatgatgagaagaacaagaaggcccctgagtactacctgtaccagaggaacaagcctgtggactactttgtgctgatcctgcagggcaaggtggaggtggaggccggcaaggagggcatgaagtttgaggccagcgccttctcctactacggcgtgatggccctgacagccagccctggagagaacaagagccccccccggccctgtggcctgaaccacagcgacagcctgagcagaagtgacagaattgatgctgtgacccccaccctgggcagcagcaacaaccagctgaacagcagcctgctgcaggtgtacatcccagactacagcgtgcgggccctgagtgacctgcagtttgtgaagatcagccggcagcagtaccagaatgccctgatggccagcaggatggacaagaccccccagagcagtgacagcgagaacaccaagattgagctgaccctgacagagctgcatgatggcctgcctgatgaaacagccaacctgctgaatgagcagaactgtgtgacccacagcaaggccaaccacagcctgcacaatgaaggagccatctag

SEQ ID NO: 261022 - DNA, 2562 bp, Artificial Sequence
  derived and/or modified sequence
atgatcggctgcggcgcctgcgagcccaaggtgaagatggccggcggccaagcagccgccgccctgcccacttggaagatggcggcacgtcggagtctatccgcccgaggaagaggcatccttcaggctgcagccggccggcttcttccgttgctcttactctcgtgttgctgcggagccggcgggtgtgcagccgtaggagagaatgaggagacagtgataatagggctccgtctcgaagataccaatgacgtaagcttcatggaagggggggcactgcgtgtgagtgagcgtactagggtgaagctcagagtctatggacagaacatcaataacgaaacatggtccagaattgcttttactgagcacgagaggcgcaggcactctcctggcgagagaggattggggggacccgcaccacccgagccagattcgggccctcaacggtgtggtataaggaccagtgacataatcatactgccacacatcattctgaacagacgcacatccggcataatagagatcgagatcaagccgttacgaaagatggagaagtccaagagctactacctgtgtacatcgctctccacaccagctctgggggctggcggctctggctctacgggaggggccgtgggcggtaagggggggtctggggtcgccggcttaccccctcccccctgggctgagaccacctggatatatcacgacggtgaggacaccaaaatgattgttggggaagagaagaaatttctgttaccattttggctccaggttatcttcatctctctcttgctgtgcctgtctgggatgttctctggactgaacctcgggctgatggcactcgaccctatggagcttcggatcgtacagaactgcgggaccgagaaagagaagaattatgccaagcgcatcgagccggtacgccgtcaggggaattatctgctgtgcagcttacttttggggaatgtgctggtaaataccacattgaccattctgctggatgacatcgccggatctgggcttgtggccgtggttgtgtctacaataggtatcgtgatatttggagagattgtgccacaggcaatttgttccaggcatgggctcgcagtgggcgcaaataccatcttcctgaccaaatttttcatgatgatgacatttccagccagctaccccgtcagtaaactcctggactgtgtactcgggcaggaaatcggaactgtctacaatagggaaaagctgctggagatgctgagagtgaccgacccctataacgacttggttaaggaagagctcaacatcattcagggggcattggaactccgcaccaaaacagtcgaggacgtgatgacaccactaagggattgcttcatgattaccggggaggcaatccttgatttcaatactatgagtgagattatggagtctgggtacactagaattccagtcttcgaaggcgagcggagcaacatcgtggacctgttgttcgtaaaggacttggcttttgtggacccagatgactgtacccctctaaagacaataacaaagttttataatcatcccctgcattttgtgttcaatgacaccaagctagacgcgatgttggaggaatttaaaaaaggcaaaagccacctcgctatcgtccagagggtgaacaacgagggggaaggggatcctttttatgaagtgctggggattgtaacattagaggacgtgatcgaagagatcatcaaatcagaaatcctcgatgaaactgacctgtacaccgacaacaggaccaagaagaaggttgcccaccgagagagaaagcaggattttagcgccttcaagcagaccgactccgagatgaaagtgaaaatcagcccccaactattattagccatgcaccgcttcttggcaacagaggttgaggctttttcccctagccagatgtctgagaaaattctgctgcggcttctgaagcaccccaatgtgatccaggaactgaagtatgatgagaaaaacaagaaagcgcctgagtactatctgtaccaaaggaacaaacctgtggactacttcgtactgatactccagggcaaggttgaggttgaagcaggaaaagagggtatgaaatttgaagccagtgctttctcatattacggtgtgatggctttgacggctagccccggcgaaaacaagtctccccctagaccttgtggactcaatcattccgactctctttccaggtccgatcgcatagacgccgtgacgcccacgctcggatctagcaacaaccagttgaactcatctctgttgcaggtttatatccctgactatagcgtgcgggccctatccgacctgcagttcgtcaagatcagccgccagcagtaccaaaacgcactgatggcctcgaggatggacaaaacaccacaaagcagcgactctgaaaacactaagatagagctgaccctgacggaactgcatgacgggctgccagacgagacagcaaacctgctgaacgagcagaattgcgtcactcattcaaaggcgaaccattctcttcataatgaaggggcaatttag

SEQ ID NO: 261023 - DNA, 2565 bp, Artificial Sequence
  derived and/or modified sequence
atgatcggctgcggcgcctgcgagcccaaggtgaagatggccggcggccaggccgctgccgccctccctacctggaaaatggcagccagacgctccctcagtgcacgagggcgggggatcctgcaggccgccgccgggagacttctccccctgctgctgctctcctgttgttgtggcgctggaggatgcgccgccgtcggggaaaacgaggaaaccgtgattattgggctcaggctggaagacacaaacgacgtgtcattcatggagggaggagccctgcgggtgtcagagagaactcgagtcaaattacgggtgtacggccagaatatcaacaacgaaacgtggagtcgaatcgcgtttacagagcacgagcgacgtcgccactcgccaggggagcgcgggcttggggggccagctcccccagagccggactccggtccgcagagatgcggcatacgaacatctgacataataatccttcctcacatcatcctgaataggcggactagtggaatcatcgagattgagatcaaacccctcagaaaaatggagaagtcaaaatcctattatctgtgtaccagtctcagcacgcctgccctgggcgccggcggatccgggagcaccggcggcgccgttggcggtaaggggggaagcggggtcgccggcctgcccccaccaccatgggccgaaactacgtggatataccacgacggtgaagataccaaaatgattgtgggagaagagaagaaatttttgctaccattttggctgcaagtgatatttataagcctgcttctgtgcttgtctgggatgttttctggactgaatcttggcttgatggccttggacccaatggagctgagaatagtacagaattgtggcaccgaaaaagagaagaattacgcgaagcggatagaaccagtcaggcgacagggaaactatctactttgtagcctgctgctcggcaacgtactggtcaatacaaccctcaccatcttgttggacgacatcgcaggcagcggcctcgtcgctgtggttgttagcacaatcggcatcgtcatttttggcgaaatagtcccccaggccatctgctccaggcatgggctagcagtgggagctaacaccattttcctgacgaagtttttcatgatgatgaccttccccgcgagctatccagtaagtaagttgctggactgtgtgttaggccaagagatagggacagtctacaatcgcgagaagttactggaaatgctgcgggtgactgacccttataacgacctggtgaaggaggagctgaatatcatacagggagctctcgagctgaggacaaagaccgtcgaagacgtcatgaccccattgcgggattgtttcatgattactggcgaggctatactggactttaatacaatgtctgaaatcatggagagcggctacaccagaatacctgtattcgagggagagcgctctaacatcgtggacctgctttttgtcaaggatcttgcatttgtggatccagacgattgtacccccctcaaaacaatcaccaagttctataaccaccctcttcatttcgtttttaatgatactaaactggatgcaatgctggaagaattcaaaaaaggcaaaagtcaccttgcaattgtgcaacgggtgaacaatgaaggtgagggcgaccctttctatgaggttctgggaatagtcacactggaggacgtaatagaggagataattaagtccgaaattctggatgaaacagacctgtatacagataatcggacaaagaaaaaagttgctcaccgtgagagaaagcaggacttcagcgctttcaagcaaacagatagcgagatgaaagtcaagatctcccctcagcttctgctggctatgcatctggtgtttatctccatcgaagttgaggcctttagtcccagtcagatgtcggaaaaaatcctcttgcgcctgctgaaacatccgaatgtgattcaggagctaaagtacgatgagaagaacaagaaggcacctgagtactatttgtatcagcgcaataaacctgtggattatttcgttctaatactccagggtaaggttgaggtcgaggccggtaaggaaggcatgaagtttgaggccagcgcgttctcctattacggagtgatggcactgactgcctctcccggtgaaaacaagagccccccccggccatgtggcctcaaccattccgattcgctgagcagatccgataggatagatgcggtgactcctaccctgggaagcagcaacaatcagttaaattcttctctgctgcaggtgtacatcccagactatagtgtccgcgctctgtccgacctccaattcgtaaaaatctcccgacaacagtaccaaaatgcccttatggcttcaagaatggataaaactcctcagagttctgacagtgaaaatacaaaaatcgagctgacacttaccgagttgcacgatggattacctgatgaaacagcaaatctgctgaatgagcagaactgtgtgactcattccaaggcaaatcactcactacacaacgagggggccatctag

SEQ ID NO: 261024 - DNA, 2562 bp, Artificial Sequence
  derived and/or modified sequence
atgatagggtgcggcgcatgcgagccaaaggtgaaaatggctgggggtcaggccgctgcagccctgccaacatggaagatggctgccagaaggtcattatccgccaggggccgagggattcttcaggctgcggctggcagactgctgcctttgctactgctgtcctgctgctgcggggcaggcggatgtgccgcagtgggggagaacgaagaaactgtgattattggcttgcgcctggaggatactaatgatgtgtctttcatggaaggaggggcactgagggtgtcggaacgcactagggttaagcttagggtgtacgggcagaacatcaataacgagacttggtccaggatcgctttcacagagcatgagagacggaggcacagccccggtgaacggggactcggtggtcctgccccaccagaacctgatagcggaccacagcgatgcgggattcggaccagcgatattatcattctcccccatattattcttaaccgcaggacatctggtattatagaaatcgagatcaagccgcttcgaaagatggagaaatccaagtcatactacctctgcacaagtctgtccacccccgctttgggcgctgggggaagcggcagtaccgggggagctgtcggaggcaagggcggatccggggttgccggactgcctccccctccgtgggccgaaacgacatggatctaccatgatggtgaagatactaagatgatcgtgggagaagaaaaaaagttcttgctgcccttctggttgcaggtgatattcattagcttattgctgtgcttgtcggggatgtttagcggactgaaccttgggttgatggctttggacccaatggaactcagaattgtccaaaactgcggtactgagaaagagaagaattatgcgaagagaatcgaaccagtgcggaggcagggcaactacctgctgtgtagtctattgctgggaaacgtattagtcaacaccaccctgactatcctgctggacgacatagctggcagcggattggttgccgtggtcgtcagcactataggcatcgtgatttttggcgagatcgtgccgcaggccatttgttctcgacacggattggctgtgggcgctaacacaatcttcctgactaaattcttcatgatgatgactttccccgcatcctaccccgtgtctaaactgctcgactgcgtcctgggccaggaaattgggactgtgtacaacagggagaagctgctagagatgttgcgcgtaactgatccttacaatgatctggtcaaggaggaacttaacatcatacaaggagcccttgaactgaggaccaagacagtggaagacgtgatgaccccccttagagattgcttcatgatcaccggggaggcaatcctggacttcaataccatgtctgagattatggagagcgggtacacacggatccccgtgtttgagggtgaaaggagtaatatcgtagacctcctctttgtgaaagatctggcctttgtggaccctgacgactgtacgccccttaagactataaccaagttctacaatcacccgctgcacttcgtttttaacgacactaagcttgatgcaatgctcgaagagttcaagaaggggaaaagtcacctggccattgtgcagagagtgaacaatgaaggcgagggtgaccccttttacgaagtcttaggaatcgttacactagaagatgttattgaagagatcatcaaatcggagattttagatgagactgacctgtataccgacaacagaacgaagaagaaagtggctcaccgcgagaggaagcaggactttagcgcctttaagcaaacggattctgaaatgaaagtaaaaatctctccacagctcttactggccatgcaccgattcttagccacggaggtcgaggcctttagtccgtcccagatgtctgagaagatattgttgagactccttaagcacccaaacgtaattcaggaattaaagtacgacgagaaaaacaagaaagcaccagaatattatctctaccagcgcaacaagccagtggattacttcgttctcatactgcaaggcaaggtggaagtagaagcaggcaaggagggaatgaagttcgaggcttcagctttcagctattacggagtgatggcgctcactgcgtcccctggcgaaaataaaagcccgccaaggccatgcggactgaaccattccgattccctcagtagatccgatcgcatcgacgctgtcacaccaaccctcggcagtagcaataatcaactcaattccagccttctgcaggtgtacatacccgactatagtgtaagggcactcagtgatctgcagttcgtgaagatttctaggcagcagtaccaaaacgccttgatggcctcccgtatggacaaaactccacaaagttccgactccgagaataccaaaattgaacttactctgacagaattacatgacggtctgccagacgagactgcaaatctactaaacgaacagaactgtgtgacccactccaaggctaatcattctctgcacaacgaaggcgctatttag

SEQ ID NO: 261025 - DNA, 2565 bp, Artificial Sequence
  derived and/or modified sequence
atgatcggttgcggtgcatgcgaacctaaagtgaaaatggccggaggtcaagcggctgccgcattacctacgtggaagatggccgctcggaggtccctgtctgctcgtggccgtggcatccttcaggctgccgctggacggctgctgcctctcctcttactgtcctgttgctgtggcgcaggaggttgtgccgctgtaggcgaaaatgaggaaacggtaattatagggttaaggcttgaagacacgaatgacgtgtcctttatggaaggaggagcccttcgagttagcgagaggacgcgtgtgaaactcagggtctacggacagaacatcaacaatgagacctggtctcgtattgccttcaccgagcatgagcggaggaggcactcccctggagagcgcggattgggcggtcctgccccaccagaacccgacagcggccctcaacggtgtggtatcaggaccagtgatatcataatactccctcacataatcctgaacaggcgcacctccgggattatcgaaatagagatcaagcccctgaggaagatggaaaaatcaaagtcatactacctttgtaccagtctttctactccggcactcggggcaggcggatcaggaagcacgggaggcgctgtgggtggcaaaggtgggtccggagtggccggactcccgcctcccccatgggccgagacgacttggatctatcatgacggcgaagataccaagatgattgttggtgaggagaaaaaattcctgctgccattctggctgcaggtgatattcatctctctgcttctttgcttaagcggcatgttctcaggtctgaacctgggcctgatggcactcgacccgatggagctgaggatcgtccaaaactgcggcactgaaaaggaaaaaaactacgccaagcggatcgaacccgtgcggcgacaaggcaactacctcctctgctcattgcttttagggaacgtgttagtgaataccacacttactatactgctggacgatatcgcgggtagcgggctggtggcggttgtggtcagcaccattggtatcgtcattttcggcgagatcgtcccacaggcaatctgcagccggcatgggttagccgtcggagccaacacaatttttttgacaaagttctttatgatgatgacattccccgcatcttacccagtgtcaaagctcttagattgtgtcctaggacaagagattggcactgtgtataatcgggagaaactgctggagatgctgcgcgtgactgacccttacaatgatctcgtgaaagaggaactgaatatcattcagggagctttagaattgcgcacgaagacggtggaggatgtgatgactccgctgcgcgactgtttcatgataactggcgaggctatcctcgattttaatacaatgtctgaaatcatggaaagcggctacacgagaattcccgtcttcgagggggagagaagcaatattgtggatctcctgtttgtgaaagaccttgcttttgtagacccagatgattgtacaccactcaagaccatcacaaagttttacaaccacccgttgcacttcgtttttaacgacacgaagctggacgctatgctagaagaattcaagaaggggaaaagtcatctcgcaatcgtgcagagagtcaacaatgagggcgagggtgaccccttttacgaggtgctcgggatagtcaccctcgaagatgtgatagaagaaataatcaaatccgaaatccttgatgagacagatctgtacacagacaaccgtactaagaagaaggtggcccatcgtgagcggaaacaggacttttctgcctttaaacagacggacagcgaaatgaaggtgaaaatttctccacagctgctgctggcgatgcatcttgtattcatatctattgaggtggaggcgttttcacccagtcagatgagtgaaaaaatcttgctccgtctgctgaaacatcccaatgttatacaggagttgaaatacgatgagaagaacaagaaggcccctgaatactacctctaccaaagaaacaagccagtcgactactttgttctgatcttgcaggggaaggtggaagtagaggctggcaaagaggggatgaagttcgaggctagtgcattctcatactacggcgtgatggccctcactgctagcccaggcgagaacaagagtcctcccagaccttgcggcctgaatcactctgactcactgagtcgttcggataggattgatgccgtcacacccaccctgggctcctcaaataaccaactcaacagcagcctgttgcaggtctacataccagactactctgtacgcgctttatctgatctgcagttcgtcaagataagcagacagcagtatcagaatgcgttgatggcaagcagaatggataaaacaccacaaagcagcgattcagaaaatactaagattgaacttacgttaactgagctccatgacggactgcctgacgagaccgccaacttactgaatgagcagaattgcgtgacccactccaaggctaaccattcattgcacaatgagggcgctatatag

SEQ ID NO: 261026 - DNA, 3987 bp, Artificial Sequence
  derived and/or modified sequence
agtcagggaggcgaactgctgagcactggccgcggacgctccgttgcagtctcgcccaggggccggtacctgcgctcgcgccgccgggttgaaaggatgaagccgcagctggagcagccaccctatgattggctgtggcgcttgtgaacccaaagtaaagatggcgggcgggcaggcagccgccgcactgcccacttggaagatggcggcgcgccgcagcctcagcgctcgcggccgggggatcctgcaggcggctgcggggcggctgctgccgctgctcctgctgagctgctgctgcggtgcgggcggctgcgcagcggtgggcgagaatgaggagacggtgatcatcgggctgcgactggaggacacgaacgacgtgtcgttcatggaagggggggcgctgcgggtgagcgaacggacccgggtcaagctgcgggtgtacgggcagaacatcaataacgagacgtggtcccgcatcgccttcaccgagcacgagcggcggcgccacagcccgggggagcgcgggctggggggccccgcgccgccagagccggacagcggcccccagcgatgcggcatccgcacctcagacatcatcatcttgccccacatcattctcaaccgccgcacctcgggcatcatcgagatcgagatcaaaccgctacgcaagatggagaagagcaagtcctattacctgtgcacgtcgctctccacgcccgccctgggcgccggcggctcggggtccacgggtggcgccgtcgggggcaagggtggctcgggggtggccgggctcccgccgcccccgtgggccgagaccacctggatttaccacgacggcgaggacaccaagatgatcgtaggcgaagagaagaagttcctgctgcccttctggctgcaggtgatcttcatttcgctgctgctgtgcctgtcgggcatgttcagcggcctcaacctggggctcatggccctggacccgatggagctgcgcatcgtgcagaactgcggcacggagaaggagaagaattacgccaagcgcatcgagccggtgcgcaggcagggcaactacctgctgtgctcactgctgctgggcaacgtgctggtcaacaccacgctcaccatcctgctcgacgacatcgccggctcgggcctcgtggccgtggtagtctccaccatcggtatcgtcatcttcggagagatcgtgccccaggccatctgctcccggcatggcctggctgtgggggccaacaccatcttcctcaccaagtttttcatgatgatgaccttccccgcttcctacccggtcagcaagctgctggactgcgtcctgggccaggagataggcaccgtctataaccgggaaaaactgctggagatgctccgggtcaccgatccctacaacgacctcgttaaggaggagctgaacatcatccaaggggcgctggagctccgcaccaagacggtggaggacgtgatgaccccactccgggactgcttcatgatcaccggcgaagccatcctggacttcaacaccatgtctgagatcatggagagcggctacacccgcattccagtgtttgaaggggagcgctccaatatcgtggacctgctgtttgtcaaagacttggccttcgtggatcccgatgactgtacccccctgaaaaccatcaccaaattttataaccaccccttgcactttgttttcaatgacaccaagttggacgctatgctggaagaatttaagaaaggtaaatctcacctggctatcgtgcagcgggtaaacaatgagggagaaggggatccattttatgaagttctgggaatcgtcaccttagaagatgtgattgaagaaatcatcaaatctgagattcttgatgaaacagatttatacactgacaacagaacgaaaaagaaagtggctcaccgggaacgaaagcaagatttttctgcctttaagcagacagacagtgagatgaaggttaaaatatcaccacagctcctcctggccatgcaccgtttcctagcaacagaagtagaagcatttagcccatcccagatgtcagagaagatccttctaaggctgctaaagcaccccaatgtcatccaggaactgaaatatgatgagaagaacaagaaagcccccgaatactacctctaccagcgcaacaagccagtagactacttcgttctcattctgcaggggaaagtggaagttgaagctgggaaagaaggtatgaagtttgaagcgagcgccttctcatactatggcgtgatggccctgacagcctctccaggtgaaaataagtcccctcctcgcccatgtggcttgaatcactcagactctctcagtcgaagcgaccggattgacgccgtcacaccaacactggggagcagcaataaccagctcaattcttcgctcctccaagtctacatccccgattactcggtgcgagccctttcggatctgcagtttgttaagatctcaagacagcaataccaaaatgccttgatggcatcccggatggacaaaaccccccagtcttcagacagtgaaaacactaaaatcgaattgactcttacggagctgcatgacgggttgccagacgagacagccaacctgctcaacgaacagaactgtgtgacgcacagtaaggccaaccacagcctgcacaacgaaggcgccatctaggccgcgctggctgcacccgcccaggcccgcacccgcccagtcccgagggcccggccctgtctgcccatgacttcactggtgtgagcttgtccgccatgctgtaccctgcaacatcctgagaccaaagaccttgtgcccttcccaggagccgcggaggaggacagtgagggaggaatggaaacgagagatgtgaagttggcagccggggcatggcgttcaagattttggagatgaactgattccgcccaaatagaatcatgtttattttttcagctctcccttttatcattattcacactcctctgccctcgatttgcatgaagttgaaaattgttgcgatttattttttcaagagatcatgtttttaaagtgtcttttgcagagttttaagttgttctgtctgaactctgctgtgatcccatgatgtgaccctgatgggctggacttgcccctccggtagccttccttggccctcccagcgaggggcacccttcctctgtgccccagtgggcatcaccgtcgatctcgctggctgaatgaagaagaccgtgttactgcagaacctgccaagtctgtcatcactgtggggtgtagcctgcctcagagggacctgcaatcacctctctgagctcagtggtattttgagaatttaatgtttaactgtacccctttccctcaggaagatttaacatttgcttgggaatgtgattttgctcccaccctaaggaatttttatcaccaaaatgaatgttaatgaatttaaaacccatggtttatcattggcaagaggcaagttgacttcatcctgtcattccagcctggggtctgccagccagccctcctccccgacccagcgcctaagctcacagagtgtcgtcgcccacctccctggtccttgctcttgttaacccaagatgctgctacacagatgccaaatggaaatcttccacagggctttttcagtaaacacgtgatgtggagtgcaagctcctccccttcccactagaacatactttaacagaaaacgagtcggaccttctagctgcactctgtactgtgtgccgagaaggcatttctagacccgtgtttttaaaggagggaactttggggattgccagcccctgctcctcctcccagggagccaactgtccctcctcccctgtccctgggcccatggggcccggcagtggctgtgtcccctgcctgagggctctgtgcctcctgcctcagatgcggcctgtgccagagaggctgcctgtacagccagggtcagtttggccccaaacagggattcagaaacc

SEQ ID NO: 261027 - DNA, 3903 bp, Artificial Sequence
  derived and/or modified sequence
cgagcctcggggttcctcagctggctgaggtggagtcagtgtcagtcagggaggcgaactgctgagcactggccgcggacgctccgttgcagtctcgcccaggggccggtacctgcgctcgcgccgccgggttgaaaggatgaagccgcagctggagcagccaccctatgattggctgtggcgcttgtgaacccaaagtaaagatggcgggcgggcaggcagccgccgcactgcccacttggaagatggcggcgcgccgcagcctcagcgctcgcggccgggggatcctgcaggcggctgcggggcggctgctgccgctgctcctgctgagctgctgctgcggtgcgggcggctgcgcagcggtgggcgagaatgaggagacggtgatcatcgggctgcgactggaggacacgaacgacgtgtcgttcatggaagggggggcgctgcgggtgagcgaacggacccgggtcaagctgcgggtgtacgggcagaacatcaataacgagacgtggtcccgcatcgccttcaccgagcacgagcggcggcgccacagcccgggggagcgcgggctggggggccccgcgccgccagagccggacagcggcccccagcgatgcggcatccgcacctcagacatcatcatcttgccccacatcattctcaaccgccgcacctcgggcatcatcgagatcgagatcaaaccgctacgcaagatggagaagagcaagtcctattacctgtgcacgtcgctctccacgcccgccctgggcgccggcggctcggggtccacgggtggcgccgtcgggggcaagggtggctcgggggtggccgggctcccgccgcccccgtgggccgagaccacctggatttaccacgacggcgaggacaccaagatgatcgtaggcgaagagaagaagttcctgctgcccttctggctgcaggtgatcttcatttcgctgctgctgtgcctgtcgggcatgttcagcggcctcaacctggggctcatggccctggacccgatggagctgcgcatcgtgcagaactgcggcacggagaaggagaagaattacgccaagcgcatcgagccggtgcgcaggcagggcaactacctgctgtgctcactgctgctgggcaacgtgctggtcaacaccacgctcaccatcctgctcgacgacatcgccggctcgggcctcgtggccgtggtagtctccaccatcggtatcgtcatcttcggagagatcgtgccccaggccatctgctcccggcatggcctggctgtgggggccaacaccatcttcctcaccaagtttttcatgatgatgaccttccccgcttcctacccggtcagcaagctgctggactgcgtcctgggccaggagataggcaccgtctataaccgggaaaaactgctggagatgctccgggtcaccgatccctacaacgacctcgttaaggaggagctgaacatcatccaaggggcgctggagctccgcaccaagacggtggaggacgtgatgaccccactccgggactgcttcatgatcaccggcgaagccatcctggacttcaacaccatgtctgagatcatggagagcggctacacccgcattccagtgtttgaaggggagcgctccaatatcgtggacctgctgtttgtcaaagacttggccttcgtggatcccgatgactgtacccccctgaaaaccatcaccaaattttataaccaccccttgcactttgttttcaatgacaccaagttggacgctatgctggaagaatttaagaaaggtaaatctcacctggctatcgtgcagcgggtaaacaatgagggagaaggggatccattttatgaagttctgggaatcgtcaccttagaagatgtgattgaagaaatcatcaaatctgagattcttgatgaaacagatttatacactgacaacagaacgaaaaagaaagtggctcaccgggaacgaaagcaagatttttctgcctttaagcagacagacagtgagatgaaggttaaaatatcaccacagctcctcctggccatgcaccttgtgtttatatctatagaagtagaagcatttagcccatcccagatgtcagagaagatccttctaaggctgctaaagcaccccaatgtcatccaggaactgaaatatgatgagaagaacaagaaagcccccgaatactacctctaccagcgcaacaagccagtagactacttcgttctcattctgcaggggaaagtggaagttgaagctgggaaagaaggtatgaagtttgaagcgagcgccttctcatactatggcgtgatggccctgacagcctctccaggtgaaaataagtcccctcctcgcccatgtggcttgaatcactcagactctctcagtcgaagcgaccggattgacgccgtcacaccaacactggggagcagcaataaccagctcaattcttcgctcctccaagtctacatccccgattactcggtgcgagccctttcggatctgcagtttgttaagatctcaagacagcaataccaaaatgccttgatggcatcccggatggacaaaaccccccagtcttcagacagtgaaaacactaaaatcgaattgactcttacggagctgcatgacgggttgccagacgagacagccaacctgctcaacgaacagaactgtgtgacgcacagtaaggccaaccacagcctgcacaacgaaggcgccatctaggccgcgctggctgcacccgcccaggcccgcacccgcccagtcccgagggcccggccctgtctgcccatgacttcactggtgtgagcttgtccgccatgctgtaccctgcaacatcctgagaccaaagaccttgtgcccttcccaggagccgcggaggaggacagtgagggaggaatggaaacgagagatgtgaagttggcagccggggcatggcgttcaagattttggagatgaactgattccgcccaaatagaatcatgtttattttttcagctctcccttttatcattattcacactcctctgccctcgatttgcatgaagttgaaaattgttgcgatttattttttcaagagatcatgtttttaaagtgtcttttgcagagttttaagttgttctgtctgaactctgctgtgatcccatgatgtgaccctgatgggctggacttgcccctccggtagccttccttggccctcccagcgaggggcacccttcctctgtgccccagtgggcatcaccgtcgatctcgctggctgaatgaagaagaccgtgttactgcagaacctgccaagtctgtcatcactgtggggtgtagcctgcctcagagggacctgcaatcacctctctgagctcagtggtattttgagaatttaatgtttaactgtacccctttccctcaggaagatttaacatttgcttgggaatgtgattttgctcccaccctaaggaatttttatcaccaaaatgaatgttaatgaatttaaaacccatggtttatcattggcaagaggcaagttgacttcatcctgtcattccagcctggggtctgccagccagccctcctccccgacccagcgcctaagctcacagagtgtcgtcgcccacctccctggtccttgctcttgttaacccaagatgctgctacacagatgccaaatggaaatcttccacagggctttttcagtaaacacgtgatgtggagtgcaagctcctccccttcccactagaacatactttaacagaaaacgagtcggaccttctagctgcactctgtactgtgtgccgagaaggcatttctagacccgtgtttttaaaggagggaactttggggattgccagcccctgctcctcctcccagggagccaactgtccctcctcccctgtccctgggc

SEQ ID NO: 261028 - DNA, 2562 bp, Artificial Sequence
  derived and/or modified sequence
atgatcggctgcggcgcctgcgagcccaaggtgaagatggccggcggccaggccgccgccgccctgcccacctggaagatggccgccagaagaagcctgagcgccagaggcagaggcatcctgcaggccgccgccggcagactgctgcccctgctgctgctgagctgctgctgcggcgccggcggctgcgccgccgtgggcgagaacgaggagaccgtgatcatcggcctgagactggaggacaccaacgacgtgagcttcatggagggcggcgccctgagagtgagcgagagaaccagagtgaagctgagagtgtacggccagaacatcaacaacgagacctggagcagaatcgccttcaccgagcacgagagaagaagacacagccccggcgagagaggcctgggcggccccgccccccccgagcccgacagcggcccccagagatgcggcatcagaaccagcgacatcatcatcctgccccacatcatcctgaacagaagaaccagcggcatcatcgagatcgagatcaagcccctgagaaagatggagaagagcaagagctactacctgtgcaccagcctgagcacccccgccctgggcgccggcggcagcggcagcaccggcggcgccgtgggcggcaagggcggcagcggcgtggccggcctgcccccccccccctgggccgagaccacctggatctaccacgacggcgaggacaccaagatgatcgtgggcgaggagaagaagttcctgctgcccttctggctgcaggtgatcttcatcagcctgctgctgtgcctgagcggcatgttcagcggcctgaacctgggcctgatggccctggaccccatggagctgagaatcgtgcagaactgcggcaccgagaaggagaagaactacgccaagagaatcgagcccgtgagaagacagggcaactacctgctgtgcagcctgctgctgggcaacgtgctggtgaacaccaccctgaccatcctgctggacgacatcgccggcagcggcctggtggccgtggtggtgagcaccatcggcatcgtgatcttcggcgagatcgtgccccaggccatctgcagcagacacggcctggccgtgggcgccaacaccatcttcctgaccaagttcttcatgatgatgaccttccccgccagctaccccgtgagcaagctgctggactgcgtgctgggccaggagatcggcaccgtgtacaacagagagaagctgctggagatgctgagagtgaccgacccctacaacgacctggtgaaggaggagctgaacatcatccagggcgccctggagctgagaaccaagaccgtggaggacgtgatgacccccctgagagactgcttcatgatcaccggcgaggccatcctggacttcaacaccatgagcgagatcatggagagcggctacaccagaatccccgtgttcgagggcgagagaagcaacatcgtggacctgctgttcgtgaaggacctggccttcgtggaccccgacgactgcacccccctgaagaccatcaccaagttctacaaccaccccctgcacttcgtgttcaacgacaccaagctggacgccatgctggaggagttcaagaagggcaagagccacctggccatcgtgcagagagtgaacaacgagggcgagggcgaccccttctacgaggtgctgggcatcgtgaccctggaggacgtgatcgaggagatcatcaagagcgagatcctggacgagaccgacctgtacaccgacaacagaaccaagaagaaggtggcccacagagagagaaagcaggacttcagcgccttcaagcagaccgacagcgagatgaaggtgaagatcagcccccagctgctgctggccatgcacagattcctggccaccgaggtggaggccttcagccccagccagatgagcgagaagatcctgctgagactgctgaagcaccccaacgtgatccaggagctgaagtacgacgagaagaacaagaaggcccccgagtactacctgtaccagagaaacaagcccgtggactacttcgtgctgatcctgcagggcaaggtggaggtggaggccggcaaggagggcatgaagttcgaggccagcgccttcagctactacggcgtgatggccctgaccgccagccccggcgagaacaagagcccccccagaccctgcggcctgaaccacagcgacagcctgagcagaagcgacagaatcgacgccgtgacccccaccctgggcagcagcaacaaccagctgaacagcagcctgctgcaggtgtacatccccgactacagcgtgagagccctgagcgacctgcagttcgtgaagatcagcagacagcagtaccagaacgccctgatggccagcagaatggacaagaccccccagagcagcgacagcgagaacaccaagatcgagctgaccctgaccgagctgcacgacggcctgcccgacgagaccgccaacctgctgaacgagcagaactgcgtgacccacagcaaggccaaccacagcctgcacaacgagggcgccatctag

SEQ ID NO: 261029 - DNA, 2565 bp, Artificial Sequence
  derived and/or modified sequence
atgatcggctgcggcgcctgcgagcccaaggtgaagatggccggcggccaggccgccgccgccctgcccacctggaagatggccgccagaagaagcctgagcgccagaggcagaggcatcctgcaggccgccgccggcagactgctgcccctgctgctgctgagctgctgctgcggcgccggcggctgcgccgccgtgggcgagaacgaggagaccgtgatcatcggcctgagactggaggacaccaacgacgtgagcttcatggagggcggcgccctgagagtgagcgagagaaccagagtgaagctgagagtgtacggccagaacatcaacaacgagacctggagcagaatcgccttcaccgagcacgagagaagaagacacagccccggcgagagaggcctgggcggccccgccccccccgagcccgacagcggcccccagagatgcggcatcagaaccagcgacatcatcatcctgccccacatcatcctgaacagaagaaccagcggcatcatcgagatcgagatcaagcccctgagaaagatggagaagagcaagagctactacctgtgcaccagcctgagcacccccgccctgggcgccggcggcagcggcagcaccggcggcgccgtgggcggcaagggcggcagcggcgtggccggcctgcccccccccccctgggccgagaccacctggatctaccacgacggcgaggacaccaagatgatcgtgggcgaggagaagaagttcctgctgcccttctggctgcaggtgatcttcatcagcctgctgctgtgcctgagcggcatgttcagcggcctgaacctgggcctgatggccctggaccccatggagctgagaatcgtgcagaactgcggcaccgagaaggagaagaactacgccaagagaatcgagcccgtgagaagacagggcaactacctgctgtgcagcctgctgctgggcaacgtgctggtgaacaccaccctgaccatcctgctggacgacatcgccggcagcggcctggtggccgtggtggtgagcaccatcggcatcgtgatcttcggcgagatcgtgccccaggccatctgcagcagacacggcctggccgtgggcgccaacaccatcttcctgaccaagttcttcatgatgatgaccttccccgccagctaccccgtgagcaagctgctggactgcgtgctgggccaggagatcggcaccgtgtacaacagagagaagctgctggagatgctgagagtgaccgacccctacaacgacctggtgaaggaggagctgaacatcatccagggcgccctggagctgagaaccaagaccgtggaggacgtgatgacccccctgagagactgcttcatgatcaccggcgaggccatcctggacttcaacaccatgagcgagatcatggagagcggctacaccagaatccccgtgttcgagggcgagagaagcaacatcgtggacctgctgttcgtgaaggacctggccttcgtggaccccgacgactgcacccccctgaagaccatcaccaagttctacaaccaccccctgcacttcgtgttcaacgacaccaagctggacgccatgctggaggagttcaagaagggcaagagccacctggccatcgtgcagagagtgaacaacgagggcgagggcgaccccttctacgaggtgctgggcatcgtgaccctggaggacgtgatcgaggagatcatcaagagcgagatcctggacgagaccgacctgtacaccgacaacagaaccaagaagaaggtggcccacagagagagaaagcaggacttcagcgccttcaagcagaccgacagcgagatgaaggtgaagatcagcccccagctgctgctggccatgcacctggtgttcatcagcatcgaggtggaggccttcagccccagccagatgagcgagaagatcctgctgagactgctgaagcaccccaacgtgatccaggagctgaagtacgacgagaagaacaagaaggcccccgagtactacctgtaccagagaaacaagcccgtggactacttcgtgctgatcctgcagggcaaggtggaggtggaggccggcaaggagggcatgaagttcgaggccagcgccttcagctactacggcgtgatggccctgaccgccagccccggcgagaacaagagcccccccagaccctgcggcctgaaccacagcgacagcctgagcagaagcgacagaatcgacgccgtgacccccaccctgggcagcagcaacaaccagctgaacagcagcctgctgcaggtgtacatccccgactacagcgtgagagccctgagcgacctgcagttcgtgaagatcagcagacagcagtaccagaacgccctgatggccagcagaatggacaagaccccccagagcagcgacagcgagaacaccaagatcgagctgaccctgaccgagctgcacgacggcctgcccgacgagaccgccaacctgctgaacgagcagaactgcgtgacccacagcaaggccaaccacagcctgcacaacgagggcgccatctag

SEQ ID NO: 261030 - protein, 552 aa, Artificial Sequence
  derived and/or modified sequence
MIGCGACEPKVKMAGGQAAAALPTWKMAARRSLSARGRGILQAAAGRLLPLLLLSCCCGAGGCAAVGENEETVIIGLRLEDTNDVSFMEGGALRVSERTRVKLRVYGQNINNETWSRIAFTEHERRRHSPGERGLGGPAPPEPDSGPQRCGIRTSDIIILPHIILNRRTSGIIEIEIKPLRKMEKSKSYYLCTSLSTPALGAGGSGSTGGAVGGKGGSGVAGLPPPPWAETTWIYHDGEDTKMIVGEEKKFLLPFWLQVIFISLLLCLSGMFSGLNLGLMALDPMELRIVQNCGTEKEKNYAKRIEPVRRQGNYLLCSLLLGNVLVNTTLTILLDDIAGSGLVAVVVSTIGIVIFGEIVPQAICSRHGLAVGANTIFLTKFFMMMTFPASYPVSKLLDCVLGQEIGTVYNREKLLEMLRVTDPYNDLVKEELNIIQGALELRTKTVEDVMTPLRDCFMITGEAILDFNTMSEIMESGYTRIPVFEGERSNIVDLLFVKDLAFVDPDDCTPLKTITKFYNHPLHFVFNDTKLDAMLEEFKKEHTNKKPKSYQH

SEQ ID NO: 261031 - protein, 574 aa, Artificial Sequence
  derived and/or modified sequence
MIGCGACEPKVKMAGGQAAAALPTWKMAARRSLSARGRGILQAAAGRLLPLLLLSCCCGAGGCAAVGENEETVIIGLRLEDTNDVSFMEGGALRVSERTRVKLRVYGQNINNETWSRIAFTEHERRRHSPGERGLGGPAPPEPDSGPQRCGIRTSDIIILPHIILNRRTSGIIEIEIKPLRKMEKSKSYYLCTSLSTPALGAGGSGSTGGAVGGKGGSGVAGLPPPPWAETTWIYHDGEDTKMIVGEEKKFLLPFWLQVIFISLLLCLSGMFSGLNLGLMALDPMELRIVQNCGTEKEKNYAKRIEPVRRQGNYLLCSLLLGNVLVNTTLTILLDDIAGSGLVAVVVSTIGIVIFGEIVPQAICSRHGLAVGANTIFLTKFFMMMTFPASYPVSKLLDCVLGQEIGTVYNREKLLEMLRVTDPYNDLVKEELNIIQGALELRTKTVEDVMTPLRDCFMITGEAILDFNTMSEIMESGYTRIPVFEGERSNIVDLLFVKDLAFVDPDDCTPLKTITKFYNHPLHFVFNDTKLDAMLEEFKKEHTNKKPKSYQHCNEQNCVTHSKANHSLHNEGAI

SEQ ID NO: 261032 - DNA, 1659 bp, Artificial Sequence
  derived and/or modified sequence
atgattgggtgtggcgcctgtgaaccaaaggttaagatggctggggggcaagccgccgccgctcttcctacctggaaaatggccgctcgtagatcattgtcggcgagggggagggggatcctccaggctgccgcgggccgtctattgccactcctgctgctttcatgctgttgcggcgccggcggttgtgccgccgttggcgagaacgaggagactgtcattattggacttcggcttgaagacactaatgatgtgtctttcatggaaggcggtgcacttagagtgagcgaacgtaccagggtaaagctgcgagtatatggacagaatattaataatgaaacgtggagcaggatcgcattcacggagcacgaacggagaagacatagtcccggcgagcgcggactcggcggccccgccccacccgagcccgactcagggccgcaacgctgtgggattaggaccagcgacatcattatccttcctcacattatcctgaacagacggacttctgggataatagaaatcgagatcaagccattacggaaaatggagaagtcaaagtcatattatctgtgcacttcattgtccacccccgcgctgggcgcaggcggatcagggtctacgggcggagccgtgggtggcaaaggtggatctggcgtggctgggcttccccctccaccttgggccgaaaccacatggatttatcacgacggagaagacacaaagatgattgttggtgaagaaaaaaagttcctgttgcccttctggctacaagtgatctttatctctcttttactttgcctctcgggtatgtttagtggacttaacctgggcctcatggcactggacccaatggagttgcgcattgtgcagaattgcgggacagagaaggagaagaattatgctaaaaggatagagccagtaaggagacaggggaactatctgctatgctcactactgcttggtaatgttctggtaaacacaacgttgacgattctgctcgacgatatcgccggctcagggctggtagcagtagtggtatccactatcgggatcgttatcttcggagagatcgtgccccaggctatatgcagtcgccacggtctggcagtcggcgctaacactatctttctgaccaaatttttcatgatgatgacatttccagctagctaccctgtcagcaaacttctggactgcgtcctgggccaagagatcggtactgtgtataatcgtgagaaacttctagaaatgctccgggtcacagatccctataatgacctggtgaaagaggagctgaacatcattcagggcgcccttgagctgcgcacgaagaccgttgaggacgtgatgacacccctccgcgactgctttatgattaccggcgaggctatcttagacttcaacactatgtcagagataatggaaagcggttacacccggatccccgtttttgagggtgagcgtagcaatatagtcgatttgctgtttgtgaaggacttagcattcgtcgaccctgacgactgtactcccctaaagacgattaccaaattttacaaccacccgctacattttgtttttaacgacaccaaactggacgccatgcttgaggagttcaaaaaggagcacaccaataaaaagccaaagtcctatcagcactag

SEQ ID NO: 261033 - DNA, 1725 bp, Artificial Sequence
  derived and/or modified sequence
atgatcggatgcggggcttgtgagcctaaagtgaaaatggccgggggccaggccgccgccgccctcccaacctggaaaatggcggcgcgtcgcagcttaagcgctcgcggcagaggaattcttcaggcagccgcaggacgattgctcccattactgctgctttcctgctgctgcggagccggagggtgcgctgcggtaggcgagaatgaggaaactgtgatcattggactccgtttagaggatacaaatgacgtcagtttcatggagggcggcgcattgcgggtgtcagagcgcacaagagtgaagcttcgcgtgtacggacagaacattaacaatgaaacctggagtcgcatcgcatttacagaacacgagcggagaaggcacagtcccggtgagcgcggccttggaggaccggctccacctgaaccagattccgggcctcagagatgcggcatccgtacctccgatatcattatcctaccgcatattatcttaaatagaaggacatccggcataatagagattgaaatcaagcctctgaggaagatggaaaaatccaagagctattatctatgcacatctctgtcaacaccagctcttggagccggggggtccggctcaacgggcggcgcggtcggcgggaagggcgggtctggtgttgccggactccccccccctccctgggccgagaccacttggatctaccacgatggagaggacacgaagatgatagtaggggaggaaaaaaaattcctcctccctttctggctgcaggtgatcttcatttcgctactgctatgtttgtccgggatgtttagcggattgaacttgggccttatggcacttgatcctatggagctgcgtatcgtgcagaattgtggcacagagaaagaaaagaactatgcaaaacgcatcgaaccagtgaggagacagggaaactaccttctatgctccctattgcttggcaacgtcttagttaacacaacactgaccattctgcttgacgacatcgctggaagcggacttgtagccgtggttgtgtccaccattggcatagtgatctttggtgaaatcgtaccacaggctatttgttctagacatggtcttgctgtgggcgctaacactatcttcctaactaaattcttcatgatgatgacctttcctgcctcctaccccgtttccaagctgttggattgtgtactaggtcaggagatcggtacagtgtacaatcgcgaaaaactgttggagatgttacgagtgactgacccatataatgatctcgttaaagaagaactcaatatcatccagggagcactggaattgcggacaaaaacggtggaggacgtcatgacccccttacgagattgtttcatgattactggagaggctatcctggacttcaacaccatgtctgagattatggaatccggctatacccggatccctgtattcgagggggagcgctcaaacatagtggacttgctgtttgtgaaggatctggcgtttgtggacccagacgactgcacgccgctgaagacaattaccaagttctacaatcatcccctgcatttcgtctttaacgacacaaaactggacgcaatgttggaggagtttaagaaagagcataccaataagaaaccaaaatcatatcaacactgcaacgaacaaaactgcgttacccatagcaaagctaatcattcgctgcataatgaaggcgccatttag

SEQ ID NO: 261034 - DNA, 1659 bp, Artificial Sequence
  derived and/or modified sequence
atgattggctgtggggcctgtgagcccaaggtgaagatggccggcggccaggccgccgccgccctgcccacctggaagatggccgcccggcgcagcctgagcgcccggggccggggcatcctgcaggccgctgctggccgcctgctgcccctgctgctgctgagctgctgctgcggggccggcggctgtgccgctgtgggggagaatgaggagaccgtcatcatcggcctgcggctggaggacaccaatgatgtgtccttcatggagggcggggccctgcgggtgtctgagaggaccagggtgaagctgcgggtgtatggccagaacatcaacaatgagacctggagccgcatcgccttcacagaacatgaaagaagaagacacagccctggagagcggggcctgggcggccctgcccctcctgagccagattctggcccccagagatgtggcatccgcaccagtgacatcatcatcctgccccacatcatcctgaacagaaggaccagcggcatcattgaaattgagatcaagcccctgaggaagatggagaagagcaagagctactacctgtgcaccagcctgagcaccccagccctgggcgctgggggcagcggcagcactggaggagctgtgggcggcaaaggaggcagcggcgtggccggcctgcccccaccaccctgggccgagaccacctggatctaccatgatggagaggacaccaagatgattgtgggggaggagaagaagttcctgctgcccttctggctgcaggtgatcttcatcagcctgctgctgtgcctgagcggcatgttttctggcctgaacctgggcctgatggccctggaccccatggagctgagaattgtgcagaactgtggcacagagaaggagaagaactatgccaagagaattgagcctgtgcggcggcagggcaactacctgctgtgcagcctgctgctgggcaatgtgctggtgaacaccaccctgaccatcctgctggatgacattgctggcagcggcctggtggccgtggtggtgtccaccatcggcatcgtcatctttggagagatcgtgccccaggccatctgcagcagacatggcctggccgtgggcgccaacaccatcttcctgaccaagttcttcatgatgatgaccttccctgccagctaccctgtgtccaagctgctggactgtgtgctgggccaggagattggaacagtgtacaaccgggagaagctgctggagatgctgcgggtgacagacccctacaatgacctggtgaaggaggagctgaacatcatccagggcgccctggagctgcggaccaagacagtggaggatgtgatgacccccctgcgggactgcttcatgatcaccggggaggccatcctggacttcaacaccatgtctgagatcatggagagcggctacacccgcatccctgtgtttgaaggagagaggagcaacatcgtggacctgctgtttgtgaaggacctggcctttgtggaccctgatgactgcacccccctgaagaccatcaccaagttctacaaccaccccctgcactttgtgttcaatgacaccaagctggatgccatgctggaggagttcaagaaggagcacaccaacaagaagcccaagagctaccagcactag

SEQ ID NO: 261035 - DNA, 1725 bp, Artificial Sequence
  derived and/or modified sequence
atgattggctgtggggcctgtgagcccaaggtgaagatggccggcggccaggccgccgccgccctgcccacctggaagatggccgcccggcgcagcctgagcgcccggggccggggcatcctgcaggccgctgctggccgcctgctgcccctgctgctgctgagctgctgctgcggggccggcggctgtgccgctgtgggggagaatgaggagaccgtcatcatcggcctgcggctggaggacaccaatgatgtgtccttcatggagggcggggccctgcgggtgtctgagaggaccagggtgaagctgcgggtgtatggccagaacatcaacaatgagacctggagccgcatcgccttcacagaacatgaaagaagaagacacagccctggagagcggggcctgggcggccctgcccctcctgagccagattctggcccccagagatgtggcatccgcaccagtgacatcatcatcctgccccacatcatcctgaacagaaggaccagcggcatcattgaaattgagatcaagcccctgaggaagatggagaagagcaagagctactacctgtgcaccagcctgagcaccccagccctgggcgctgggggcagcggcagcactggaggagctgtgggcggcaaaggaggcagcggcgtggccggcctgcccccaccaccctgggccgagaccacctggatctaccatgatggagaggacaccaagatgattgtgggggaggagaagaagttcctgctgcccttctggctgcaggtgatcttcatcagcctgctgctgtgcctgagcggcatgttttctggcctgaacctgggcctgatggccctggaccccatggagctgagaattgtgcagaactgtggcacagagaaggagaagaactatgccaagagaattgagcctgtgcggcggcagggcaactacctgctgtgcagcctgctgctgggcaatgtgctggtgaacaccaccctgaccatcctgctggatgacattgctggcagcggcctggtggccgtggtggtgtccaccatcggcatcgtcatctttggagagatcgtgccccaggccatctgcagcagacatggcctggccgtgggcgccaacaccatcttcctgaccaagttcttcatgatgatgaccttccctgccagctaccctgtgtccaagctgctggactgtgtgctgggccaggagattggaacagtgtacaaccgggagaagctgctggagatgctgcgggtgacagacccctacaatgacctggtgaaggaggagctgaacatcatccagggcgccctggagctgcggaccaagacagtggaggatgtgatgacccccctgcgggactgcttcatgatcaccggggaggccatcctggacttcaacaccatgtctgagatcatggagagcggctacacccgcatccctgtgtttgaaggagagaggagcaacatcgtggacctgctgtttgtgaaggacctggcctttgtggaccctgatgactgcacccccctgaagaccatcaccaagttctacaaccaccccctgcactttgtgttcaatgacaccaagctggatgccatgctggaggagttcaagaaggagcacaccaacaagaagcccaagagctaccagcactgcaatgagcagaactgtgtgacccacagcaaggccaaccacagcctgcacaatgaaggagccatctag

SEQ ID NO: 261036 - DNA, 1659 bp, Artificial Sequence
  derived and/or modified sequence
atgatcggctgcggcgcctgcgagcccaaggtgaagatggccggcggacaggccgcagctgccctacccacctggaaaatggccgctaggagaagtctctcggccagaggaaggggcattctgcaagcagcagcaggcaggcttcttccactgctgctgctcagctgctgctgcggagcaggtggctgcgccgccgtgggcgaaaacgaggaaaccgtcatcatcggacttagattggaagacacgaatgacgtgagtttcatggagggaggggctctgcgggtctcagaacgcacccgtgtgaagctgagggtgtatggccaaaacataaataacgaaacttggtcacgcatcgctttcaccgagcatgagcggcgacgtcactctcctggggagagagggctggggggacctgccccccctgaacccgacagcggacctcagcggtgcggaattaggacaagcgacataatcattctccctcatatcatcctgaaccgccgaacctcggggataatagaaatagaaattaaaccgctcaggaaaatggagaagagcaaatcttactacctgtgtacttccctgtcgacccctgccctcggtgctggcggctctgggagcacgggtggggccgttggaggaaaaggaggatcgggggttgctgggctacctcctcctccgtgggcggagacaacttggatctatcatgatggcgaagatacgaagatgatcgtgggcgaagagaagaaattcttgttgcccttttggctccaggtgatttttatctctctgctgctgtgcctgtcaggcatgttttccggcctaaacctcggcctgatggccctcgacccaatggaacttagaatcgtgcagaattgcggaacagagaaggaaaagaactacgcaaagaggatagagcctgtcaggcgccagggaaattatctcttgtgtagcctcctgctcggcaacgtcctggtaaacaccactctaaccattctgctggatgacatcgcaggctccggcctagttgctgtcgtggtcagtactataggcatcgtaattttcggggaaatcgtgccacaggccatctgctccaggcacggcctggctgtgggtgccaacacaatctttctaacaaagttttttatgatgatgacctttccagccagctaccctgttagtaagttactggactgtgtgctcggccaggagattggaacggtgtataaccgcgagaagttgctggaaatgcttcgggtgaccgatccttataatgacctggtaaaggaagagcttaatattattcagggtgcccttgaactgcgaacgaaaacggtggaggatgttatgacccccttgagagattgtttcatgattacgggcgaggccattttggattttaataccatgtctgagatcatggagtccggctacacaagaatcccggttttcgaaggtgagcgttcaaacatcgttgatcttctttttgttaaagacctcgcatttgtagaccctgatgattgcacacccctaaaaacaatcacaaagttttacaaccaccccttacacttcgtctttaacgatacaaaactggacgctatgttggaggagttcaagaaagagcatactaacaagaagcctaagagctaccagcactag

SEQ ID NO: 261037 - DNA, 1725 bp, Artificial Sequence
  derived and/or modified sequence
atgatcggctgcggcgcctgcgagcccaaggtgaagatggccggcggccaggcggccgccgcactgcccacgtggaagatggccgcgcgaaggagtctcagcgctcggggacgcggtattctgcaggcagcagctggacgcctccttccactcttgctgctctcctgttgttgcggggctggcggatgtgctgctgtgggggagaatgaggaaacagtcatcatcggcctaagactagaagatacaaacgacgtctcttttatggagggcggtgccctacgagtgtcagaacggacccgagtgaaactgcgggtgtatggtcaaaatataaacaacgagacttggtcacgcattgccttcactgaacacgagcggcgccgccactcccccggggaaaggggcctgggcggacctgcacccccagagccagattccgggcctcaacggtgcgggatccgcacaagtgatatcattatcctgccgcatattattttgaataggaggaccagtggtatcatcgaaatcgaaatcaagcccctgcgcaagatggagaagagcaagtcttattatctgtgcacatccctgtcaacacccgcactgggggccggcgggagtggatctacggggggtgctgtggggggcaagggaggcagcggagtcgccgggttgccaccaccaccgtgggctgagacgacttggatttaccatgatggagaggacactaaaatgatcgtcggagaggagaagaagtttcttctgcctttctggcttcaggtaatctttatcagcctgctgctctgtctgtccggcatgttttccggactgaatttgggcttgatggccctagatcctatggagctccggattgttcaaaactgcggcactgaaaaagagaagaattatgccaaaaggatagagccggtgaggcggcagggaaattatctgctgtgcagtcttttactgggtaacgttcttgtcaatacaaccctgactatactgttagatgacatagccggttccggactggtcgccgtggtggtcagcaccatcggtattgttatttttggcgaaatcgtgccacaagccatttgcagtcggcacgggctggcagtgggagctaacacaatcttcctcacaaagttcttcatgatgatgacttttccagcgagctaccctgttagtaagctgttggattgcgttctgggacaagaaatcgggaccgtatacaatagagagaaactgctcgagatgctgcgcgtgaccgacccttacaacgaccttgtcaaggaggagctgaatatcatccagggagccctggaactccgcacaaaaactgtcgaagacgtaatgacccctctacgcgactgctttatgatcaccggagaagcaattcttgattttaataccatgagcgaaataatggaatcaggttacactagaatccccgtgttcgagggtgaacgttctaacatcgtcgacttgctgttcgtaaaggatctcgcgtttgtggatcctgatgattgtacaccactcaagactattacgaaattttacaaccacccactgcactttgtttttaatgatacaaagttagatgctatgctcgaagagtttaaaaaggagcatactaataagaagcctaagtcgtatcagcattgtaacgagcaaaactgcgtcactcacagcaaagccaaccactccctccacaatgaaggggctatttag

SEQ ID NO: 261038 - DNA, 1659 bp, Artificial Sequence
  derived and/or modified sequence
atgattggctgcggggcatgtgaacctaaagtgaagatggcaggaggccaggcagccgctgccctgccgacctggaagatggccgcaagaagatcactctccgcaagaggaaggggcattctgcaggccgctgcgggacgactgctcccacttctgttattatcatgctgttgcggtgccggaggttgcgctgcagtgggcgagaacgaagaaaccgtcatcatcggactacgcctggaggacacgaacgacgtcagctttatggaaggcggtgcactgcgcgtcagcgaacgcacaagagtcaagttgagagtctacgggcagaacattaataatgagacctggagtcgaatcgctttcaccgagcacgagcggaggagacacagcccgggtgagaggggcctggggggtcctgcccctcccgaacctgatagcggaccccaacgttgcggcattagaacctctgacattatcatcctaccccatatcatccttaacagacgtacatctgggattatcgagattgagataaaacctctgagaaaaatggagaagtctaaatcctattacttgtgtacgagcctgtctactcccgcactcggagccggaggaagtggctctactggcggagcggtgggcggaaaagggggttcgggcgtagctgggctgcccccacctccttgggctgagaccacttggatctaccatgacggagaagacacaaagatgatcgtgggcgaggagaaaaagtttctcctgcccttttggctgcaagtcatttttatttctttactgctctgtctgtcgggaatgttttccgggcttaatttgggattgatggccctggatccgatggagctgcggatcgtacagaattgtggaactgaaaaggagaaaaactacgccaaacgtatcgagccagtccgacgccagggaaattatctgctgtgttcacttcttctggggaacgtgctggtgaataccacactcacaatcctgctagatgatatcgcaggctctgggttagtggcagtggtggtaagcacaatcggcattgtcattttcggcgagatagtccctcaggccatctgttctcgacatggcctggccgtgggggctaacactatattccttacaaaatttttcatgatgatgacgttcccagctagctatccggtatcaaaactcctggattgcgtgttggggcaggaaattgggaccgtgtacaatagagaaaagttactggaaatgttaagagtgacagacccctacaacgatttggtgaaagaagagttgaacatcatccagggggctttagagctccgaactaaaaccgtggaggatgtgatgactccactccgagattgtttcatgatcaccggtgaggctatcttagatttcaacaccatgagcgaaatcatggagtccggatacacgcggattccggtgttcgaaggagagcgctctaacatcgttgacctgctctttgtaaaggacttagcctttgtcgatcctgatgattgtactccgctgaagacaattaccaaattctataatcacccactccacttcgtcttcaatgataccaaattggacgctatgttagaagaatttaagaaggaacatacgaataagaagccgaagagctaccagcattag

SEQ ID NO: 261039 - DNA, 1725 bp, Artificial Sequence
  derived and/or modified sequence
atgataggctgcggcgcatgtgaaccaaaagttaagatggccggaggacaggctgccgcagcccttccgacatggaaaatggcagctcgccgatctcttagcgccagaggtcggggtattctgcaggccgctgccggacggctgctgccgcttttgctcctctcctgctgttgcggggcaggagggtgtgccgcagtcggagaaaatgaggaaactgtcatcattggtctccgtttggaagacacaaacgacgtctcctttatggaagggggagctctgagggtgagcgagagaacccgcgtcaaactacgggtatacggccagaacataaacaacgagacttggtcacggattgccttcactgagcatgaaaggaggcgacacagcccgggagagagaggcctcggcggtcctgccccacccgagccggactcagggcctcagcgttgcgggatacgcacaagcgatattatcatcttaccacacattatattgaataggaggacgtctgggataattgagatcgaaataaaaccactgcgtaaaatggagaagtcaaaatcatattatctgtgcacttccctctccactcctgccttgggagccggtgggtcaggatctacgggcggagcagtcggtggcaaggggggatcaggggtggctgggctgccaccgcctccctgggcagaaaccacctggatataccatgacggagaggacacaaagatgattgtaggagaggagaagaaatttttgttgcccttctggttacaagtgatttttatcagcttgcttctttgcctgtcaggaatgttcagtggtctcaacctgggactgatggccctcgaccctatggaactgcgtattgtgcagaactgtgggactgagaaggaaaaaaactatgcaaaacgcatcgaaccagtcaggcggcaaggcaattacctcctgtgcagcctgctgctgggaaacgtgctggttaataccaccctgactattctcctggatgacatcgcaggaagtggcttggtagctgtcgtcgtgagtaccatcggcattgtgattttcggggagatcgtcccccaggcgatttgcagccggcatggattagctgtgggtgctaatactatctttctcaccaagttcttcatgatgatgacatttcccgcaagctatcctgtttccaagttgctggattgtgtcctaggtcaggagatcgggaccgtgtacaatcgcgagaagttgctagaaatgcttcgagtgacggatccctacaatgatctcgtaaaggaggagctgaacatcatccaaggtgctcttgagctccgaaccaaaaccgtcgaggatgtaatgacccctctgagggattgttttatgattacgggcgaggcaattctcgatttcaacacaatgtcagagattatggagagtggctatacgcgcatccccgtttttgaaggcgaacgctccaatatcgttgaccttctttttgtgaaagacctggcttttgttgacccggatgactgcactcctctcaaaaccattaccaagttctataatcaccctttacatttcgtcttcaacgacaccaaactggacgcgatgttggaagaattcaaaaaggaacacaccaacaagaagcccaaaagctaccagcactgtaatgaacagaattgcgtgacacatagcaaagcaaaccacagcttgcataacgagggagccatctag

SEQ ID NO: 261040 - DNA, 2059 bp, Artificial Sequence
  derived and/or modified sequence
gcctcggggttcctcagctggctgaggtggagtcagtgtcagtcagggaggcgaactgctgagcactggccgcggacgctccgttgcagtctcgcccaggggccggtacctgcgctcgcgccgccgggttgaaaggatgaagccgcagctggagcagccaccctatgattggctgtggcgcttgtgaacccaaagtaaagatggcgggcgggcaggcagccgccgcactgcccacttggaagatggcggcgcgccgcagcctcagcgctcgcggccgggggatcctgcaggcggctgcggggcggctgctgccgctgctcctgctgagctgctgctgcggtgcgggcggctgcgcagcggtgggcgagaatgaggagacggtgatcatcgggctgcgactggaggacacgaacgacgtgtcgttcatggaagggggggcgctgcgggtgagcgaacggacccgggtcaagctgcgggtgtacgggcagaacatcaataacgagacgtggtcccgcatcgccttcaccgagcacgagcggcggcgccacagcccgggggagcgcgggctggggggccccgcgccgccagagccggacagcggcccccagcgatgcggcatccgcacctcagacatcatcatcttgccccacatcattctcaaccgccgcacctcgggcatcatcgagatcgagatcaaaccgctacgcaagatggagaagagcaagtcctattacctgtgcacgtcgctctccacgcccgccctgggcgccggcggctcggggtccacgggtggcgccgtcgggggcaagggtggctcgggggtggccgggctcccgccgcccccgtgggccgagaccacctggatttaccacgacggcgaggacaccaagatgatcgtaggcgaagagaagaagttcctgctgcccttctggctgcaggtgatcttcatttcgctgctgctgtgcctgtcgggcatgttcagcggcctcaacctggggctcatggccctggacccgatggagctgcgcatcgtgcagaactgcggcacggagaaggagaagaattacgccaagcgcatcgagccggtgcgcaggcagggcaactacctgctgtgctcactgctgctgggcaacgtgctggtcaacaccacgctcaccatcctgctcgacgacatcgccggctcgggcctcgtggccgtggtagtctccaccatcggtatcgtcatcttcggagagatcgtgccccaggccatctgctcccggcatggcctggctgtgggggccaacaccatcttcctcaccaagtttttcatgatgatgaccttccccgcttcctacccggtcagcaagctgctggactgcgtcctgggccaggagataggcaccgtctataaccgggaaaaactgctggagatgctccgggtcaccgatccctacaacgacctcgttaaggaggagctgaacatcatccaaggggcgctggagctccgcaccaagacggtggaggacgtgatgaccccactccgggactgcttcatgatcaccggcgaagccatcctggacttcaacaccatgtctgagatcatggagagcggctacacccgcattccagtgtttgaaggggagcgctccaatatcgtggacctgctgtttgtcaaagacttggccttcgtggatcccgatgactgtacccccctgaaaaccatcaccaaattttataaccaccccttgcactttgttttcaatgacaccaagttggacgctatgctggaagaatttaagaaagaacacacaaacaagaaacccaaatcataccaacactgaaaagaagagacaataagaagcattctttctttcaacatcacagacattggcaactctaggatgtctatacagagggataaaaaggggtggcagttggctgggcgtggtggctcatgcctgtaatcccggcactttgggaggcccagggaggtggatcacttgaggtcaggagttccagactgacagtctggccaccatggtgaaaccccgtttctaataaaaatacagaaaaatta

SEQ ID NO: 261041 - DNA, 1849 bp, Artificial Sequence
  derived and/or modified sequence
agtcagggaggcgaactgctgagcactggccgcggacgctccgttgcagtctcgcccaggggccggtacctgcgctcgcgccgccgggttgaaaggatgaagccgcagctggagcagccaccctatgattggctgtggcgcttgtgaacccaaagtaaagatggcgggcgggcaggcagccgccgcactgcccacttggaagatggcggcgcgccgcagcctcagcgctcgcggccgggggatcctgcaggcggctgcggggcggctgctgccgctgctcctgctgagctgctgctgcggtgcgggcggctgcgcagcggtgggcgagaatgaggagacggtgatcatcgggctgcgactggaggacacgaacgacgtgtcgttcatggaagggggggcgctgcgggtgagcgaacggacccgggtcaagctgcgggtgtacgggcagaacatcaataacgagacgtggtcccgcatcgccttcaccgagcacgagcggcggcgccacagcccgggggagcgcgggctggggggccccgcgccgccagagccggacagcggcccccagcgatgcggcatccgcacctcagacatcatcatcttgccccacatcattctcaaccgccgcacctcgggcatcatcgagatcgagatcaaaccgctacgcaagatggagaagagcaagtcctattacctgtgcacgtcgctctccacgcccgccctgggcgccggcggctcggggtccacgggtggcgccgtcgggggcaagggtggctcgggggtggccgggctcccgccgcccccgtgggccgagaccacctggatttaccacgacggcgaggacaccaagatgatcgtaggcgaagagaagaagttcctgctgcccttctggctgcaggtgatcttcatttcgctgctgctgtgcctgtcgggcatgttcagcggcctcaacctggggctcatggccctggacccgatggagctgcgcatcgtgcagaactgcggcacggagaaggagaagaattacgccaagcgcatcgagccggtgcgcaggcagggcaactacctgctgtgctcactgctgctgggcaacgtgctggtcaacaccacgctcaccatcctgctcgacgacatcgccggctcgggcctcgtggccgtggtagtctccaccatcggtatcgtcatcttcggagagatcgtgccccaggccatctgctcccggcatggcctggctgtgggggccaacaccatcttcctcaccaagtttttcatgatgatgaccttccccgcttcctacccggtcagcaagctgctggactgcgtcctgggccaggagataggcaccgtctataaccgggaaaaactgctggagatgctccgggtcaccgatccctacaacgacctcgttaaggaggagctgaacatcatccaaggggcgctggagctccgcaccaagacggtggaggacgtgatgaccccactccgggactgcttcatgatcaccggcgaagccatcctggacttcaacaccatgtctgagatcatggagagcggctacacccgcattccagtgtttgaaggggagcgctccaatatcgtggacctgctgtttgtcaaagacttggccttcgtggatcccgatgactgtacccccctgaaaaccatcaccaaattttataaccaccccttgcactttgttttcaatgacaccaagttggacgctatgctggaagaatttaagaaagaacacacaaacaagaaacccaaatcataccaacactgcaacgaacagaactgtgtgacgcacagtaaggccaaccacagcctgcacaacgaaggcgccatctag

SEQ ID NO: 261042 - DNA, 1659 bp, Artificial Sequence
  derived and/or modified sequence
atgatcggctgcggcgcctgcgagcccaaggtgaagatggccggcggccaggccgccgccgccctgcccacctggaagatggccgccagaagaagcctgagcgccagaggcagaggcatcctgcaggccgccgccggcagactgctgcccctgctgctgctgagctgctgctgcggcgccggcggctgcgccgccgtgggcgagaacgaggagaccgtgatcatcggcctgagactggaggacaccaacgacgtgagcttcatggagggcggcgccctgagagtgagcgagagaaccagagtgaagctgagagtgtacggccagaacatcaacaacgagacctggagcagaatcgccttcaccgagcacgagagaagaagacacagccccggcgagagaggcctgggcggccccgccccccccgagcccgacagcggcccccagagatgcggcatcagaaccagcgacatcatcatcctgccccacatcatcctgaacagaagaaccagcggcatcatcgagatcgagatcaagcccctgagaaagatggagaagagcaagagctactacctgtgcaccagcctgagcacccccgccctgggcgccggcggcagcggcagcaccggcggcgccgtgggcggcaagggcggcagcggcgtggccggcctgcccccccccccctgggccgagaccacctggatctaccacgacggcgaggacaccaagatgatcgtgggcgaggagaagaagttcctgctgcccttctggctgcaggtgatcttcatcagcctgctgctgtgcctgagcggcatgttcagcggcctgaacctgggcctgatggccctggaccccatggagctgagaatcgtgcagaactgcggcaccgagaaggagaagaactacgccaagagaatcgagcccgtgagaagacagggcaactacctgctgtgcagcctgctgctgggcaacgtgctggtgaacaccaccctgaccatcctgctggacgacatcgccggcagcggcctggtggccgtggtggtgagcaccatcggcatcgtgatcttcggcgagatcgtgccccaggccatctgcagcagacacggcctggccgtgggcgccaacaccatcttcctgaccaagttcttcatgatgatgaccttccccgccagctaccccgtgagcaagctgctggactgcgtgctgggccaggagatcggcaccgtgtacaacagagagaagctgctggagatgctgagagtgaccgacccctacaacgacctggtgaaggaggagctgaacatcatccagggcgccctggagctgagaaccaagaccgtggaggacgtgatgacccccctgagagactgcttcatgatcaccggcgaggccatcctggacttcaacaccatgagcgagatcatggagagcggctacaccagaatccccgtgttcgagggcgagagaagcaacatcgtggacctgctgttcgtgaaggacctggccttcgtggaccccgacgactgcacccccctgaagaccatcaccaagttctacaaccaccccctgcacttcgtgttcaacgacaccaagctggacgccatgctggaggagttcaagaaggagcacaccaacaagaagcccaagagctaccagcactag

SEQ ID NO: 261043 - DNA, 1725 bp, Artificial Sequence
  derived and/or modified sequence
atgatcggctgcggcgcctgcgagcccaaggtgaagatggccggcggccaggccgccgccgccctgcccacctggaagatggccgccagaagaagcctgagcgccagaggcagaggcatcctgcaggccgccgccggcagactgctgcccctgctgctgctgagctgctgctgcggcgccggcggctgcgccgccgtgggcgagaacgaggagaccgtgatcatcggcctgagactggaggacaccaacgacgtgagcttcatggagggcggcgccctgagagtgagcgagagaaccagagtgaagctgagagtgtacggccagaacatcaacaacgagacctggagcagaatcgccttcaccgagcacgagagaagaagacacagccccggcgagagaggcctgggcggccccgccccccccgagcccgacagcggcccccagagatgcggcatcagaaccagcgacatcatcatcctgccccacatcatcctgaacagaagaaccagcggcatcatcgagatcgagatcaagcccctgagaaagatggagaagagcaagagctactacctgtgcaccagcctgagcacccccgccctgggcgccggcggcagcggcagcaccggcggcgccgtgggcggcaagggcggcagcggcgtggccggcctgcccccccccccctgggccgagaccacctggatctaccacgacggcgaggacaccaagatgatcgtgggcgaggagaagaagttcctgctgcccttctggctgcaggtgatcttcatcagcctgctgctgtgcctgagcggcatgttcagcggcctgaacctgggcctgatggccctggaccccatggagctgagaatcgtgcagaactgcggcaccgagaaggagaagaactacgccaagagaatcgagcccgtgagaagacagggcaactacctgctgtgcagcctgctgctgggcaacgtgctggtgaacaccaccctgaccatcctgctggacgacatcgccggcagcggcctggtggccgtggtggtgagcaccatcggcatcgtgatcttcggcgagatcgtgccccaggccatctgcagcagacacggcctggccgtgggcgccaacaccatcttcctgaccaagttcttcatgatgatgaccttccccgccagctaccccgtgagcaagctgctggactgcgtgctgggccaggagatcggcaccgtgtacaacagagagaagctgctggagatgctgagagtgaccgacccctacaacgacctggtgaaggaggagctgaacatcatccagggcgccctggagctgagaaccaagaccgtggaggacgtgatgacccccctgagagactgcttcatgatcaccggcgaggccatcctggacttcaacaccatgagcgagatcatggagagcggctacaccagaatccccgtgttcgagggcgagagaagcaacatcgtggacctgctgttcgtgaaggacctggccttcgtggaccccgacgactgcacccccctgaagaccatcaccaagttctacaaccaccccctgcacttcgtgttcaacgacaccaagctggacgccatgctggaggagttcaagaaggagcacaccaacaagaagcccaagagctaccagcactgcaacgagcagaactgcgtgacccacagcaaggccaaccacagcctgcacaacgagggcgccatctag

SEQ ID NO: 261044 - protein, 270 aa, Artificial Sequence
  derived and/or modified sequence
MAGAENWPGQQLELDEDEASCCRWGAQHAGARELAALYSPGKRLQEWCSVILCFSLIAHNLVHLLLLARWEDTPLVILGVVAGALIADFLSGLVHWGADTWGSVELPIVGKAFIRPFREHHIDPTAITRHDFIETNGDNCLVTLLPLLNMAYKFRTHSPEALEQLYPWECFVFCLIIFGTFTNQIHKWSHTYFGLPRWVTLLQDWHVILPRKHHRIHHVSPHETYFCITTGWLNYPLEKIGFWRRLEDLIQGLTGEKPRADDMKWAQKIK

SEQ ID NO: 261045 - protein, 195 aa, Artificial Sequence
  derived and/or modified sequence
MNERAIAGALIADFLSGLVHWGADTWGSVELPIVGKAFIRPFREHHIDPTAITRHDFIETNGDNCLVTLLPLLNMAYKFRTHSPEALEQLYPWECFVFCLIIFGTFTNQIHKWSHTYFGLPRWVTLLQDWHVILPRKHHRIHHVSPHETYFCITTGWLNYPLEKIGFWRRLEDLIQGLTGEKPRADDMKWAQKIK

SEQ ID NO: 261046 - DNA, 813 bp, Artificial Sequence
  derived and/or modified sequence
atggccggcgccgagaactggcccggccagcagctggagctggacgaggacgaggccagctgctgcagatggggcgcccagcacgccggcgccagagagctggccgccctgtacagccccggcaagagactgcaggagtggtgcagcgtgatcctgtgcttcagcctgatcgcccacaacctggtgcacctgctgctgctggccagatgggaggacacccccctggtgatcctgggcgtggtggccggcgccctgatcgccgacttcctgagcggcctggtgcactggggcgccgacacctggggcagcgtggagctgcccatcgtgggcaaggccttcatcagacccttcagagagcaccacatcgaccccaccgccatcaccagacacgacttcatcgagaccaacggcgacaactgcctggtgaccctgctgcccctgctgaacatggcctacaagttcagaacccacagccccgaggccctggagcagctgtacccctgggagtgcttcgtgttctgcctgatcatcttcggcaccttcaccaaccagatccacaagtggagccacacctacttcggcctgcccagatgggtgaccctgctgcaggactggcacgtgatcctgcccagaaagcaccacagaatccaccacgtgagcccccacgagacctacttctgcatcaccaccggctggctgaactaccccctggagaagatcggcttctggagaagactggaggacctgatccagggcctgaccggcgagaagcccagagccgacgacatgaagtgggcccagaagatcaagtag

SEQ ID NO: 261047 - DNA, 588 bp, Artificial Sequence
  derived and/or modified sequence
atgaacgagagagccatcgccggcgccctgatcgccgacttcctgagcggcctggtgcactggggcgccgacacctggggcagcgtggagctgcccatcgtgggcaaggccttcatcagacccttcagagagcaccacatcgaccccaccgccatcaccagacacgacttcatcgagaccaacggcgacaactgcctggtgaccctgctgcccctgctgaacatggcctacaagttcagaacccacagccccgaggccctggagcagctgtacccctgggagtgcttcgtgttctgcctgatcatcttcggcaccttcaccaaccagatccacaagtggagccacacctacttcggcctgcccagatgggtgaccctgctgcaggactggcacgtgatcctgcccagaaagcaccacagaatccaccacgtgagcccccacgagacctacttctgcatcaccaccggctggctgaactaccccctggagaagatcggcttctggagaagactggaggacctgatccagggcctgaccggcgagaagcccagagccgacgacatgaagtgggcccagaagatcaagtag

SEQ ID NO: 261048 - DNA, 813 bp, Artificial Sequence
  derived and/or modified sequence
atggccggggctgaaaactggcctgggcagcagctagaactagatgaagacgaagcatcttgctgtaggtggggtgcccagcatgccggggctagggaactggcagctctgtattctcccggtaagagacttcaggagtggtgcagcgtgatcttatgtttcagcttgattgctcacaatctggtgcacctcctactcctggccaggtgggaagacactccactcgttattttgggtgtggtcgcaggggctcttattgccgattttttgtctggactggtgcattggggggctgatacctgggggagcgttgagcttcccattgtcggaaaagcttttattcggccatttcgggagcaccacatcgatcccaccgcgatcacccgacatgactttatagagactaacggcgacaactgccttgtgaccttgcttccgctgctaaacatggcctataagttcagaacacatagtccagaagctttagagcagctgtacccatgggagtgcttcgtgttttgtttgataatcttcgggactttcactaatcagatacacaagtggagccacacctactttggtctacctagatgggtgacgctgcttcaggactggcacgtgattctgcctcgtaagcaccaccgaattcaccacgtctcccctcacgagacctatttctgcattaccactggctggctcaattatccactcgaaaagataggtttctggaggcggctggaagacttaattcaaggactgaccggagagaagccgcgcgccgatgacatgaagtgggcccaaaaaatcaaatag

SEQ ID NO: 261049 - DNA, 588 bp, Artificial Sequence
  derived and/or modified sequence
atgaatgaacgagccattgcaggagcgttgatcgcggacttcttgagcgggcttgtccattggggggcagatacatggggaagtgtggagcttcctattgttggtaaagcatttatccgaccctttagagagcaccacatcgacccaacagccataactcgccatgacttcatcgagactaacggcgacaattgtcttgtgaccctgctgcctttgcttaatatggcctataaattcaggacacacagtcctgaagccctggaacaactctacccctgggagtgttttgtcttttgcctgattatctttggcaccttcactaaccagatccataagtggtcccatacatattttgggcttccgcgctgggtaactctgctgcaggactggcacgttatcctgccccggaagcaccatcgcattcaccatgttagtcctcacgagacatacttctgcatcactacaggatggctgaactaccccctcgaaaagataggattttggcggagactggaagatttgatacagggcttgactggcgaaaagccaagggctgacgatatgaagtgggcgcagaagatcaaatag

SEQ ID NO: 261050 - DNA, 813 bp, Artificial Sequence
  derived and/or modified sequence
atggccggggctgagaactggccaggccagcagctggagctggatgaagatgaggccagctgctgccgctggggcgcccagcacgccggggcccgggagctggccgccctgtacagccctgggaagaggctgcaggagtggtgcagcgtcatcctgtgcttcagcctgattgcccacaacctggtgcacctgctgctgctggcccgctgggaggacacccccctggtgatcctgggcgtggtggccggggccctgattgctgacttcctgagcggcctggtgcactggggcgctgacacctggggctctgtggagctgcccatcgtgggcaaggccttcatccggcccttccgggagcaccacatcgaccccacagccatcaccaggcatgacttcatcgagaccaacggggacaactgcctggtgaccctgctgcccctgctgaacatggcctacaagttccgcacccacagccctgaggccctggagcagctgtacccctgggagtgctttgtgttctgcctgatcatcttcggcaccttcaccaaccagatccacaagtggagccacacctacttcggcctgccccgctgggtgaccctgctgcaggactggcacgtgatcctgcccaggaagcaccaccgcatccaccacgtgagcccccatgagacctacttctgcatcaccaccggctggctgaactaccccctggagaagattggcttctggaggcggctggaggacctgatccagggcctgaccggggagaagcccagggcagatgacatgaagtgggcccagaagatcaagtag

SEQ ID NO: 261051 - DNA, 588 bp, Artificial Sequence
  derived and/or modified sequence
atgaatgaaagagccatcgccggggccctgattgctgacttcctgagcggcctggtgcactggggcgctgacacctggggctctgtggagctgcccatcgtgggcaaggccttcatccggcccttccgggagcaccacatcgaccccacagccatcaccaggcatgacttcatcgagaccaatggagacaactgcctggtgaccctgctgcccctgctgaacatggcctacaagttccgcacccacagccctgaggccctggagcagctgtacccctgggagtgctttgtgttctgcctgatcatcttcggcaccttcaccaaccagatccacaagtggagccacacctacttcggcctgccccgctgggtgaccctgctgcaggactggcacgtgatcctgcccaggaagcaccaccgcatccaccacgtgagcccccatgagacctacttctgcatcaccaccggctggctgaactaccccctggagaagattggcttctggaggcggctggaggacctgatccagggcctgactggagagaagcccagggcagatgacatgaagtgggcccagaagatcaagtag

SEQ ID NO: 261052 - DNA, 813 bp, Artificial Sequence
  derived and/or modified sequence
atggccggcgccgagaactggcccggccagcagctggagctggacgaagatgaggcttcctgctgccggtggggtgctcagcacgcgggggccagggagctggctgctctgtattcccccggcaaaagactgcaggaatggtgttcggtcatcctctgtttctctcttatagctcacaacctggtgcacctgctgctgcttgcccggtgggaagacacccccttggtaatcctgggtgttgtggctggcgcactgattgccgacttcctgagcggcctggtgcattggggcgccgatacatggggctccgtagaactgcctatcgtcgggaaggcttttatccggcctttccgtgaacaccacatcgatcccacagccataaccagacacgattttatagagacaaatggcgacaactgtctggtcacactcctgcccctcctcaacatggcttataagtttcgcactcactccccagaagcccttgaacagctgtacccgtgggaatgctttgtgttctgtctgataatttttggaacctttaccaatcagatccacaagtggagccatacctactttggccttccccgctgggtcaccctcctccaagactggcacgtgattctgccccggaagcatcatcgaatccaccacgtctctccacacgaaacatacttttgcattaccactggatggctgaattatcccctagagaagatcggcttctggagacgacttgaagacctgattcagggtttgactggcgagaaaccacgagcagatgacatgaaatgggcacaaaaaatcaagtag

SEQ ID NO: 261053 - DNA, 588 bp, Artificial Sequence
  derived and/or modified sequence
atgaacgagcgggccatcgccggcgccctgatcgccgacttcctgtctggcctagttcactggggtgctgatacatggggtagtgtggaactgccgatcgtgggcaaggcgttcatccgccctttcagagagcaccatattgatcctactgctatcacacgccacgattttatcgagactaacggcgacaattgcttggtaacccttctccccctgctcaatatggcgtataagttcaggacacacagccccgaggctctagagcagctgtacccatgggagtgctttgtcttttgcttgatcatcttcggcacatttacaaaccagatccataaatggtctcacacctactttggcctgcccaggtgggtcactctgttacaagattggcacgtcatacttcctcgcaagcatcataggattcatcatgtgtctccccatgaaacatatttttgcattaccacagggtggttgaattaccctcttgaaaagatcggattctggcgccgcctcgaggatctgatccaaggactcacgggcgagaagccccgcgccgacgacatgaagtgggcccagaagattaaatag

SEQ ID NO: 261054 - DNA, 813 bp, Artificial Sequence
  derived and/or modified sequence
atggccggagcggagaactggcccggacagcaactggaactggacgaggatgaagccagctgttgcaggtggggagctcagcacgctggcgcacgagagctggctgctctgtactcacccggtaagcgcttgcaagagtggtgctctgtcatcttgtgcttttctcttatcgcccacaatctggtgcacctactgttgctggcaagatgggaagatacacccctagtgattctcggtgtcgtcgcaggtgccctcattgcagacttcctcagcggcctggtgcactggggagctgacacgtgggggtccgtcgagctccccattgttggtaaggcattcataaggccattccgggagcaccacattgaccctactgccatcaccaggcacgacttcatcgaaacgaacggggacaactgccttgtaactttgttgccgcttttgaatatggcttataaattccgtacccacagcccggaagccttagagcagttatacccctgggagtgtttcgtgttctgcctgataatcttcgggactttcacaaatcagatccataagtggagccacacatacttcggactgcccagatgggtgacacttctccaggattggcacgtcattttaccgaggaaacaccaccgtatccatcacgtcagcccacacgaaacgtatttctgtataaccacaggatggctcaattatcccttggagaagataggtttctggcgcaggctggaggacctcatacaagggctgaccggtgaaaaacccagggcggatgacatgaagtgggctcagaaaatcaagtag

SEQ ID NO: 261055 - DNA, 588 bp, Artificial Sequence
  derived and/or modified sequence
atgaacgagagggccatcgccggagccctcatcgcggattttctttccggcctcgttcattggggcgcagacacatgggggtcggtcgagctgcccattgtagggaaagcatttatcaggcccttccgtgaacaccacattgatcccactgccattacgcgtcatgattttatagagaccaacggtgataactgcctcgtcacacttctacccctgctcaatatggcttacaaatttagaacccactctccagaggccttggagcagctatacccctgggagtgtttcgtcttctgtctgataatcttcggcaccttcacgaaccagattcataaatggagccatacatacttcgggttgccacgttgggtcaccctgctgcaggactggcacgttatcctcccgcgaaagcaccacagaattcaccacgtgtctcctcatgagacctatttttgcatcactacaggctggctgaactacccacttgagaaaatcgggttttggcgcaggcttgaagatctgatccagggtctgaccggcgagaaacctcgggcagacgatatgaagtgggcccagaaaattaaatag

SEQ ID NO: 261056 - DNA, 2198 bp, Artificial Sequence
  derived and/or modified sequence
gctgggcggtcattgggcggcgtgatctcgccgcggttccgcggccctgccgccgccgccgccagcagagcgcaccgggccgatcgggcgagtggccatggcgggcgccgagaactggccgggccagcagctggagctggacgaggacgaggcgtcttgttgccgctggggcgcgcagcacgccggggcccgcgagctggctgcgctctactcgccaggcaagcgcctccaggagtggtgctctgtgatcctgtgcttcagcctcatcgcccacaacctggtccatctcctgctgctggcccgctgggaggacacacccctcgtcatactcggtgttgttgcaggggctctcattgctgacttcttgtctggcctggtacactggggtgctgacacatggggctctgtggagctgcccattgtggggaaggctttcatccgacccttccgggagcaccacattgacccgacagctatcacacggcacgacttcatcgagaccaacggggacaactgcctggtgacactgctgccgctgctaaacatggcctacaagttccgcacccacagccctgaagccctggagcagctatacccctgggagtgcttcgtcttctgcctgatcatcttcggcaccttcaccaaccagatccacaagtggtcgcacacgtactttgggctgccacgctgggtcaccctcctgcaggactggcatgtcatcctgccacgtaaacaccatcgcatccaccacgtctcaccccacgagacctacttctgcatcaccacaggctggctcaactaccctctggagaagataggcttctggcgacgcctggaggacctcatccagggcctgacgggcgagaagcctcgggcagatgacatgaaatgggcccagaagatcaaataacttctccgagcctgctacctggttgccaaccttccctagcccccaaaccgaagccatctgccaaattccagcctctttgagctggcccctccagatggagaggacatctcctgggctgggcccaggtaccccagcccacccctcatgacacagaatacttgagccactgatttttcatttcttttttttttttttcctcggcccctcctcagccacctgagttgctctatctgcaagcctgactctgccagcctcccctggtagagaggaggtttacccactccctgcacgcctgccgtccctgccccgctgggcagcccttcagtgtggctggcgttggggccagtgagttgcctctttccctccttgtctggccccagtggtctggggagcccccaggcacacctaagcgtcgtggagcattgttctgccacagccctgcatactgaccccgggaggctgggcaggtggacagccccagccaccaccttcagcctagcctgtcccccaaggatggtgaagctcagcaggggtctgagggtagccggccagaagaggctggaacctcctgctcaagtctagacccctacttctctgctgcccccaccctgccagagctgatgtttccaataccaagatgtcttcacagggcacagcccctgcagagcatcttggtcatttggaagaggacacggtatcccctctggccagagtatgtcagagaaggaagagtagggcttttttgttttgtttttttttaaaggtgcttgcttgtttaatgtaaataatagaaagccttaatatcttttctgtaacacggagtaatattttaatgtcatgttttggatgtacataatatatttataacaaagcagcaagagtctacttaaccttggctgcctcgtggtgtttcctggctgggtggggtggggggtatcaaggagcctgggacgtgaggccccactctcgccccattcccagctccccccaaccctggcctcaggatgagagctgtcacctgagacagtgaattaatgttgacatctgctccaaagccttttggaggggattgggtgaggacagtggtctttcctgttgatcatgatgataaagtaatgatggctgatccctatttgtgacttccttcagcaaatattcactggcacctggtgtgtgccaggctctgtcctgtacacaggtacagcggtgaaagaaccaacaaagacctatcctggtggagctgacctcctgggaaaagagtcaataaacaaataaatgcacatggaaa

SEQ ID NO: 261057 - DNA, 1973 bp, Artificial Sequence
  derived and/or modified sequence
caagtaacaggcaggaggagtgttaagcctgaggctccatcttcagggaagaaaacatcccaactagagaagaagggacaccttcccctcctaacaaatgaatgagcgggcaattgcaggggctctcattgctgacttcttgtctggcctggtacactggggtgctgacacatggggctctgtggagctgcccattgtggggaaggctttcatccgacccttccgggagcaccacattgacccgacagctatcacacggcacgacttcatcgagaccaacggggacaactgcctggtgacactgctgccgctgctaaacatggcctacaagttccgcacccacagccctgaagccctggagcagctatacccctgggagtgcttcgtcttctgcctgatcatcttcggcaccttcaccaaccagatccacaagtggtcgcacacgtactttgggctgccacgctgggtcaccctcctgcaggactggcatgtcatcctgccacgtaaacaccatcgcatccaccacgtctcaccccacgagacctacttctgcatcaccacaggctggctcaactaccctctggagaagataggcttctggcgacgcctggaggacctcatccagggcctgacgggcgagaagcctcgggcagatgacatgaaatgggcccagaagatcaaataacttctccgagcctgctacctggttgccaaccttccctagcccccaaaccgaagccatctgccaaattccagcctctttgagctggcccctccagatggagaggacatctcctgggctgggcccaggtaccccagcccacccctcatgacacagaatacttgagccactgatttttcatttcttttttttttttttcctcggcccctcctcagccacctgagttgctctatctgcaagcctgactctgccagcctcccctggtagagaggaggtttacccactccctgcacgcctgccgtccctgccccgctgggcagcccttcagtgtggctggcgttggggccagtgagttgcctctttccctccttgtctggccccagtggtctggggagcccccaggcacacctaagcgtcgtggagcattgttctgccacagccctgcatactgaccccgggaggctgggcaggtggacagccccagccaccaccttcagcctagcctgtcccccaaggatggtgaagctcagcaggggtctgagggtagccggccagaagaggctggaacctcctgctcaagtctagacccctacttctctgctgcccccaccctgccagagctgatgtttccaataccaagatgtcttcacagggcacagcccctgcagagcatcttggtcatttggaagaggacacggtatcccctctggccagagtatgtcagagaaggaagagtagggcttttttgttttgtttttttttaaaggtgcttgcttgtttaatgtaaataatagaaagccttaatatcttttctgtaacacggagtaatattttaatgtcatgttttggatgtacataatatatttataacaaagcagcaagagtctacttaaccttggctgcctcgtggtgtttcctggctgggtggggtggggggtatcaaggagcctgggacgtgaggccccactctcgccccattcccagctccccccaaccctggcctcaggatgagagctgtcacctgagacagtgaattaatgttgacatctgctccaaagccttttggaggggattgggtgaggacagtggtctttcctgttgatcatgatgataaagtaatgatggctgatccctatttgtgacttccttcagcaaatattcactggcacctggtgtgtgccaggctctgtcctgtacacaggtacagcggtgaaagaaccaacaaagacctatcctggtggagctgacctcctgggaaaagagtcaataaacaaataaatgcacatggaaa

SEQ ID NO: 261058 - protein, 186 aa, Artificial Sequence
  derived and/or modified sequence
MFGKPDKMDVRCHSDAEAARVSKNAHKESRESKGAEGNLPAAFLKEPQGAFSASGAAEDCNKSKSNSAADPDYCRRILVRDAKGSIREIILPKGLDLDRPKRTRTSFTAEQLYRLEMEFQRCQYVVGRERTELARQLNLSETQANSEENNERFKRGIKKQKKKRKKEPANDESRRGDSGGRGWQPL

SEQ ID NO: 261059 - DNA, 4494 bp, Artificial Sequence
  derived and/or modified sequence
accagactggccgcctctcggcgagcgcgccactctcccgtcgccgctgacccgcgcgcggccgccgaagcctccccgcggggacattcattcttgccccttgcctgtcgccgggccgggcgtacgggccgcgttgtcgggggttttgtcccctttttcctcttttttttttccttctccgccccccccccttttttttttttttgctttttttttcctttctgtttttgttgttgttcttgcctatgttcgggaaaccagacaaaatggacgttcgatgccactcggacgccgaggctgcccgggtctcgaagaacgcgcacaaggagagtcgggagagcaagggcgcggaggggaacctcccagccgccttcctcaaggagccgcagggcgccttctcagcgtcgggcgctgctgaggattgtaacaaaagtaaatccaattccgcagcggacccggattactgccgccggatcctggtccgagatgccaaggggtccatccgagagatcatcctgcccaagggcctggacttggaccggcctaagaggacgcgcacgtccttcaccgcggagcagctctatcggctggagatggagttccagcgctgccagtacgtggtgggccgcgagaggaccgagctcgcccggcagcttaacctctccgagacccaggcaaatagtgaagaaaataatgaacgattcaaacgcgggataaaaaaacaaaagaagaaaaggaagaaagagccagcaaatgatgagtctcggcgtggggactccgggggcagagggtggcagcccctatagtgcggggccctgcgactggtaccgtgagcgcctgggatgaggtttgggcggatttcgggtttccggagaggcagagacgcctggctacgacgatttgttccacttccttgagtgtttcgctctcgatttctctatctgtccctctgaggtcggcccctcagaccctcctccttaatttcccactgcgtaattcttagtttatttaggaactcatctctgggcactataaagtctctgcctcctaatgctaggtttctagagtcttccagctgcatcttcatgccggcagcattttggattttgtgcaatcatgggcccagaataggcaaggttttattttcttctgacttagaatataagtctcgccatcgtcaaagagaaactttgaaggagcaggagactgaaatcgatattaattcctgcaaagagacctcctcaccctggtgcttatgcggtggtgacgggtgtagacgttgcaaacaaatcttgggaagcgaggagggccggggaggacacttccggacacgctcttctaaagcgtgtgcagcacggggcgaagtccgcgctgcgggggcagcggccccggctccttcttgtagcgcctgcacacctgggtgttgcagggacccgcagctcccgtgcggcaccggccctagccaggccttactgcccctactcgtgtactgtgcctgaagctgaagttggaggcatccaaaataaggcggggcacagtgtgggcggcggagtccctgagccttgagctccgctttttgctgagatcacagcagccgcccacagacagttcacttttatttctcaaagttgctgcagatccctcagcttggcttctcttggctcttcccctccctgtccgcctctccttactttctcttgcttgaaactgcttttccttttctactcttttcttccgcgctcctgtcccgtaaacgcctgcgcttcctttaaggagttctctctctgtggtgtgggctcccctctcgttccccctgtctccctcctccattacttcttccttccaggtctctctctctcttttggttttctggtttttttctcctgctcaaggggtcccaaaggccaaggcagtgggtggctctcgctgcagcttcaaggctggtggctgggaccctccaggggtgagaaggaagggagaaggtggcataactttttggaacaaaagaaaacacaaaatcctagcttgggattcccaacaaattcagcctcctctcccaggggcctcagcctgggaagtcaccaagcagatccctccttccagcttcctgctctttctcctttttgctttcttacccctgaaagagggaaggacaagtcacctcataacttctgctctcacctcccttccctccctggctttgggaagagctgctgagctctttgcctgccactcagggagtgcaattgttcttaaagagcctcttctgcatagaaaaagaattgcaattttaatttaaaaacatttatagaaaattcatttaattttagtgactatcttcttttccctccttccccaagggcctccagtaagctgccttggtccctggaggcttctggcttccaactggagactcacaggccttggaggaggaggcaggtaccctctatgccaatagctgggcctgcctggggaaaggtggaaggagaaacagctgcaggaggggggagctgaaaggaatctgatgctcaggcctgcacaaagcaaccgccaaattgtttcagagcagaaaagaaaaagggagaaaacctcttagcaaagccctgtgagtttgggggtcaggttcaagaaagatgtgggaagtcacttggagagctaaacgggacacatgctcctatccacacttgcagttggtctaaccttcagccagaatgtattcataagtagcatttggcaaccctttatagtttacaaatagcattttacatacaccattctactattcctcatggtggctttgggaggtccagctccgttttaaagactcacacaggactgaagcaaataacttgctcaaagccacatagctgctcagaacccaagattgtaagctccccctagggccagaggcctctttctttcagtttttttctttcgtccccctttgacccctctttccttcttccctttctcccctccttcctcctttccttctttttgtgcccacagtgtctggatcatggtacctgaattctttagcctatttgcacccacatctgctaatgtccatatctagccatctattacaccagctgctgaggatttacttggtgccctcatcaagaagtttgaatttctccctccttcctttttttttcctgccactgtcccaactctttccctctacgtctctctagaatgacatctttaaaccccttacactctttggtcttacacatccttaaaaatgattatttataaattgaattataatatccatgaggtaaacactcatagggtaaagtacacaaagcttaactatacaagttgatgatttacacacacacacacacacacacacacacaccccttcttgaatggctccaaggatacccttttaacttcttcccttcagccacataagccatatgatgacacacagtgtctttctcctgtttgaaaagaaattgtgtcatattggtgtgctgttcttgcatagaaagccttttttaagaagtctttttaagatttcttgaaggattttagaaatcatatatctcttctaaccccctgaaatcctgagtttaagtggcttgattaaatggctgatcaaaacttaaaaacacactaggtcaatgtttttcaagatacaactgaggaccagctgcttcagaatcatctggggactggctaaaattccaggttcctaagccctagtcccatctgatgaatcagaaactaggttggggcttaggaacgtgcattttaaacacttttccaaagtgattcttatccagactaatatttgagaagtactgtattaaatggcaaactcccaaaacactgcagcctcctgcatctggcccagggcctggcatttggtaggaatacaatgaatgtttgttaaacaaattaatccacagtttctgacacagtttagaatttcttggaccacattatgctattgtaatttaacaccatttctacgtcgggaaatctttacatttcagtctttttcattttcatggaggtttcattttaatggagcaggagagaaaagagagatctactttggtggtttctcaggtctcagggaaggtcttttataaactcaatggggaccaccttcctggagaggctgctcccttacagacctggtagtttggggaaaggaggaggagagcccttcaggtttgctgaaaagcattcagatgcacacccttcttggttggaactgaaagcttctgtttgaagagacatgagttctggaaggagcaaggccaccaggtccagagaacctggcatgcaatggacatggaagctgaaaattacttgggtattctctgatttctagctaatatgaaaataattttctttctagaaacacatttgcctatcttcttaccctgaaacagaaaataaatattgtgctttatgtggtagtgttgtacccattcttaaaaataaatcacatcatatatatgtgtaaaatat

SEQ ID NO: 261060 - DNA, 561 bp, Artificial Sequence
  derived and/or modified sequence
atgttcggcaagcccgacaagatggacgtgagatgccacagcgacgccgaggccgccagagtgagcaagaacgcccacaaggagagcagagagagcaagggcgccgagggcaacctgcccgccgccttcctgaaggagccccagggcgccttcagcgccagcggcgccgccgaggactgcaacaagagcaagagcaacagcgccgccgaccccgactactgcagaagaatcctggtgagagacgccaagggcagcatcagagagatcatcctgcccaagggcctggacctggacagacccaagagaaccagaaccagcttcaccgccgagcagctgtacagactggagatggagttccagagatgccagtacgtggtgggcagagagagaaccgagctggccagacagctgaacctgagcgagacccaggccaacagcgaggagaacaacgagagattcaagagaggcatcaagaagcagaagaagaagagaaagaaggagcccgccaacgacgagagcagaagaggcgacagcggcggcagaggctggcagcccctgtag

SEQ ID NO: 261061 - DNA, 561 bp, Artificial Sequence
  derived and/or modified sequence
atgtttggcaagccggacaagatggatgtgagatgtcacagcgacgccgaggcagcaagagtttctaaaaacgctcacaaagagtccagggaatctaagggtgctgagggcaacctcccggcagctttcctgaaggagcctcagggcgctttctcagctagcggcgccgctgaggattgcaacaaatccaaatccaacagcgctgcagatccggactattgccggcggattctggtgagagatgcgaagggaagcatcagggagataatcctgccgaaaggcctcgatctagataggcctaagcgaacaagaacatcttttactgcagagcagttgtaccgattggagatggagtttcaacgctgccaatatgtagttggtagagaacgaactgaactcgctagacagctaaatctgagcgaaacccaggccaattccgaggagaataatgagaggttcaagcggggcatcaaaaagcagaaaaaaaaacgtaagaaagaacccgctaatgatgagtcccggaggggcgattccggagggcggggatggcagcccctttag

SEQ ID NO: 261062 - DNA, 561 bp, Artificial Sequence
  derived and/or modified sequence
atgtttgggaagccagacaagatggatgtgcgctgccacagtgatgctgaggccgcccgggtgtccaagaatgcccacaaggagagccgggagagcaaaggagctgagggcaacctgcctgctgccttcctgaaggagccccagggcgccttcagcgccagcggggctgctgaggactgcaacaagagcaagagcaacagcgctgctgaccctgactactgccgccgcatcctggtgagagatgccaagggcagcatccgggagatcatcctgcccaagggcctggacctggaccggcccaagaggaccaggaccagcttcaccgctgagcagctgtaccgcctggagatggagttccagcgctgccagtatgtggtgggccgggagaggacagagctggcccggcagctgaacctgtctgagacccaggccaacagcgaggagaacaatgaacgcttcaagaggggcatcaagaagcagaagaagaagaggaagaaggagcccgccaatgatgagagccggcggggggacagcggcggccggggctggcagcccctgtag

SEQ ID NO: 261063 - DNA, 561 bp, Artificial Sequence
  derived and/or modified sequence
atgttcggcaagcccgacaagatggacgtgcggtgccacagcgacgccgaggctgcccgtgtgtcaaaaaacgctcataaagagtcaagagagagcaagggggccgagggaaacttgcccgctgcctttttgaaagagccacagggggcctttagcgcgtccggcgcagctgaggattgtaataaaagtaagagtaacagtgctgcagatcccgactattgtagacgaatcctcgtgcgcgatgctaagggctccatcagggaaatcattctccccaaagggctggacctagatcggcctaagcgaacccggacgagctttacagccgaacagctctaccggttagaaatggaattccagaggtgtcagtacgtggtgggaagagaacgcactgaacttgccagacagcttaatctctcagaaactcaagcgaacagtgaggagaacaatgaacggtttaaacgaggaataaaaaaacagaaaaaaaagcgcaaaaaggaaccagccaacgatgaaagccggagaggagattcaggagggcgtgggtggcaaccactctag

SEQ ID NO: 261064 - DNA, 561 bp, Artificial Sequence
  derived and/or modified sequence
atgttcggaaaaccggacaaaatggacgtgcgttgccactccgacgcagaggccgctagggtgagcaaaaatgcccataaggagtcccgagagagcaagggagccgagggaaatctgcccgctgccttcctgaaggaacctcaaggggctttctccgcctccggagccgctgaggattgcaacaaatccaagtccaattcagcagctgatccagactactgccgtcgtatcctggtaagagatgccaaaggctcaatccgtgaaattattctcccaaaagggttagatttggatcgtcccaaaaggacccggacctcgttcactgctgagcaactgtacagattggaaatggagttccagcgttgtcagtacgtggtgggaagggagaggactgaactcgctcggcagctgaatttatctgaaacgcaagcaaacagtgaagaaaataatgaacggttcaagaggggcattaagaagcagaagaagaagcgcaagaaagaaccagctaacgatgagtcacgcaggggtgattcaggaggaagaggttggcagccactgtag

SEQ ID NO: 261065 - protein, 233 aa, Artificial Sequence
  derived and/or modified sequence
MEGGGGIPLETLKEESQSRHVLPASFEVNSLQKSNWGFLLTGLVGGTLVAVYAVATPFVTPALRKVCLPFVPATTKQIENVVKMLRCRRGSLVDIGSGDGRIVIAAAKKGFTAVGYELNPWLVWYSRYRAWREGVHGSAKFYISDLWKVTFSQYSNVVIFGVPQMMLQLEKKLERELEDDARVIACRFPFPHWTPDHVTGEGIDTVWAYDASTFRGREKRPCTSMHFQLPIQA

SEQ ID NO: 261066 - DNA, 702 bp, Artificial Sequence
  derived and/or modified sequence
atggagggcggcggcggcatccccctggagaccctgaaggaggagagccagagcagacacgtgctgcccgccagcttcgaggtgaacagcctgcagaagagcaactggggcttcctgctgaccggcctggtgggcggcaccctggtggccgtgtacgccgtggccacccccttcgtgacccccgccctgagaaaggtgtgcctgcccttcgtgcccgccaccaccaagcagatcgagaacgtggtgaagatgctgagatgcagaagaggcagcctggtggacatcggcagcggcgacggcagaatcgtgatcgccgccgccaagaagggcttcaccgccgtgggctacgagctgaacccctggctggtgtggtacagcagatacagagcctggagagagggcgtgcacggcagcgccaagttctacatcagcgacctgtggaaggtgaccttcagccagtacagcaacgtggtgatcttcggcgtgccccagatgatgctgcagctggagaagaagctggagagagagctggaggacgacgccagagtgatcgcctgcagattccccttcccccactggacccccgaccacgtgaccggcgagggcatcgacaccgtgtgggcctacgacgccagcaccttcagaggcagagagaagagaccctgcaccagcatgcacttccagctgcccatccaggcctag

SEQ ID NO: 261067 - DNA, 1423 bp, Artificial Sequence
  derived and/or modified sequence
tggaaatctcgcgatggagggaggaggaggtatacccctagaaacacttaaagaagaaagtcagtcaagacatgttctacctgcaagttttgaagtcaacagtttgcagaaaagcaactgggggttcttacttactgggcttgtgggtggcaccctggtggctgtgtacgctgtagccacgccgtttgtaacgccagcccttcgaaaagtctgtttgccgtttgtacctgcaactacgaagcagattgaaaatgttgtgaaaatgttgcgatgccgaagaggatcccttgtggacatcggtagtggggacggacgcattgtcatagcggctgcgaagaaagggttcacagcagttggttatgaattaaacccatggctagtttggtattccagataccgcgcttggcgagaaggtgtgcatggatctgccaaattttatatttcagatttgtggaaggttactttttcgcagtactcgaacgttgttattttcggtgtgcctcagatgatgctgcagttggagaagaaacttgaacgtgaacttgaggatgatgcacgagttattgcttgccggttccctttcccacattggactccagaccacgtcacgggggaggggatagacacagtgtgggcatatgatgcaagcacttttagaggccgtgaaaagaggccctgtacatcgatgcatttccagctgcccattcaagcataaacttgactgggagtgtttttctgaaatattgtagtcttccctgatcttgtagagacttacagctgtgtccttagcaaaggagcataattgtctttggtttggaatgagaaattactattactttccttaactgttggagaaaacaaacgaagaaaaacaggtagatttaaaatctgcttttgatgctattttcttaaaaattgtacttactgcctttccatgcacctggatgcatgaaaagatgaataagtgatggtcatggttatgggtaggaaaataagatgccaatagctcttcacattataaacaatatggcttaatgcctcgataaggagaaatgatttttaaagacagtatatattaccaactgtttgtagtatcctataactttgttcatacttaagttgtatctctttcctttttgtacttcatggcaaaattaattttctaaaggattcagagaggcgtttatattttataacatttattagaaataatttgttccaccactagattactgtattttatggaatctaagctgtatatgtgtacatttgtatacatgtatgtgtaaatgtaagcctgacgtgggttcagattccagttttgtcatcagcaagaggcctcggacccatgacttactgcctctgagccttggctttctgtgtatctctgccactgggataatggtacacataacagtggagt

SEQ ID NO: 261068 - DNA, 702 bp, Artificial Sequence
  derived and/or modified sequence
atggagggaggagggggtattcccctagaaacgctgaaagaagaatcccaaagcaggcatgttctgccagcctctttcgaagtgaattcactgcagaagagcaactgggggtttttactcaccggactggtgggtggtacactggtggccgtgtatgcagtggccactcctttcgttacccccgcattaaggaaagtttgtctgccattcgtacccgcaacaacaaaacagatagaaaatgtagtgaaaatgctgaggtgcaggagaggtagcttggttgatatcggcagtggggacgggcggatcgtcattgcagccgctaaaaaaggcttcacagccgttgggtatgagcttaatccatggctggtgtggtattctcgataccgtgcctggagggagggcgttcacggcagtgcgaagttttatataagcgacctctggaaagttacatttagccagtatagtaacgttgtgatctttggcgtaccccagatgatgctccaactggaaaagaaactcgagcgggagcttgaggatgatgcacgtgtcatcgcttgccgtttcccctttccccattggacacctgaccacgtcaccggcgagggcattgacaccgtttgggcttacgatgcatccacatttcgcggccgcgaaaagagaccatgtacatcgatgcattttcagctgcctatccaagcttag

SEQ ID NO: 261069 - DNA, 702 bp, Artificial Sequence
  derived and/or modified sequence
atggagggcggcggcggcatccccctggagaccctgaaggaggagagccagagccgccacgtgctgcctgccagctttgaggtgaacagcctgcagaagagcaactggggcttcctgctgaccggcctggtgggcggcaccctggtggccgtgtatgctgtggccaccccatttgtgaccccagccctgaggaaggtgtgcctgccctttgtgcctgccaccaccaagcagattgaaaatgtggtgaagatgctgcgctgccggcggggcagcctggtggacatcggcagcggagatggccgcatcgtgattgctgctgccaagaagggcttcaccgctgtgggctatgagctgaacccctggctggtgtggtacagccgctaccgggcctggagggagggcgtgcacggcagcgccaagttctacatcagtgacctgtggaaggtgaccttcagccagtacagcaatgtggtgatcttcggcgtgccccagatgatgctgcagctggagaagaagctggagcgggagctggaggatgatgcccgggtcatcgcctgccgcttccccttcccccactggaccccagaccacgtgactggagagggcatcgacacagtgtgggcctatgatgccagcaccttccggggccgggagaagaggccctgcacctccatgcacttccagctgcccatccaggcctag

SEQ ID NO: 261070 - DNA, 702 bp, Artificial Sequence
  derived and/or modified sequence
atggagggcggcggcggcatccccctggagaccctgaaggaggagtcacagagtcgccacgttcttccagcctcctttgaggtgaactctctccagaaatctaactggggctttcttctgactggtctcgtgggcggtacactggtggctgtgtacgcggttgccactccatttgttactccagctcttcggaaagtctgcctgcctttcgtcccggctacaaccaaacagatagagaatgtagttaaaatgctgagatgccgcagaggctccctcgtcgatataggcagcggggatggccgaatcgtgatcgctgccgcgaagaaaggtttcacagccgtcgggtacgaattgaacccctggctggtatggtacagccgctaccgagcctggcgcgagggcgtgcatgggtctgcgaaattttatattagcgacctgtggaaagtcactttctcacagtactcgaacgtggtgatcttcggcgtaccccagatgatgctgcagctggagaaaaaacttgaaagggagcttgaagatgacgctcgtgtgatcgcctgtcggtttccatttcctcactggacaccagatcacgtgactggcgaagggattgatacggtctgggcatatgacgccagtacatttaggggtcgagaaaagagaccttgcacatccatgcacttccaactccccatacaagcatag

SEQ ID NO: 261071 - DNA, 702 bp, Artificial Sequence
  derived and/or modified sequence
atggaaggtggcggtggtataccactggagaccctgaaggaggagtctcaaagtagacacgtgttacctgcaagttttgaggtgaacagcctccagaaaagcaactggggctttctgctcacaggtcttgtgggaggcactctggttgcagtttatgccgtggcaacacccttcgtgacccccgcactgagaaaagtctgccttccctttgtacctgccactacaaaacagatcgagaacgtagtgaaaatgttgcgctgtcggagggggtctcttgtggatattggttcaggcgacggtcgcatcgtgattgctgccgctaaaaagggctttacagcagtgggctacgagctaaacccatggctggtgtggtatagtcggtatcgcgcatggagggaaggggtacacggaagtgctaaattctatatcagcgatctgtggaaagtaaccttcagccagtattccaacgtggtcatctttggtgtgccccaaatgatgctacagttagagaagaagctggagcgggaacttgaggacgatgccagagtaattgcgtgccgattcccgtttccacactggacccctgaccacgtgacaggagaaggaatagacaccgtctgggcctacgatgccagtactttcaggggcagagaaaaaaggccatgtacatcaatgcattttcagctcccgattcaagcctag

SEQ ID NO: 261072 - protein, 282 aa, Artificial Sequence
  derived and/or modified sequence
MEGDFSVCRNCKRHVVSANFTLHEAYCLRFLVLCPECEEPVPKETMEEHCKLEHQQANECQERPVECKFCKLDMQLSKLELHESYCGSRTELCQGCGQFIMHRMLAQHRDVCRSEQAQLGKGERISAPEREIYCHYCNQMIPENKYFHHMGKCCPDSEFKKHFPVGNPEILPSSLPSQAAENQTSTMEKDVRPKTRSINRFPLHSESSSKKAPRSKNKTLDPLLMSEPKPRTSSPRGDKAAYDILRRCSQCGILLPLPILNQHQEKCRWLASSKGKQVRNFS

SEQ ID NO: 261073 - DNA, 849 bp, Artificial Sequence
  derived and/or modified sequence
atggagggcgacttcagcgtgtgcagaaactgcaagagacacgtggtgagcgccaacttcaccctgcacgaggcctactgcctgagattcctggtgctgtgccccgagtgcgaggagcccgtgcccaaggagaccatggaggagcactgcaagctggagcaccagcaggccaacgagtgccaggagagacccgtggagtgcaagttctgcaagctggacatgcagctgagcaagctggagctgcacgagagctactgcggcagcagaaccgagctgtgccagggctgcggccagttcatcatgcacagaatgctggcccagcacagagacgtgtgcagaagcgagcaggcccagctgggcaagggcgagagaatcagcgcccccgagagagagatctactgccactactgcaaccagatgatccccgagaacaagtacttccaccacatgggcaagtgctgccccgacagcgagttcaagaagcacttccccgtgggcaaccccgagatcctgcccagcagcctgcccagccaggccgccgagaaccagaccagcaccatggagaaggacgtgagacccaagaccagaagcatcaacagattccccctgcacagcgagagcagcagcaagaaggcccccagaagcaagaacaagaccctggaccccctgctgatgagcgagcccaagcccagaaccagcagccccagaggcgacaaggccgcctacgacatcctgagaagatgcagccagtgcggcatcctgctgcccctgcccatcctgaaccagcaccaggagaagtgcagatggctggccagcagcaagggcaagcaggtgagaaacttcagctag

SEQ ID NO: 261074 - DNA, 849 bp, Artificial Sequence
  derived and/or modified sequence
atggagggcgacttcagcgtgtgtaggaattgcaaaagacatgtggtctccgctaactttacattacacgaagcttactgcctgcgttttctcgtcctctgccccgagtgtgaagagcctgtgcctaaagaaaccatggaggaacactgcaagctagagcatcagcaagccaatgagtgtcaggaacgaccagttgagtgtaaattctgtaaattggacatgcaactgtctaagctcgaacttcacgagagttactgtggatctagaactgagttatgtcagggttgtggccaattcattatgcatcgaatgttggcccagcaccgcgatgtgtgccgcagcgagcaagcccagctgggaaagggtgagaggatcagcgccccggaacgggaaatatattgtcattattgcaaccaaatgattcctgaaaacaaatacttccatcacatgggcaaatgttgccctgattccgagttcaagaagcacttcccagtcgggaaccctgagatcctaccctcctctctgcccagccaagcggccgaaaaccagacatctacaatggagaaagacgtccggcccaagacgcgatctatcaacagattcccccttcattccgaatcttccagcaaaaaagcgccgagatccaaaaacaagaccctggatcctctgctcatgagtgagcctaagccccgaacaagctcaccacggggagacaaagctgcctacgacatactgcgtcggtgttcacagtgtggcatactcttgcctcttccaattctgaaccaacatcaggagaagtgtcgctggttagcctcttccaagggcaagcaagtacggaacttttcttag

SEQ ID NO: 261075 - DNA, 849 bp, Artificial Sequence
  derived and/or modified sequence
atggagggggacttctctgtgtgcaggaactgcaagagacatgtggtgtctgccaacttcaccctgcacgaggcctactgcctgcgcttcctggtgctgtgcccagaatgtgaggagcctgtgcccaaggagaccatggaggagcactgcaagctggagcaccagcaggccaatgaatgccaggagaggcctgtggagtgcaagttctgcaagctggacatgcagctgagcaagctggagctgcacgagagctactgcggcagcaggacagagctgtgccagggctgcggccagttcatcatgcacaggatgctggcccagcacagagatgtgtgccgctctgagcaggcccagctgggcaaaggagagcgcatcagcgcccctgagcgggagatctactgccactactgcaaccagatgatccctgagaacaagtacttccaccacatgggcaagtgctgcccagattctgagttcaagaagcacttccctgtgggcaaccctgagatcctgcccagcagcctgcccagccaggccgctgagaaccagaccagcaccatggagaaggatgtgcggcccaagaccaggagcatcaaccgcttccccctgcacagcgagagcagcagcaagaaggcccccaggagcaagaacaagaccctggaccccctgctgatgtctgagcccaagcccaggaccagcagccccaggggggacaaggccgcctatgacatcctgcggcgctgcagccagtgtggcatcctgctgcccctgcccatcctgaaccagcaccaggagaagtgccgctggctggccagcagcaagggcaagcaggtgaggaacttctcctag

SEQ ID NO: 261076 - DNA, 849 bp, Artificial Sequence
  derived and/or modified sequence
atggagggcgacttcagcgtgtgccggaactgcaagcggcacgtggtgtctgctaatttcacactccacgaagcttactgcctgagattcctggtactgtgccctgaatgtgaggagcctgtgcctaaggagacaatggaagaacattgtaagctcgagcaccagcaagcgaatgagtgccaggagagacccgtagagtgtaagttctgcaagctggacatgcaacttagcaagctggaattgcacgagtcttactgtggcagtcgtacagagctttgtcagggttgtggccagttcatcatgcatagaatgctcgctcagcatcgagacgtgtgccgttcggagcaggcccagctcggcaagggggagcgcatatccgcaccggaacgtgaaatttattgtcactactgcaaccaaatgatacccgaaaacaagtatttccatcacatggggaagtgttgccctgactcggaattcaaaaaacactttccggtgggcaaccccgaaatcttgccctctagccttccctcccaggccgctgaaaaccaaacatcaactatggagaaagatgtccgacctaaaaccagatccattaaccgatttccccttcacagcgagtcgtccagcaagaaagcgcctcggagtaaaaacaagactttggaccctctgctgatgagcgaacccaaaccaaggacaagttccccccgcggagacaaagccgcctacgatatcctcagaagatgtagtcagtgtggcatcctcttgccactgccaattttgaatcagcatcaggagaagtgtagatggctggcatcttctaagggtaaacaggtaaggaacttctcttag

SEQ ID NO: 261077 - DNA, 849 bp, Artificial Sequence
  derived and/or modified sequence
atggagggggacttttcggtgtgtagaaactgtaaaaggcacgtagtgtcagccaactttacactccacgaggcttactgcctaagattcctggttctgtgtcccgagtgcgaggagcccgtgccaaaagagactatggaggagcattgtaaattggagcatcaacaggccaatgagtgtcaggagagacccgtagaatgtaagttttgtaagctggatatgcaactcagcaagttagaactccatgagtcgtactgcggctctcgtaccgaactgtgccaggggtgcggtcagtttatcatgcatcggatgctggctcagcacagagacgtgtgccgctcggagcaggcacagctcggaaaaggagaacgcattagtgcccctgagagggaaatctactgtcattattgcaatcaaatgattcctgaaaacaagtactttcatcacatgggaaaatgttgtcctgacagcgagttcaaaaaacacttccctgtggggaaccccgagatactgccctcctccctccctagtcaggccgcagaaaatcagaccagcactatggagaaagatgtgaggcctaagaccaggtccattaatagattcccactccattccgagagcagttccaaaaaagccccaaggagtaagaacaagacactggacccccttctgatgagcgaaccgaaacctcgcaccagctcaccaagaggggacaaagcagcttatgacatcctgagaagatgttcgcagtgtggaattttactacccctccccatcctgaaccagcatcaggaaaaatgcagatggctggcttcaagcaaagggaagcaagtcagaaacttctcctag

SEQ ID NO: 261078 - DNA, 3565 bp, Artificial Sequence
  derived and/or modified sequence
ggtagatgcggctgtgacagcagcaaagaatgacggccaagggcgacagcaggggctggccatgctgtaaaggggcttcttgggagggtccagcctcaggaatcaaggggaactcctgagccgagaattctgaagatctcctccctccctgaagctgtgggctgggccatcggaaaactttcagttttgtttccttgcctgcaagaaacgaaactcaaccgaaagcctgcagagagcagaacatggaaggagacttctcggtgtgcaggaactgtaaaagacatgtagtctctgccaacttcaccctccatgaggcttactgcctgcggttcctggtcctgtgtccggagtgtgaggagcctgtccccaaggaaaccatggaggagcactgcaagcttgagcaccagcaggccaatgagtgccaggagcgccctgttgagtgtaagttctgcaaactggacatgcagctcagcaagctggagctccacgagtcctactgtggcagccggacagagctctgccaaggctgtggccagttcatcatgcaccgcatgctcgcccagcacagagatgtctgtcgcagtgaacaggcccagctcgggaaaggggaaagaatttcagctcctgaaagggaaatctactgtcattattgcaaccaaatgattccagaaaataagtatttccaccatatgggtaaatgttgtccagactcagagtttaagaaacactttcctgttggaaatccagaaattcttccttcatctcttccaagtcaagctgctgaaaatcaaacttccacgatggagaaagatgttcgtccaaagacaagaagtataaacagatttcctcttcattctgaaagttcatcaaagaaagcaccaagaagcaaaaacaaaaccttggatccacttttgatgtcagagcccaagcccaggaccagctcccctagaggagataaagcagcctatgacattctgaggagatgttctcagtgtggcatcctgcttcccctgccgatcctaaatcaacatcaggagaaatgccggtggttagcttcatcaaaaggaaaacaagtgagaaatttcagctagatttggaaaaggaaaggtactacaaattcaaaagatttcacttttaacactggcattcctgcctacttgctgtggtggtcttgtgaaaggtgatgggttttattcgttgggctttaaaagaaaaggtttggcagaactaaaaacaaaactcacgtatcatctcaatagatacagaaaaggcttttgataaaattcaacttgacttcatgttaaaaaccctcaacaaaccaggcgtcgaaggaacatacctcaaaataataagagccatctatgacaaaaccacagccaacatcatactgaatgagcaaaagctggagcattactcttgagaagtagaacaaggcacttcagtcctattcaacatagtactggaagtcctcgccacagcaatcaggcaagagaaagaaataaaaggcaaccaaaaagaaaggaagtcgaagtatctctgtttgcagacgatatgattctatatctagaaaaccccatgatcttggcccaaaagctcctagatctgataaacaacttcagctaactttcaggagacaaaatcaatatacaaaatatggtagcatttttatacaccaacgacatccaagctgagagccaaatcaagaatgcaatcctattcacaattgccacaaaaagaataaaatacctaggaatacagctaaccagggagatgaaagatctctacaacaaaaattacaaaacactgctgaaagaaatcagagatgacacaaatggaaaaacattccatacttatggataggaagaatcaatattgttaaaatggccatactacccaaagcaatttatagattcaatgctattcctatcaaactaccaataacattcttcacagaatcagaaaaaaaaagcattaaaatttatttgaaaccaaaaaagagcccaaaaagccaaagcaatcctaagcaaaaagaacaaagctggaggcatcgcattacccaacttcaaactatactacagggctacagtaaccaaaactgcatgatactggtacaaaagcatggtgctggtacaaaagcagacacatagatcaatggaacagaatagagggcccagaaataaagctacacacctacaaccatctaatctttgacaaagttgacaaaaatacgcaatggggaaagaattccccattcagtaagtggtactgggataactagctagccatatgcagaggattgaaactgaaccacttccttacaccatatgcaaaaatcaactcaagatggattaaagacttaaatgtaaaaccccaaactataaaaactctggaagataacctaggcaataccattctggacataggaacggaaaaagatttcatgacaaagatcccaaaaataattgtaacgaaagcaaaaattgacaaatgggacatgattaaacagaattaccatttgactcagcaatcccattattggttatatacccaaaggaatctaaatcattctgtcataaagacatatatacacaaatgttcacggcagcactatacacaatcgcaaagtcagggaatcaaactaaatgtccatcagtggtagaaaggataaagaaaatgtggtggcagggagtggtggctcatgtctgtaatcccagcactttgggaggctgaggcgggtggttcacctgaggtcaggagtttgagaccagcctggccaacatggagaaactccgtctccgctaaaaatacgaaaattagccaggcgtggtggcgagcacctgtcatcccagctacttgggaggcctaggcgtgagaatcgcttgaacctggaaggtggtggttgcagtgagccgagatcctgccactgcactccagcctgggcaaccaagcgagactctgccttaaaaaaaaaaaaaagaaaatgtggcacatatacaccatggaatactatgcagccataaaaaagaatgggatcatgtcctgtgcagcaacgtggatggagctggaagccattatcctaaatgaactcactcagaaacagaaaaccaaataccacatgttctcacttataagtagaagctaaacattgagtacacatggatacaaagaagggaaccgcagacactggggcctacctgaggtcggagcatggaaggagggtgaggatcaaaaaactacctatctggtactatgctttttatctggatgatgaaataatctgtacaacaaaccctggtgacatgcaatttacctatatagcaagcctacacatgtgcccctgaacctaaaaaaaaagttaaaagaaaaacgtttggattattttccctctttcgaacaaagacattggtttgcccaaggactacaaataaaccaacgggaaaaaagaaaggttccagttttgtctgaaaattctgattaagcctctgggccctacagcctggagaacctggagaatcctacacccacagaacccggctttgtccccaaagaataaaaacacctctct

SEQ ID NO: 261079 - protein, 608 aa, Artificial Sequence
  derived and/or modified sequence
MAAAAAAVGPGAGGAGSAVPGGAGPCATVSVFPGARLLTIGDANGEIQRHAEQQALRLEVRAGPDSAGIALYSHEDVCVFKCSVSRETECSRVGKQSFIITLGCNSVLIQFATPNDFCSFYNILKTCRGHTLERSVFSERTEESSAVQYFQFYGYLSQQQNMMQDYVRTGTYQRAILQNHTDFKDKIVLDVGCGSGILSFFAAQAGARKIYAVEASTMAQHAEVLVKSNNLTDRIVVIPGKVEEVSLPEQVDIIISEPMGYMLFNERMLESYLHAKKYLKPSGNMFPTIGDVHLAPFTDEQLYMEQFTKANFWYQPSFHGVDLSALRGAAVDEYFRQPVVDTFDIRILMAKSVKYTVNFLEAKEGDLHRIEIPFKFHMLHSGLVHGLAFWFDVAFIGSIMTVWLSTAPTEPLTHWYQVRCLFQSPLFAKAGDTLSGTCLLIANKRQSYDISIVAQVDQTGSKSSNLLDLKNPFFRYTGTTPSPPPGSHYTSPSENMWNTGSTYNLSSGMAVAGMPTAYDLSSVIASGSSVGHNNLIPLANTGIVNHTHSRMGSIMSTGIVQGSSGAQGSGGGSTSAHYAVNSQFTMGGPAISMASPMSIPTNTMHYGS

SEQ ID NO: 261080 - DNA, 1827 bp, Artificial Sequence
  derived and/or modified sequence
atggccgccgccgccgccgccgtgggccccggcgccggcggcgccggcagcgccgtgcccggcggcgccggcccctgcgccaccgtgagcgtgttccccggcgccagactgctgaccatcggcgacgccaacggcgagatccagagacacgccgagcagcaggccctgagactggaggtgagagccggccccgacagcgccggcatcgccctgtacagccacgaggacgtgtgcgtgttcaagtgcagcgtgagcagagagaccgagtgcagcagagtgggcaagcagagcttcatcatcaccctgggctgcaacagcgtgctgatccagttcgccacccccaacgacttctgcagcttctacaacatcctgaagacctgcagaggccacaccctggagagaagcgtgttcagcgagagaaccgaggagagcagcgccgtgcagtacttccagttctacggctacctgagccagcagcagaacatgatgcaggactacgtgagaaccggcacctaccagagagccatcctgcagaaccacaccgacttcaaggacaagatcgtgctggacgtgggctgcggcagcggcatcctgagcttcttcgccgcccaggccggcgccagaaagatctacgccgtggaggccagcaccatggcccagcacgccgaggtgctggtgaagagcaacaacctgaccgacagaatcgtggtgatccccggcaaggtggaggaggtgagcctgcccgagcaggtggacatcatcatcagcgagcccatgggctacatgctgttcaacgagagaatgctggagagctacctgcacgccaagaagtacctgaagcccagcggcaacatgttccccaccatcggcgacgtgcacctggcccccttcaccgacgagcagctgtacatggagcagttcaccaaggccaacttctggtaccagcccagcttccacggcgtggacctgagcgccctgagaggcgccgccgtggacgagtacttcagacagcccgtggtggacaccttcgacatcagaatcctgatggccaagagcgtgaagtacaccgtgaacttcctggaggccaaggagggcgacctgcacagaatcgagatccccttcaagttccacatgctgcacagcggcctggtgcacggcctggccttctggttcgacgtggccttcatcggcagcatcatgaccgtgtggctgagcaccgcccccaccgagcccctgacccactggtaccaggtgagatgcctgttccagagccccctgttcgccaaggccggcgacaccctgagcggcacctgcctgctgatcgccaacaagagacagagctacgacatcagcatcgtggcccaggtggaccagaccggcagcaagagcagcaacctgctggacctgaagaaccccttcttcagatacaccggcaccacccccagccccccccccggcagccactacaccagccccagcgagaacatgtggaacaccggcagcacctacaacctgagcagcggcatggccgtggccggcatgcccaccgcctacgacctgagcagcgtgatcgccagcggcagcagcgtgggccacaacaacctgatccccctggccaacaccggcatcgtgaaccacacccacagcagaatgggcagcatcatgagcaccggcatcgtgcagggcagcagcggcgcccagggcagcggcggcggcagcaccagcgcccactacgccgtgaacagccagttcaccatgggcggccccgccatcagcatggccagccccatgagcatccccaccaacaccatgcactacggcagctag

SEQ ID NO: 261081 - DNA, 1827 bp, Artificial Sequence
  derived and/or modified sequence
atggcagctgccgccgccgcagttggcccaggagcgggcggcgccgggtctgccgtgcccggaggcgccggcccctgcgccaccgtctcagtgtttcctggagctcggctgcttactatcggcgacgccaacggggaaatacagcgacatgctgagcagcaggccttgaggctggaggtgagggctggccccgattcagcgggcatagccttgtacagccatgaggatgtgtgcgtattcaaatgctccgtttctcgagagactgagtgctccagagtcgggaagcagagctttattattacccttggctgcaattcagtcctgattcagttcgccactcccaacgacttctgttcattttacaatattttaaaaacctgccgcgggcatacgctggaaaggagcgtcttctcagaaaggaccgaagagtctagtgctgtgcagtatttccaattttatgggtacctaagtcaacaacagaatatgatgcaggattacgtcaggaccggaacatatcagcgtgcaattcttcagaatcacaccgatttcaaagacaagatcgtgcttgatgtgggctgcggatctggcatcctcagcttcttcgcagcccaagccggcgctcgtaagatttacgccgtcgaagcgtccaccatggcccaacacgccgaggtgttggtcaaatcaaacaacctgactgacagaatcgtagtgataccgggtaaggtcgaagaagtctctctgcctgagcaggtcgatatcatcatttccgaacccatgggatacatgttgttcaacgagaggatgctcgagagctatttacacgcaaaaaagtacctaaaaccttccgggaatatgttccctaccatcggggatgtccatttagcgcccttcacggacgagcagctctatatggagcagttcactaaggccaatttctggtatcagccctcgttccacggagtcgacctttctgccctgcggggggcagccgtggacgagtatttccgccaacctgtcgttgacaccttcgatataagaattttaatggcaaaaagcgtgaaatacacggtcaactttcttgaggccaaggaaggcgacctacatcgtattgagattccattcaaattccatatgctacactccggactagtgcatggcttggccttttggtttgatgtggccttcatcggctctattatgaccgtgtggctatccaccgcgccaactgagcccttaacgcattggtatcaggtccgttgtctgttccagtcccctctgttcgcaaaagctggggacacattgagcggaacctgtctgctgatcgccaataaaaggcagtcttacgacattagtattgttgcacaagtggaccagacaggatctaagtcttccaatctcctagacctgaaaaacccctttttcaggtatactggaaccacgccttcgccccccccaggttcccactatacatctccctccgagaatatgtggaatactggcagcacctacaacctgagtagtggcatggctgtggcaggtatgccgacggcctatgacctgtcaagcgtaattgcttcgggcagcagcgtggggcataacaacctgatcccgctcgcgaataccgggattgtaaatcatacacatagcagaatgggctctattatgagcacagggatcgttcagggttctagcggagcacaaggctccgggggtggaagcacgagtgcccactatgccgtaaacagccagttcaccatgggcgggccagccatctcgatggcttccccaatgagcatacctacaaacactatgcattacggatcatag

SEQ ID NO: 261082 - DNA, 1827 bp, Artificial Sequence
  derived and/or modified sequence
atggctgctgctgctgctgctgtgggccctggggccggcggggccggcagcgctgtgcctgggggcgccggcccctgtgccaccgtgtctgtgtttcctggggcccggctgctgaccatcggagatgccaacggggagatccagagacatgctgagcagcaggccctgcggctggaggtgcgggccggccctgacagcgctggcatcgccctgtacagccatgaagatgtgtgtgtgttcaagtgcagcgtgtcccgggagacagaatgttcccgggtgggcaagcagagcttcatcatcaccctgggctgcaacagcgtgctgatccagtttgccaccccaaatgacttctgcagcttctacaacatcctgaagacctgccggggccacaccctggagaggtctgtgttcagcgagaggacagaggagagcagcgctgtgcagtacttccagttctacggctacctgagccagcagcagaacatgatgcaggactatgtgaggacaggcacctaccagagggccatcctgcagaaccacacagacttcaaggacaagatcgtgctggatgtgggctgcggcagcggcatcctgtccttctttgctgcccaggccggggccaggaagatctatgctgtggaggccagcaccatggcccagcacgccgaggtgctggtgaagagcaacaacctgacagacagaattgtggtgattcctgggaaggtggaggaggtgtccctgcctgagcaggtggacatcatcatcagcgagcccatgggctacatgctgttcaatgaaagaatgctggagagctacctgcacgccaagaagtacctgaagcccagcggcaacatgttccccaccatcggagatgtgcacctggcccccttcacagatgagcagctgtacatggagcagttcaccaaggccaacttctggtaccagcccagcttccatggagtggacctgagcgccctgcggggagctgctgtggatgagtacttccggcagcctgtggtggacacctttgacatccgcatcctgatggccaagtctgtgaagtacacagtgaacttcctggaggccaaggagggggacctgcaccgcatcgagatccccttcaagttccacatgctgcacagcggcctggtgcacggcctggccttctggtttgatgtggccttcatcggcagcatcatgacagtgtggctgagcacagcccccacagagcccctgacccactggtaccaggtgcgctgcctcttccagagccccctgtttgccaaggccggggacaccctgagcggcacctgcctgctgattgccaacaagaggcagagctatgacatcagcatcgtggcccaggtggaccagacaggcagcaagagcagcaacctgctggacctgaagaaccccttcttccgctacacaggcaccacccccagccccccacctggcagccactacaccagccccagcgagaacatgtggaacacaggcagcacctacaacctgagcagcggcatggctgtggccggcatgcccacagcctatgacctgagcagcgtcatcgccagcggcagctctgtgggccacaacaacctgatccccctggccaacacaggaattgtgaaccacacccacagcaggatgggcagcatcatgagcactggaattgtgcagggcagcagcggggcccagggcagcggcggcggcagcaccagcgcccactatgctgtgaacagccagttcaccatgggcggccctgccatctccatggccagccccatgagcatccccaccaacaccatgcactacggcagctag

SEQ ID NO: 261083 - DNA, 1827 bp, Artificial Sequence
  derived and/or modified sequence
atggccgccgccgccgccgccgtgggccccggcgccggcggcgccggttccgctgtccccggcggggccggaccatgcgcaacagtgtctgttttccccggcgctcggctcttgaccatcggagacgccaacggcgaaattcagcggcacgccgaacaacaggctttaagactggaagtacgggcaggacccgactccgccggcattgccctgtactcccatgaagacgtgtgtgtgttcaagtgctctgtaagcagagaaactgaatgtagcagagtcggcaaacagtcctttatcatcaccttgggttgcaatagcgtgttgatacagtttgcaacccccaatgatttttgttctttctacaacattctcaagacctgtaggggacatacacttgagcggtccgtcttttccgaacgcacagaagaatctagtgccgttcaatatttccagttctacgggtacctgtcacagcagcaaaatatgatgcaggactacgtgcgaaccggtacatatcagagagctatcctgcagaatcacaccgattttaaagataaaatagtgcttgacgtgggatgtgggagtggaatcttgtcattctttgccgcccaagccggtgcccggaaaatttatgcagtggaagcttctacaatggctcaacacgctgaggtgctagtcaagagtaacaatttgacagacagaatcgtggtcattcctgggaaagtcgaggaggtgtcattacccgaacaagtggacatcatcatttccgagcctatgggctatatgctttttaatgagcgcatgctggagagctatctgcatgctaaaaaatatttgaaacctagcgggaacatgttccccacaatcggtgatgtccacctggctccctttacagatgagcagctgtatatggagcagttcactaaagccaatttctggtatcagccaagctttcacggcgttgatctgtcagcattacggggcgcagccgtggacgaatattttcgtcaaccagtcgtggacaccttcgatattagaatcctgatggcgaaatccgtcaagtacacggtaaacttcctcgaagccaaagagggagacctgcacaggatagaaatcccatttaagtttcatatgctacattccggcctggtacatgggctcgctttctggtttgacgtggcatttatcgggtcaattatgaccgtgtggttgtccaccgcacccacagagcccctgactcactggtatcaggtgagatgcctattccagtcacctctcttcgctaaggcaggagacaccctgagtggaacttgcctactgatcgcaaataagcgccaaagctatgatatatcaatcgttgcacaggtggaccagactggctccaaaagcagtaatcttctcgatctcaagaaccctttctttcgctacacaggcaccactcccagtcccccacctggttcacactacacgtcaccgtcagagaatatgtggaatacggggtccacctacaatctgagttccgggatggctgttgcaggaatgcccacggcctatgatttaagcagcgttatcgcaagcggatcttccgtggggcacaataacctgatccccctggccaatactggaatagtcaaccatactcacagcaggatgggatccatcatgagcacaggcattgtgcagggcagttcgggggctcagggctcaggaggcggtagtacctccgctcattatgcagtgaattcacagttcacaatggggggacccgctatatcaatggcctccccaatgagcatacccactaataccatgcactacggatcatag

SEQ ID NO: 261084 - DNA, 1827 bp, Artificial Sequence
  derived and/or modified sequence
atggccgctgctgcagctgcagtgggtcccggtgcaggcggagccggatccgcagtccctggcggagccggaccgtgcgccacggtttcagtcttccccggagctcgtctgctgacaatcggggatgccaacggagaaattcagagacacgctgagcaacaagcgttacgcctggaagttcgggcaggccctgattctgccggaattgccttgtattcgcatgaagatgtgtgcgtgtttaaatgcagtgtgtcaagggaaaccgagtgttctcgagtggggaaacagagctttattatcacattgggctgcaattctgtgctgatccagtttgccaccccgaacgacttttgttcattctacaatattctgaagacttgcagggggcacaccctggagagaagtgtcttctccgaaagaacagaagaaagttcagccgtccagtatttccaattctatggttatttgtcacagcagcagaatatgatgcaggattatgtgagaacagggacttatcagcgcgcaatccttcagaaccacactgactttaaggataagatcgtgttggatgtggggtgcggctcagggatactaagcttctttgcagcgcaggcaggcgcacggaaaatttatgcagtcgaggcctctaccatggcccaacatgcagaagtgctggtcaaatccaataacctgacagatcggatagtggtgatccccggtaaggtggaggaggtttctctccccgaacaggtggatatcataattagcgaacctatgggctacatgttgtttaatgagcgaatgctcgagtcatacctccatgccaagaaatacctaaaaccttcaggaaatatgtttcctacaattggggatgtccatctggcgccttttaccgatgagcaactttatatggaacagtttacgaaagctaacttctggtatcagccttcattccacggggtggatctgtccgcactccgtggcgcagccgtcgatgaatacttccgccagcccgtcgtcgataccttcgatattagaattttgatggccaaaagtgtgaaatatacagtcaacttcctggaggcaaaagagggcgacttgcaccgcatcgagattccctttaagttccatatgctacacagtgggctggtgcacggtttggccttttggtttgatgtcgcgtttattggcagtatcatgaccgtgtggctcagcacagcacccaccgagccattgacccactggtatcaagtaagatgtttattccagagccctcttttcgccaaggccggtgatacgctgtctggcacctgcctgctgatcgcaaataaacgccaaagctatgatatttccatagtagcccaggtcgaccaaacaggctctaaatcctctaatttattagatctgaaaaaccccttttttagatatacgggaacgactccctcccccccaccgggaagtcattataccagtccttcggagaacatgtggaatacaggctcaacgtacaatctgagctcagggatggccgtggctggtatgccgacagcatacgatctctccagtgttattgcgtcgggctcgagcgtgggccacaacaatctgatccctcttgctaatactggtatcgtgaaccacacacacagccgcatggggtctatcatgagcacaggcatagtgcaaggatcatccggggctcaaggcagcggcggtggttccacgagcgctcattacgcggtgaacagccagtttaccatgggtgggcctgcaatctctatggcttcgcctatgagcattcctactaatacaatgcattacgggtcctag

SEQ ID NO: 261085 - DNA, 2968 bp, Artificial Sequence
  derived and/or modified sequence
ggcggtagcggcagcggcggcggcggcggcggcggcggcggcggcggcggcggcggcggcggcagcggcggcggcctgggcccgggcgcagcggcggcggcggcggggcctggagccggatctaagatggcagcggcggcggcggcggtggggccgggcgcgggcggcgcggggtcggcggtcccgggcggcgcggggccctgcgctaccgtgtcggtgttccccggcgcccgcctcctcaccatcggcgacgcgaacggcgagatccagcggcacgcggagcagcaggcgctgcgcctcgaggtgcgcgccggcccggactcggcgggcatcgccctctacagccatgaagatgtgtgtgtctttaagtgctcagtgtcccgagagacagagtgcagccgtgtgggcaagcagtccttcatcatcaccctgggctgcaacagcgtcctcatccagttcgccacacccaacgatttctgttccttctacaacatcctgaaaacctgccggggccacaccctggagcggtctgtgttcagcgagcggacggaggagtcttctgccgtgcagtacttccagttttatggctacctgtcccagcagcagaacatgatgcaggactacgtgcggacaggcacctaccagcgcgccatcctgcaaaaccacaccgacttcaaggacaagatcgttcttgatgttggctgtggctctgggatcctgtcgttttttgccgcccaagctggagcacggaaaatctacgcggtggaggccagcaccatggcccagcacgctgaggtcttggtgaagagtaacaacctgacggaccgcatcgtggtcatcccgggcaaggtggaggaggtgtcactccccgagcaggtggacatcatcatctcggagcccatgggctacatgctcttcaacgagcgcatgctggagagctacctccacgccaagaagtacctgaagcccagcggaaacatgtttcctaccattggtgacgtccaccttgcacccttcacggatgaacagctctacatggagcagttcaccaaggccaacttctggtaccagccatctttccatggagtggacctgtcggccctccgaggtgccgcggtggatgagtatttccggcagcctgtggtggacacatttgacatccggatcctgatggccaagtctgtcaagtacacggtgaacttcttagaagccaaagaaggagatttgcacaggatagaaatcccattcaaattccacatgctgcattcagggctggtccacggcctggctttctggtttgacgttgctttcatcggctccataatgaccgtgtggctgtccacagccccgacagagcccctgacccactggtaccaggtgcggtgcctgttccagtcaccactgttcgccaaggcaggggacacgctctcagggacatgtctgcttattgccaacaaaagacagagctacgacatcagtattgtggcccaggtggaccagaccggctccaagtccagtaacctcctggatctgaaaaaccccttctttagatacacgggcacaacgccctcacccccacccggctcccactacacatctccctcggaaaacatgtggaacacgggcagcacctacaacctcagcagcgggatggccgtggcagggatgccgaccgcctatgacttgagcagtgttattgccagtggctccagcgtgggccacaacaacctgattcctttagccaacacggggattgtcaatcacacccactcccggatgggctccataatgagcacggggattgtccaagggtcctccggcgcccagggcagtggtggtggcagcacgagtgcccactatgcagtcaacagccagttcaccatgggcggccccgccatctccatggcgtcgcccatgtccatcccgaccaacaccatgcactacgggagctaggggcccgccccgcggactgacagcaccaggaaaccaaatgatgtccctgcccgccgcccccgccgggcggctttcccccttgtactggagaagctcgaacacccggtcacagctctctttgctatgggaactgggacacttttttacacgatgttgccgccgtccccaccctaacccccacctcccggccctgagcgtgtgtcgctgccatattttacacaaaatcatgttgtgggagccctcgtcccccctcctgcccgctctaccctgacctgggcttgtcatctgctggaacaggcgccatggggcctgccagccctgcctgccaggtcccttagcacctgtccccctgcctgtctccagtgggaaggtagcctggccaggcggggcctccccttcgacgaccaggcctcggtcacaacggacgtgacatgctgctttttttaattttatttttttatgaaaagaaccagtgtcaatccgcagaccctctgtgaagccaggccggccgggccgagccagcagcccctctccctagactcagaggcgccgcggggaggggtggccccgccgaggcttcaggggccccctccccaccaaagggttcacctcacacttgaatgtacaacccaccccactgtcgggaaggcctccgtcctcggcccctgcctcttgctgctgtcctgtccccgagcccctgcaggtccccccccgcccccccactcaagagttagagcaggtggctgcaggccttgggcccggagggaaggccactgccggccacttggggcagacacagacacctcaaggatctgtcacggaaggcgtcctttttccttgtagctaacgttaggcctgagtagctcccctccatccttgtagacgctccagtccctactactgtgacggcatttccatccctcccctgcccgggaagggaccttgcagggacctctccctccaaaaaaagaaaaaaagaaaaagaaagaaaaaataaatgaggaaacgtgttgca

SEQ ID NO: 261086 - protein, 377 aa, Artificial Sequence
  derived and/or modified sequence
MYWKHENAAPALPEGCRLPAEGGPATDQVMAQPGSGCKATTRCLEGTAPPAMAQSDAEALAGALDKDEGQASPCTPSTPSVCSPPSAASSVPSAGKNICSSCGLEILDRYLLKVNNLIWHVRCLECSVCRTSLRQQNSCYIKNKEIFCKMDYFSRFGTKCARCGRQIYASDWVRRARGNAYHLACFACFSCKRQLSTGEEFGLVEEKVLCRIHYDTMIENLKRAAENGNGLTLEGAVPSEQDSQPKPAKRARTSFTAEQLQVMQAQFAQDNNPDAQTLQKLADMTGLSRRVIQVWFQNCRARHKKHTPQHPVPPSGAPPSRLPSALSDDIHYTPFSSPERARMVTLHGYIESHPFSVLTLPALPHLPVGAPQLPLSR

SEQ ID NO: 261087 - DNA, 3459 bp, Artificial Sequence
  derived and/or modified sequence
gaggcagcggcggcagcagccagggaggccggggctgcgcgcgggccgggggcgggggctgaggccgggcccggggcggcggggccggcgcctcggctctcctcctgctcctgcagcagcctctgctcccactgcggctgtggtccccctcggcgcagctctccgcgctgcgcgcccgctgagcccgaggttccccggcccatgtactggaagcatgagaacgccgccccggcgttgcccgagggctgccggctgccggccgagggcggccccgccaccgaccaggtgatggcccagccagggtccggctgcaaagcgaccacccgctgtcttgaagggaccgcgccgcccgccatggctcagtctgacgccgaggccctggcaggagctctggacaaggacgagggtcaggcctccccatgtacgcccagcacgccatctgtctgctcaccgccctctgccgcctcctccgtgccgtctgcaggcaagaacatctgctccagctgcggcctcgagatcctggaccgatatctgctcaaggtcaacaacctcatctggcacgtgcggtgcctcgagtgctccgtgtgtcgcacgtcgctgaggcagcagaacagctgctacatcaagaacaaggagatcttctgcaagatggactacttcagccgattcgggaccaagtgtgcccggtgcggccgacagatctacgccagcgactgggtgcggagagctcgcggcaacgcctaccacctggcctgcttcgcctgcttctcgtgcaagcgccagctgtccactggtgaggagttcggcctggtcgaggagaaggtgctctgccgcatccactacgacaccatgattgagaacctcaagagggccgccgagaacgggaacggcctcacgttggagggggcagtgccctcggaacaggacagtcaacccaagccggccaagcgcgcgcggacgtccttcaccgcggaacagctgcaggttatgcaggcgcagttcgcgcaggacaacaaccccgacgctcagacgctgcagaagctggcggacatgacgggcctcagccggagagtcatccaggtgtggtttcaaaactgccgggcgcgtcataaaaagcacacgccgcaacacccagtgccgccctcgggggcgcccccgtcccgccttccctccgccctgtccgacgacatccactacaccccgttcagcagccccgagcgggcgcgcatggtcaccctgcacggctacattgagagtcatcctttttcagtactaacgctgccggcacttccgcatctgcccgtgggcgccccacagctgcccctcagccgctgagatccagtgtccaagctgcggccaggagtccacccacctccgcatccacccccgtccgccatcctgcccaccaccaggtcggttcccgaggcctggcctttccctctcctgctgagaaccagaacccaccaggagcaccacagagtcctcctcttggaaggcagaactccctgaaatctggaatcagggtggaaacagcctgtttttcccatttaaacaggagtcctcttcaacttcagctgattacaataacaaaaggcggaattgaattgtgcgatgccaacggccttctcatttacaggtttttttcccccacattggcctttatttactacttccttggaaccatctctgaattctgaatagctgacaacccccaatgttatccactctgttgcttttgtctggaaaactctacagtgtttgtgggatgtccccaaaggaaagctatgttctaattttatcatttccatctgtctggttatgtcaagttaattcagaaagagaagagacagtgaccaaccctgagaggcctaatagggcagagatggaggcctgcccagactaggaggcagcggggatagacagggaatggggagaagaaagacccccattggtttggaaatcaaggagagggcggtgacatattggaccagaagaggcactagccattttaaggagaggaaagagaaaactctggggtcagggagagaccctacccccacctaattatccagcatatatgtaagaaacatagcagcgatggtattcgatctgtgccatgactcttctgaatgtttggacaggttagagttggggacccctgttggccacttgttgacctctcatagtggtgcttgggccaggtcttctcaatggaaggggaatcccttataggggagagggaacagagcccagtgaaatggcagtcagaatgttaaccctggatccatctctaagtagagagagggtgcccattgcctaggtgagtgtgccaagctcaggattccaactggtgcctctgagcttcccaatcaatacttcctggagccagccccacccacccctgagaacagaggtcagacacagctgcgtaacatccatcctgctacaactcttccaccccaaacaaaagggctcaggctacacacgaccatgatttatgttttcaggggatgcccatttgtcccaagcttatcctgtaattctagaattacctggtgtcctgatgcattttccactagaggttgctaatcagcatgttttagcccaagtccgccttcctgctgtggttaacctgttatgttgcttttggaaggagactctaagacagggaaagcaagttcatggtacatacgcagccattgtctctgtttttacccatggcagacattgctaatcaatggcagctctatttcactgagtctggataaggtttcagagttcaaatgcttgacgttggcacttaacatgaaagcctataggtcattcttgctctgggatctacaggcagggtaggcacaggtgcagcctaagaagggaacctgcttcctctcccttccaaagacagtgacagctgactgagggcaaagagcaggcaccactcagaacgtggtgagtacagctcagctcagcactcagtcagtggtaacttgtgcccagccctgtgctaggcgctgacattaacaggagcaaccagggcccaattcctggccttggagctcaaatctttcctttgatttttgctcctgatcatcaaggccccagtggcaaccatgtggtaagtggccaaccaagccctacccagggtcacccaacacactctgccttgagcctctcctcagggtctattccttgcgtggattatgtggccgtagcatgttacagttcaaacatgtctccactaccctgttaagagcagcctgggaacgtacaggccatcaagactatttatttaaatacaaaaaaaggggaaaacacacacacggaaaaaaaattgtaagcactttttttgtaaaaccaatgtctgttttgttacatacctttcatgtcgtgctttgtaaatgtcttatttgtgtaataaagttaatgcaagtagaagtgctggcactgaaatccagaaca

SEQ ID NO: 261088 - DNA, 1134 bp, Artificial Sequence
  derived and/or modified sequence
atgtactggaagcatgagaacgcagcgcctgcattgccagagggctgtcggcttccagccgagggcggtcccgctaccgaccaggttatggctcagccaggctccgggtgtaaagccacaactagatgcctggaaggaactgcccccccagctatggcacagagcgacgcagaggctcttgccggcgcattagacaaggacgagggccaagccagcccttgcacaccctctacgcctagcgtgtgctcacctcccagcgctgcgtcatccgtaccttccgccggaaagaatatctgctcctcgtgcgggcttgagattttagatagatatctgctgaaggtaaataatctcatctggcatgttcgatgcttggaatgttccgtatgccgaacgtctttgcggcagcagaattcatgctatataaagaataaggagatattttgtaagatggattattttagtcgattcggcactaagtgtgcacgatgcgggcggcagatttacgcctccgactgggtgaggcgagcccgaggcaatgcatatcacctggcctgtttcgcctgtttttcttgcaaaagacaactgtcaaccggcgaggaattcggactggtggaagaaaaagtgctgtgtcgcatccactatgacacaatgatagaaaacctgaaacgagcagcagaaaacgggaatgggcttactctcgaaggagccgtcccatcagagcaggacagccagccgaaacccgcaaaaagagcacgcaccagcttcaccgcagagcagctgcaggtgatgcaagcccaatttgcccaggataataatcctgacgcccagaccctgcagaaacttgccgacatgacaggcttatctcggagggtgatccaggtttggttccagaattgcagggccaggcacaaaaagcatactccccagcatcccgtgcccccttccggggctcctccctccagactgccctccgccttgtctgacgatattcattacacccccttttcaagtcctgaacgcgctcgtatggtcaccctccatggctatattgagtctcacccattcagcgttctcactcttccagcgttgccccatctgcctgtcggcgctccgcagctgcctctctcacggtag

SEQ ID NO: 261089 - DNA, 1134 bp, Artificial Sequence
  derived and/or modified sequence
atgtactggaagcatgaaaatgctgccccagccctgcctgagggctgccgcctgcctgctgagggcggccctgccacagaccaggtgatggcccagcccggcagcggctgcaaggccaccacccgctgcctggagggcacagcccccccagccatggcccagagtgatgctgaggccctggccggggccctggacaaggatgagggccaggccagcccctgcacccccagcacccccagcgtgtgcagcccccccagcgctgccagctctgtgcccagcgctgggaagaacatctgcagcagctgtggcctggagatcctggaccgctacctgctgaaggtgaacaacctgatctggcacgtgcgctgcctggagtgcagcgtgtgcaggaccagcctgcggcagcagaacagctgctacatcaagaacaaggagatcttctgcaagatggactacttcagccgcttcggcaccaagtgtgcccgctgtggccggcagatctatgccagtgactgggtgcggcgggcccggggaaatgcctaccacctggcctgctttgcctgcttcagctgcaagaggcagctgagcactggagaggagtttggcctggtggaggagaaggtgctgtgccgcatccactatgacaccatgattgagaacctgaagagagctgctgaaaatggaaatggcctgaccctggagggcgctgtgcccagcgagcaggacagccagcccaagccagccaagagggcccggaccagcttcaccgctgagcagctgcaggtgatgcaggcccagtttgcccaggacaacaacccagatgcccagaccctgcagaagctggccgacatgacaggcctgagcagaagagtcatccaggtgtggttccagaactgccgggcccggcacaagaagcacaccccccagcaccctgtgcccccatctggggccccacccagccggctgcccagcgccctgagtgatgacatccactacacccccttcagcagccctgagcgggccaggatggtgaccctgcacggctacatcgagagccaccccttctctgtgctgaccctgcctgccctgccccacctgcctgtgggcgccccccagctgcccctgagcaggtag

SEQ ID NO: 261090 - DNA, 1134 bp, Artificial Sequence
  derived and/or modified sequence
atgtactggaagcacgagaacgccgcccccgccctgcccgagggctgtagactaccagctgaggggggcccagcaactgaccaggtaatggctcagccagggagtggctgtaaggccactactcgttgcttagaaggtactgcgccgccggcgatggctcagtcagacgctgaggccttggccggagcgcttgataaagatgagggtcaagcatcaccatgcaccccctccaccccaagtgtgtgttcccccccttctgctgcctcttcagttccgtcagcagggaagaatatttgctcatcctgtggactcgagatcctcgataggtatttgctgaaggttaacaatttgatttggcacgtgaggtgcttagaatgtagtgtgtgtcggacatccctcaggcagcagaactcttgttacatcaagaacaaagaaatattttgcaagatggattatttctcgagattcggaacgaagtgtgctcgatgcgggcggcagatctacgctagtgattgggtgagaagggcgagaggcaatgcatatcacctggcctgttttgcctgcttcagctgtaagcgccagctgagtaccggagaggagtttggtctggttgaagaaaaagtgctctgtcgcatacactacgacaccatgatcgaaaacttgaaacgcgcggccgagaatggtaacgggctaacgttggagggagcagtgcccagcgagcaggattcccagcccaagcctgccaaaagagccaggacttcctttacagcagagcagctgcaggtaatgcaggcccaattcgcacaggacaataatcctgacgcccagacattacagaagctggccgacatgacagggttgagcaggcgcgtcattcaggtgtggtttcaaaactgcagagcgcgacataaaaagcataccccacagcaccctgtgcctcccagcggcgctccacctagcagactacccagcgcactcagtgacgatattcattacacaccattcagctccccagagcgcgcacgaatggttactctacatggctacatcgaaagccacccgttctccgtcctcacgcttccagctttacctcaccttccagtgggggcaccccaattgcctctttctagatag

SEQ ID NO: 261091 - DNA, 1134 bp, Artificial Sequence
  derived and/or modified sequence
atgtactggaagcatgaaaacgcagctccagcccttccagagggatgtcgtctccctgccgagggagggcctgcaactgatcaggtgatggcccaacctggctctgggtgcaaggcaaccacgcgatgtctggagggcacggcccctccagctatggcccagtcggacgctgaagcactggcgggagctctcgataaggacgaagggcaggcatctccttgcacaccatccactccatccgtctgtagcccaccttcagctgcatcttccgtgccctctgctggcaagaatatttgtagctcatgcggcctggagatcctggacaggtatctgcttaaggttaataatctgatatggcacgttcgctgcctcgaatgttctgtctgccggacatcattgcggcagcagaattcatgctacatcaagaacaaagagattttttgcaagatggactacttctctaggttcggtaccaaatgtgctcgctgtggtcgccagatctacgcaagtgattgggtgaggagggccaggggcaacgcgtatcacctggcatgcttcgcttgcttctcgtgcaagcggcagttgagcacaggagaggagttcgggctggtggaggagaaggtgctgtgtagaatacattatgatactatgatcgagaacctgaagcgggctgcagagaatgggaatggccttacactggaaggcgctgttcccagcgagcaggacagccagccaaaaccagccaaacgggctcgcacaagtttcactgcagaacagctgcaggtcatgcaggcacagttcgctcaggataacaacccagatgcacagactttgcagaaactggctgatatgacagggctgagtagaagggttatccaggtctggttccagaactgtagggctcgccataagaagcatactccgcagcatcctgtgcccccttctggcgcacccccaagtaggctcccaagcgctctgtctgatgacattcattacactccattttcatcacctgagcgcgcacgcatggtcaccttgcacggctacatcgaaagtcatcctttcagtgtactcacactacccgcattaccccaccttcccgtcggagcaccccagctgccccttagccgctag

SEQ ID NO: 261092 - DNA, 1134 bp, Artificial Sequence
  derived and/or modified sequence
atgtactggaagcacgagaacgccgcccccgccctgcccgagggctgcagactgcccgccgagggcggccccgccaccgaccaggtgatggcccagcccggcagcggctgcaaggccaccaccagatgcctggagggcaccgccccccccgccatggcccagagcgacgccgaggccctggccggcgccctggacaaggacgagggccaggccagcccctgcacccccagcacccccagcgtgtgcagcccccccagcgccgccagcagcgtgcccagcgccggcaagaacatctgcagcagctgcggcctggagatcctggacagatacctgctgaaggtgaacaacctgatctggcacgtgagatgcctggagtgcagcgtgtgcagaaccagcctgagacagcagaacagctgctacatcaagaacaaggagatcttctgcaagatggactacttcagcagattcggcaccaagtgcgccagatgcggcagacagatctacgccagcgactgggtgagaagagccagaggcaacgcctaccacctggcctgcttcgcctgcttcagctgcaagagacagctgagcaccggcgaggagttcggcctggtggaggagaaggtgctgtgcagaatccactacgacaccatgatcgagaacctgaagagagccgccgagaacggcaacggcctgaccctggagggcgccgtgcccagcgagcaggacagccagcccaagcccgccaagagagccagaaccagcttcaccgccgagcagctgcaggtgatgcaggcccagttcgcccaggacaacaaccccgacgcccagaccctgcagaagctggccgacatgaccggcctgagcagaagagtgatccaggtgtggttccagaactgcagagccagacacaagaagcacaccccccagcaccccgtgccccccagcggcgccccccccagcagactgcccagcgccctgagcgacgacatccactacacccccttcagcagccccgagagagccagaatggtgaccctgcacggctacatcgagagccaccccttcagcgtgctgaccctgcccgccctgccccacctgcccgtgggcgccccccagctgcccctgagcagatag

SEQ ID NO: 261093 - DNA, 819 bp, Artificial Sequence
  derived and/or modified sequence
atggtgcgatgttacgtggaaattgttgaaaagctccctgagcggcgccccgatccagcaacaatcgaaggatgcgcccagttgaagcccaacaactacttactggcctggcatacgcctttcaacgaaaaagggagcggcttcggtgctgctactaaagccatgtgtatcggactgaggtattggaagcccgagagattagagaccctgattgaagtttcggtggagtgcgggagaatgacccacaaccacccgactggctttttggggtccctgtgtaccgccctatttgtgagttttgctgcacaggggaagccgcttgtccagtgggggcgcgacatgctgcgggctgtgccgctggccgaagagtattgtcgcaagactattaggcacactgccgagtatcaagagcattggttttacttcgaagccaaatggcagttttaccttgaagagcgcaagatcagtaaggactcagagaacaaggcaatcttccctgataattacgacgctgaagaacgggagaaaacctaccggaagtggtctagtgagggaagaggggggcgcagagggcacgacgccccaatgatcgcatacgacgcactgctggctgccggcaattcttggaccgaactctgtcaccgcgcgatgtttcacgggggagagtcagcagcaaccggcacaattgccggctgtttgtttggacttctttatggactggatcttgtgccgaaagggctgtaccaagatctggaggataaggagaagctggaagaccttggggcggctctatatcggctcagcaccgaggagaaatag

SEQ ID NO: 261094 - DNA, 531 bp, Artificial Sequence
  derived and/or modified sequence
atggtgaggtgttacgtcgagatcgtggagaaactccccgaacgccggccagacccagctaccatcgagggatgcgcccagttaaaaccaaataactatctcctggcctggcatacacccttcaacgagaagggtagcgggtttggtgccgccaccaaggctatgtgtatcggcctaagatattggaaacctgagcggttggaaaccttaatagaagtgtctgtcgagtgcgggaggatgacgcacaaccaccccacaggtttcttgggcagcctttgtaccgccctctttgtttccttcgccgcacagggtaagcctctggttcaatgggggcgggatatgctcagagccgttcccctcgccgaagaatattgccgcaagaccatccggcacaccgcagaataccaggagcactggttctacttcgaggcgaaatggcagttttaccttgaagaaagaaagatttccaaagatagcgagaataaggcaatttttcctgacaattacgacgcggaggagagggaaaaatag

SEQ ID NO: 261095 - DNA, 819 bp, Artificial Sequence
  derived and/or modified sequence
atggtgcgctgctacgtggagatcgtggagaagctgcctgagaggaggccagaccctgccaccatcgagggctgtgcccagctgaagcccaacaactacctgctggcctggcacacccccttcaatgagaagggcagcggctttggagctgccaccaaggccatgtgcatcggcctgcgctactggaagccagagcggctggagaccctgattgaggtgtctgtggagtgtggccgcatgacccacaaccaccccaccggcttcctgggcagcctgtgcacagccctgtttgtgtcctttgctgcccagggcaagcccctggtgcagtggggccgggacatgctgcgggctgtgcccctggccgaggagtactgcaggaagaccatccgccacacagctgagtaccaggagcactggttctactttgaggccaagtggcagttctacctggaggagaggaagatcagcaaggacagcgagaacaaggccatcttcccagacaactatgatgctgaggagcgggagaagacctacaggaagtggagcagcgagggccggggcggcagaagaggacatgatgcccccatgattgcctatgatgccctgctggccgccggcaacagctggacagagctgtgccaccgggccatgtttcatggaggagagagcgctgccaccggcaccatcgccggctgcctgtttggcctgctgtatggcctggacctggtgcccaagggcctgtaccaggacctggaggacaaggagaagctggaggacctgggcgccgccctgtaccgcctgagcacagaggagaagtag

SEQ ID NO: 261096 - DNA, 531 bp, Artificial Sequence
  derived and/or modified sequence
atggtgcgctgctacgtggagatcgtggagaagctgcctgagaggaggccagaccctgccaccatcgagggctgtgcccagctgaagcccaacaactacctgctggcctggcacacccccttcaatgagaagggcagcggctttggagctgccaccaaggccatgtgcatcggcctgcgctactggaagccagagcggctggagaccctgattgaggtgtctgtggagtgtggccgcatgacccacaaccaccccaccggcttcctgggcagcctgtgcacagccctgtttgtgtcctttgctgcccagggcaagcccctggtgcagtggggccgggacatgctgcgggctgtgcccctggccgaggagtactgcaggaagaccatccgccacacagctgagtaccaggagcactggttctactttgaggccaagtggcagttctacctggaggagaggaagatcagcaaggacagcgagaacaaggccatcttcccagacaactatgatgctgaggagcgggagaagtag

SEQ ID NO: 261097 - DNA, 819 bp, Artificial Sequence
  derived and/or modified sequence
atggtgcggtgctacgtggagatcgtggagaagctgcccgagcggcggccggaccccgccacaatagaaggttgcgcccaactgaagcctaataactatttgctggcctggcatacaccctttaatgagaaagggagcggatttggggcggctacgaaggccatgtgcataggactgaggtactggaaaccggagaggcttgaaaccctgatagaggtgtccgtggagtgtggacgaatgacccataatcatcctaccgggtttctggggtccctctgcactgctctctttgtgagcttcgccgctcaaggaaaaccactggtccagtggggccgagacatgctcagagccgtgcctttggccgaggagtactgtagaaagacaatccggcacacagctgagtaccaggaacattggttttacttcgaagcaaagtggcagttctacctggaagagaggaaaattagtaaggactccgagaataaagcaatatttccagataactacgatgcggaggaacgtgaaaagacctaccgcaagtggagtagcgagggcaggggcggacgcaggggccacgacgctcctatgatcgcctacgatgcccttttggcagccgggaatagttggacagaactttgtcacagggccatgtttcatggaggagagtcagccgcgaccgggactatagcaggatgtctgttcggtctgctgtatggtttggatttggtgccaaaaggactgtaccaagacctggaagataaggagaaattagaagatttgggtgccgcattgtaccgcttgtcaacggaggagaaatag

SEQ ID NO: 261098 - DNA, 531 bp, Artificial Sequence
  derived and/or modified sequence
atggtgcggtgctacgtggagatcgtggagaagctgcccgagcggcgtccagatcccgccactattgagggctgtgctcagctcaagccaaacaattacctgcttgcttggcacacaccttttaacgaaaagggcagcggcttcggggcggcaaccaaggcaatgtgcatcggcctcagatactggaagccagaacggctagaaactcttatcgaggtctccgtggaatgcggaaggatgactcataatcatccaacgggctttctggggagcctgtgtacagctctgtttgtatctttcgccgcgcagggaaaacctctggtgcaatggggtcgggatatgctccgagcagtgccactggcagaggaatactgcagaaagaccataaggcatactgcggaatatcaggagcattggttctacttcgaggccaagtggcaattctacctggaggaacgaaagatttctaaggactccgagaataaggcgatcttcccagacaattacgacgctgaggaaagggagaaatag

SEQ ID NO: 261099 - DNA, 819 bp, Artificial Sequence
  derived and/or modified sequence
atggtgcgctgttacgtggaaatcgtggaaaagctgcccgaaagaagaccagacccagccaccattgaagggtgcgctcagctgaaaccgaataattacctgctagcgtggcacaccccattcaacgagaagggctcgggattcggggcagccactaaagccatgtgcatcggcctgcgttattggaagcctgagcgcctggagactttaatagaagtgagtgtggaatgcggaagaatgacgcacaatcacccaactgggttcctgggtagcctctgcaccgcgttgttcgtcagcttcgcagcccagggtaagcccctcgtgcagtggggcagagatatgctccgcgcagtgccactggctgaggaatattgccggaaaaccatcagacacacggcagagtaccaagagcactggttttatttcgaagcgaaatggcaattctatctagaggagcgtaaaatctcaaaagattctgaaaataaggccatcttcccagacaactacgacgcagaagaaagagagaagacctacaggaaatggtctagcgaagggagaggaggccgtcgtggccatgacgctcccatgattgcttacgatgccctactagcagcaggcaattcatggaccgaactctgtcaccgcgcaatgttccacggaggagaaagcgctgccacagggactatcgcgggatgtctcttcggtcttctgtatgggcttgacctggttcccaaaggactctaccaggatctggaagataaagagaagcttgaggatctaggggctgctctgtatagattgtctacagaagaaaaatag

SEQ ID NO: 261100 - DNA, 531 bp, Artificial Sequence
  derived and/or modified sequence
atggtccggtgctatgtcgagatcgtcgaaaaacttcctgagaggcgacctgaccccgctaccatcgaaggatgtgctcagttaaaacctaacaactacctacttgcttggcacactccctttaatgagaagggcagcggcttcggagcagccactaaggctatgtgcatcgggctgcggtactggaaacctgagcgccttgaaaccctgattgaagtgtccgtggagtgtggccgtatgacccacaaccatcctactgggttccttggttcgctgtgtaccgcattgttcgtcagtttcgcggctcaggggaaacctctagtccagtggggtagagatatgctccgcgcagtgcctctggctgaggagtactgtcggaaaaccatccggcacactgctgagtatcaggagcactggttttactttgaggccaagtggcagttttacttggaggagaggaaaatctctaaggattccgaaaacaaagccatcttcccggataactacgacgctgaggagagagaaaaatag

SEQ ID NO: 261101 - DNA, 819 bp, Artificial Sequence
  derived and/or modified sequence
atggtgagatgctacgtggagatcgtggagaagctgcccgagagaagacccgaccccgccaccatcgagggctgcgcccagctgaagcccaacaactacctgctggcctggcacacccccttcaacgagaagggcagcggcttcggcgccgccaccaaggccatgtgcatcggcctgagatactggaagcccgagagactggagaccctgatcgaggtgagcgtggagtgcggcagaatgacccacaaccaccccaccggcttcctgggcagcctgtgcaccgccctgttcgtgagcttcgccgcccagggcaagcccctggtgcagtggggcagagacatgctgagagccgtgcccctggccgaggagtactgcagaaagaccatcagacacaccgccgagtaccaggagcactggttctacttcgaggccaagtggcagttctacctggaggagagaaagatcagcaaggacagcgagaacaaggccatcttccccgacaactacgacgccgaggagagagagaagacctacagaaagtggagcagcgagggcagaggcggcagaagaggccacgacgcccccatgatcgcctacgacgccctgctggccgccggcaacagctggaccgagctgtgccacagagccatgttccacggcggcgagagcgccgccaccggcaccatcgccggctgcctgttcggcctgctgtacggcctggacctggtgcccaagggcctgtaccaggacctggaggacaaggagaagctggaggacctgggcgccgccctgtacagactgagcaccgaggagaagtag

SEQ ID NO: 261102 - DNA, 531 bp, Artificial Sequence
  derived and/or modified sequence
atggtgagatgctacgtggagatcgtggagaagctgcccgagagaagacccgaccccgccaccatcgagggctgcgcccagctgaagcccaacaactacctgctggcctggcacacccccttcaacgagaagggcagcggcttcggcgccgccaccaaggccatgtgcatcggcctgagatactggaagcccgagagactggagaccctgatcgaggtgagcgtggagtgcggcagaatgacccacaaccaccccaccggcttcctgggcagcctgtgcaccgccctgttcgtgagcttcgccgcccagggcaagcccctggtgcagtggggcagagacatgctgagagccgtgcccctggccgaggagtactgcagaaagaccatcagacacaccgccgagtaccaggagcactggttctacttcgaggccaagtggcagttctacctggaggagagaaagatcagcaaggacagcgagaacaaggccatcttccccgacaactacgacgccgaggagagagagaagtag

SEQ ID NO: 261103 - protein, 500 aa, Artificial Sequence
  derived and/or modified sequence
MVGRSCGVATQRQGGGQRPTNLALTLSSSPAHSTALPWLPPRSLQLLSGHSVPAQPTPHLPSACGGPTRVTLGEERAWRSHGSNAGGHTCLPRRTAGAGSLTPGGERGGNNAGHTVVVDGKEYDFHLLPSGIINTKAVSFIGNGVVIHLPGLFEEAEKNEKKGLKDWEKRLIISDRAHLVFDFHQAVDGLQEVQRQAQEGKNIGTTKKGIGPTYSSKAARTGLRICDLLSDFDEFSSRFKNLAHQHQSMFPTLEIDIEGQLKRLKGFAERIRPMVRDGVYFMYEALHGPPKKILVEGANAALLDIDFGTYPFVTSSNCTVGGVCTGLGIPPQNIGDVYGVVKAYTTRVGIGAFPTEQINEIGGLLQTRGHEWGVTTGRKRRCGWLDLMILRYAHMVNGFTALALTKLDILDVLGEVKVGVSYKLNGKRIPYFPANQEMLQKVEVEYETLPGWKADTTGARRWEDLPPQAQNYIRFVENHVGVAVKWVGVGKSRESMIQLF

SEQ ID NO: 261104 - DNA, 1503 bp, Artificial Sequence
  derived and/or modified sequence
atggtgggcagaagctgcggcgtggccacccagagacagggcggcggccagagacccaccaacctggccctgaccctgagcagcagccccgcccacagcaccgccctgccctggctgccccccagaagcctgcagctgctgagcggccacagcgtgcccgcccagcccaccccccacctgcccagcgcctgcggcggccccaccagagtgaccctgggcgaggagagagcctggagaagccacggcagcaacgccggcggccacacctgcctgcccagaagaaccgccggcgccggcagcctgacccccggcggcgagagaggcggcaacaacgccggccacaccgtggtggtggacggcaaggagtacgacttccacctgctgcccagcggcatcatcaacaccaaggccgtgagcttcatcggcaacggcgtggtgatccacctgcccggcctgttcgaggaggccgagaagaacgagaagaagggcctgaaggactgggagaagagactgatcatcagcgacagagcccacctggtgttcgacttccaccaggccgtggacggcctgcaggaggtgcagagacaggcccaggagggcaagaacatcggcaccaccaagaagggcatcggccccacctacagcagcaaggccgccagaaccggcctgagaatctgcgacctgctgagcgacttcgacgagttcagcagcagattcaagaacctggcccaccagcaccagagcatgttccccaccctggagatcgacatcgagggccagctgaagagactgaagggcttcgccgagagaatcagacccatggtgagagacggcgtgtacttcatgtacgaggccctgcacggcccccccaagaagatcctggtggagggcgccaacgccgccctgctggacatcgacttcggcacctaccccttcgtgaccagcagcaactgcaccgtgggcggcgtgtgcaccggcctgggcatccccccccagaacatcggcgacgtgtacggcgtggtgaaggcctacaccaccagagtgggcatcggcgccttccccaccgagcagatcaacgagatcggcggcctgctgcagaccagaggccacgagtggggcgtgaccaccggcagaaagagaagatgcggctggctggacctgatgatcctgagatacgcccacatggtgaacggcttcaccgccctggccctgaccaagctggacatcctggacgtgctgggcgaggtgaaggtgggcgtgagctacaagctgaacggcaagagaatcccctacttccccgccaaccaggagatgctgcagaaggtggaggtggagtacgagaccctgcccggctggaaggccgacaccaccggcgccagaagatgggaggacctgcccccccaggcccagaactacatcagattcgtggagaaccacgtgggcgtggccgtgaagtgggtgggcgtgggcaagagcagagagagcatgatccagctgttctag

SEQ ID NO: 261105 - DNA, 1969 bp, Artificial Sequence
  derived and/or modified sequence
ggcgtcgtggggaggagcgtggcgtcggcgtcgtggggaggagcgtggcgtcggcgtcgtggggaggagcgtggcgtcggcgtcgtggggaggagcgtggcgtcggcgtcgtggggaggagcgtggcgtcggcgtcgtggggaggagcgtggcgtcggcatggtggggaggagctgtggggtggcaacccagaggcaaggaggtgggcagaggcccacgaacctggccctgaccctcagctcgtccccagctcacagcacagccctcccctggctgcctccaaggagtctccagttactgagtggccactccgtgccagctcagcccacccctcaccttcccagtgcctgtggaggcccaactagggtgacgctgggagaggagagggcttggaggagccacgggtcaaatgcaggaggccacacctgcctgcccaggaggactgcaggagccggatccttaacacctggaggggagcgggggggcaacaacgccggccacacggtggtggtggatgggaaagagtacgacttccacctgctgcccagcggcatcatcaacaccaaggccgtgtccttcattggcaacggggtggtcatccacttgccaggcttgtttgaggaagcagagaagaatgaaaagaaaggcctgaaggactgggagaagaggctcatcatctctgacagagcccaccttgtgtttgattttcaccaggctgtcgacggacttcaggaagtgcagcgccaggcacaagaggggaagaatataggcaccaccaagaagggaatcggaccaacctactcttccaaagctgcccggacaggcctccgcatctgcgacctcctgtcagattttgatgagttttcctccagattcaagaacctggcccaccagcaccagtcgatgttccccaccctggaaatagacattgaaggccaactcaaaaggctcaagggctttgctgagcggatcagacccatggtccgagatggtgtttactttatgtatgaggcactccacggcccccccaagaagatcctggtggagggtgccaacgccgccctcctcgacattgacttcgggacctacccctttgtgacttcatccaactgcaccgtgggcggtgtgtgcacgggcctgggcatccccccgcagaacataggtgacgtgtatggcgtggtgaaagcctataccacacgtgtgggcatcggggccttccccaccgagcagatcaacgagattggaggcctgctgcagacccgcggccacgagtggggagtgaccacaggcaggaagaggcgctgcggctggctcgacctgatgattctaagatatgctcacatggtcaacggattcactgcgctggccctgacgaagctggacatcctggacgtactgggtgaggttaaagtcggtgtctcatacaagctgaacgggaaaaggattccctatttcccagctaaccaggagatgcttcagaaggtcgaagttgagtatgaaacgctgcctgggtggaaagcagacaccacaggcgccaggaggtgggaggacctgcccccacaggcccagaactacatccgctttgtggagaatcacgtgggagtcgcagtcaaatgggttggtgttggcaagtcaagagagtcgatgatccagctgttttagtcacagactgagctgatcccaacaggccctggcagcgtctggacttgtgtaaacagcagcagtcacgttcctcggccgccacaaccaacaccaaagcaggaaaaccattttctgtacttttatatttctgttcaacctgttggtttctacaatgattttaaacattggaaagccagccttgtgtatatttttaaaaattatattcaaaatgagccaaagtgctcagagaccttctatgacacattagtgtcacatggttgcgtgtccagccgaagcagtgtaataaacatctccaatggccactgaa

SEQ ID NO: 261106 - DNA, 1503 bp, Artificial Sequence
  derived and/or modified sequence
atggtgggtcggtcatgcggggtggccactcagcggcaggggggcggacagaggcccactaacctggcgctgactctgagcagcagtccggcacatagcacagccttgccttggctgcccccccgcagcttgcagctcctaagtggccactctgtgccagcccaacccacacctcaccttccctctgcatgcggcggcccaactagggtgacgctgggagaagagagagcatggcgctctcatggctcgaacgctggcggtcatacttgccttccacgcagaacagctggagccggatctcttacacccggtggggagcgtggaggtaacaatgccggccacactgtcgtggttgacggcaaggagtacgactttcacttactcccgtccggaatcattaacaccaaggccgtcagtttcatcggcaatggtgttgtgatccacctgccagggctgtttgaggaggctgagaagaacgagaagaaaggccttaaggactgggagaaaagacttatcatcagcgaccgcgctcacctagtcttcgactttcatcaggcggtagatggtttgcaggaggtccagagacaggctcaggaagggaaaaacattggtaccaccaaaaagggcataggccctacttactcttccaaggccgcccgcactggtttgagaatatgcgatctgctttctgattttgacgagttctccagtaggttcaagaacctcgctcatcagcaccagtccatgttcccgactctcgagatcgacattgaggggcagctgaagcggctaaaaggattcgccgagagaatcagacctatggttagggatggcgtgtatttcatgtatgaagcgctccatggcccaccaaaaaagattctggtggagggtgcgaatgcggccttgttagatatcgacttcggcacctaccctttcgtgacctcttctaactgtaccgttggtggagtatgtacaggcttgggaatccctcctcagaacatcggagacgtgtatggagtcgtcaaagcttatacaacaagggtcggcatcggggcattcccaacagaacagatcaacgagattggcggcctcctgcagacgcgaggccatgagtggggtgtaacaaccgggcgaaagcggaggtgcggctggctggatcttatgatcttacgctacgcgcacatggtcaatggcttcacggccctcgcacttacgaagctagatatccttgatgtgttaggtgaggtgaaggtcggagtttcttacaaactcaacgggaaacggatcccttatttcccagcgaatcaggaaatgctgcaaaaagtcgaagtggagtatgagacactgccgggctggaaagcggacaccacgggtgctcggaggtgggaggatttacctccccaagcacagaactatatcagatttgtcgaaaaccatgtcggtgttgccgtcaagtgggtaggagtcggaaagtcaagggagtccatgatacagctcttttag

SEQ ID NO: 261107 - DNA, 1503 bp, Artificial Sequence
  derived and/or modified sequence
atggtgggccgcagctgtggggtggccacccagaggcagggcggcggccagaggcccaccaacctggccctgaccctgagcagcagccctgcccacagcacagccctgccctggctgccccccaggagcctgcagctgctgagcggccacagcgtgcctgcccagcccaccccccacctgcccagcgcctgtggcggccccaccagggtgaccctgggggaggagcgggcctggaggagccacggcagcaatgccggcggccacacctgcctgcccaggagaacagctggggccggcagcctgaccccaggaggagagcggggcggcaacaatgccggccacacagtggtggtggatggcaaggagtatgacttccacctgctgcccagcggcatcatcaacaccaaggctgtgtccttcatcggaaatggagtggtgatccacctgcccggcctgtttgaggaggccgagaagaatgagaagaagggcctgaaggactgggagaagaggctcatcatcagtgaccgggcccacctggtgtttgacttccaccaggccgtggatggcctgcaggaggtgcagaggcaggcccaggagggcaagaacatcggcaccaccaagaagggcatcggccccacctacagcagcaaggccgccaggacaggcctgcgcatctgtgacctgctgagtgactttgatgagttcagcagccgcttcaagaacctggcccaccagcaccagagcatgttccccaccctggagattgatattgagggccagctgaagaggctgaagggctttgctgagcgcatccggcccatggtgagagatggagtgtacttcatgtatgaggccctgcacggcccccccaagaagatcctggtggagggcgccaatgctgccctgctggacatcgactttggcacctacccctttgtgaccagcagcaactgcaccgtgggcggcgtgtgcaccggcctgggcatccccccccagaacattggagatgtgtatggagtggtgaaggcctacaccaccagggtgggcatcggggccttccccacagagcagatcaatgaaattggaggcctgctgcagacccggggccacgagtggggcgtgaccaccggcaggaagaggcgctgtggctggctggacctgatgatcctgcgctatgcccacatggtgaatggcttcaccgccctggccctgaccaagctggacatcctggatgtgctgggggaggtgaaggtgggcgtgtcctacaagctgaatggcaagaggatcccctacttccctgccaaccaggagatgctgcagaaggtggaggtggagtatgagaccctgcccggctggaaggctgacaccactggagcccggcgctgggaggacctgcccccccaggcccagaactacatccgctttgtggagaaccacgtgggcgtggccgtgaagtgggtgggcgtgggcaagagccgggagagcatgatccagctgttctag

SEQ ID NO: 261108 - DNA, 1503 bp, Artificial Sequence
  derived and/or modified sequence
atggtgggccggagctgcggcgtggccacccagcggcagggcggcgggcagcgaccaacaaatctcgcccttactctgagctccagccctgcccatagtacagcactgccatggctaccaccccgctcccttcagctgctatcagggcacagtgtgccagcacagcccacaccccacctgccttctgcctgtggtggacccacaagagtcacccttggcgaggaaagggcatggcgctcgcatgggagcaacgcaggtggccacacatgtctgccgaggcgcaccgccggcgctggctcactcacgcccggcggtgaaagaggaggaaataacgctggacacacagtcgtggtggacggtaaggagtatgattttcacctactcccctctggtattattaataccaaggccgttagctttatcggaaacggagtggtgatccacttgcccggcttattcgaagaagccgaaaagaatgagaagaaaggtctgaaagactgggagaaacggctgatcatctccgatcgagctcacctggtgtttgatttccaccaagctgttgacggcctgcaggaggttcagcggcaagcacaggagggaaaaaacatagggactaccaagaagggaatcggccctacttactccagcaaggccgcacgaacggggctcaggatttgcgatctcctttcagacttcgatgaattttccagcaggtttaaaaacctggcccaccagcatcagtccatgttcccgactctggagatcgacatagaaggccagctgaaaagactgaagggcttcgctgagagaatccgccccatggtccgagatggcgtctattttatgtacgaggcactgcacggaccccccaagaaaattttagtggagggagccaatgctgcgctgctggacatcgacttcggcacatatccatttgttacgtccagtaattgcactgtgggcggtgtctgcacagggctcggaataccacctcagaacataggagacgtgtatggagtggtcaaagcctacacaaccagggtgggcataggagcttttccaaccgagcagattaatgaaatcggcggcctgctgcagactagaggacacgagtggggagtgaccactggccgcaagcgaagatgcggatggttggatctgatgatcctgcggtatgctcatatggtgaacggcttcactgctctggctctcacaaaactagatatactggatgtcttgggagaagtgaaggtcggagtatcttacaagctcaacggcaagcggatcccatattttccggcgaatcaagagatgctgcaaaaggttgaggttgaatacgagactttgcctggatggaaagcagataccacaggagccagacggtgggaggatctcccaccacaagctcagaactacattcgcttcgtggagaaccacgtgggtgtcgcggtgaaatgggtcggagtcgggaagtctagagagtccatgattcagctgttttag

SEQ ID NO: 261109 - DNA, 1503 bp, Artificial Sequence
  derived and/or modified sequence
atggttggcaggagctgcggggtcgccacgcaaaggcaggggggtggacagaggcctaccaatctggctcttacactgagctcttccccagcgcactctaccgccctcccctggttgcccccacgctcactgcagctactgagcgggcacagtgtaccagcacagccaacacctcacctgcctagcgcctgtggcggtcctacaagggtgactttgggagaggagcgggcatggcggtctcacggatccaatgcgggagggcacacatgcctgcccagaaggaccgcaggagcgggaagcttgacgcctggcggtgagagaggaggcaacaacgccggtcacaccgtggttgtggatggcaaggaatacgacttccacctgctgccttctggtatcattaataccaaagccgtgtccttcatcggtaatggagtcgtgattcatctgcccggactctttgaggaggcggaaaagaatgaaaaaaaaggcttgaaagattgggagaaacggttgatcatctccgatcgggcacatctggtgtttgattttcaccaggcagtggatggactccaggaagtgcagagacaggcacaagaaggaaagaacattggcactaccaagaaaggtatagggccaacgtatagcagcaaggccgctcgaacaggcttgagaatttgtgacctgttgagcgatttcgatgagtttagctctcgattcaagaacctggcccaccagcaccagtctatgttcccaaccctggagatcgatattgagggtcagctgaagagactaaaagggttcgcagagaggatccggccaatggtgagggacggcgtgtattttatgtatgaagccctgcacggccctccaaagaaaatccttgtggagggagcgaacgcagctctgctggatattgacttcggaacataccctttcgtgacctccagtaactgcaccgtagggggagtatgtaccgggctaggcattccaccccaaaatattggtgatgtttacggtgttgtcaaggcatacacgacaagggttggcataggagcatttccaacggagcaaataaatgagattggagggctgctgcagaccagggggcacgagtggggggtgactaccggtagaaagagaaggtgtggttggctggacttgatgattctcaggtacgcgcacatggtcaacggcttcacggccctcgcgctgacgaagctggacattctcgatgtactaggcgaagtgaaggtgggcgtgagttacaagttaaatggaaaacggataccatactttccagcgaaccaggagatgcttcagaaagtagaagtggaatacgagactctccccggttggaaagcggacacaactggggctaggcgctgggaagatctgccgcctcaggcccagaattacatcagattcgtagagaaccacgtcggagtagccgtaaaatgggttggcgtggggaagtcccgcgaatcaatgatccagttgttttag

SEQ ID NO: 261110 - DNA, 270 bp, Artificial Sequence
  derived and/or modified sequence
atgaacgccaaggtggtggtggtgctggtgctggtgctgaccgccctgtgcctgagcgacggcaagcccgtgagcctgagctacagatgcccctgcagattcttcgagagccacgtggccagagccaacgtgaagcacctgaagatcctgaacacccccaactgcgccctgcagatcgtggccagactgaagaacaacaacagacaggtgtgcatcgaccccaagctgaagtggatccaggagtacctggagaaggccctgaacaagtag

SEQ ID NO: 261111 - DNA, 360 bp, Artificial Sequence
  derived and/or modified sequence
atgaacgccaaggtggtggtggtgctggtgctggtgctgaccgccctgtgcctgagcgacggcaagcccgtgagcctgagctacagatgcccctgcagattcttcgagagccacgtggccagagccaacgtgaagcacctgaagatcctgaacacccccaactgcgccctgcagatcgtggccagactgaagaacaacaacagacaggtgtgcatcgaccccaagctgaagtggatccaggagtacctggagaaggccctgaacaagggcagaagagaggagaaggtgggcaagaaggagaagatcggcaagaagaagagacagaagaagagaaaggccgcccagaagagaaagaactag

SEQ ID NO: 261112 - DNA, 1857 bp, Artificial Sequence
  derived and/or modified sequence
actttcactctccgtcagccgcattgcccgctcggcgtccggcccccgacccgcgctcgtccgcccgcccgcccgcccgcccgcgccatgaacgccaaggtcgtggtcgtgctggtcctcgtgctgaccgcgctctgcctcagcgacgggaagcccgtcagcctgagctacagatgcccatgccgattcttcgaaagccatgttgccagagccaacgtcaagcatctcaaaattctcaacactccaaactgtgcccttcagattgtagcccggctgaagaacaacaacagacaagtgtgcattgacccgaagctaaagtggattcaggagtacctggagaaagctttaaacaagtaagcacaacagccaaaaaggactttccgctagacccactcgaggaaaactaaaaccttgtgagagatgaaagggcaaagacgtgggggagggggccttaaccatgaggaccaggtgtgtgtgtggggtgggcacattgatctgggatcgggcctgaggtttgccagcatttagaccctgcatttatagcatacggtatgatattgcagcttatattcatccatgccctgtacctgtgcacgttggaacttttattactggggtttttctaagaaagaaattgtattatcaacagcattttcaagcagttagttccttcatgatcatcacaatcatcatcattctcattctcattttttaaatcaacgagtacttcaagatctgaatttggcttgtttggagcatctcctctgctcccctggggagtctgggcacagtcaggtggtggcttaacagggagctggaaaaagtgtcctttcttcagacactgaggctcccgcagcagcgcccctcccaagaggaaggcctctgtggcactcagataccgactggggctgggcgccgccactgccttcacctcctctttcaacctcagtgattggctctgtgggctccatgtagaagccactattactgggactgtgctcagagacccctctcccagctattcctactctctccccgactccgagagcatgcttaatcttgcttctgcttctcatttctgtagcctgatcagcgccgcaccagccgggaagagggtgattgctggggctcgtgccctgcatccctctcctcccagggcctgccccacagctcgggccctctgtgagatccgtctttggcctcctccagaatggagctggccctctcctggggatgtgtaatggtccccctgcttacccgcaaaagacaagtctttacagaatcaaatgcaattttaaatctgagagctcgctttgagtgactgggttttgtgattgcctctgaagcctatgtatgccatggaggcactaacaaactctgaggtttccgaaatcagaagcgaaaaaatcagtgaataaaccatcatcttgccactaccccctcctgaagccacagcagggtttcaggttccaatcagaactgttggcaaggtgacatttccatgcataaatgcgatccacagaaggtcctggtggtatttgtaactttttgcaaggcatttttttatatatatttttgtgcacatttttttttacgtttctttagaaaacaaatgtatttcaaaatatatttatagtcgaacaattcatatatttgaagtggagccatatgaatgtcagtagtttatacttctctattatctcaaactactggcaatttgtaaagaaatatatatgatatataaatgtgattgcagcttttcaatgttagccacagtgtattttttcacttgtactaaaattgtatcaaatgtgacattatatgcactagcaataaaatgctaattgtttcatggta

SEQ ID NO: 261113 - DNA, 470 bp, Artificial Sequence
  derived and/or modified sequence
cccgcgctcgtccgcccgcccgcccgcccgcccgcgccatgaacgccaaggtcgtggtcgtgctggtcctcgtgctgaccgcgctctgcctcagcgacgggaagcccgtcagcctgagctacagatgcccatgccgattcttcgaaagccatgttgccagagccaacgtcaagcatctcaaaattctcaacactccaaactgtgcccttcagattgtagcccggctgaagaacaacaacagacaagtgtgcattgacccgaagctaaagtggattcaggagtacctggagaaagctttaaacaaggggcgcagagaagaaaaagtggggaaaaaagaaaagataggaaaaaagaagcgacagaagaagagaaaggctgcccagaaaaggaaaaactagttatctgccacctcgagatggaccacagttcacttgctctcggcgctttgtaaatttgctcgatcctcctcc

SEQ ID NO: 261114 - DNA, 270 bp, Artificial Sequence
  derived and/or modified sequence
atgaacgccaaagttgtggtcgtgctggtgctggtgttgacagcactgtgcctaagtgatggcaagcccgtgagtttgtcttataggtgtccctgtagatttttcgaatcacatgtcgcccgggctaatgtcaaacatttgaagattctgaatacccccaattgtgcgctgcagatcgtagctagattaaagaataacaacagacaggtgtgtatcgatccgaagctaaagtggatccaagaatacctggagaaagccctcaataaatag

SEQ ID NO: 261115 - DNA, 360 bp, Artificial Sequence
  derived and/or modified sequence
atgaatgctaaggtggtggtcgtgctggttttggtgcttacagccctctgtctgagtgacggcaagccagtttcactgtcctatcgttgcccatgtagattttttgagtctcatgtcgcccgggccaacgtaaaacacctgaagatactgaatacgcctaattgcgcactacagatcgttgcgcgcctcaagaataacaaccgccaggtgtgtattgatccaaagctcaaatggattcaggagtacctagaaaaggccctgaataagggtcgacgggaagaaaaagttggtaagaaggagaaaattggcaagaagaagcggcaaaaaaagcgtaaggccgcacaaaagagaaagaactag

SEQ ID NO: 261116 - DNA, 270 bp, Artificial Sequence
  derived and/or modified sequence
atgaatgccaaggtggtggtggtgctggtgctggtgctgacagccctgtgcctgagtgatggcaagcctgtgtccctgagctaccgctgcccctgccgcttctttgagagccacgtggcccgggccaacgtgaagcacctgaagatcctgaacacccccaactgtgccctgcagatcgtggcccggctgaagaacaacaaccggcaggtgtgcatcgaccccaagctgaagtggatccaggagtacctggagaaggccctgaacaagtag

SEQ ID NO: 261117 - DNA, 360 bp, Artificial Sequence
  derived and/or modified sequence
atgaatgccaaggtggtggtggtgctggtgctggtgctgacagccctgtgcctgagtgatggcaagcctgtgtccctgagctaccgctgcccctgccgcttctttgagagccacgtggcccgggccaacgtgaagcacctgaagatcctgaacacccccaactgtgccctgcagatcgtggcccggctgaagaacaacaaccggcaggtgtgcatcgaccccaagctgaagtggatccaggagtacctggagaaggccctgaacaagggcagaagagaggagaaggtgggcaagaaggagaagattggcaagaagaagaggcagaagaagaggaaggccgcccagaagaggaagaactag

SEQ ID NO: 261118 - DNA, 270 bp, Artificial Sequence
  derived and/or modified sequence
atgaacgccaaggtggtggtggtgctggtgctggtgctgaccgccctgtgtctcagcgacggaaagcccgtgagtctgtcatatcgctgtccttgtagatttttcgagagtcatgtggcccgggcaaatgttaaacacctgaaaatcctgaatacccctaactgcgcactgcagatagttgcccggcttaagaacaataatcgtcaggtgtgcattgatccgaaacttaaatggatccaggagtatttggagaaagctctgaacaagtag

SEQ ID NO: 261119 - DNA, 360 bp, Artificial Sequence
  derived and/or modified sequence
atgaacgccaaggtggtggtggtgctggtgctggtgctgaccgccttgtgtctgtccgatggcaaaccagtgagtctgagttatcgttgtccatgtaggttctttgagagccacgttgcccgggcaaatgtcaagcatctcaaaatcttaaatacaccaaattgtgctctccagatagtcgccagacttaagaacaacaacaggcaagtatgtattgatccaaagctgaaatggatccaggaatacctggaaaaggccctgaacaagggcaggagggaagagaaagtgggcaagaaagagaagattggaaagaaaaaacgacagaagaagcgcaaagcagcacagaagaggaagaactag

SEQ ID NO: 261120 - DNA, 270 bp, Artificial Sequence
  derived and/or modified sequence
atgaatgctaaggtggtggtggttctcgtcctagtgctgactgccctttgtttgtctgacggcaaacccgtgtctctgtcctaccgctgcccatgcaggtttttcgagtcccacgttgctcgcgctaatgtgaagcacctcaagatcctaaacacccctaactgtgccctgcagattgttgcaagactgaagaataataatagacaggtgtgcatcgacccaaagctcaaatggatccaggagtatctggagaaggccctgaataaatag

SEQ ID NO: 261121 - DNA, 360 bp, Artificial Sequence
  derived and/or modified sequence
atgaacgctaaagtggttgtggtgctagtgttagttcttactgccctctgcctatcagatggcaagcccgtttctctctcctaccgatgtccttgccgcttctttgaaagccacgttgcaagagccaacgtgaagcacctgaaaatcctgaatactccgaattgcgctctgcaaattgtggcgaggctgaagaacaacaataggcaagtgtgcattgatcctaaacttaagtggattcaagaataccttgagaaggcgctgaacaagggccgtcgcgaagaaaaagtcggaaaaaaggagaagatcggtaagaaaaagcgacaaaagaaaagaaaggctgctcagaagagaaaaaattag

SEQ ID NO: 261122 - DNA, 270 bp, Artificial Sequence
  derived and/or modified sequence
atgaatgctaaagtcgtggtagttttagttttggttttaacagccctttgtcttagcgatggcaaacccgtgagcctctcctaccgatgcccatgtaggttcttcgagtcccacgtggcccgcgcgaacgttaagcacctgaagatcctcaatacccctaactgtgctttgcaaattgtggcgagacttaagaataacaaccggcaagtgtgtatcgaccccaaactcaagtggattcaggagtatttagagaaggccttgaacaaatag

SEQ ID NO: 261123 - DNA, 360 bp, Artificial Sequence
  derived and/or modified sequence
atgaatgccaaagtggtcgtggtcttggtgctcgtactcacagctctgtgtctctcggatggcaagccagtgtctttgtcttacaggtgcccttgtcgcttttttgaatcccacgtggccagagcaaatgtgaaacatcttaagatcttaaatacaccgaactgtgcactacaaatcgtcgcacgattgaagaacaacaatcgacaagtatgtatcgatcccaagttaaagtggatccaagagtacctagaaaaagccctgaacaaggggaggcgcgaagaaaaagtaggaaagaaggagaaaattggcaagaagaaacgccagaaaaaaaggaaagcagcccagaagaggaagaattag

SEQ ID NO: 261124 - DNA, 360 bp, Artificial Sequence
  derived and/or modified sequence
atgaatgctaaggtagtggtggtcctcgtcctggtgctaacagctctgtgtctctcagatggcaagccagtgtccctctcttaccgctgtccttgtagattctttgagagccacgtagctcgagctaatgtgaaacaccttaaaatcctgaacacccccaattgtgctcttcagatcgtcgcccgactaaagaataataaccgccaggtgtgcatcgaccctaaattgaaatggattcaggaatacttagaaaaggcgctcaataaaggtcgtcgggaggagaaagtgggcaaaaaagagaagataggtaagaaaaaaagacagaaaaaaagaaaggccgcacagaagagaaagaactag

SEQ ID NO: 261125 - RNA, 270 nt, Artificial Sequence
  derived and/or modified sequence
augaaugcuaaagucgugguaguuuuaguuuugguuuuaacagcccuuugucuuagcgauggcaaacccgugagccucuccuaccgaugcccauguagguucuucgagucccacguggcccgcgcgaacguuaagcaccugaagauccucaauaccccuaacugugcuuugcaaauuguggcgagacuuaagaauaacaaccggcaaguguguaucgaccccaaacucaaguggauucaggaguauuuagagaaggccuugaacaaauag

SEQ ID NO: 261126 - RNA, 360 nt, Artificial Sequence
  derived and/or modified sequence
augaaugccaaaguggucguggucuuggugcucguacucacagcucugugucucucggauggcaagccagugucuuugucuuacaggugcccuugucgcuuuuuugaaucccacguggccagagcaaaugugaaacaucuuaagaucuuaaauacaccgaacugugcacuacaaaucgucgcacgauugaagaacaacaaucgacaaguauguaucgaucccaaguuaaaguggauccaagaguaccuagaaaaagcccugaacaaggggaggcgcgaagaaaaaguaggaaagaaggagaaaauuggcaagaagaaacgccagaaaaaaaggaaagcagcccagaagaggaagaauuag

SEQ ID NO: 261127 - RNA, 360 nt, Artificial Sequence
  derived and/or modified sequence
augaaugcuaagguaguggugguccucguccuggugcuaacagcucugugucucucagauggcaagccagugucccucucuuaccgcuguccuuguagauucuuugagagccacguagcucgagcuaaugugaaacaccuuaaaauccugaacacccccaauugugcucuucagaucgucgcccgacuaaagaauaauaaccgccaggugugcaucgacccuaaauugaaauggauucaggaauacuuagaaaaggcgcucaauaaaggucgucgggaggagaaagugggcaaaaaagagaagauagguaagaaaaaaagacagaaaaaaagaaaggccgcacagaagagaaagaacuag

SEQ ID NO: 261128 - protein, 252 aa, Artificial Sequence
  derived and/or modified sequence
MAELEFVQIIIIVVVMMVMVVVITCLLSHYKLSARSFISRHSQGRRREDALSSEGCLWPSESTVSGNGIPEPQVYAPPRPTDRLAVPPFAQRERFHRFQPTYPYLQHEIDLPPTISLSDGEEPPPYQGPCTLQLRDPEQQLELNRESVRAPPNRTIFDSDLMDSARLGGPCPPSSNSGISATCYGSGGRMEGPPPTYSEVIGHYPGSSFQHQQSSGPPSLLEGTRLHHTHIAPLESAAIWSKEKDKQKGHPL

SEQ ID NO: 261129 - DNA, 759 bp, Artificial Sequence
  derived and/or modified sequence
atggcagagttggaattcgtccagattataatcatagttgtggtgatgatggttatggtggttgtgatcacttgcctactgtcccactataagctgtctgcgcgaagtttcatttctaggcatagccaaggtcgccgccgtgaagacgctttatcaagtgagggttgcttgtggccctccgaatcgactgtctccggtaacggtatcccggagccccaggtgtatgcacctccacgacccacggaccgcttggccgtgcctcctttcgcgcagcgggaacggtttcatagatttcagcctacttatccctaccttcagcacgaaattgacttgccccccacaataagcttatccgatggcgaagaacctcccccataccagggaccttgcacgctacaattgcgcgacccggagcagcagctggagctcaatagagagtccgtgcgtgcgccgccaaaccgcaccatcttcgattccgatcttatggactccgctaggctcggaggcccgtgccccccgagtagcaacagtgggatttccgctacctgctatggctcaggcggcaggatggagggccctccgcccacgtacagcgaagtgattgggcattacccgggtagttccttccagcaccaacaatcatcgggtcccccgtctttgctagagggcacccggttacatcatacccatatcgcccccctcgaaagcgcggctatttggtccaaggaaaaagataagcagaagggacatcccctgtag

SEQ ID NO: 261130 - DNA, 759 bp, Artificial Sequence
  derived and/or modified sequence
atggccgagctggagtttgtgcagatcatcatcatcgtggtggtgatgatggtgatggtggtggtgatcacctgcctgctgagccactacaagctgagcgcccggagcttcatcagccgccacagccagggcagaagaagagaagatgccctgagcagcgagggctgcctgtggcccagcgagagcacagtgtctggaaatggcatccctgagccccaggtgtatgccccaccccggcccacagaccggctggccgtgcccccatttgcccagcgggagcgcttccaccgcttccagcccacctacccctacctgcagcatgaaattgacctgccccccaccatcagcctgagtgatggagaggagcccccaccctaccagggcccctgcaccctgcagctgcgggaccctgagcagcagctggagctgaaccgggagagcgtgcgggccccacccaacagaaccatctttgacagcgacctgatggacagcgcccggctgggcggcccctgcccccccagcagcaacagcggcatcagcgccacctgctacggcagcggcggccgcatggagggccccccacccacctacagcgaggtgattggccactacccaggcagcagcttccagcaccagcagagcagcggcccccccagcctgctggagggcacccggctgcaccacacccacatcgcccccctggagagcgctgccatctggagcaaggagaaggacaagcagaagggccaccccctgtag

SEQ ID NO: 261131 - DNA, 759 bp, Artificial Sequence
  derived and/or modified sequence
atggccgagctggagttcgtgcagatcatcatcatcgtggtggtgatgatggtgatggtggttgtgattacatgcctccttagtcactacaagctatccgctcggtccttcatcagccgccacagccaggggcggaggcgggaggatgccctgtcaagtgagggctgcctgtggccctcagaatcaactgtgagcgggaacggcatccccgagccacaggtttacgcgccacctaggccaactgacagactggccgtgcccccctttgctcagagggaaagattccatcgttttcagcctacctacccctacttacagcacgagattgacctaccgccaactatcagtctgagcgatggggaggaaccgcctccttatcagggaccctgtaccttacagttgagggaccccgaacagcagctggaactgaacagggaatccgtgcgagccccacccaatagaaccatcttcgactctgaccttatggactcagccaggctcggaggaccatgtccacccagttcaaacagcggtatctctgctacctgttatggcagcggaggaaggatggaggggccgccacccacatacagtgaagtgatcggccactatcctggcagcagctttcagcatcagcagagtagcggccctccttctctgctggagggtacacgactgcatcacacccatattgccccccttgagtctgcagccatttggagcaaggaaaaggataaacaaaagggacacccgttatag

SEQ ID NO: 261132 - DNA, 759 bp, Artificial Sequence
  derived and/or modified sequence
atggctgagctcgagtttgtgcagatcattatcattgtggtagtgatgatggtgatggtggtcgtgatcacctgccttctctcacattacaaactgtcagccaggtcatttatctcaaggcactctcagggcaggagaagggaggatgctctgtcctctgaaggctgtttgtggccatccgaaagtacagtttccggaaacggtatccccgagccacaggtgtacgcgccacctagacccactgaccgccttgccgtgccgccattcgcccagcgcgaacgtttccatcggttccagcctacatatccctacctgcagcatgagattgatcttcctccaactattagcctaagcgacggagaagaaccaccgccttatcagggtccctgcacattgcagctgagagatcccgaacagcaactggagctgaatcgagagagtgtcagggcacctccaaacagaaccatttttgattccgatttgatggactcagccaggcttggagggccatgccccccatctagtaatagtgggattagcgccacctgttacggctccggcggacgaatggagggaccgcctcctacctacagcgaggtaatcgggcattatcccggtagcagcttccagcaccagcagtcttccgggccaccttcactgctcgagggaacacggctgcatcacactcacattgctcccctggaaagcgccgctatctggagtaaagaaaaggataaacagaagggacatccattatag

SEQ ID NO: 261133 - DNA, 4572 bp, Artificial Sequence
  derived and/or modified sequence
ccagcctgagccacatccctgggcttgacttctccagaacaagcctcctggtctttctgggagagctctggcagcatcactgtgcctgtgcagggagagcgggaacccacttcctgcaccggctttctctgagttcttcaggatgaattcgctctggtctagcggagctggagtttgttcagatcatcatcatcgtggtggtgatgatggtgatggtggtggtgatcacgtgcctgctgagccactacaagctgtctgcacggtccttcatcagccggcacagccaggggcggaggagagaagatgccctgtcctcagaaggatgcctgtggccctcggagagcacagtgtcaggcaacggaatcccagagccgcaggtctacgccccgcctcggcccaccgaccgcctggccgtgccgcccttcgcccagcgggagcgcttccaccgcttccagcccacctatccgtacctgcagcacgagatcgacctgccacccaccatctcgctgtcagacggggaggagcccccaccctaccagggcccctgcaccctccagcttcgggaccccgagcagcagctggaactgaaccgggagtcggtgcgcgcacccccaaacagaaccatcttcgacagtgacctgatggatagtgccaggctgggcggcccctgcccccccagcagtaactcgggcatcagcgccacgtgctacggcagcggcgggcgcatggaggggccgccgcccacctacagcgaggtcatcggccactacccggggtcctccttccagcaccagcagagcagtgggccgccctccttgctggaggggacccggctccaccacacacacatcgcgcccctagagagcgcagccatctggagcaaagagaaggataaacagaaaggacaccctctctagggtccccaggggggccgggctggggctgcgtaggtgaaaaggcagaacactccgcgcttcttagaagaggagtgagaggaaggcggggggcgcagcaacgcatcgtgtggccctcccctcccacctccctgtgtataaatatttacatgtgatgtctggtctgaatgcacaagctaagagagcttgcaaaaaaaaaaagaaaaaagaaaaaaaaaaaccacgtttctttgttgagctgtgtcttgaaggcaaaagaaaaaaaatttctacagtagtctttcttgtttctagttgagctgcgtgcgtgaatgcttattttcttttgtttatgataatttcacttaactttaaagacatatttgcacaaaacctttgtttaaagatctgcaatattatatatataaatatatataagataagagaaactgtatgtgcgagggcaggagtatttttgtattagaagaggcctattaaaaaaaaaagttgttttctgaactagaagaggaaaaaaatggcaatttttgagtgccaagtcagaaagtgtgtattaccttgtaaagaaaaaaattacaaagcaggggtttagagttatttatataaatgttgagattttgcactattttttaatataaatatgtcagtgcttgcttgatggaaacttctcttgtgtctgttgagactttaagggagaaatgtcggaatttcagagtcgcctgacggcagagggtgagcccccgtggagtctgcagagaggccttggccaggagcggcgggctttcccgaggggccactgtccctgcagagtggatgcttctgcctagtgacaggttatcaccacgttatatattccctaccgaaggagacaccttttcccccctgacccagaacagcctttaaatcacaagcaaaataggaaagttaaccacggaggcaccgagttccaggtagtggttttgcctttcccaaaaatgaaaataaactgttaccgaaggaattagtttttcctcttcttttttccaactgtgaaggtccccgtggggtggagcatggtgcccctcacaagccgcagcggctggtgcccgggctaccagggacatgccagagggctcgatgacttgtctctgcagggcgctttggtggttgttcagctggctaaaggttcaccggtgaaggcaggtgcggtaactgccgcactggaccctaggaagccccaggtattcgcaatctgacctcctcctgtctgtttcccttcacggatcaattctcacttaagaggccaataaacaacccaacatgaaaaggtgacaagcctgggtttctcccaggataggtgaaagggttaaaatgagtaaagcagttgagcaaacaccaacccgagcttcgggcgcagaattcttcaccttctcttcccctttccatctcctttccccgcggaaacaacgcttcccttctggtgtgtctgttgatctgtgttttcatttacatctctcttagactccgctcttgttctccaggttttcaccagatagatttggggttggcgggacctgctggtgacgtgcaggtgaaggacaggaaggggcatgtgagcgtaaatagaggtgaccagaggagagcatgaggggtggggctttgggacccaccggggccagtggctggagcttgacgtctttcctccccatgggggtgggagggcccccagctggaagagcagactcccagctgctaccccctcccttcccatgggagtggctttccattttgggcagaatgctgactagtagactaacataaaagatataaaaggcaataactattgtttgtgagcaacttttttataacttccaaaacaaaaacctgagcacagttttgaagttctagccactcgagctcatgcatgtgaaacgtgtgctttacgaaggtggcagctgacagacgtgggctctgcatgccgccagcctagtagaaagttctcgttcattggcaacagcagaacctgcctctccgtgaagtcgtcagcctaaaatttgtttctctcttgaagaggattctttgaaaaggtcctgcagagaaatcagtacaggttatcccgaaaggtacaaggacgcacttgtaaagatgattaaaacgtatctttcctttatgtgacgcgtctctagtgccttactgaagaagcagtgacactcccgtcgctcggtgaggacgttcccggacagtgcctcactcacctgggactggtatcccctcccagggtccaccaagggctcctgcttttcagacaccccatcatcctcgcgcgtcctcaccctgtctctaccagggaggtgcctagcttggtgaggttactcctgctcctccaacctttttttgccaaggtttgtacacgactcccatctaggctgaaaacctagaagtggaccttgtgtgtgtgcatggtgtcagcccaaagccaggctgagacagtcctcatatcctcttgagccaaactgtttgggtctcgttgcttcatggtatggtctggatttgtgggaatggctttgcgtgagaaaggggaggagagtggttgctgccctcagccggcttgaggacagagcctgtccctctcatgacaactcagtgttgaagcccagtgtcctcagcttcatgtccagtggatggcagaagttcatggggtagtggcctctcaaaggctgggcgcatcccaagacagccagcaggttgtctctggaaacgaccagagttaagctctcggcttctctgctgagggtgcaccctttcctctagatggtagttgtcacgttatctttgaaaactcttggactgctcctgaggaggccctcttttccagtaggaagttagatgggggttctcagaagtggctgattggaaggggacaagcttcgtttcaggggtctgccgttccatcctggttcagagaaggccgagcgtggctttctctagccttgtcactgtctccctgcctgtcaatcaccacctttcctccagaggaggaaaattatctcccctgcaaagcccggttctacacagatttcacaaattgtgctaagaaccgtccgtgttctcagaaagcccagtgtttttgcaaagaatgaaaagggaccccatatgtagcaaaaatcagggctgggggagagccgggttcattccctgtcctcattggtcgtccctatgaattgtacgtttcagagaaattttttttcctatgtgcaacacgaagcttccagaaccataaaatatcccgtcgataaggaaagaaaatgtcgttgttgttgtttttctggaaactgcttgaaatcttgctgtactatagagctcagaaggacacagcccgtcctcccctgcctgcctgattccatggctgttgtgctgattccaatgctttcacgttggttcctggcgtgggaactgctctcctttgcagccccatttcccaagctctgttcaagttaaacttatgtaagctttccgtggcatgcggggcgcgcacccacgtccccgctgcgtaagactctgtatttggatgccaatccacaggcctgaagaaactgcttgttgtgtatcagtaatcattagtggcaatgatgacattctgaaaagctgcaatacttatacaataaattttacaattctttgg

SEQ ID NO: 261134 - DNA, 4546 bp, Artificial Sequence
  derived and/or modified sequence
acgcgagttcccgtctttcctggtcgtcctccttgggttcgggtgaaagcgcttgggggttcagtgggccatgatccccgagctgctggagaactgaaggcggacagtctcctgcgaaaccaggcaatggcggagctggagtttgttcagatcatcatcatcgtggtggtgatgatggtgatggtggtggtgatcacgtgcctgctgagccactacaagctgtctgcacggtccttcatcagccggcacagccaggggcggaggagagaagatgccctgtcctcagaaggatgcctgtggccctcggagagcacagtgtcaggcaacggaatcccagagccgcaggtctacgccccgcctcggcccaccgaccgcctggccgtgccgcccttcgcccagcgggagcgcttccaccgcttccagcccacctatccgtacctgcagcacgagatcgacctgccacccaccatctcgctgtcagacggggaggagcccccaccctaccagggcccctgcaccctccagcttcgggaccccgagcagcagctggaactgaaccgggagtcggtgcgcgcacccccaaacagaaccatcttcgacagtgacctgatggatagtgccaggctgggcggcccctgcccccccagcagtaactcgggcatcagcgccacgtgctacggcagcggcgggcgcatggaggggccgccgcccacctacagcgaggtcatcggccactacccggggtcctccttccagcaccagcagagcagtgggccgccctccttgctggaggggacccggctccaccacacacacatcgcgcccctagagagcgcagccatctggagcaaagagaaggataaacagaaaggacaccctctctagggtccccaggggggccgggctggggctgcgtaggtgaaaaggcagaacactccgcgcttcttagaagaggagtgagaggaaggcggggggcgcagcaacgcatcgtgtggccctcccctcccacctccctgtgtataaatatttacatgtgatgtctggtctgaatgcacaagctaagagagcttgcaaaaaaaaaaagaaaaaagaaaaaaaaaaaccacgtttctttgttgagctgtgtcttgaaggcaaaagaaaaaaaatttctacagtagtctttcttgtttctagttgagctgcgtgcgtgaatgcttattttcttttgtttatgataatttcacttaactttaaagacatatttgcacaaaacctttgtttaaagatctgcaatattatatatataaatatatataagataagagaaactgtatgtgcgagggcaggagtatttttgtattagaagaggcctattaaaaaaaaaagttgttttctgaactagaagaggaaaaaaatggcaatttttgagtgccaagtcagaaagtgtgtattaccttgtaaagaaaaaaattacaaagcaggggtttagagttatttatataaatgttgagattttgcactattttttaatataaatatgtcagtgcttgcttgatggaaacttctcttgtgtctgttgagactttaagggagaaatgtcggaatttcagagtcgcctgacggcagagggtgagcccccgtggagtctgcagagaggccttggccaggagcggcgggctttcccgaggggccactgtccctgcagagtggatgcttctgcctagtgacaggttatcaccacgttatatattccctaccgaaggagacaccttttcccccctgacccagaacagcctttaaatcacaagcaaaataggaaagttaaccacggaggcaccgagttccaggtagtggttttgcctttcccaaaaatgaaaataaactgttaccgaaggaattagtttttcctcttcttttttccaactgtgaaggtccccgtggggtggagcatggtgcccctcacaagccgcagcggctggtgcccgggctaccagggacatgccagagggctcgatgacttgtctctgcagggcgctttggtggttgttcagctggctaaaggttcaccggtgaaggcaggtgcggtaactgccgcactggaccctaggaagccccaggtattcgcaatctgacctcctcctgtctgtttcccttcacggatcaattctcacttaagaggccaataaacaacccaacatgaaaaggtgacaagcctgggtttctcccaggataggtgaaagggttaaaatgagtaaagcagttgagcaaacaccaacccgagcttcgggcgcagaattcttcaccttctcttcccctttccatctcctttccccgcggaaacaacgcttcccttctggtgtgtctgttgatctgtgttttcatttacatctctcttagactccgctcttgttctccaggttttcaccagatagatttggggttggcgggacctgctggtgacgtgcaggtgaaggacaggaaggggcatgtgagcgtaaatagaggtgaccagaggagagcatgaggggtggggctttgggacccaccggggccagtggctggagcttgacgtctttcctccccatgggggtgggagggcccccagctggaagagcagactcccagctgctaccccctcccttcccatgggagtggctttccattttgggcagaatgctgactagtagactaacataaaagatataaaaggcaataactattgtttgtgagcaacttttttataacttccaaaacaaaaacctgagcacagttttgaagttctagccactcgagctcatgcatgtgaaacgtgtgctttacgaaggtggcagctgacagacgtgggctctgcatgccgccagcctagtagaaagttctcgttcattggcaacagcagaacctgcctctccgtgaagtcgtcagcctaaaatttgtttctctcttgaagaggattctttgaaaaggtcctgcagagaaatcagtacaggttatcccgaaaggtacaaggacgcacttgtaaagatgattaaaacgtatctttcctttatgtgacgcgtctctagtgccttactgaagaagcagtgacactcccgtcgctcggtgaggacgttcccggacagtgcctcactcacctgggactggtatcccctcccagggtccaccaagggctcctgcttttcagacaccccatcatcctcgcgcgtcctcaccctgtctctaccagggaggtgcctagcttggtgaggttactcctgctcctccaacctttttttgccaaggtttgtacacgactcccatctaggctgaaaacctagaagtggaccttgtgtgtgtgcatggtgtcagcccaaagccaggctgagacagtcctcatatcctcttgagccaaactgtttgggtctcgttgcttcatggtatggtctggatttgtgggaatggctttgcgtgagaaaggggaggagagtggttgctgccctcagccggcttgaggacagagcctgtccctctcatgacaactcagtgttgaagcccagtgtcctcagcttcatgtccagtggatggcagaagttcatggggtagtggcctctcaaaggctgggcgcatcccaagacagccagcaggttgtctctggaaacgaccagagttaagctctcggcttctctgctgagggtgcaccctttcctctagatggtagttgtcacgttatctttgaaaactcttggactgctcctgaggaggccctcttttccagtaggaagttagatgggggttctcagaagtggctgattggaaggggacaagcttcgtttcaggggtctgccgttccatcctggttcagagaaggccgagcgtggctttctctagccttgtcactgtctccctgcctgtcaatcaccacctttcctccagaggaggaaaattatctcccctgcaaagcccggttctacacagatttcacaaattgtgctaagaaccgtccgtgttctcagaaagcccagtgtttttgcaaagaatgaaaagggaccccatatgtagcaaaaatcagggctgggggagagccgggttcattccctgtcctcattggtcgtccctatgaattgtacgtttcagagaaattttttttcctatgtgcaacacgaagcttccagaaccataaaatatcccgtcgataaggaaagaaaatgtcgttgttgttgtttttctggaaactgcttgaaatcttgctgtactatagagctcagaaggacacagcccgtcctcccctgcctgcctgattccatggctgttgtgctgattccaatgctttcacgttggttcctggcgtgggaactgctctcctttgcagccccatttcccaagctctgttcaagttaaacttatgtaagctttccgtggcatgcggggcgcgcacccacgtccccgctgcgtaagactctgtatttggatgccaatccacaggcctgaagaaactgcttgttgtgtatcagtaatcattagtggcaatgatgacattctgaaaagctgcaatacttatacaataaattttacaattctttggaatgag

SEQ ID NO: 261135 - DNA, 800 bp, Artificial Sequence
  derived and/or modified sequence
ttggaacgagggctgcgggcaccagtgagcggagctggagtttgttcagatcatcatcatcgtggtggtgatgatggtgatggtggtggtgatcacgtgcctgctgagccactacaagctgtctgcacggtccttcatcagccggcacagccaggggcggaggagagaagatgccctgtcctcagaaggatgcctgtggccctcggagagcacagtgtcaggcaacggaatcccagagccgcaggtctacgccccgcctcggcccaccgaccgcctggccgtgccgcccttcgcccagcgggagcgcttccaccgcttccagcccacctatccgtacctgcagcacgagatcgacctgccacccaccatctcgctgtcagacggggaggagcccccaccctaccagggcccctgcaccctccagcttcgggaccccgagcagcagctggaactgaaccgggagtcggtgcgcgcacccccaaacagaaccatcttcgacagtgacctgatggatagtgccaggctgggcggcccctgcccccccagcagtaactcgggcatcagcgccacgtgctacggcagcggcgggcgcatggaggggccgccgcccacctacagcgaggtcatcggccactacccggggtcctccttccagcaccagcagagcagtgggccgccctccttgctggaggggacccggctccaccacacacacatcgcgcccctagagagcgcagccatctggagcaaagagaaggataaacagaaaggacaccctctctagggtccccaggggggcc

SEQ ID NO: 261136 - DNA, 759 bp, Artificial Sequence
  derived and/or modified sequence
atggccgagctggagttcgtgcagatcatcatcatcgtggtggtgatgatggtgatggtggtggtgatcacctgcctgctgagccactacaagctgagcgccagaagcttcatcagcagacacagccagggcagaagaagagaggacgccctgagcagcgagggctgcctgtggcccagcgagagcaccgtgagcggcaacggcatccccgagccccaggtgtacgccccccccagacccaccgacagactggccgtgccccccttcgcccagagagagagattccacagattccagcccacctacccctacctgcagcacgagatcgacctgccccccaccatcagcctgagcgacggcgaggagccccccccctaccagggcccctgcaccctgcagctgagagaccccgagcagcagctggagctgaacagagagagcgtgagagccccccccaacagaaccatcttcgacagcgacctgatggacagcgccagactgggcggcccctgcccccccagcagcaacagcggcatcagcgccacctgctacggcagcggcggcagaatggagggccccccccccacctacagcgaggtgatcggccactaccccggcagcagcttccagcaccagcagagcagcggcccccccagcctgctggagggcaccagactgcaccacacccacatcgcccccctggagagcgccgccatctggagcaaggagaaggacaagcagaagggccaccccctgtag

SEQ ID NO: 261137 - DNA, 714 bp, Artificial Sequence
  derived and/or modified sequence
atgatggtgatggtcgtggtaattacatgcctgttatcccactacaaattatctgctagatcattcatatccagacactcccagggccggcgtcgcgaggatgccctgtccagcgagggatgcctgtggccgtccgagtccactgtgtccgggaatggaataccagaaccgcaggtctatgcacccccccgccctacagacagactggcagttcctcctttcgcacagagagagaggtttcaccgcttccagcccacctatccctacctgcagcatgaaatagacctcccaccaactatctcactgtctgacggcgaagagcctcctccttaccagggcccctgtactctgcagctccgagacccagaacaacagctggagctgaatagggagtcagttcgggctcccccaaaccgaaccattttcgacagtgaccttatggattctgccagactgggaggaccttgtccaccaagttccaactccggaatcagcgctacatgctacggaagcggagggcgtatggaaggtcctcctcccacatatagcgaagtcatcggacactatcctgggtcatctttccagcaccaacagagctcaggacctccatccttgttagaagggactcgccttcaccatacccatatagcgccactcgagtctgccgctatctggtctaaagaaaaggataagcagaaaggacacccactgtag

SEQ ID NO: 261138 - DNA, 714 bp, Artificial Sequence
  derived and/or modified sequence
atgatggttatggtggtagtgatcacgtgtctgctctctcattataaactatcagcgagaagttttatttccaggcatagccagggccgccgaagggaggacgccctgtctagtgaagggtgcctgtggccgagcgagtcaaccgtttctgggaatggcattcctgaaccacaggtctatgcccctccaaggccaaccgatagacttgcagtaccaccttttgcacaaagagagcggtttcatcgatttcagcccacgtatccttacctccaacacgaaatagatctgccacctactatttctctgtccgacggggaggagcccccaccatatcaaggcccatgtactctgcagctgagggatccagagcagcagctggaattgaatcgcgagtctgtgcgagcccctcctaatcgtaccatatttgactcagatctcatggattccgctcgcctaggtggcccatgccctccaagctccaatagcggcattagcgcaacatgctacgggagcggtggcaggatggagggaccaccaccgacctactccgaggtcataggacattatccaggcagcagctttcagcaccaacaaagctctgggccaccatctctgttggaagggactcggctgcaccacacgcacatcgcaccactcgagtcagccgctatctggagtaaagagaaagacaagcaaaaaggacaccctctgtag

SEQ ID NO: 261139 - DNA, 714 bp, Artificial Sequence
  derived and/or modified sequence
atgatggtgatggttgtcgttattacctgtcttctttctcattacaaactgtccgcgcgctctttcatctctcgccattcccagggcaggcggagggaggacgctttatcttcagagggctgtctgtggcctagcgagtctaccgtgtctggcaatgggatcccagagcctcaggtgtatgcaccccctcgccccacagacagactggcagtgccgcccttcgctcaaagggagcggttccataggttccaacccacctatccttaccttcagcacgaaattgatctgcctcccacgatttccctttcagatggggaagagccacccccctaccagggcccttgcactctgcagcttagagatccagagcagcagctggagctaaacagggaaagcgtaagagctccgcccaacagaacaatcttcgacagtgatctgatggattctgcgcggcttggcggcccatgcccaccaagcagcaattctgggatatctgccacttgctacggttccggcggtaggatggaaggtcctccaccaacctattccgaggtgatcggccattacccgggctcgtctttccagcaccagcaatctagcggacctccaagcctgctcgaaggtacaaggcttcatcacacgcatatagcccctctggagagcgccgctatatggagtaaggagaaagacaagcagaaaggacaccccttgtag

SEQ ID NO: 261140 - DNA, 714 bp, Artificial Sequence
  derived and/or modified sequence
atgatggtgatggtggtggtgatcacctgcctgctgagccactacaagctgagcgcccgctccttcatcagccgccacagccagggcagaagaagagaagatgccctgagcagcgagggctgcctgtggcccagcgagagcacagtgtctggaaatggcatccctgagccccaggtgtatgccccaccccggcccacagaccggctggccgtgcccccatttgcccagcgggagcgcttccaccgcttccagcccacctacccctacctgcagcacgagattgacctgccccccaccatcagcctgagtgatggagaggagcccccaccctaccagggcccctgcaccctgcagctgcgggaccctgagcagcagctggagctgaaccgggagagcgtgcgggccccacccaacagaaccatctttgacagcgacctgatggattctgcccggctgggcggcccctgcccccccagcagcaacagcggcatcagcgccacctgctacggcagcggcggccgcatggagggccccccacccacctacagcgaggtgattggccactacccaggcagcagcttccagcaccagcagagcagcggcccccccagcctgctggagggcacccggctgcaccacacccacatcgcccccctggagagcgctgccatctggagcaaggagaaggacaagcagaagggccaccccctgtag

SEQ ID NO: 261141 - DNA, 714 bp, Artificial Sequence
  derived and/or modified sequence
atgatggtgatggtggtggtgatcacctgcctgctgagccactacaaactctccgctagaagctttatatcccgccacagtcagggccgtcgtagagaggacgccctcagctcagagggctgtctgtggccatcagagagtacagtgagtggtaatggaatcccagagccccaggtctatgctcctccgagacccactgacagactcgctgttcctcccttcgcccagcgcgagagattccataggttccagcccacctacccctatctccaacacgagattgacttgccaccaacgatcagcctgtcagatggggaagaacctcctccgtaccagggcccgtgcacactgcagcttagagaccccgaacagcagctcgaactcaatcgggagtctgtcagagcaccacctaaccgcacaatattcgactctgacttaatggacagtgctcgcctcggagggccttgtccaccctcgtctaattctggaatcagcgctacttgttacggttccggcggacggatggaggggcctccaccaacgtatagcgaggtaattgggcactatcctggctctagttttcagcaccaacagagtagcggcccccccagcctcctggagggaactcggctgcaccatacccatattgcccccctcgagtctgccgcaatctggtcaaaggagaaggataagcagaaaggccaccccttatag

SEQ ID NO: 261142 - DNA, 714 bp, Artificial Sequence
  derived and/or modified sequence
atgatggtgatggtggtggtgatcacctgcctgctgagccactacaaactgagtgctagaagcttcatttcccgccacagccaagggcgccgcagggaggatgccctgtcctctgaaggctgtttgtggcctagcgaaagtacagtgtcagggaatggaattccagagccacaagtctatgcgcctcctcgacccaccgaccgcctggctgtcccacccttcgcacagcgcgagcggtttcatagattccagcccacgtatccttacctccagcatgagattgatctgcccccgacgatcagcctatccgatggtgaagaaccacccccctatcagggtccttgtactctgcagctgcgggatcccgagcaacagcttgaattgaacagggaatcagttagggccccccccaatcggaccatcttcgatagtgatcttatggatagcgcacggctgggcggaccttgcccaccctcatccaattctgggatctctgctacttgttacggatctggcggccggatggagggcccaccccccacctactccgaggttatcggtcattatcccggctctagcttccaacatcagcagagctccgggcctccctcattgctcgaagggacgcgacttcatcatacacatattgcgcctctggagagtgcagcgatttggtcaaaggagaaagacaagcagaagggacaccccctttag

SEQ ID NO: 261143 - DNA, 714 bp, Artificial Sequence
  derived and/or modified sequence
atgatggtgatggtggtggtgatcacctgcctgctgagccactacaagttgagtgcacgcagcttcatctctcgccattcacagggaagacggagagaagatgctctgtcctccgagggctgtttatggccttcagaaagcactgtgtctggtaacggcattcctgagccgcaggtgtatgcacccccaagacctactgataggctcgctgtgccacctttcgcgcagcgcgagcgctttcacaggtttcagcctacatatccctacctgcagcatgagatcgatcttccccctactatttcactgtctgatggagaagagcccccgccgtaccaggggccatgcacactgcaactgagggatcctgaacagcagttggagttgaatcgtgagtcggtccgagctcctccaaatagaacaattttcgatagcgatctgatggactccgcgaggctgggcggaccctgtcctccttcttcgaattccggcatctcagctacatgctatggctccggggggagaatggaaggcccgccgccaacctactcggaagtcatcggtcactacccaggatcctcttttcagcatcaacagtcgtccggacccccaagcctgctggaggggacccgcctgcatcacacccacattgccccccttgagtccgccgccatctggagtaaagaaaaggacaaacaaaagggccacccactgtag

SEQ ID NO: 261144 - DNA, 714 bp, Artificial Sequence
  derived and/or modified sequence
atgatggtgatggtggtggttattacctgcctgctctcgcattataagctctcggccagaagtttcatatcacggcacagccaaggcagaagacgggaggacgcgctgagctctgagggatgcctgtggccatccgaatccaccgtcagcgggaatggtattcctgaacctcaggtttatgccccaccacgtccgacagatcggctggctgtgcctcctttcgctcaacgagagcggttccatcgattccaacccacctacccatacctgcaacacgagattgacctgccgccaactatctcattgagtgacggggaagagcccccaccttaccagggcccttgtactcttcaattgcgtgaccctgagcaacagcttgagctgaatcgcgaatccgtcagggctcctccgaatcgcaccatctttgattccgatctgatggatagtgccaggcttggtggaccctgcccaccctcgtcgaactctggcatctctgctacttgttacggctcaggaggtcggatggaaggaccacccccaacttacagcgaggttatcggtcattatcctggatcctccttccagcatcagcagtcaagcgggccaccttcacttttggaggggacacgtttgcatcatacacacattgcacctctggagtccgctgccatttggagcaaggaaaaggacaagcagaaagggcaccctctgtag

SEQ ID NO: 261145 - DNA, 714 bp, Artificial Sequence
  derived and/or modified sequence
atgatggtgatggtcgtcgtgataacctgcttgctgagtcattacaagctgtcggcgcgaagttttattagtcggcactcccaaggccgtcgaagagaggatgcgttaagctcagaaggatgtctttggcccagtgagtctacggtgagtggtaatggcattcccgaaccccaggtatatgcccctccgcgtcctacagataggctggcggtgcccccattcgcacagcgagagcggttccataggtttcagcctacatatccctaccttcagcatgaaatcgatctcccgcctaccatcagtttatctgacggagaggaacctcccccatatcagggtccgtgtacactccaactgcgagacccagagcaacagctggagctgaatcgagagtccgtgcgcgcacctccaaacagaaccatctttgacagcgacttgatggatagtgcgaggttaggtgggccatgcccgcctagttcaaacagcggcatttctgccacgtgttacggtagtggcggacgtatggagggcccacccccaacatactcagaggttataggtcattacccaggctcatcttttcagcatcaacaaagttcagggccaccaagcctccttgaaggaacacgactgcaccatacccatattgctcctctggaaagtgcggcaatctggtctaaggagaaggataagcagaaaggtcaccctctgtag

SEQ ID NO: 261146 - DNA, 714 bp, Artificial Sequence
  derived and/or modified sequence
atgatggtcatggtggtcgtgatcacctgtctgttgagtcattacaagctgtcggctagatccttcatctccagacatagtcagggtcgtcgcagggaagacgcgctgtcaagcgaaggatgtttgtggccatcagagagtacagtgtctgggaacggtatccccgagccacaggtgtacgcaccccctaggcccaccgatagactagctgtgccaccctttgcccaaagggagcgcttccataggttccagccgacatacccgtatcttcaacacgaaatcgacctgcctccaactataagcctctcagacggagaggaacctcccccataccaaggtccttgcactctccaacttagggaccccgagcagcagctggagctcaacagggaaagcgttcgagccccaccaaaccgcactatatttgactcagatcttatggattcggccagacttggcggaccgtgtcctcctagctcgaactctgggatatctgctacctgttacggttctgggggacggatggaaggacctccaccaacctacagtgaagtgattggtcattaccctggatcctctttccaacaccaacagtccagcggtccacccagcctcttagagggcacgaggctgcatcatactcatatcgcacccctcgagtccgcagctatctggagtaaggagaaagataagcaaaagggtcatcctctttag

SEQ ID NO: 261147 - DNA, 714 bp, Artificial Sequence
  derived and/or modified sequence
atgatggtgatggtggtggtgatcacctgcctgctgagccactacaagctgagcgccagaagcttcatcagcagacacagccagggcagaagaagagaggacgccctgagcagcgagggctgcctgtggcccagcgagagcaccgtgagcggcaacggcatccccgagccccaggtgtacgccccccccagacccaccgacagactggccgtgccccccttcgcccagagagagagattccacagattccagcccacctacccctacctgcagcacgagatcgacctgccccccaccatcagcctgagcgacggcgaggagccccccccctaccagggcccctgcaccctgcagctgagagaccccgagcagcagctggagctgaacagagagagcgtgagagccccccccaacagaaccatcttcgacagcgacctgatggacagcgccagactgggcggcccctgcccccccagcagcaacagcggcatcagcgccacctgctacggcagcggcggcagaatggagggccccccccccacctacagcgaggtgatcggccactaccccggcagcagcttccagcaccagcagagcagcggcccccccagcctgctggagggcaccagactgcaccacacccacatcgcccccctggagagcgccgccatctggagcaaggagaaggacaagcagaagggccaccccctgtag

SEQ ID NO: 261148 - protein, 100 aa, Artificial Sequence
  derived and/or modified sequence
MRALTLLALLALAALCIAGQAGAKPSGAESSKGAAFVSKQEGSEVVKRPRRYLYQWLGAPVPYPDPLEPRREVCELNPDCDELADHIGFQEAYRRFYGPV

SEQ ID NO: 261149 - DNA, 303 bp, Artificial Sequence
  derived and/or modified sequence
atgcgcgctctgaccctgctggcattgctggcattggctgcactgtgcattgctggacaggccggagccaagccttccggcgccgagagctcaaaaggcgccgcgtttgtgagtaagcaggaaggatccgaggtagtcaagcgccctaggaggtacctgtaccagtggctcggcgcccccgttccttacccagaccccctcgagccgagaagggaagtgtgtgagctgaacccagactgcgatgaacttgccgaccacattggtttccaagaggcatataggaggttctatgggccagtgtag

SEQ ID NO: 261150 - DNA, 303 bp, Artificial Sequence
  derived and/or modified sequence
atgagggccctgaccctgctggccctgctggccctggccgccctgtgcatcgccggccaggccggggccaagcccagcggggctgagagcagcaagggggccgcctttgtgtccaagcaggagggcagcgaggtggtgaagaggccccggcgctacctgtaccagtggctgggcgcccctgtgccctacccagaccccctggagccccggcgggaggtgtgtgagctgaacccagactgtgatgagctggccgaccacatcggcttccaggaggcctaccgccgcttctacggccctgtgtag

SEQ ID NO: 261151 - DNA, 303 bp, Artificial Sequence
  derived and/or modified sequence
atgcgggccctgaccctgctggccctgctggccctggccgccctgtgtatcgctggtcaagccggagctaaaccttccggcgcggaaagcagtaaaggggccgcgtttgtttccaaacaagagggcagcgaggtggtcaagcggccacggaggtatctttaccagtggctgggagcgcctgtgccttaccctgaccctttggagccccgccgggaggtgtgtgagctgaatccagattgcgatgagttggccgaccacatcggattccaggaggcatacaggcggttctacggacctgtgtag

SEQ ID NO: 261152 - DNA, 303 bp, Artificial Sequence
  derived and/or modified sequence
atgcgggctctcactcttcttgccctgctagctctggctgccctctgcatcgccggtcaggcaggcgcaaaacccagtggagccgagtcttcaaaaggagccgcttttgttagcaaacaggagggcagtgaggttgtcaaacgccctcgacgttatctataccagtggttgggcgctcccgtgccttatcccgaccccttagaaccccgtcgtgaggtttgtgagctgaatcctgattgtgacgagttagcagaccatattggtttccaagaagcttatagaaggttttacggcccagtatag

SEQ ID NO: 261153 - DNA, 732 bp, Artificial Sequence
  derived and/or modified sequence
gattgtggctcaccctccatcactcccaggggcccctggcccagcagccgcagctcccaaccacaatatcctttggggtttggcctacggagctggggcggatgacccccaaatagccctggcagattccccctagacccgcccgcaccatggtcaggcatgcccctcctcatcgctgggcacagcccagagggtataaacagtgctggaggctggcggggcaggccagctgagtcctgagcagcagcccagcgcagccaccgagacaccatgagagccctcacactcctcgccctattggccctggccgcactttgcatcgctggccaggcaggtgcgaagcccagcggtgcagagtccagcaaaggtgcagcctttgtgtccaagcaggagggcagcgaggtagtgaagagacccaggcgctacctgtatcaatggctgggagccccagtcccctacccggatcccctggagcccaggagggaggtgtgtgagctcaatccggactgtgacgagttggctgaccacatcggctttcaggaggcctatcggcgcttctacggcccggtctagggtgtcgctctgctggcctggccggcaaccccagttctgctcctctccaggcacccttctttcctcttccccttgcccttgccctgacctcccagccctatggatgtggggtccccatcatcccagctgctcccaaataaactccagaagaggaatctg

SEQ ID NO: 261154 - DNA, 303 bp, Artificial Sequence
  derived and/or modified sequence
atgagagccctgaccctgctggccctgctggccctggccgccctgtgcatcgccggccaggccggcgccaagcccagcggcgccgagagcagcaagggcgccgccttcgtgagcaagcaggagggcagcgaggtggtgaagagacccagaagatacctgtaccagtggctgggcgcccccgtgccctaccccgaccccctggagcccagaagagaggtgtgcgagctgaaccccgactgcgacgagctggccgaccacatcggcttccaggaggcctacagaagattctacggccccgtgtag

SEQ ID NO: 261155 - protein, 583 aa, Artificial Sequence
  derived and/or modified sequence
MLRMRVPALLVLLFCFRGRAGWSRYWISGNAANGQHDLHIRPVELEDEASYECQATQAGLRSRPAQLHVLVPPEAPQVLGGPSVSLVAGVPANLTCRSRGDARPTPELLWFRDGVLLDGATFHQTLLKEGTPGSVESTLTLTPFSHDDGATFVCRARSQALPTGRDTAITLSLQYPPEVTLSASPHTVQEGEKVIFLCQATAQPPVTGYRWAKGGSPVLGARGPRLEVVADASFLTEPVSCEVSNAVGSANRSTALDVLFGPILQAKPEPVSVDVGEDASFSCAWRGNPLPRVTWTRRGGAQVLGSGATLRLPSVGPEDAGDYVCRAEAGLSGLRGGAAEARLTVNAPPVVTALHSAPAFLRGPARLQCLVFASPAPDAVVWSWDEGFLEAGSQGRFLVETFPAPESRGGLGPGLISVLHISGTQESDFSRSFNCSARNRLGEGGAQASLGRRDLLPTVRIVAGVAAATTTLLMVITGVALCCWRHSKASASFSEQKNLMRIPGSSDGSSSRGPEEEETGSREDRGPIVHTDHSDLVLEEKGTLETKDPTNGYYKVRGVSPPASPDSRVTSFQWKSPGISNLP

SEQ ID NO: 261156 - DNA, 1752 bp, Artificial Sequence
  derived and/or modified sequence
atgcttagaatgcgagtcccggcgttgcttgtgcttctgttctgttttagaggccgggctggatggtcacggtactggataagcggcaatgccgccaatggccagcatgacctgcacatcaggccagtcgagctagaggatgaggcgagttacgagtgccaagccacacaagcgggactgaggagtcggcccgcccaactacacgtactggtgccaccggaggcaccacaggtgctaggcggcccctctgtatctctagttgcaggggtgcccgctaacctaacctgccgatcccggggtgacgctcgccctacaccagaactgttgtggttcagagatggtgtcctgctggacggggctacattccatcaaacactgctcaaagaaggaactccggggtctgtcgaaagtactttaacattgaccccattctctcacgatgatggagctacattcgtatgtcgtgctcgctcccaggccctacctaccgggagggacactgccatcactctaagcctgcagtatcccccagaggtgacactgtcggcatccccacacacggtgcaggagggggagaaggtcatttttctttgtcaggcaacggcacagccccccgttacaggctatagatgggccaagggcgggagtccggttctgggggcaaggggcccacgtctggaggttgtggcagatgccagcttcctcactgagccagttagctgcgaagtcagtaatgcggtgggaagtgcgaaccggtctaccgccctcgatgtattgttcgggccaatactgcaagcaaagcccgaacctgtgagtgtggacgtaggcgaagatgctagcttctcttgtgcttggcgggggaaccctctgccccgggtaacttggacccggcgaggcggagcccaagtcctcgggtcaggtgccaccctgcggctcccttcggtggggccagaggacgccggcgactacgtctgtagggccgaggccggactgagcggcctgagaggaggtgcggctgaggctcgcctcaccgttaatgcacctccggtggtcactgccctgcactcggcccctgcatttctaagaggcccagcccgccttcagtgtctcgtatttgcctcccctgcccctgacgccgtcgtgtggtcttgggacgagggattcttagaggccggaagtcagggaagattcctcgtagagacattccccgcaccagaaagcagaggcggtttggggcccggacttatatcggtcctacacatttctgggacacaggaatctgatttctccagatcattcaactgcagcgcacggaatcgcctgggggaggggggggcgcaagccagccttggccgacgtgatcttctcccaacagtgaggatcgtcgccggcgtggcggccgctaccaccaccctcctgatggtgattactggtgtagccctgtgttgttggagacattccaaggcctcagcttcattttctgagcagaagaacttaatgcggattccgggaagtagtgacggttcgtcctctcgcggcccagaggaagaagagaccgggagcagggaagatcgaggacctatcgtgcacacagaccattctgacttggtcctagaagaaaaaggtacactggagacgaaggatcctaccaacggttactacaaggtccgcggagttagtcctcccgcatcccccgactctcgcgtgaccagctttcagtggaagagccctggcatctctaatctgccatag

SEQ ID NO: 261157 - DNA, 2574 bp, Artificial Sequence
  derived and/or modified sequence
cccagagacccaggccgcggaactggcaggcgtttcagagcgtcagaggctgcggatgagcagacttggaggactccaggccagagactaggctgggcgaagagtcgagcgtgaagggggctccgggccagggtgacaggaggcgtgcttgagaggaagaagttgacgggaaggccagtgcgacggcaaatctcgtgaaccttgggggacgaatgctcaggatgcgggtccccgccctcctcgtcctcctcttctgcttcagagggagagcagggtggtcccggtactggatatcagggaatgcagccaatggccagcatgacctccacattaggcccgtggagctagaggatgaagcatcatatgaatgtcaggctacacaagcaggcctccgctccagaccagcccaactgcacgtgctggtccccccagaagccccccaggtgctgggcggcccctctgtgtctctggttgctggagttcctgcgaacctgacatgtcggagccgtggggatgcccgccctacccctgaattgctgtggttccgagatggggtcctgttggatggagccaccttccatcagaccctgctgaaggaagggacccctgggtcagtggagagcaccttaaccctgacccctttcagccatgatgatggagccacctttgtctgccgggcccggagccaggccctgcccacaggaagagacacagctatcacactgagcctgcagtaccccccagaggtgactctgtctgcttcgccacacactgtgcaggagggagagaaggtcattttcctgtgccaggccacagcccagcctcctgtcacaggctacaggtgggcaaaagggggctctccggtgctcggggcccgcgggccaaggttagaggtcgtggcagacgcctcgttcctgactgagcccgtgtcctgcgaggtcagcaacgccgtgggtagcgccaaccgcagtactgcgctggatgtgctgtttgggccgattctgcaggcaaagccggagcccgtgtccgtggacgtgggggaagacgcttccttcagctgcgcctggcgcgggaacccgcttccacgggtaacctggacccgccgcggtggcgcgcaggtgctgggctctggagccacactgcgtcttccgtcggtggggcccgaggacgcaggcgactatgtgtgcagagctgaggctgggctatcgggcctgcggggcggcgccgcggaggctcggctgactgtgaacgctcccccagtagtgaccgccctgcactctgcgcctgccttcctgaggggccctgctcgcctccagtgtctggttttcgcctctcccgccccagatgccgtggtctggtcttgggatgagggcttcctggaggcggggtcgcagggccggttcctggtggagacattccctgccccagagagccgcgggggactgggtccgggcctgatctctgtgctacacatttcggggacccaggagtctgactttagcaggagctttaactgcagtgcccggaaccggctgggcgagggaggtgcccaggccagcctgggccgtagagacttgctgcccactgtgcggatagtggccggagtggccgctgccaccacaactctccttatggtcatcactggggtggccctctgctgctggcgccacagcaaggcctcagcctctttctccgagcaaaagaacctgatgcgaatccctggcagcagcgacggctccagttcacgaggtcctgaagaagaggagacaggcagccgcgaggaccggggccccattgtgcacactgaccacagtgatctggttctggaggagaaagggactctggagaccaaggacccaaccaacggttactacaaggtccgaggagtcagtccacccgcgtctccagactcacgtgtgacatctttccaatggaagagtcctgggatctccaacttgccataatggattgttctgatttctgaggagccaggacaagttggcgaccttactcctccaaaactgaacacaaggggagggaaagatcattacatttgtcaggagcatttgtatacagtcagctcagccaaaggagatgccccaagtgggagcaacatggccacccaatatgcccacctattccccggtgtaaaagagattcaagatggcaggtaggccctttgaggagagatggggacagggcagtgggtgttgggagtttggggccgggatggaagttgtttctagccactgaaagaagatatttcaagatgaccatctgcattgagaggaaaggtagcataggatagatgaagatgaagagcataccaggccccaccctggctctccctgaggggaactttgctcggccaatggaaatgcagccaagatggccatatactccctaggaacccaagatggccaccatcttgattttactttccttaaagactcagaaagacttggacccaaggagtggggatacagtgagaattaccactgttggggcaaaatattgggataaaaatatttatgtttaataataaaaaaaagtcaaagaggcaagtgtgtctta

SEQ ID NO: 261158 - DNA, 1752 bp, Artificial Sequence
  derived and/or modified sequence
atgctgaggatgagggtgcctgccctgctggtgctgctcttctgcttccggggccgggccggctggagccgctactggatctctggaaatgctgccaacggccagcacgacctgcacatccggcctgtggagctggaggatgaggccagctatgagtgccaggccacccaggccggcctgcggagcaggcctgcccagctgcacgtgctggtgcccccagaggccccccaggtgctgggcggccccagcgtgtccctggtggccggcgtgcctgccaacctgacctgccgcagcagaggagatgcccggcccaccccagagctgctgtggttcagagatggagtgctgctggatggagccaccttccaccagaccctgctgaaggagggcaccccaggctctgtggagagcaccctgaccctgacccccttcagccatgatgatggagccacctttgtgtgccgggcccggagccaggccctgcccaccggccgggacacagccatcaccctgagcctgcagtacccacctgaggtgaccctgagcgccagcccccacacagtgcaggagggggagaaggtgatcttcctgtgccaggccacagcccagccccctgtgacaggctaccgctgggccaagggcggcagccctgtgctgggcgcccggggcccccggctggaggtggtggctgatgccagcttcctgacagagcctgtgtcctgtgaggtgtccaatgctgtgggcagcgccaacagaagcacagccctggatgtgctgtttggccccatcctgcaggccaagccagagcctgtgtctgtggatgtgggagaagatgccagcttcagctgtgcctggaggggcaaccccctgccccgggtgacctggaccaggagaggaggagcccaggtgctgggcagcggggccaccctgcggctgcccagcgtgggcccagaagatgctggggactatgtgtgcagagctgaggccggcctgagcggcctgcggggcggcgctgctgaggcccggctgactgtgaatgcccctcctgtggtgacagccctgcacagcgccccagccttcctgcggggccctgcccggctgcagtgcctggtgtttgccagccctgccccagatgctgtggtgtggagctgggatgagggcttcctggaggccggcagccagggccgcttcctggtggagaccttccctgcccctgagagcagaggaggcctgggccctggcctcatctctgtgctgcacatcagcggcacccaggagagtgacttcagccgctccttcaactgcagcgccaggaaccggctgggggagggcggggcccaggccagcctgggccggcgggacctgctgcccaccgtgagaattgtggccggcgtggccgccgccaccaccaccctgctgatggtgatcactggagtggccctgtgctgctggaggcacagcaaggccagcgccagcttcagcgagcagaagaacctgatgagaattcctggcagcagtgatggcagcagcagccggggccctgaggaggaggagaccggcagcagagaagatcggggccccatcgtgcacacagaccacagcgacctggtgctggaggagaagggcaccctggagaccaaggaccccaccaacggctactacaaggtgcggggcgtgtccccaccagccagcccagacagccgggtgaccagcttccagtggaagagccctggcatcagcaacctgccctag

SEQ ID NO: 261159 - DNA, 1752 bp, Artificial Sequence
  derived and/or modified sequence
atgctgcggatgcgggtgcccgccctgctggtgctgctgttctgcttccgcgggcgggcaggatggagccgatactggattagcggcaacgctgcaaatggccagcacgatttgcatatacgccctgtggagctcgaagacgaagcctcctacgaatgtcaagccacacaggccgggcttcggtcgcgccccgcacaacttcacgtgctggtccctcctgaggccccacaagtgttaggcggcccaagcgtttctttggtggccggagtgccagccaacttgacgtgtcgatcccggggcgacgcccggccgaccccagaactgctgtggttccgtgacggagtactgcttgatggggcgacattccaccagacgttgttgaaggagggcactcctggatctgtcgagtccaccctcacacttactcccttttctcacgatgatggcgcaacgttcgtgtgccgcgcccgatcacaagcactgcccactggtcgggataccgcgattacgttgagcctacagtatccaccggaggtcactctgtccgccagtccgcacaccgtacaggagggagagaaggttatatttctctgccaggctactgcacagccgcctgtcaccggatataggtgggcaaaagggggaagcccagttctcggtgcccgaggcccacgactggaggttgttgcagacgcatccttcctgactgaacccgtctcatgcgaggtgagcaacgccgtggggagtgcaaataggtctacagctctggacgtgctcttcggccccattctgcaggcaaaacctgagcccgtatccgtcgacgtcggcgaggatgcaagcttcagttgtgcctggaggggcaacccacttccgcgtgtaacctggaccagacgcggaggggctcaggtgctgggctcaggggcaactctgcgcctgccatctgtggggccagaagatgccggcgattacgtatgtcgtgctgaggccggtctgagtgggctgaggggtggcgccgccgaagctcgtctaaccgtcaacgctcctcccgtggtcaccgccctccattcggcacccgccttcctgcggggccccgcacggctgcagtgcctggtgttcgcctctcccgctccagatgctgtggtgtggtcttgggacgaagggtttcttgaggccggcagccagggtcggtttcttgtggagacattcccagctcccgaaagtagggggggcctgggcccagggcttatcagcgtgcttcatatttctggcacacaagagagtgatttctcgagatccttcaactgttctgcacggaacagactgggcgaggggggcgctcaggcatctttgggcaggcgtgatctgttgccaactgtgcggatcgtggcaggagttgcagcagccactactacacttctgatggtgattacgggagtcgccctgtgctgctggagacactccaaagctagcgcctccttttcagagcagaagaacctcatgagaatacccgggagcagcgacggctccagctcaaggggaccggaggaagaggagaccggctcccgggaagatcgcggccctatcgtacacacagaccattctgacttggtgcttgaggaaaaaggcacactggagaccaaagaccctacgaatggttattataaagtgagaggtgtgagtccaccagcctcacccgactcccgcgtcacatctttccaatggaagtcgccagggatctcaaacctcccctag

SEQ ID NO: 261160 - DNA, 1752 bp, Artificial Sequence
  derived and/or modified sequence
atgttacggatgagggtgccagccctcctggtcttgctcttctgcttccggggacgagctggctggtctcgctactggatcagtgggaacgctgccaacggccagcacgatcttcacatccggccagtggagcttgaggatgaagcatcctacgaatgtcaggcgacacaggcaggactccggagccggcctgcccagttacatgtgctggtacccccagaagcccctcaagtcctaggcggaccgtcagtgtccctcgtggcaggagtacctgccaaccttacctgtaggtcgcggggtgatgctagaccgacgcccgagctgctttggtttagagatggggtgctcctggatggcgctacctttcaccagactttgctcaaggagggaacacccggatctgtggagagcacattgacactcactccatttagccatgacgacggtgcgacattcgtgtgcagggcacgctctcaggccctgccaacaggcagggacaccgccatcaccctgtctcttcagtatcccccagaggtgactctcagcgcttcaccacatacggtccaggagggcgaaaaggtgatctttctatgccaggccaccgcacagccccctgttaccggataccgatgggcaaagggaggatcaccggtgctcggggcacgcggacctagactggaagtggtggccgatgccagttttctgacagagcccgtatcttgcgaggtgagcaatgccgttggcagtgctaacagatcaacggctctcgatgtcttgtttgggcctatccttcaggccaagcccgaacctgtgagcgtggatgtgggcgaagatgcttcattctcatgcgcctggcgcggaaatcccctcccccgagtgacttggacgagacgagggggagcacaggtgctggggtctggcgctactcttcggctgccatcagtaggacccgaagacgctggtgactatgtatgtcgagccgaagcgggtttgagcggcctacggggtggcgctgccgaggcacgtctaacagtaaatgcccctccagtcgtcaccgcccttcatagcgctccagccttcctgaggggaccggctcgtttgcaatgcctagtatttgcctcaccagcgcctgacgccgtggtctggagttgggacgaaggttttctggaggcagggtctcaaggaaggttcctggtagagacatttccagccccagagtctcgcggagggttgggacccggtctgatttccgtccttcatatctcagggactcaggagtccgatttcagtcgctcattcaattgcagcgcccgaaatcgactgggtgagggaggtgcacaggcctcactggggaggagggacttgctccctactgtgcggatcgtggcaggcgtcgcagcagccacgacaactcttctgatggtgattaccggcgtcgcactatgctgctggaggcactccaaggccagtgcctcattttcagaacagaagaacttaatgcgtatcccgggatcttcggatggaagtagttctagagggccagaggaggaagagacaggcagcagggaggatcgtggacctatcgtgcataccgatcattcagaccttgtgctcgaagaaaagggcacactggaaacaaaagatcccaccaatgggtactacaaggttagaggagtgagcccacccgcatctcctgatagcagagtgacctcttttcagtggaagtcgcccggtatttctaacctcccatag

SEQ ID NO: 261161 - DNA, 1752 bp, Artificial Sequence
  derived and/or modified sequence
atgctgagaatgagagtgcccgccctgctggtgctgctgttctgcttcagaggcagagccggctggagcagatactggatcagcggcaacgccgccaacggccagcacgacctgcacatcagacccgtggagctggaggacgaggccagctacgagtgccaggccacccaggccggcctgagaagcagacccgcccagctgcacgtgctggtgccccccgaggccccccaggtgctgggcggccccagcgtgagcctggtggccggcgtgcccgccaacctgacctgcagaagcagaggcgacgccagacccacccccgagctgctgtggttcagagacggcgtgctgctggacggcgccaccttccaccagaccctgctgaaggagggcacccccggcagcgtggagagcaccctgaccctgacccccttcagccacgacgacggcgccaccttcgtgtgcagagccagaagccaggccctgcccaccggcagagacaccgccatcaccctgagcctgcagtacccccccgaggtgaccctgagcgccagcccccacaccgtgcaggagggcgagaaggtgatcttcctgtgccaggccaccgcccagccccccgtgaccggctacagatgggccaagggcggcagccccgtgctgggcgccagaggccccagactggaggtggtggccgacgccagcttcctgaccgagcccgtgagctgcgaggtgagcaacgccgtgggcagcgccaacagaagcaccgccctggacgtgctgttcggccccatcctgcaggccaagcccgagcccgtgagcgtggacgtgggcgaggacgccagcttcagctgcgcctggagaggcaaccccctgcccagagtgacctggaccagaagaggcggcgcccaggtgctgggcagcggcgccaccctgagactgcccagcgtgggccccgaggacgccggcgactacgtgtgcagagccgaggccggcctgagcggcctgagaggcggcgccgccgaggccagactgaccgtgaacgccccccccgtggtgaccgccctgcacagcgcccccgccttcctgagaggccccgccagactgcagtgcctggtgttcgccagccccgcccccgacgccgtggtgtggagctgggacgagggcttcctggaggccggcagccagggcagattcctggtggagaccttccccgcccccgagagcagaggcggcctgggccccggcctgatcagcgtgctgcacatcagcggcacccaggagagcgacttcagcagaagcttcaactgcagcgccagaaacagactgggcgagggcggcgcccaggccagcctgggcagaagagacctgctgcccaccgtgagaatcgtggccggcgtggccgccgccaccaccaccctgctgatggtgatcaccggcgtggccctgtgctgctggagacacagcaaggccagcgccagcttcagcgagcagaagaacctgatgagaatccccggcagcagcgacggcagcagcagcagaggccccgaggaggaggagaccggcagcagagaggacagaggccccatcgtgcacaccgaccacagcgacctggtgctggaggagaagggcaccctggagaccaaggaccccaccaacggctactacaaggtgagaggcgtgagcccccccgccagccccgacagcagagtgaccagcttccagtggaagagccccggcatcagcaacctgccctag

SEQ ID NO: 261162 - protein, 688 aa, Artificial Sequence
  derived and/or modified sequence
MLRMRVPALLVLLFCFRGRAGPSPHFLQQPEDLVVLLGEEARLPCALGAYWGLVQWTKSGLALGGQRDLPGWSRYWISGNAANGQHDLHIRPVELEDEASYECQATQAGLRSRPAQLHVLVPPEAPQVLGGPSVSLVAGVPANLTCRSRGDARPTPELLWFRDGVLLDGATFHQTLLKEGTPGSVESTLTLPTGRDTAITLSLQYPPEVTLSASPHTVQEGEKVIFLCQATAQPPVTGYRWAKGGSPVLGARGPRLEVVADASFLTEPVSCEVSNAVGSANRSTALDVLFGPILQAKPEPVSVDVGEDASFSCAWRGNPLPRVTWTRRGGAQVLGSGATLRLPSVGPEDAGDYVCRAEAGLSGLRGGAAEARLTVNAPPVVTALHSAPAFLRGPARLQCLVFASPAPDAVVWSWDEGFLEAGSQGRFLVETFPAPESRGGLGPGLISVLHISGTQESDFSRSFNCSARNRLGEGGAQASLGRRDLLPTVRIVAGVAAATTTLLMVITGVALCCWRHSKASASFSEQKNLMRIPGSSDGSSSRGPEEEETGSREDRGPIVHTDHSDLVLEEKGTLETKDPTNGYYKVRGVSVSLSLGEAPGGGLFLPPPSPLGPPGTPTFYDFNPHLGMVPPCRLYRARAGYLTTPHPRAFTSYIKPTSFGPPDLAPGTPPFPYAAFPTPSHPRLQTHV

SEQ ID NO: 261163 - protein, 708 aa, Artificial Sequence
  derived and/or modified sequence
MLRMRVPALLVLLFCFRGRAGPSPHFLQQPEDLVVLLGEEARLPCALGAYWGLVQWTKSGLALGGQRDLPGWSRYWISGNAANGQHDLHIRPVELEDEASYECQATQAGLRSRPAQLHVLVPPEAPQVLGGPSVSLVAGVPANLTCRSRGDARPTPELLWFRDGVLLDGATFHQTLLKEGTPGSVESTLTLTPFSHDDGATFVCRARSQALPTGRDTAITLSLQYPPEVTLSASPHTVQEGEKVIFLCQATAQPPVTGYRWAKGGSPVLGARGPRLEVVADASFLTEPVSCEVSNAVGSANRSTALDVLFGPILQAKPEPVSVDVGEDASFSCAWRGNPLPRVTWTRRGGAQVLGSGATLRLPSVGPEDAGDYVCRAEAGLSGLRGGAAEARLTVNAPPVVTALHSAPAFLRGPARLQCLVFASPAPDAVVWSWDEGFLEAGSQGRFLVETFPAPESRGGLGPGLISVLHISGTQESDFSRSFNCSARNRLGEGGAQASLGRRDLLPTVRIVAGVAAATTTLLMVITGVALCCWRHSKASASFSEQKNLMRIPGSSDGSSSRGPEEEETGSREDRGPIVHTDHSDLVLEEKGTLETKDPTNGYYKVRGVSVSLSLGEAPGGGLFLPPPSPLGPPGTPTFYDFNPHLGMVPPCRLYRARAGYLTTPHPRAFTSYIKPTSFGPPDLAPGTPPFPYAAFPTPSHPRLQTHV

SEQ ID NO: 261164 - DNA, 2067 bp, Artificial Sequence
  derived and/or modified sequence
atgctccgcatgcgggttcctgccttgttagttttgctcttctgttttagagggcgagcgggcccctctccccattttctgcagcagcccgaggatttagtcgttttgcttggggaagaagctcgactaccatgcgctctaggtgcatactggggactggtgcagtggacgaagtcgggcctagctctcggaggacaacgggacctgcccggatggagtagatactggatctccggtaatgcagccaacggacaacatgatctacacatccgacctgtggagttagaggacgaagcttcttacgagtgccaggcaacacaggctggactacggtcaagacctgcccagttacatgtgctggtgcctcccgaggccccacaggtgctgggcggaccaagtgtttcattggtcgctggggtccccgcaaatctgacctgcagatctcggggagatgcccggccaaccccggaactgctctggtttcgggacggcgtgctattggatggggcaactttccaccagacactgctcaaggaaggtacacctggttctgtagagtctactctcacactgcctacaggacgtgataccgctatcacgctcagcttacagtacccccctgaggtgaccctgagtgcaagccctcataccgttcaagagggagaaaaagtaattttcttgtgccaggccaccgctcagccacccgtgaccgggtataggtgggctaagggcggcagcccagtgctgggagcccggggcccccggttggaggtcgttgcagacgccagctttctgacggagccagtctcatgcgaagtgagtaacgctgtgggatccgccaacagaagcaccgctctggacgttctcttcgggccgattttacaagccaaacccgaacctgttagtgtggatgtcggggaggacgcaagcttctcctgcgcttggagaggaaaccctctcccgagggtgacctggaccagacgcggcggcgctcaagtcctcggcagcggagcaaccctgagacttccgtcagttggccccgaagacgccggggactatgtgtgtcgagccgaggccggattatcgggcctgagaggcggggccgccgaggcccgactaacggttaacgccccccccgttgtgacagccctgcactcggcccccgcctttcttagggggccagcccggcttcagtgcttggtattcgcgtcgcctgccccggacgcagtggtgtggtcgtgggatgagggattcttggaagctgggtctcaggggcgcttcttagtggagaccttcccggctcctgaatcccgaggcggtctcggccctgggctcataagtgttctgcacatatccggaacccaggaaagcgatttttctagatcctttaattgctcagcccgaaatcggcttggcgagggcggcgcccaggcctctcttggaaggcgcgatcttctgcccacagtgaggatagtggccggagtggccgctgcgaccacaacactattgatggtaattacgggcgtcgcactgtgttgctggaggcactccaaggcatctgctagtttcagcgaacaaaaaaatctcatgcgcatcccaggaagctcggacggctcaagcagtagggggcctgaggaggaagaaacaggcagcagagaagatcgggggccaatagtgcacacagatcactctgatttagtactggaggagaaagggactctggagacgaaggatcccactaacggttactacaaagtgcgtggcgtttctgtgagcttaagtcttggtgaggcgcccgggggggggctctttttacctccaccctctcccctaggcccgccagggaccccaaccttctacgattttaatccgcacctgggtatggtgccaccctgtcgtctgtacagagcgagagcaggttatctgacaaccccccatccccgtgctttcactagctatatcaaacctacttccttcggcccgccagacctggcaccaggaacgccaccattcccttacgcagcttttccaacaccttcccaccctaggctgcagactcatgtttag

SEQ ID NO: 261165 - DNA, 2127 bp, Artificial Sequence
  derived and/or modified sequence
atgctcagaatgcgagtgccggccctgctggtgctgctcttttgtttccgaggccgagccggcccttccccacactttttgcagcaacccgaggacctggtcgtactgctgggagaagaagcccgcctgccttgcgcccttggtgcttactggggtcttgtgcaatggaccaaaagtggacttgctcttggcgggcagcgggatctgcccggatggtcacggtattggatctctggaaatgcggccaacggacaacacgacctgcatataaggcctgtcgaacttgaggacgaggcctcttatgagtgtcaagccacccaggcggggctgcgctcacgtcccgcgcagttgcacgtgctggtgccacccgaggctccacaggttttgggcggccccagcgtaagtcttgtcgccggtgtgccagcaaacctgacatgtaggtcccgcggagatgcccgtcctaccccggaactcctatggtttagggacggagtcctgctggatggagctactttccaccaaaccctgctgaaagaaggaaccccaggatcagttgaaagcacactcacacttacccctttctcacatgacgacggagctacatttgtgtgtcgtgcccgctcccaggccttgcccaccggaagggacactgccataaccctgtctctgcagtacccgcccgaggtgaccctgagtgcatcacctcataccgtgcaagagggcgaaaaagtgattttcctctgtcaggctactgcacagcctccagtgaccggatatcggtgggcaaagggcggcagtcctgtgctcggtgctcgagggccacggttggaggtggttgcagatgcctctttccttacagagcccgtgagttgcgaagtatcaaatgccgtggggtctgcaaacagatccacagcgctggatgtcttgtttgggccaattctccaggccaagcctgagcccgtgtccgtagatgttggggaagacgcatcgttcagctgtgcatggcgcggtaatccactgccacgggtgacctggacccggcgcggcggagcccaagtgcttggtagtggagcaaccctgcgcctccctagcgtggggccggaggatgcgggcgattacgtgtgtcgggcggaagctggactttccggactccgggggggagccgctgaagctagactgaccgtcaacgcgccaccagtggttaccgccctgcactccgctcccgccttccttaggggacccgcaagacttcagtgcctggtgtttgcatctcccgcacccgacgcagtggtatggtcatgggatgagggcttccttgaggctggttctcagggcaggtttttggtcgaaacgtttccagctcctgaatcgcgcggggggctgggacctggattgatcagcgttctgcacatttctggcacgcaagaatccgacttttctagaagctttaactgctccgcaagaaatcggttgggcgagggtggggcccaggcttctctgggtcggagagaccttttgcctactgtccggatcgtggcaggggtggctgctgccacaactactctgttaatggtgatcacaggggtggcgctttgctgctggcggcactctaaggcttctgccagcttctccgaacaaaagaatctaatgcggatcccagggagctctgacggatccagcagtcgtggtccagaggaggaggagaccggtagccgagaggataggggacccatcgtccataccgaccattccgacttggtgctggaagaaaagggcactttagaaaccaaagatccaaccaacggttactacaaggtccggggggtttctgtaagcctgtcactaggcgaagcaccagggggcggcctgtttctgccaccacctagccctctcggccctcccggaacccctacattttatgacttcaatccacacctcggaatggtgccaccatgccgcctgtatagagccagagccgggtatctgacaacaccacacccccgggccttcacgtcgtacatcaaacctacaagcttcggaccgcctgatctggctcccggcacaccccctttcccctatgctgccttcccaaccccttcacacccaagactgcagacacacgtttag

SEQ ID NO: 261166 - DNA, 2279 bp, Artificial Sequence
  derived and/or modified sequence
cccagagacccaggccgcggaactggcaggcgtttcagagcgtcagaggctgcggatgagcagacttggaggactccaggccagagactaggctgggcgaagagtcgagcgtgaagggggctccgggccagggtgacaggaggcgtgcttgagaggaagaagttgacgggaaggccagtgcgacggcaaatctcgtgaaccttgggggacgaatgctcaggatgcgggtccccgccctcctcgtcctcctcttctgcttcagagggagagcaggcccgtcgccccatttcctgcaacagccagaggacctggtggtgctgctgggggaggaagcccggctgccgtgtgctctgggcgcctactgggggctagttcagtggactaagagtgggctggccctagggggccaaagggacctaccagggtggtcccggtactggatatcagggaatgcagccaatggccagcatgacctccacattaggcccgtggagctagaggatgaagcatcatatgaatgtcaggctacacaagcaggcctccgctccagaccagcccaactgcacgtgctggtccccccagaagccccccaggtgctgggcggcccctctgtgtctctggttgctggagttcctgcgaacctgacatgtcggagccgtggggatgcccgccctacccctgaattgctgtggttccgagatggggtcctgttggatggagccaccttccatcagaccctgctgaaggaagggacccctgggtcagtggagagcaccttaaccctgcccacaggaagagacacagctatcacactgagcctgcagtaccccccagaggtgactctgtctgcttcgccacacactgtgcaggagggagagaaggtcattttcctgtgccaggccacagcccagcctcctgtcacaggctacaggtgggcaaaagggggctctccggtgctcggggcccgcgggccaaggttagaggtcgtggcagacgcctcgttcctgactgagcccgtgtcctgcgaggtcagcaacgccgtgggtagcgccaaccgcagtactgcgctggatgtgctgtttgggccgattctgcaggcaaagccggagcccgtgtccgtggacgtgggggaagacgcttccttcagctgcgcctggcgcgggaacccgcttccacgggtaacctggacccgccgcggtggcgcgcaggtgctgggctctggagccacactgcgtcttccgtcggtggggcccgaggacgcaggcgactatgtgtgcagagctgaggctgggctatcgggcctgcggggcggcgccgcggaggctcggctgactgtgaacgctcccccagtagtgaccgccctgcactctgcgcctgccttcctgaggggccctgctcgcctccagtgtctggttttcgcctctcccgccccagatgccgtggtctggtcttgggatgagggcttcctggaggcggggtcgcagggccggttcctggtggagacattccctgccccagagagccgcgggggactgggtccgggcctgatctctgtgctacacatttcggggacccaggagtctgactttagcaggagctttaactgcagtgcccggaaccggctgggcgagggaggtgcccaggccagcctgggccgtagagacttgctgcccactgtgcggatagtggccggagtggccgctgccaccacaactctccttatggtcatcactggggtggccctctgctgctggcgccacagcaaggcctcagcctctttctccgagcaaaagaacctgatgcgaatccctggcagcagcgacggctccagttcacgaggtcctgaagaagaggagacaggcagccgcgaggaccggggccccattgtgcacactgaccacagtgatctggttctggaggagaaagggactctggagaccaaggacccaaccaacggttactacaaggtccgaggagtcagtgtgagcctgagccttggcgaagcccctggaggaggtctcttcctgccaccaccctccccccttgggcccccagggacccctaccttctatgacttcaacccacacctgggcatggtccccccctgcagactttacagagccagggcaggctatctcaccacaccccaccctcgagctttcaccagctacatcaaacccacatcctttgggcccccagatctggcccccgggactccccccttcccatatgctgccttccccacacctagccacccgcgtctccagactcacgtgtga

SEQ ID NO: 261167 - DNA, 2993 bp, Artificial Sequence
  derived and/or modified sequence
cccagagacccaggccgcggaactggcaggcgtttcagagcgtcagaggctgcggatgagcagacttggaggactccaggccagagactaggctgggcgaagagtcgagcgtgaagggggctccgggccagggtgacaggaggcgtgcttgagaggaagaagttgacgggaaggccagtgcgacggcaaatctcgtgaaccttgggggacgaatgctcaggatgcgggtccccgccctcctcgtcctcctcttctgcttcagagggagagcaggcccgtcgccccatttcctgcaacagccagaggacctggtggtgctgctgggggaggaagcccggctgccgtgtgctctgggcgcctactgggggctagttcagtggactaagagtgggctggccctagggggccaaagggacctaccagggtggtcccggtactggatatcagggaatgcagccaatggccagcatgacctccacattaggcccgtggagctagaggatgaagcatcatatgaatgtcaggctacacaagcaggcctccgctccagaccagcccaactgcacgtgctggtccccccagaagccccccaggtgctgggcggcccctctgtgtctctggttgctggagttcctgcgaacctgacatgtcggagccgtggggatgcccgccctacccctgaattgctgtggttccgagatggggtcctgttggatggagccaccttccatcagaccctgctgaaggaagggacccctgggtcagtggagagcaccttaaccctgacccctttcagccatgatgatggagccacctttgtctgccgggcccggagccaggccctgcccacaggaagagacacagctatcacactgagcctgcagtaccccccagaggtgactctgtctgcttcgccacacactgtgcaggagggagagaaggtcattttcctgtgccaggccacagcccagcctcctgtcacaggctacaggtgggcaaaagggggctctccggtgctcggggcccgcgggccaaggttagaggtcgtggcagacgcctcgttcctgactgagcccgtgtcctgcgaggtcagcaacgccgtgggtagcgccaaccgcagtactgcgctggatgtgctgtttgggccgattctgcaggcaaagccggagcccgtgtccgtggacgtgggggaagacgcttccttcagctgcgcctggcgcgggaacccgcttccacgggtaacctggacccgccgcggtggcgcgcaggtgctgggctctggagccacactgcgtcttccgtcggtggggcccgaggacgcaggcgactatgtgtgcagagctgaggctgggctatcgggcctgcggggcggcgccgcggaggctcggctgactgtgaacgctcccccagtagtgaccgccctgcactctgcgcctgccttcctgaggggccctgctcgcctccagtgtctggttttcgcctctcccgccccagatgccgtggtctggtcttgggatgagggcttcctggaggcggggtcgcagggccggttcctggtggagacattccctgccccagagagccgcgggggactgggtccgggcctgatctctgtgctacacatttcggggacccaggagtctgactttagcaggagctttaactgcagtgcccggaaccggctgggcgagggaggtgcccaggccagcctgggccgtagagacttgctgcccactgtgcggatagtggccggagtggccgctgccaccacaactctccttatggtcatcactggggtggccctctgctgctggcgccacagcaaggcctcagcctctttctccgagcaaaagaacctgatgcgaatccctggcagcagcgacggctccagttcacgaggtcctgaagaagaggagacaggcagccgcgaggaccggggccccattgtgcacactgaccacagtgatctggttctggaggagaaagggactctggagaccaaggacccaaccaacggttactacaaggtccgaggagtcagtgtgagcctgagccttggcgaagcccctggaggaggtctcttcctgccaccaccctccccccttgggcccccagggacccctaccttctatgacttcaacccacacctgggcatggtccccccctgcagactttacagagccagggcaggctatctcaccacaccccaccctcgagctttcaccagctacatcaaacccacatcctttgggcccccagatctggcccccgggactccccccttcccatatgctgccttccccacacctagccacccgcgtctccagactcacgtgtgacatctttccaatggaagagtcctgggatctccaacttgccataatggattgttctgatttctgaggagccaggacaagttggcgaccttactcctccaaaactgaacacaaggggagggaaagatcattacatttgtcaggagcatttgtatacagtcagctcagccaaaggagatgccccaagtgggagcaacatggccacccaatatgcccacctattccccggtgtaaaagagattcaagatggcaggtaggccctttgaggagagatggggacagggcagtgggtgttgggagtttggggccgggatggaagttgtttctagccactgaaagaagatatttcaagatgaccatctgcattgagaggaaaggtagcataggatagatgaagatgaagagcataccaggccccaccctggctctccctgaggggaactttgctcggccaatggaaatgcagccaagatggccatatactccctaggaacccaagatggccaccatcttgattttactttccttaaagactcagaaagacttggacccaaggagtggggatacagtgagaattaccactgttggggcaaaatattgggataaaaatatttatgtttaataataaaaaaaagtcaaagaggcaagtgtgtctta

SEQ ID NO: 261168 - DNA, 2067 bp, Artificial Sequence
  derived and/or modified sequence
atgctgaggatgagggtgcctgccctgctggtgctgctcttctgcttccggggccgggccggccccagcccccacttcctgcagcagcctgaggacctggtggtgctgctgggggaggaggcccggctgccctgtgccctgggcgcctactggggcctggtgcagtggaccaagagcggcctggccctgggcggccagagggacctgcccggctggagccgctactggatctctggaaatgctgccaacggccagcacgacctgcacatccggcctgtggagctggaggatgaggccagctatgagtgccaggccacccaggccggcctgcggagcaggcctgcccagctgcacgtgctggtgcccccagaggccccccaggtgctgggcggccccagcgtgtccctggtggccggcgtgcctgccaacctgacctgccgcagcagaggagatgcccggcccaccccagagctgctgtggttcagagatggagtgctgctggatggagccaccttccaccagaccctgctgaaggagggcaccccaggctctgtggagagcaccctgaccctgcccaccggccgggacacagccatcaccctgagcctgcagtacccacctgaggtgaccctgagcgccagcccccacacagtgcaggagggggagaaggtgatcttcctgtgccaggccacagcccagccccctgtgacaggctaccgctgggccaagggcggcagccctgtgctgggcgcccggggcccccggctggaggtggtggctgatgccagcttcctgacagagcctgtgtcctgtgaggtgtccaatgctgtgggcagcgccaacagaagcacagccctggatgtgctgtttggccccatcctgcaggccaagccagagcctgtgtctgtggatgtgggagaagatgccagcttcagctgtgcctggaggggcaaccccctgccccgggtgacctggaccaggagaggaggagcccaggtgctgggcagcggggccaccctgcggctgcccagcgtgggcccagaagatgctggggactatgtgtgcagagctgaggccggcctgagcggcctgcggggcggcgctgctgaggcccggctgactgtgaatgcccctcctgtggtgacagccctgcacagcgccccagccttcctgcggggccctgcccggctgcagtgcctggtgtttgccagccctgccccagatgctgtggtgtggagctgggatgagggcttcctggaggccggcagccagggccgcttcctggtggagaccttccctgcccctgagagcagaggaggcctgggccctggcctcatctctgtgctgcacatcagcggcacccaggagagtgacttcagccgctccttcaactgcagcgccaggaaccggctgggggagggcggggcccaggccagcctgggccggcgggacctgctgcccaccgtgagaattgtggccggcgtggccgccgccaccaccaccctgctgatggtgatcactggagtggccctgtgctgctggaggcacagcaaggccagcgccagcttcagcgagcagaagaacctgatgagaattcctggcagcagtgatggcagcagcagccggggccctgaggaggaggagaccggcagcagagaagatcggggccccatcgtgcacacagaccacagcgacctggtgctggaggagaagggcaccctggagaccaaggaccccaccaacggctactacaaggtgcggggcgtgtctgtgtccctgagcctgggggaggcccctgggggcggcctcttcctgcccccacccagccccctgggccccccaggcacccccaccttctatgacttcaacccccacctgggcatggtgcccccctgccgcctgtaccgggcccgggccggctacctgaccaccccccacccccgggccttcaccagctacatcaagcccaccagctttggacctccagacctggcccctggcaccccacccttcccctatgctgccttccccacccccagccacccccggctgcagacccacgtgtag

SEQ ID NO: 261169 - DNA, 2127 bp, Artificial Sequence
  derived and/or modified sequence
atgctgaggatgagggtgcctgccctgctggtgctgctcttctgcttccggggccgggccggccccagcccccacttcctgcagcagcctgaggacctggtggtgctgctgggggaggaggcccggctgccctgtgccctgggcgcctactggggcctggtgcagtggaccaagagcggcctggccctgggcggccagagggacctgcccggctggagccgctactggatctctggaaatgctgccaacggccagcacgacctgcacatccggcctgtggagctggaggatgaggccagctatgagtgccaggccacccaggccggcctgcggagcaggcctgcccagctgcacgtgctggtgcccccagaggccccccaggtgctgggcggccccagcgtgtccctggtggccggcgtgcctgccaacctgacctgccgcagcagaggagatgcccggcccaccccagagctgctgtggttcagagatggagtgctgctggatggagccaccttccaccagaccctgctgaaggagggcaccccaggctctgtggagagcaccctgaccctgacccccttcagccatgatgatggagccacctttgtgtgccgggcccggagccaggccctgcccaccggccgggacacagccatcaccctgagcctgcagtacccacctgaggtgaccctgagcgccagcccccacacagtgcaggagggggagaaggtgatcttcctgtgccaggccacagcccagccccctgtgacaggctaccgctgggccaagggcggcagccctgtgctgggcgcccggggcccccggctggaggtggtggctgatgccagcttcctgacagagcctgtgtcctgtgaggtgtccaatgctgtgggcagcgccaacagaagcacagccctggatgtgctgtttggccccatcctgcaggccaagccagagcctgtgtctgtggatgtgggagaagatgccagcttcagctgtgcctggaggggcaaccccctgccccgggtgacctggaccaggagaggaggagcccaggtgctgggcagcggggccaccctgcggctgcccagcgtgggcccagaagatgctggggactatgtgtgcagagctgaggccggcctgagcggcctgcggggcggcgctgctgaggcccggctgactgtgaatgcccctcctgtggtgacagccctgcacagcgccccagccttcctgcggggccctgcccggctgcagtgcctggtgtttgccagccctgccccagatgctgtggtgtggagctgggatgagggcttcctggaggccggcagccagggccgcttcctggtggagaccttccctgcccctgagagcagaggaggcctgggccctggcctcatctctgtgctgcacatcagcggcacccaggagagtgacttcagccgctccttcaactgcagcgccaggaaccggctgggggagggcggggcccaggccagcctgggccggcgggacctgctgcccaccgtgagaattgtggccggcgtggccgccgccaccaccaccctgctgatggtgatcactggagtggccctgtgctgctggaggcacagcaaggccagcgccagcttcagcgagcagaagaacctgatgagaattcctggcagcagtgatggcagcagcagccggggccctgaggaggaggagaccggcagcagagaagatcggggccccatcgtgcacacagaccacagcgacctggtgctggaggagaagggcaccctggagaccaaggaccccaccaacggctactacaaggtgcggggcgtgtctgtgtccctgagcctgggggaggcccctgggggcggcctcttcctgcccccacccagccccctgggccccccaggcacccccaccttctatgacttcaacccccacctgggcatggtgcccccctgccgcctgtaccgggcccgggccggctacctgaccaccccccacccccgggccttcaccagctacatcaagcccaccagctttggacctccagacctggcccctggcaccccacccttcccctatgctgccttccccacccccagccacccccggctgcagacccacgtgtag

SEQ ID NO: 261170 - DNA, 2067 bp, Artificial Sequence
  derived and/or modified sequence
atgctgcggatgcgggtgcccgccctgctggtgctgctgttctgcttcagggggcgggcaggtcctagtccacactttcttcaacagccagaagatttggtggtgcttcttggagaggaggctagattgccatgcgccctgggggcttactggggcctcgtgcagtggaccaaatcgggcctggccctgggaggacaaagggatctgcctggctggtcacgctattggatctccgggaacgcggcaaacggccagcatgacctccatattagacctgtggaattggaggacgaagcctcttatgagtgccaggccacccaagccggcttacggtcccggcccgcccagctgcatgtgttggtccccccagaggccccacaggttttaggtggaccttcagtctcccttgttgccggcgtaccggccaatctgacatgtcggtcgagaggcgacgctcggcccacaccagaactgctgtggtttcgtgacggagtgctcctggacggcgccactttccaccagacactgctaaaggagggtacgcccggtagtgtggaaagcacattgacactacccaccggaagggacactgccattacactgtccctgcagtaccctccggaggtcacactctccgcttcaccgcacacagtccaagagggagagaaagtgatatttctgtgccaggcaaccgcgcagccaccagtgactggctacagatgggcgaaaggggggtctcccgtgctgggggcccgcggtccgcgattggaggtggtagcagatgcaagctttctcaccgaacccgtgtcctgcgaggtaagcaacgcagtgggttcagccaaccgatcaactgcactcgacgtgttattcggacccattctgcaggctaagcctgagcccgttagcgttgatgtaggggaggacgcttcttttagttgtgcttggaggggcaatccacttccccgcgtgacctggacccgacgcggaggggcccaggtgcttggctcaggcgcgacactccgcctcccgagtgttggtccggaagatgccggtgactatgtgtgccgggccgaggcgggacttagcggacttcgcggcggtgctgctgaagcgagattgaccgttaatgcgccacctgtggttaccgccctgcactccgcccccgccttcctccggggccccgctagactccaatgcctggtgtttgccagtcctgctcctgatgctgtggtgtggtcttgggatgagggctttctcgaggcaggctcccaggggcgctttttggtggaaaccttccctgcgcccgagagtaggggcggcctgggacctgggcttatttctgtgctgcacatctcgggaacgcaagagtccgatttctctagaagcttcaattgctcagcccggaacaggctcggcgaagggggcgcccaggctagtctggggaggcgagacctacttcccacagtgagaattgtggccggggtggctgcggcaactaccactctattaatggttattaccggtgttgctttgtgctgttggcgacactctaaagcctctgcttccttctccgaacagaagaacttgatgcgaatacccggttcatctgatggttcctccagccgtgggcctgaagaagaggagactggatcaagagaggatagaggccccatagtacacacggatcacagcgatctagtcctcgaagaaaagggaaccctggagaccaaagaccctacaaacggctattacaaggtccgtggtgtgagtgtatcactgagcctgggggaagcacctggtggtgggttgtttctccctccgccatcaccactgggcccgcccgggactccgactttctacgatttcaaccctcacctaggcatggtacctccttgtaggttgtacagggcacgcgccgggtacctcactacgccccatcctcgggctttcactagttatataaaacccacatctttcgggccccctgatctcgctccgggcacaccgcccttcccttacgcggcgttcccgactccttcacacccacgactgcagacccatgtgtag

SEQ ID NO: 261171 - DNA, 2127 bp, Artificial Sequence
  derived and/or modified sequence
atgctgcggatgcgggtgcccgccctgctggtgctgctgttctgcttccgtggaagagctgggcctagtccacattttttgcaacaaccagaagacttggtggtactgctgggggaagaggccaggttgccttgcgccctcggtgcatactggggactggttcaatggacaaaatctggccttgccctgggaggacaacgggatttaccaggttggtccaggtactggattagcggtaacgccgctaacggccaacacgatttacacatcagaccagttgagctggaggacgaagcttcatatgagtgtcaggccactcaggccgggttgagaagccgacccgctcagctgcatgtcttggtgcctccagaagctccacaagtgttaggaggtccgtcggtgtcccttgtagctggggtcccagccaatttgacatgcagaagtcgcggagatgctagacccactcccgagctcctctggtttcgggatggggtgttactggacggggcgacatttcatcagaccttgttgaaggaagggactcccggcagcgtggaatccacactgacgctgaccccattcagtcatgacgacggcgccaccttcgtgtgtcgggcacgcagccaggcccttcctactggccgcgacaccgccattactttgtctctgcagtatcctcccgaggtgacgctttctgccagtccacacaccgtacaggaaggggaaaaggtcatctttctctgccaggccacggcccagcctcctgttaccggctacagatgggccaagggcggatctccggttctgggggctagaggtccacgactcgaggttgtcgccgatgcttccttcttgaccgaaccagtgtcatgcgaggtttccaacgccgtggggagcgctaatcggtctaccgccttagacgtgctgttcggtcctatcctgcaggccaagccagagcctgtaagcgtagacgttggtgaagacgctagcttcagctgtgcttggcgaggaaatcccctaccccgggttacttggacgaggagaggaggggcacaggttcttgggtccggagctactttgcggctaccttccgtcggccccgaagatgcgggggactacgtctgccgagccgaggctgggttgtcggggctcaggggaggtgccgcagaagcccggctgacggtgaacgcgccaccagtggtaacggctttacatagcgccccagcgttcttaaggggtcccgccagattgcagtgtctcgtgtttgcttctcctgctcctgacgctgtggtgtggagctgggatgagggcttccttgaggctggaagccaggggcgatttcttgttgaaacattccctgcccccgaatcccgtgggggccttgggcctggcctgatttccgtgcttcacatttcagggactcaagagtcagacttctcgcgctcctttaactgttccgcgcggaaccgattaggcgagggcggggcccaggcgtccttaggaagaagagacttgttaccaacggtccggatagtggctggggttgccgccgcgacgaccaccctgctaatggtcatcactggagtggccctgtgctgctggcgccattcgaaagccagcgcttccttctccgagcagaaaaaccttatgcgcatcccaggaagtagcgacggtagcagtagccgaggtcctgaagaagaggagacggggtccagagaggatagagggcccatagttcacacagatcactcggatctggtgttagaggagaagggcacattggagactaaggaccccaccaacggctattacaaagtcagaggagttagcgtgtctctctcactgggcgaggcacccggcgggggactgtttctgcctcctccgtccccacttggaccccccgggacacctaccttctacgacttcaacccacatttgggcatggtccccccctgccgcctctaccgcgcgagagcgggttacctgaccaccccccatccacgggccttcacttcctatatcaagcctacaagtttcggcccccctgacctcgcccccggaaccccaccctttccctatgcagccttcccaactccctctcaccctcgtcttcaaactcatgtgtag

SEQ ID NO: 261172 - DNA, 2067 bp, Artificial Sequence
  derived and/or modified sequence
atgctacgcatgagagtccctgccctgctggtgctgcttttttgtttccgtgggagggccggaccttctccacatttcttgcagcagccagaggacttagtggtgctgctgggagaagaggctaggctgccgtgcgccctgggcgcttattggggactcgtccagtggacaaaatcagggctcgcgctcggcggacaaagggacctgcccggatggagccgatattggattagcggcaatgcagccaatggccaacacgacctgcacatacgtcccgtagaacttgaggatgaggcaagctatgagtgtcaggctacccaggccggactgcgtagtcgacccgcacaacttcacgtgttggtgccgccagaagcaccacaggtcctagggggaccttccgtttcactcgtggctggcgtccctgcaaatctcacatgccggtctcgaggcgacgccaggccaacaccagagctcttatggttccgcgacggagtgctgctggacggagccacattccaccaaactctgctcaaagagggaacccccggaagcgtcgagtctaccctgacccttcccaccgggcgagataccgcgatcaccctatccctgcaatatccacccgaggtgaccttgtcagcctccccacataccgttcaagagggagagaaggtcatcttcctttgtcaagcgactgcgcagccgcctgtgactggctatcgatgggccaagggcggatctcccgtgctcggagcccgtggcccaaggcttgaagttgtcgcggatgcttcattcctcacagaacccgtttcatgtgaggtctccaatgcggtgggcagcgccaatcgctccaccgcattagacgtcctgttcggccctattctgcaggcaaagcctgaacccgtaagcgtggacgtcggcgaggacgcatcgttttcttgcgcctggagaggaaatcctctgcctcgagttacatggaccaggcggggaggggcacaagtgctgggcagtggggcaactcttcgcctgccttctgttggcccagaggatgctggagactacgtgtgtcgtgcagaagcgggactgtccggtctgagggggggtgccgctgaggcccgtctaaccgtgaatgccccacccgtcgtgactgcacttcacagtgccccagcatttcttagaggacctgcaaggttacagtgcctggtcttcgccagcccagcgccagacgctgtggtatggtcttgggacgagggatttctggaggctgggtcacaggggaggtttctggtggagacgtttccggcaccagaatctaggggaggactcgggccagggctaatttctgtattacatataagtgggacgcaggagagcgactttagcaggtccttcaactgttcggctaggaaccgcctgggggaaggtggggctcaggccagtctaggcaggagagatcttctccccactgtgagaatcgtcgctggggtggcagccgctactactaccctgctgatggtcattacaggcgtggcattatgctgctggagacactcaaaagcgtcagcctccttctcagaacagaagaatctgatgaggattccagggagctctgacggaagttcctccagggggccagaagaagaggagaccggtagtagggaggatagggggccaattgtgcatactgatcactctgacctggtccttgaagaaaaaggcacccttgagaccaaagatcctacaaacggatactataaagtgcgcggagtgtcagtcagcttgtcattgggtgaagcgcctggcggaggactgtttctcccacccccttcgcctctgggcccacccggaacccctactttctacgattttaacccacacctgggaatggttcccccttgtaggttgtatagagctagagccggttacctgactacaccacatcctcgggcattcacctcttacatcaagcctacgtccttcgggccacctgatctggcccctggcacgcccccttttccgtatgccgcatttcctaccccatcacaccctcggttacagacccacgtatag

SEQ ID NO: 261173 - DNA, 2127 bp, Artificial Sequence
  derived and/or modified sequence
atgctccgcatgagagtgccggcacttcttgtccttcttttctgttttagggggagagctggcccttcccctcactttctccagcagcctgaagacctagtagtcctgctgggagaggaggctcgcctgccctgtgccctcggagcttattgggggctggtgcagtggaccaaatccggacttgctctgggcggacagcgcgaccttcctggttggtctcgctactggatttcaggaaacgcagccaatggacagcatgatctccacattagacccgtcgagctggaggatgaggcatcatatgagtgccaggctacccaggcgggtttgcgctcgagacctgctcagctccatgtgttagttcctcctgaagcccctcaggtattgggcggaccaagcgtatctttggtcgctggagtgcccgcaaacctcacttgcaggtcccgaggcgacgctagacctacccctgaactcttatggttccgagacggagtgctgctcgatggagccactttccatcaaactttactgaaggaaggcacgccaggatccgtggagtcaactctgactttgactccctttagccacgatgacggcgctacattcgtctgtcgggcaagaagccaggctctgcctactggtagagataccgccataaccctctctttgcaatatcccccagaggtgaccttatctgcctccccacatacagtgcaggagggtgaaaaggtcattttcctttgccaggccaccgctcaaccccctgtgactgggtatagatgggcgaagggcggaagccccgtcttgggcgctagggggcctcgactggaggtcgtggctgacgcctcgttcctgaccgaacctgtctcttgcgaggtgagcaacgccgttggcagtgccaaccggtccaccgcgctcgacgttctgttcggtccaattctccaggcaaaacctgaaccagtgagcgtggatgtcggcgaggatgcaagcttctcctgtgcgtggcgagggaatcccttgccaagggtgacatggacccggagaggcggtgcacaggtgctgggatcaggagctactttaagacttccaagcgtagggccagaggacgccggtgactacgtctgtcgggcagaagccggattatcaggtctgagaggaggtgcagccgaagccaggttgaccgtcaatgcccctcccgtggtcaccgccttgcacagcgctcccgcttttctgaggggacctgccaggctgcagtgcttggtgttcgcaagccctgcaccagacgcagttgtgtggtcttgggatgaaggattcttggaagcaggttctcagggacgtttcttagtggaaacattccccgctccagagtccagaggagggttaggcccaggtctgatatccgtgttacatatttctgggacgcaggagtccgattttagcaggagctttaattgctctgcccgaaatagactgggggagggaggcgcacaagcaagcctgggacgcagggatctgttacctacggtccggatcgtcgcaggggtggctgcggctactacgaccctccttatggtgataacaggtgttgccctctgctgctggcggcactctaaagcctctgcaagtttttcagagcagaaaaacctgatgcggattcctggaagtagtgacggaagctccagcagggggcctgaggaggaggaaacaggcagtagagaagaccgcggacccattgtgcacacagatcatagtgacctggttctggaggagaaagggacattagagactaaggatcctacaaatggctactacaaggttcgaggcgtgtcagtgtctctgagcttgggagaggctccaggcggtggcttgtttttaccacccccaagccctttgggcccacccggtactccaactttttatgacttcaatccccaccttggcatggtgcctccctgtaggctatatcgtgccagagcaggttacctgactaccccgcaccctcgcgctttcacaagctacatcaaacccacttcctttggacccccagacctggccccaggtactcctcccttcccgtacgcggcatttcctaccccaagccaccccaggctccagacgcacgtttag

SEQ ID NO: 261174 - DNA, 2067 bp, Artificial Sequence
  derived and/or modified sequence
atgctgagaatgagagtgcccgccctgctggtgctgctgttctgcttcagaggcagagccggccccagcccccacttcctgcagcagcccgaggacctggtggtgctgctgggcgaggaggccagactgccctgcgccctgggcgcctactggggcctggtgcagtggaccaagagcggcctggccctgggcggccagagagacctgcccggctggagcagatactggatcagcggcaacgccgccaacggccagcacgacctgcacatcagacccgtggagctggaggacgaggccagctacgagtgccaggccacccaggccggcctgagaagcagacccgcccagctgcacgtgctggtgccccccgaggccccccaggtgctgggcggccccagcgtgagcctggtggccggcgtgcccgccaacctgacctgcagaagcagaggcgacgccagacccacccccgagctgctgtggttcagagacggcgtgctgctggacggcgccaccttccaccagaccctgctgaaggagggcacccccggcagcgtggagagcaccctgaccctgcccaccggcagagacaccgccatcaccctgagcctgcagtacccccccgaggtgaccctgagcgccagcccccacaccgtgcaggagggcgagaaggtgatcttcctgtgccaggccaccgcccagccccccgtgaccggctacagatgggccaagggcggcagccccgtgctgggcgccagaggccccagactggaggtggtggccgacgccagcttcctgaccgagcccgtgagctgcgaggtgagcaacgccgtgggcagcgccaacagaagcaccgccctggacgtgctgttcggccccatcctgcaggccaagcccgagcccgtgagcgtggacgtgggcgaggacgccagcttcagctgcgcctggagaggcaaccccctgcccagagtgacctggaccagaagaggcggcgcccaggtgctgggcagcggcgccaccctgagactgcccagcgtgggccccgaggacgccggcgactacgtgtgcagagccgaggccggcctgagcggcctgagaggcggcgccgccgaggccagactgaccgtgaacgccccccccgtggtgaccgccctgcacagcgcccccgccttcctgagaggccccgccagactgcagtgcctggtgttcgccagccccgcccccgacgccgtggtgtggagctgggacgagggcttcctggaggccggcagccagggcagattcctggtggagaccttccccgcccccgagagcagaggcggcctgggccccggcctgatcagcgtgctgcacatcagcggcacccaggagagcgacttcagcagaagcttcaactgcagcgccagaaacagactgggcgagggcggcgcccaggccagcctgggcagaagagacctgctgcccaccgtgagaatcgtggccggcgtggccgccgccaccaccaccctgctgatggtgatcaccggcgtggccctgtgctgctggagacacagcaaggccagcgccagcttcagcgagcagaagaacctgatgagaatccccggcagcagcgacggcagcagcagcagaggccccgaggaggaggagaccggcagcagagaggacagaggccccatcgtgcacaccgaccacagcgacctggtgctggaggagaagggcaccctggagaccaaggaccccaccaacggctactacaaggtgagaggcgtgagcgtgagcctgagcctgggcgaggcccccggcggcggcctgttcctgcccccccccagccccctgggcccccccggcacccccaccttctacgacttcaacccccacctgggcatggtgcccccctgcagactgtacagagccagagccggctacctgaccaccccccaccccagagccttcaccagctacatcaagcccaccagcttcggcccccccgacctggcccccggcaccccccccttcccctacgccgccttccccacccccagccaccccagactgcagacccacgtgtag

SEQ ID NO: 261175 - DNA, 2127 bp, Artificial Sequence
  derived and/or modified sequence
atgctgagaatgagagtgcccgccctgctggtgctgctgttctgcttcagaggcagagccggccccagcccccacttcctgcagcagcccgaggacctggtggtgctgctgggcgaggaggccagactgccctgcgccctgggcgcctactggggcctggtgcagtggaccaagagcggcctggccctgggcggccagagagacctgcccggctggagcagatactggatcagcggcaacgccgccaacggccagcacgacctgcacatcagacccgtggagctggaggacgaggccagctacgagtgccaggccacccaggccggcctgagaagcagacccgcccagctgcacgtgctggtgccccccgaggccccccaggtgctgggcggccccagcgtgagcctggtggccggcgtgcccgccaacctgacctgcagaagcagaggcgacgccagacccacccccgagctgctgtggttcagagacggcgtgctgctggacggcgccaccttccaccagaccctgctgaaggagggcacccccggcagcgtggagagcaccctgaccctgacccccttcagccacgacgacggcgccaccttcgtgtgcagagccagaagccaggccctgcccaccggcagagacaccgccatcaccctgagcctgcagtacccccccgaggtgaccctgagcgccagcccccacaccgtgcaggagggcgagaaggtgatcttcctgtgccaggccaccgcccagccccccgtgaccggctacagatgggccaagggcggcagccccgtgctgggcgccagaggccccagactggaggtggtggccgacgccagcttcctgaccgagcccgtgagctgcgaggtgagcaacgccgtgggcagcgccaacagaagcaccgccctggacgtgctgttcggccccatcctgcaggccaagcccgagcccgtgagcgtggacgtgggcgaggacgccagcttcagctgcgcctggagaggcaaccccctgcccagagtgacctggaccagaagaggcggcgcccaggtgctgggcagcggcgccaccctgagactgcccagcgtgggccccgaggacgccggcgactacgtgtgcagagccgaggccggcctgagcggcctgagaggcggcgccgccgaggccagactgaccgtgaacgccccccccgtggtgaccgccctgcacagcgcccccgccttcctgagaggccccgccagactgcagtgcctggtgttcgccagccccgcccccgacgccgtggtgtggagctgggacgagggcttcctggaggccggcagccagggcagattcctggtggagaccttccccgcccccgagagcagaggcggcctgggccccggcctgatcagcgtgctgcacatcagcggcacccaggagagcgacttcagcagaagcttcaactgcagcgccagaaacagactgggcgagggcggcgcccaggccagcctgggcagaagagacctgctgcccaccgtgagaatcgtggccggcgtggccgccgccaccaccaccctgctgatggtgatcaccggcgtggccctgtgctgctggagacacagcaaggccagcgccagcttcagcgagcagaagaacctgatgagaatccccggcagcagcgacggcagcagcagcagaggccccgaggaggaggagaccggcagcagagaggacagaggccccatcgtgcacaccgaccacagcgacctggtgctggaggagaagggcaccctggagaccaaggaccccaccaacggctactacaaggtgagaggcgtgagcgtgagcctgagcctgggcgaggcccccggcggcggcctgttcctgcccccccccagccccctgggcccccccggcacccccaccttctacgacttcaacccccacctgggcatggtgcccccctgcagactgtacagagccagagccggctacctgaccaccccccaccccagagccttcaccagctacatcaagcccaccagcttcggcccccccgacctggcccccggcaccccccccttcccctacgccgccttccccacccccagccaccccagactgcagacccacgtgtag

SEQ ID NO: 261176 - protein, 265 aa, Artificial Sequence
  derived and/or modified sequence
MEDSMDMDMSPLRPQNYLFGCELKADKDYHFKVDNDENEHQLSLRTVSLGAGAKDELHIVEAEAMNYEGSPIKVTLATLKMSVQPTVSLGGFEITPPVVLRLKCGSGPVHISGQHLVAVEEDAESEDEEEEDVKLLSISGKRSAPGGGSKVPQKKVKLAADEDDDDDDEEDDDEDDDDDDFDDEEAEEKAPVKKGQESFKKQEKTPKTPKGPSSVEDIKAKMQASIEKGGSLPKVEAKFINYVKNCFRMTDQEAIQDLWQWRKSL

SEQ ID NO: 261177 - DNA, 798 bp, Artificial Sequence
  derived and/or modified sequence
atggaggacagcatggacatggacatgagccccctgagaccccagaactacctgttcggctgcgagctgaaggccgacaaggactaccacttcaaggtggacaacgacgagaacgagcaccagctgagcctgagaaccgtgagcctgggcgccggcgccaaggacgagctgcacatcgtggaggccgaggccatgaactacgagggcagccccatcaaggtgaccctggccaccctgaagatgagcgtgcagcccaccgtgagcctgggcggcttcgagatcaccccccccgtggtgctgagactgaagtgcggcagcggccccgtgcacatcagcggccagcacctggtggccgtggaggaggacgccgagagcgaggacgaggaggaggaggacgtgaagctgctgagcatcagcggcaagagaagcgcccccggcggcggcagcaaggtgccccagaagaaggtgaagctggccgccgacgaggacgacgacgacgacgacgaggaggacgacgacgaggacgacgacgacgacgacttcgacgacgaggaggccgaggagaaggcccccgtgaagaagggccaggagagcttcaagaagcaggagaagacccccaagacccccaagggccccagcagcgtggaggacatcaaggccaagatgcaggccagcatcgagaagggcggcagcctgcccaaggtggaggccaagttcatcaactacgtgaagaactgcttcagaatgaccgaccaggaggccatccaggacctgtggcagtggagaaagagcctgtag

SEQ ID NO: 261178 - DNA, 798 bp, Artificial Sequence
  derived and/or modified sequence
atggaggactccatggacatggatatgtcgccccttaggccacagaattacctgttcgggtgtgaactcaaagccgataaggactaccacttcaaggtggataacgatgaaaatgaacatcagctgtccctgcgcactgtttctctcggcgccggagccaaagatgagctgcacattgttgaggccgaagcaatgaactatgagggctcccctatcaaggtcacactggccaccctgaagatgtcagtgcaacctactgtttcacttggaggctttgagataactccccctgttgtactgcggctgaagtgtgggtctggacccgttcacatctctgggcagcacctagtcgcagttgaggaggacgctgagagcgaagacgaagaagaagaagatgtgaagttgctgtcgataagcggcaagcggtctgccccagggggcggaagcaaggtgccacagaagaaagttaagctcgccgcggatgaggatgatgatgacgacgatgaggaagatgatgacgaagatgacgatgatgatgacttcgacgacgaggaagccgaagagaaggcccctgttaagaagggccaggagtcctttaagaagcaagagaagacgccaaagacacccaaagggcctagcagtgtcgaggacatcaaggcaaagatgcaagccagtatcgagaaagggggttccttgccaaaggtggaggcgaagttcatcaactatgtgaaaaactgctttcgaatgacagatcaggaggccatccaagatctctggcaatggcggaagagcctctag

SEQ ID NO: 261179 - DNA, 798 bp, Artificial Sequence
  derived and/or modified sequence
atggaggacagcatggacatggacatgagccccctgcggccccagaactacctgtttggctgtgagctgaaggctgacaaggactaccacttcaaggtggacaatgatgaaaatgagcaccagctgagcctgaggacagtgtccctgggcgctggggccaaggatgagctgcacatcgtggaggccgaggccatgaactatgagggcagccccatcaaggtgaccctggccaccctgaagatgtctgtgcagcccaccgtgtccctgggcggctttgagatcaccccacctgtggtgctgcggctgaagtgtggcagcggccctgtgcacatcagcggccagcacctggtggccgtggaggaggatgctgagagtgaagatgaggaggaggaggatgtgaagctgctgagcatcagcggcaagaggtctgcccctgggggcggcagcaaggtgccccagaagaaggtgaagctggccgcagatgaagatgatgatgatgatgatgaggaggatgatgatgaagatgatgatgatgatgactttgatgatgaggaggccgaggagaaggcccctgtgaagaagggccaggagagcttcaagaagcaggagaagacccccaagacccccaagggccccagctctgtggaggacatcaaggccaagatgcaggccagcattgagaagggcggcagcctgcccaaggtggaggccaagttcatcaactacgtgaagaactgcttcaggatgacagaccaggaggccatccaggacctgtggcagtggaggaagagcctgtag

SEQ ID NO: 261180 - DNA, 798 bp, Artificial Sequence
  derived and/or modified sequence
atggaggacagcatggacatggacatgagccccctgcggccccagaattacctgtttggatgcgagttgaaggcggataaggactaccactttaaagtggacaacgatgaaaacgagcaccagctaagcctgcgtaccgtttccctcggggccggagcaaaggacgagcttcacatcgttgaggccgaagctatgaattatgaggggagccccataaaagtgacattagcgactcttaagatgtcagtgcagcccaccgtctcactggggggattcgaaatcaccccccctgtagtgctgagattgaagtgtggtagcggtcctgtgcacattagcgggcagcatctggtggcggtagaagaggacgctgagtccgaggatgaagaggaggaagacgttaaactcttaagcattagcggaaagcggtcagccccgggtggtggctctaaggtgccccaaaagaaggtgaagttggccgccgatgaagacgacgacgacgatgacgaggaagacgatgacgaggacgacgacgatgacgactttgacgacgaggaagctgaggaaaaggcgcctgttaaaaagggccaagagagtttcaagaaacaggaaaaaacacctaagacccctaagggccctagctcagttgaggacatcaaagcaaagatgcaggcgtcaatcgaaaagggagggtcactgcccaaggtcgaggctaaattcattaattacgttaagaattgcttccggatgacagatcaggaagctattcaagatttgtggcagtggcgtaagtctctgtag

SEQ ID NO: 261181 - DNA, 1237 bp, Artificial Sequence
  derived and/or modified sequence
aagcgcggggagcctgcgtcctttccctggtgtgattccgtcctgcgcggttgttctctggagcagcgttcttttatctccgtccgccttctctcctacctaagtgcgtgccgccacccgatggaagattcgatggacatggacatgagccccctgaggccccagaactatcttttcggttgtgaactaaaggccgacaaagattatcactttaaggtggataatgatgaaaatgagcaccagttatctttaagaacggtcagtttaggggctggtgcaaaggatgagttgcacattgttgaagcagaggcaatgaattacgaaggcagtccaattaaagtaacactggcaactttgaaaatgtctgtacagccaacggtttcccttgggggctttgaaataacaccaccagtggtcttaaggttgaagtgtggttcagggccagtgcatattagtggacagcacttagtagctgtggaggaagatgcagagtcagaagatgaagaggaggaggatgtgaaactcttaagtatatctggaaagcggtctgcccctggaggtggtagcaaggttccacagaaaaaagtaaaacttgctgctgatgaagatgatgacgatgatgatgaagaggatgatgatgaagatgatgatgatgatgattttgatgatgaggaagctgaagaaaaagcgccagtgaagaaaggacaagaatccttcaagaaacaggaaaaaactcctaaaacaccaaaaggacctagttctgtagaagacattaaagcaaaaatgcaagcaagtatagaaaaaggtggttctcttcccaaagtggaagccaaattcatcaattatgtgaagaattgcttccggatgactgaccaagaggctattcaagatctctggcagtggaggaagtctctttaagaaaatagtttaaacaatttgttaaaaaattttccgtcttatttcatttctgtaacagttgatatctggctgtcctttttataatgcagagtgagaactttccctaccgtgtttgataaatgttgtccaggttctattgccaagaatgtgttgtccaaaatgcctgtttagtttttaaagatggaactccaccctttgcttggttttaagtatgtatggaatgttatgataggacatagtagtagcggtggtcagacatggaaatggtggggagacaaaaatatacatgtgaaataaaactcagtattttaataaagta

SEQ ID NO: 261182 - DNA, 798 bp, Artificial Sequence
  derived and/or modified sequence
atggaggacagcatggacatggacatgtcaccgcttcggccacaaaattacctgtttggttgcgagttgaaggcagacaaggattaccacttcaaggttgataacgacgagaatgagcatcagctgtctctgaggaccgtgtctcttggcgctggcgcaaaagacgaacttcacattgtggaagcagaagctatgaattacgagggctcacccatcaaagtgaccctagcaacactcaaaatgtctgtccagccaacagtgtcccttggtggattcgaaattacgccacccgtggtgctacgcctgaagtgcggcagtggccctgttcatatcagcggccagcacctggtcgctgtggaggaggacgctgagtctgaggacgaggaggaagaagatgtgaagctgctttcaatttccggcaagagatcggcccctggcggagggagcaaggtgcctcagaagaaagtgaaactggcagccgatgaagacgacgacgacgacgacgaggaagacgacgatgaagatgatgacgacgatgatttcgatgatgaggaggctgaggagaaggccccagtgaagaagggacaggaatccttcaagaagcaggagaaaacccccaagacgcctaagggaccttccagcgtagaggacatcaaagccaagatgcaagctagcatcgagaagggaggcagcctaccgaaggtggaagccaaattcatcaattacgtaaagaattgcttccgaatgaccgaccaggaagctatacaggacctgtggcagtggaggaagtccttgtag

SEQ ID NO: 261183 - protein, 723 aa, Artificial Sequence
  derived and/or modified sequence
MLLFVEVASKGTGLNPNAKVWQEIAPGNTDATPVTHGTESSWHEIAATSGAHPEGNAELSEDICKEYEVMYSSSCETTRNTTGIEESTDGMILGPEDLSYQIYDVSGESNSAVSTEDLKECLKKQLEFCFSRENLSKDLYLISQMDSDQFIPIWTVANMEEIKKLTTDPDLILEVLRSSPMVQVDEKGEKVRPSHKRCIVILREIPETTPIEEVKGLFKSENCPKVISCEFAHNSNWYITFQSDTDAQQAFKYLREEVKTFQGKPIMARIKAINTFFAKNGYRLMDSSIYSHPIQTQAQYASPVFMQPVYNPHQQYSVYSIVPQSWSPNPTPYFETPLAPFPNGSFVNGFNSPGSYKTNAAAMNMGRPFQKNRVKPQFRSSGGSEHSTEGSVSLGDGQLNRYSSRNFPAERHNPTVTGHQEQTYLQKETSTLQVEQNGDYGRGRRTLFRGRRRREDDRISRPHPSTAESKAPTPKFDLLASNFPPLPGSSSRMPGELVLENRMSDVVKGVYKEKDNEELTISCPVPADEQTECTSAQQLNMSTSSPCAAELTALSTTQQEKDLIEDSSVQKDGLNQTTIPVSPPSTTKPSRASTASPCNNNINAATAVALQEPRKLSYAEVCQKPPKEPSSVLVQPLRELRSNVVSPTKNEDNGAPENSVEKPHEKPEARASKDYSGFRGNIIPRGAAGKIREQRRQFSHRAIPQGVTRRNGKEQYVPPRSPK

SEQ ID NO: 261184 - DNA, 2172 bp, Artificial Sequence
  derived and/or modified sequence
atgctgctgttcgtggaggtggccagcaagggcaccggcctgaaccccaacgccaaggtgtggcaggagatcgcccccggcaacaccgacgccacccccgtgacccacggcaccgagagcagctggcacgagatcgccgccaccagcggcgcccaccccgagggcaacgccgagctgagcgaggacatctgcaaggagtacgaggtgatgtacagcagcagctgcgagaccaccagaaacaccaccggcatcgaggagagcaccgacggcatgatcctgggccccgaggacctgagctaccagatctacgacgtgagcggcgagagcaacagcgccgtgagcaccgaggacctgaaggagtgcctgaagaagcagctggagttctgcttcagcagagagaacctgagcaaggacctgtacctgatcagccagatggacagcgaccagttcatccccatctggaccgtggccaacatggaggagatcaagaagctgaccaccgaccccgacctgatcctggaggtgctgagaagcagccccatggtgcaggtggacgagaagggcgagaaggtgagacccagccacaagagatgcatcgtgatcctgagagagatccccgagaccacccccatcgaggaggtgaagggcctgttcaagagcgagaactgccccaaggtgatcagctgcgagttcgcccacaacagcaactggtacatcaccttccagagcgacaccgacgcccagcaggccttcaagtacctgagagaggaggtgaagaccttccagggcaagcccatcatggccagaatcaaggccatcaacaccttcttcgccaagaacggctacagactgatggacagcagcatctacagccaccccatccagacccaggcccagtacgccagccccgtgttcatgcagcccgtgtacaacccccaccagcagtacagcgtgtacagcatcgtgccccagagctggagccccaaccccaccccctacttcgagacccccctggcccccttccccaacggcagcttcgtgaacggcttcaacagccccggcagctacaagaccaacgccgccgccatgaacatgggcagacccttccagaagaacagagtgaagccccagttcagaagcagcggcggcagcgagcacagcaccgagggcagcgtgagcctgggcgacggccagctgaacagatacagcagcagaaacttccccgccgagagacacaaccccaccgtgaccggccaccaggagcagacctacctgcagaaggagaccagcaccctgcaggtggagcagaacggcgactacggcagaggcagaagaaccctgttcagaggcagaagaagaagagaggacgacagaatcagcagaccccaccccagcaccgccgagagcaaggcccccacccccaagttcgacctgctggccagcaacttcccccccctgcccggcagcagcagcagaatgcccggcgagctggtgctggagaacagaatgagcgacgtggtgaagggcgtgtacaaggagaaggacaacgaggagctgaccatcagctgccccgtgcccgccgacgagcagaccgagtgcaccagcgcccagcagctgaacatgagcaccagcagcccctgcgccgccgagctgaccgccctgagcaccacccagcaggagaaggacctgatcgaggacagcagcgtgcagaaggacggcctgaaccagaccaccatccccgtgagcccccccagcaccaccaagcccagcagagccagcaccgccagcccctgcaacaacaacatcaacgccgccaccgccgtggccctgcaggagcccagaaagctgagctacgccgaggtgtgccagaagccccccaaggagcccagcagcgtgctggtgcagcccctgagagagctgagaagcaacgtggtgagccccaccaagaacgaggacaacggcgcccccgagaacagcgtggagaagccccacgagaagcccgaggccagagccagcaaggactacagcggcttcagaggcaacatcatccccagaggcgccgccggcaagatcagagagcagagaagacagttcagccacagagccatcccccagggcgtgaccagaagaaacggcaaggagcagtacgtgccccccagaagccccaagtag

SEQ ID NO: 261185 - DNA, 2172 bp, Artificial Sequence
  derived and/or modified sequence
atgttgctcttcgtggaagtcgctagcaaggggaccgggctgaaccccaacgcaaaggtatggcaggaaatcgcacctggaaacaccgatgctactcccgtgacacacggaaccgaaagttcttggcacgagatcgccgcgaccagtggagcacaccccgaggggaatgccgaactatctgaagatatctgtaaggagtacgaggtaatgtactctagcagttgtgagacaacccgcaatactaccggaatcgaggaaagtacggacgggatgattcttggacctgaggacttgagctaccagatttatgacgtgtctggggagagcaactccgctgtttctaccgaggacctgaaggagtgcctgaagaaacagttggagttctgcttcagccgggagaacctctcaaaggatctgtatttgatctcccagatggacagcgaccagtttatccctatctggacagtagctaatatggaggagattaaaaaattgactaccgaccctgatctgattctggaggttctacgctcgagtcctatggtgcaggtggacgagaaaggagaaaaggtcagaccctcgcacaagaggtgcatcgtgatactgcgcgaaattcctgagacaacccccattgaggaagttaaagggctctttaagtctgagaactgcccgaaggtgatttcatgtgagtttgctcataactctaactggtatattacctttcaaagtgatactgatgcccagcaggcgttcaaatacttgcgggaagaagtgaagacgtttcagggcaagccgatcatggctcggatcaaggcaattaatacgttttttgcaaaaaacggataccggctgatggactctagcatctattcccaccccattcagacccaggcccagtacgcgtccccagtgtttatgcagcccgtttataacccccatcagcagtattccgtatatagcatcgtcccccagagttggagccccaatccaaccccttacttcgagacccccttagcacccttccctaatggctctttcgtgaacgggtttaattcacccggatcatacaagactaacgccgcagccatgaacatgggcagaccattccagaagaaccgcgtgaaacctcagtttcgctcttctggcggcagcgagcattccactgaggggtccgtgtcattgggggatggacagctgaaccgctattcttctcgcaattttcccgctgagaggcataatccaacagtgacagggcatcaggagcagacatatctgcagaaggagacgtcaacgcttcaggtcgaacagaatggggattatggcagaggacgcagaaccctgttccggggccgcagaagaagagaggatgacaggatcagcaggccgcaccccagtactgccgagagcaaggctcccacaccaaagtttgatttgctggcatctaactttccacccctgcccggatccagctcccgtatgcccggcgaattggttttggaaaataggatgtctgacgtcgtgaagggggtgtataaagaaaaagacaacgaggaattaaccatttcatgtcctgtgcctgccgatgagcaaaccgaatgcactagcgcccagcagctgaatatgtccacttctagcccttgtgcagcagagctcacagccctgagcacgacccaacaggagaaggaccttatcgaagatagcagtgtgcagaaggatggccttaaccagactactattccagtgtcccctccgtcaactacaaagccttcccgtgctagtaccgcatctccatgcaacaacaacatcaacgccgccacagcagtggctctgcaagagcccagaaagctgagctacgcggaagtgtgtcagaagccgccaaaagaaccttcctccgtgctggttcagcctctaagggaactccgcagcaatgtggtatcgccgactaaaaacgaagataatggagctcccgagaacagcgtcgaaaagccccatgagaagcccgaagctcgcgccagcaaagattattccggcttccgagggaacatcatccccagaggggccgcgggaaaaatcagggaacagcgtcgacagttctcgcatcgggccataccccagggcgtcactagacgtaacggcaaagaacaatacgtgcccccaaggagcccaaaatag

SEQ ID NO: 261186 - DNA, 2172 bp, Artificial Sequence
  derived and/or modified sequence
atgctgctgtttgtggaggtggccagcaagggcaccggcctgaaccccaatgccaaggtgtggcaggagatcgcccctggcaacacagatgccacccctgtgacccacggcacagagagctcctggcatgaaattgctgccaccagcggggcccaccctgagggcaatgctgagctgtctgaggacatctgcaaggagtatgaggtgatgtacagcagcagctgtgagaccaccaggaacaccaccggcatcgaggagagcacagatggcatgatcctgggccctgaggacctgagctaccagatctatgatgtgtctggagagagcaacagcgctgtgtccacagaggacctgaaggagtgcctgaagaagcagctggagttctgcttcagccgggagaacctgagcaaggacctgtacctgatcagccagatggacagcgaccagttcatccccatctggacagtggccaacatggaggagatcaagaagctgaccacagatcctgacctgatcctggaggtgctgcggagcagccccatggtgcaggtggatgagaagggggagaaggtgcggcccagccacaagcgctgcatcgtcatcctgcgggagatccctgagaccacccccatcgaggaggtgaagggcctcttcaagtctgagaactgccccaaggtgatcagctgtgaatttgcccacaacagcaactggtacatcaccttccagagcgacacagatgcccagcaggccttcaagtacctgcgggaggaggtgaagaccttccagggcaagcccatcatggcccgcatcaaggccatcaacaccttctttgccaagaatggctaccgcctgatggacagcagcatctacagccaccccatccagacccaggcccagtatgccagccctgtgttcatgcagcctgtgtacaacccccaccagcagtacagcgtgtacagcatcgtgccccagagctggagccccaaccccaccccctactttgagacccccctggcccccttccccaacggcagctttgtgaatggcttcaacagccctggcagctacaagaccaatgctgctgccatgaacatgggccggcccttccagaagaacagagtgaagccccagttccgcagcagcggcggcagcgagcacagcacagagggctctgtgtccctgggagatggccagctgaaccgctacagcagcaggaacttccctgctgagcggcacaaccccaccgtgacaggccaccaggagcagacctacctgcagaaggagaccagcaccctgcaggtggagcagaatggagactatggccggggccgccgcaccctcttccggggcagaagaagaagagaagatgaccgcatcagccggccccaccccagcacagctgagagcaaggcccccacccccaagtttgacctgctggccagcaacttcccccccctgcccggcagcagcagcaggatgcctggagagctggtgctggagaacaggatgtctgatgtggtgaagggcgtgtacaaggagaaggacaatgaggagctgaccatcagctgccctgtgcctgcagatgagcagacagagtgcaccagcgcccagcagctgaacatgagcaccagcagcccctgtgccgctgagctgacagccctgagcaccacccagcaggagaaggacctgattgaggacagctctgtgcagaaggatggcctgaaccagaccaccatccctgtgtccccacccagcaccaccaagcccagccgggccagcacagccagcccctgcaacaacaacatcaatgctgccacagctgtggccctgcaggagcccaggaagctgtcctatgcagaggtgtgccagaagccacccaaggagcccagctctgtgctggtgcagcccctgcgggagctgcggagcaatgtggtgagccccaccaagaatgaagataatggagccccagaaaattctgtggagaagccccatgagaagccagaggcccgggccagcaaggactacagcggcttccggggcaacatcatccccagaggagctgctgggaagatccgggagcagaggcggcagttcagccaccgggccatcccccagggcgtgaccaggagaaatggcaaggagcagtatgtgccccccaggagccccaagtag

SEQ ID NO: 261187 - DNA, 2853 bp, Artificial Sequence
  derived and/or modified sequence
cttatcctagcaattggggcgcgggcctgtgagccagttggagttgcggcggcgggaacgattgggctgagcagaggacgacatgttgcttttcgtggaggtagcatctaaaggaactggtttaaatcctaatgccaaagtatggcaagaaattgctcctggaaatactgatgccaccccagtaactcatggaactgaaagctcttggcatgaaatagcagctacatcaggtgctcatcctgagggtaatgcagagctctcagaagatatatgtaaagaatatgaagtaatgtattcttcatcttgtgaaaccacaagaaatactacaggcattgaagaatcaactgatgggatgattttaggaccagaagatctgagttaccaaatatatgatgtttccggagaaagcaattcagcagtttctacagaagacctaaaagaatgtctgaagaaacaattagaattctgtttttcacgagaaaatttgtcaaaggatctttacttgatatctcaaatggatagtgatcagttcatcccaatttggacagttgccaacatggaagaaataaaaaagttgactacagaccctgatctaattcttgaagtgttaagatcttctcccatggtacaagttgatgagaagggtgagaaagtgagaccaagtcataagcgttgtattgtaattcttagagagattcctgaaacaacaccaatagaggaagtgaaaggtttgttcaaaagtgaaaactgccccaaagtgataagctgtgagtttgcacacaatagcaactggtatatcactttccagtcagacacagatgcacaacaggcttttaaatacttaagagaagaagttaaaacatttcagggcaagccaattatggcaaggataaaagccatcaatacattttttgctaagaatggttatcgattaatggattctagtatctatagtcaccccattcaaactcaagcacagtatgcctccccagtctttatgcagcctgtatataatcctcaccaacagtactcggtctatagtattgtgcctcagtcttggtctccaaatcctacaccttactttgaaacaccactggctccctttcccaatggtagttttgtgaatggctttaattcgccaggatcttataaaacaaatgctgctgctatgaatatgggtcgaccattccaaaaaaatcgtgtgaagcctcagtttaggtcatctggtggttcagaacactcaacagagggctctgtatccttgggggatggacagttgaacagatatagttcaagaaactttccagctgaacggcataaccccacagtaactgggcatcaggagcaaacttaccttcagaaggagacttccactttgcaggtggaacagaatggggactatggtaggggcaggagaactctcttcagaggtcgaagacgacgagaagatgacaggatctcaagacctcatccttcaacagctgaatcaaaggctccaacaccaaagtttgacttattagcctcaaattttccacctttacctggaagttcatcaagaatgccaggtgaactcgttttggagaataggatgtctgatgttgttaaaggtgtctacaaagaaaaggataatgaagagttgacaattagttgcccagtgcctgcagatgagcagacagaatgcacttctgcccagcaactcaatatgagtaccagttctccatgtgctgctgagcttactgcattaagcacaactcagcaagaaaaggatctaatagaagattcctctgttcagaaggatggtctcaatcagacaactataccagtttctcctccaagtactacaaagccatcgagggcaagtactgcttcaccatgtaataataacataaatgcagctacagctgtggctctacaggaaccccgaaagttaagttatgctgaagtgtgccagaagccccctaaagagccatcttcagttcttgtgcagccactacgggaacttcgctccaatgtggtgtctcccaccaaaaatgaagacaatggagctcctgagaactccgttgagaaaccacatgagaagccagaagcaagggctagtaaggattattctggcttccgaggcaatataatccccaggggagcagcaggaaaaatcagggaacagagacgccagtttagccatagggctatacctcagggagtgactcgacgtaatggcaaagagcaatatgtgccacccagatcaccaaagtaaaaaacaacaaaactattcaaaaacttcactctcttcccattaaacttgaactgtggctatattgaactgttttggaggggagggggtagccaggaaggaaacaagagaaagtacgtccatttcattatggattttggagttgtgagtgataggatcccaaaattcatctctaatgtggtttttaaatgctggaggattccaatcaatataaatatatatatatatatacacacacatatataaaaagtataatttttctatttttgtttttggttttaatttgcagagatttgctgccaggaatcaattttgagggttcagatttagcttggaagaaaaaaaagaaacatacatccttcagtataggagatgagggaatgagagaaaatattttttgaagaagcatttctgtaaaattagaaattactttttttaatctatttaaagtttggcttgaagaatgccatctctgactatatggccttgtattgcaaagcggatcagtggctggggtgcctgttgtgggtgtgagtgtgtacaagagcgattgaagccaaatctgttgtcatgttagtaaatgatttgaaaactgaatgtaa

SEQ ID NO: 261188 - DNA, 2172 bp, Artificial Sequence
  derived and/or modified sequence
atgctgctgttcgtggaggtggccagcaagggcaccggcctgaaccccaatgctaaggtttggcaggaaattgcgcctggcaacacagatgccaccccagttacccacggaaccgagagtagctggcacgagatagcagccacctctggggcgcatcccgaaggcaatgccgaactgagcgaagacatttgtaaggagtacgaggtaatgtattccagttcctgcgagactactagaaatactaccggtatcgaagaatcgactgatggcatgatcttgggacccgaagacctgtcctatcagatctacgatgtaagtggcgagtctaactccgctgtctccacagaggatttaaaagagtgtctcaagaaacagctcgagttttgcttcagcagagaaaatctttctaaggatctctacctgataagtcagatggattctgaccagtttatacctatttggacagtggccaacatggaggaaataaagaagctcaccaccgatcccgatttaatcctggaagtgttgcggtcgagtcccatggttcaagtagatgagaaaggagagaaggtgagaccatctcataagcggtgcattgtcatattaagggaaattccagaaaccacccctatagaagaagtgaaaggtctgtttaaaagcgagaattgccctaaggtcatctcttgcgagttcgctcacaacagcaactggtatattactttccagagcgataccgatgcgcagcaggcttttaagtatctgcgggaggaggtgaaaacatttcagggaaaaccaatcatggcccgcattaaggcgataaatacctttttcgccaaaaacggttaccgcctaatggattccagtatatactcccaccctattcagactcaagctcagtacgcctctccggtgtttatgcaaccagtgtacaacccccaccaacagtactccgtgtatagcattgtaccccagagctggagccctaatcccaccccatatttcgaaaccccacttgctccttttcccaacgggagcttcgtgaacgggttcaatagcccaggatcatacaaaacaaacgcagccgcaatgaatatgggccgcccatttcagaagaatagggtcaagccccagtttagatcgagtggcgggtctgagcactctaccgaaggtagcgtgagcctcggcgatggacagctgaatcgctactcttccagaaacttccccgctgagaggcataatcctaccgtaaccggtcatcaggagcagacctacttacagaaagagacgtcgacactgcaggtggagcagaacggcgactacggccgcggccgcagaacactgtttcgagggcgcaggcggagggaggacgataggatatcacggccccacccttcaacagcagaatcgaaggcgcctacacctaagtttgacctgctcgctagcaacttccctcctctgcccggatccagctcaaggatgcccggcgaactagtcctggagaatagaatgagtgatgttgttaaaggtgtatacaaggaaaaggataatgaagagctgaccatctcctgcccagtccccgcagacgagcagacagagtgtacctccgctcagcagctgaacatgtcgacctcttcaccttgcgctgcggaattaaccgcactatccaccacacagcaggagaaggacttgattgaagactcatccgtacagaaggacgggcttaatcaaacgactatccccgtgagccccccctcgaccactaagcctagtcgagcaagcactgcgtctccttgtaataataacattaatgccgctactgccgtggcactgcaggaacccaggaagctcagttatgctgaggtgtgtcagaaaccacctaaagagcctagcagtgtccttgtccagccactgcgcgaactgcgctctaacgttgtgtcaccaaccaaaaacgaagataacggagctccagagaactctgtggaaaaaccgcacgaaaaacccgaagctcgcgcctctaaagattactcaggattccgagggaacatcattcctcggggggcagctggtaagattcgagagcagcggaggcagttcagccacagagcaattcctcagggggtgaccaggcgtaatggtaaggaacagtacgtgcctccccggtcaccaaaatag

SEQ ID NO: 261189 - DNA, 2172 bp, Artificial Sequence
  derived and/or modified sequence
atgctactttttgtcgaggtggcatccaagggcacgggtcttaatcccaacgcaaaagtgtggcaagagatcgccccaggcaatactgacgccacgcctgtgacgcacggtaccgagtcttcatggcacgagatcgccgctacaagtggggcacaccctgaaggaaatgccgagttgtctgaggacatatgcaaggaatatgaagtgatgtatagctcttcatgcgagaccacccgcaatactactggaattgaggagagtactgatggaatgattctcggccctgaggacctttcctaccagatttatgacgtaagcggtgagtcaaactcagctgttagcactgaagatctgaaggaatgcctgaagaaacaactggaattctgttttagcagggagaacctgtcaaaagacctctatttgattagtcagatggattccgaccagttcattcccatttggaccgtcgctaatatggaggaaatcaagaagttgacaaccgaccctgacctgatcctcgaggttctcaggagctcccctatggtccaggtagatgagaaaggggaaaaagtccgaccaagccacaagcggtgtatcgttatcttgagagagattcctgaaactactccaattgaggaagtgaaaggactattcaagtcagagaactgtcccaaagtcatttcctgcgagttcgctcataacagtaactggtacataaccttccaatcagacactgacgcacagcaggcatttaaatatctacgagaagaggtgaagacattccaaggcaagcctataatggcacgcataaaggcgattaatacctttttcgccaagaatggctatcgtttgatggactcttcaatatactcccaccccattcagactcaggcccagtacgcttcccctgtgttcatgcagcccgtgtataatcctcaccagcagtactcagtgtattccattgtccctcagtcctggagtcctaaccctactccgtactttgaaacgcccctggccccttttcctaatggctcctttgtgaatgggttcaattccccaggtagctataagaccaatgcggcagccatgaatatggggcgtccctttcagaagaaccgggtcaaacctcagttccgtagcagcgggggaagtgaacattcgacggagggaagcgtgtccctgggcgatggacagctgaatagatattcgtcccggaacttccctgctgagcgtcataaccctacagtaactggccatcaggaacagacgtatctgcaaaaagaaacctcaaccctgcaagtggaacagaacggagattatgggagagggcgacgcaccctgttcaggggaaggaggaggagagaagatgacaggatcagtagaccccacccatctaccgctgaaagtaaagctcccacccccaagtttgacttactcgctagcaacttcccgcctttacctggatcctcatcacggatgcctggcgagctagtgcttgagaatagaatgtccgatgtcgtgaagggggtatacaaagaaaaggataatgaagaattaaccatatcgtgccctgtaccggctgatgaacagacagagtgcacctcagcccagcagcttaatatgtctacgtccagcccgtgtgccgcagaactgactgcgttaagtacaacgcaacaggagaaggatctcattgaggactcgagtgtgcagaaggacggcctgaatcagaccacgataccagtttctcctcccagcacgacaaaaccctctagggcttctacggcgtctccttgcaacaataatatcaacgccgcaaccgcggtcgcgctgcaagagcccaggaaactctcatacgctgaagtgtgccaaaaacctccgaaggaaccaagttccgtcttagtccagcccctaagagaactgagatcaaatgtggtcagccctactaagaacgaggataacggggcaccggagaattctgtggagaagcctcacgagaagcctgaagctcgcgcatctaaagactattcgggcttccgcggtaacatcattccacggggtgcagccggaaaaatacgagaacagcggagacagttttcgcacagggctatcccccagggtgtaaccagacgcaacggcaaagaacagtacgtccctcccagatcccctaagtag

SEQ ID NO: 261190 - protein, 653 aa, Artificial Sequence
  derived and/or modified sequence
MLLFVEQVASKGTGLNPNAKVWQEIAPGNTDATPVTHGTESSWHEIAATSGAHPEGNAELSEDICKEYEVMYSSSCETTRNTTGIEESTDGMILGPEDLSYQIYDVSGESNSAVSTEDLKECLKKQLEFCFSRENLSKDLYLISQMDSDQFIPIWTVANMEEIKKLTTDPDLILEVLRSSPMVQVDEKGEKVRPSHKRCIVILREIPETTPIEEVKGLFKSENCPKVISCEFAHNSNWYITFQSDTDAQQAFKYLREEVKTFQGKPIMAPFPNGSFVNGFNSPGSYKTNAAAMNMGRPFQKNRVKPQFRSSGGSEHSTEGSVSLGDGQLNRYSSRNFPAERHNPTVTGHQEQTYLQKETSTLQVEQNGDYGRGRRTLFRGRRRREDDRISRPHPSTAESKAPTPKFDLLASNFPPLPGSSSRMPGELVLENRMSDVVKGVYKEKDNEELTISCPVPADEQTECTSAQQLNMSTSSPCAAELTALSTTQQEKDLIEDSSVQKDGLNQTTIPVSPPSTTKPSRASTASPCNNNINAATAVALQEPRKLSYAEVCQKPPKEPSSVLVQPLRELRSNVVSPTKNEDNGAPENSVEKPHEKPEARASKDYSGFRGNIIPRGAAGKIREQRRQFSHRAIPQGVTRRNGKEQYVPPRSPK

SEQ ID NO: 261191 - DNA, 1962 bp, Artificial Sequence
  derived and/or modified sequence
atgctgctgttcgtggagcaggtggccagcaagggcaccggcctgaaccccaacgccaaggtgtggcaggagatcgcccccggcaacaccgacgccacccccgtgacccacggcaccgagagcagctggcacgagatcgccgccaccagcggcgcccaccccgagggcaacgccgagctgagcgaggacatctgcaaggagtacgaggtgatgtacagcagcagctgcgagaccaccagaaacaccaccggcatcgaggagagcaccgacggcatgatcctgggccccgaggacctgagctaccagatctacgacgtgagcggcgagagcaacagcgccgtgagcaccgaggacctgaaggagtgcctgaagaagcagctggagttctgcttcagcagagagaacctgagcaaggacctgtacctgatcagccagatggacagcgaccagttcatccccatctggaccgtggccaacatggaggagatcaagaagctgaccaccgaccccgacctgatcctggaggtgctgagaagcagccccatggtgcaggtggacgagaagggcgagaaggtgagacccagccacaagagatgcatcgtgatcctgagagagatccccgagaccacccccatcgaggaggtgaagggcctgttcaagagcgagaactgccccaaggtgatcagctgcgagttcgcccacaacagcaactggtacatcaccttccagagcgacaccgacgcccagcaggccttcaagtacctgagagaggaggtgaagaccttccagggcaagcccatcatggcccccttccccaacggcagcttcgtgaacggcttcaacagccccggcagctacaagaccaacgccgccgccatgaacatgggcagacccttccagaagaacagagtgaagccccagttcagaagcagcggcggcagcgagcacagcaccgagggcagcgtgagcctgggcgacggccagctgaacagatacagcagcagaaacttccccgccgagagacacaaccccaccgtgaccggccaccaggagcagacctacctgcagaaggagaccagcaccctgcaggtggagcagaacggcgactacggcagaggcagaagaaccctgttcagaggcagaagaagaagagaggacgacagaatcagcagaccccaccccagcaccgccgagagcaaggcccccacccccaagttcgacctgctggccagcaacttcccccccctgcccggcagcagcagcagaatgcccggcgagctggtgctggagaacagaatgagcgacgtggtgaagggcgtgtacaaggagaaggacaacgaggagctgaccatcagctgccccgtgcccgccgacgagcagaccgagtgcaccagcgcccagcagctgaacatgagcaccagcagcccctgcgccgccgagctgaccgccctgagcaccacccagcaggagaaggacctgatcgaggacagcagcgtgcagaaggacggcctgaaccagaccaccatccccgtgagcccccccagcaccaccaagcccagcagagccagcaccgccagcccctgcaacaacaacatcaacgccgccaccgccgtggccctgcaggagcccagaaagctgagctacgccgaggtgtgccagaagccccccaaggagcccagcagcgtgctggtgcagcccctgagagagctgagaagcaacgtggtgagccccaccaagaacgaggacaacggcgcccccgagaacagcgtggagaagccccacgagaagcccgaggccagagccagcaaggactacagcggcttcagaggcaacatcatccccagaggcgccgccggcaagatcagagagcagagaagacagttcagccacagagccatcccccagggcgtgaccagaagaaacggcaaggagcagtacgtgccccccagaagccccaagtag

SEQ ID NO: 261192 - DNA, 1962 bp, Artificial Sequence
  derived and/or modified sequence
atgctactcttcgttgagcaagttgcctccaaggggacaggcttaaaccctaatgctaaggtttggcaggagattgccccaggcaatacagacgccactcccgttacacatggcaccgaaagctcctggcatgaaatcgccgcaacttccggtgcccaccctgaggggaatgccgagttgtcagaggatatttgtaaagaatatgaagtcatgtatagctcctcttgcgagacaactagaaacacgacgggtatagaggaaagcacagatggcatgattttaggacccgaggacctctcataccaaatttacgacgtgtcaggagaatctaattcagcagtctccaccgaggacctaaaggaatgtttgaagaagcagctcgagttttgtttcagccgagaaaacttgagcaaggacctgtatttgatcagtcagatggactccgatcaattcattcccatctggactgttgccaacatggaggagatcaaaaagttgacaactgacccggacttgattttagaggtcttgcggagctcccccatggttcaggtggatgaaaagggggaaaaggtgcggcccagccacaaacgatgtatcgtcattcttcgggagatacccgagaccacccctatagaggaagtgaagggattattcaaatcagagaactgcccaaaggtcatctcgtgtgaattcgcccataacagcaactggtatataacattccagtcagacaccgatgcccagcaagcttttaaatatttgcgggaagaggtgaaaacatttcagggaaaaccaatcatggctcctttcccgaacggctctttcgtaaacggatttaactccccgggttcatacaaaactaatgcagcagcgatgaatatgggtcggccgtttcagaaaaatcgtgtgaaaccccagtttagaagttcaggagggagcgagcatagcactgaaggatcagtgtccctcggggacggccaactcaaccggtatagctcgagaaactttcccgccgagagacacaatcccacagttactggtcatcaagagcagacatatctgcagaaggagacaagtacgctccaagttgagcaaaacggggattacggacggggacgtagaactctatttagagggcggagaagacgggaggatgatcgtattagccgccctcacccctcaaccgctgagagcaaggcccctacgcccaagttcgatcttctcgcgtcaaatttccctcctttaccgggcagttcttccagaatgcctggcgaactggtgctggagaaccgcatgtccgacgtagtcaagggcgtttataaagagaaggataacgaggagctcaccattagctgtcccgtgcctgcagacgagcaaacggagtgtacctccgctcaacaattgaatatgtcaacatcttccccttgcgctgccgagctcactgcactttccacaacccagcaggagaaggacctgattgaagattcgagcgtccagaaagacggccttaaccagaccaccatcccagttagcccacctagtactaccaagccatcccgggcctctacggcctccccgtgcaacaacaatattaatgccgcaaccgccgtggcactccaggaacctagaaaactgtcctacgcagaggtctgccagaaaccgccaaaggagccaagtagcgttctggtacaaccattgagggagctgcgaagcaatgtggttagccccacgaagaatgaagacaatggcgcccccgaaaattcggttgagaagccccatgagaaaccagaggcccgtgcaagcaaggactattccgggttcaggggaaacatcatccctcggggagcggcgggcaaaattcgggagcagagaaggcagttctctcaccgcgccattcctcagggcgtgacccgcaggaacggcaaggaacagtatgtccccccaagatccccaaaatag

SEQ ID NO: 261193 - DNA, 1962 bp, Artificial Sequence
  derived and/or modified sequence
atgctgctgtttgtggagcaggtggccagcaaaggaacaggcctgaaccccaatgccaaggtgtggcaggagatcgcccctggcaacacagatgccacccctgtgacccatggaacagagagctcctggcatgaaattgctgccaccagcggggcccaccctgagggcaatgctgagctgtctgaggacatctgcaaggagtatgaggtgatgtacagcagcagctgtgagaccaccaggaacaccactggaattgaggagagcacagatggcatgatcctgggccctgaggacctgagctaccagatctatgatgtgtctggagagagcaacagcgctgtgtccacagaggacctgaaggaatgtctgaagaagcagctggagttctgcttcagccgggagaacctgagcaaggacctgtacctgatcagccagatggacagcgaccagttcatccccatctggacagtggccaacatggaggagatcaagaagctgaccacagatcctgacctgatcctggaggtgctgcggagcagccccatggtgcaggtggatgagaagggggagaaggtgcggcccagccacaagcgctgcatcgtcatcctgcgggagatccctgagaccacccccatcgaggaggtgaagggcctcttcaagtctgagaactgccccaaggtgatcagctgtgaatttgcccacaacagcaactggtacatcaccttccagagcgacacagatgcccagcaggccttcaagtacctgcgggaggaggtgaagaccttccagggcaagcccatcatggcccccttccccaacggcagctttgtgaatggcttcaacagccctggcagctacaagaccaatgctgctgccatgaacatgggccggcccttccagaagaacagagtgaagccccagttccgcagcagcggcggcagcgagcacagcacagagggctctgtgtccctgggagatggccagctgaaccgctacagcagcaggaacttccctgctgagcggcacaaccccaccgtgacaggccaccaggagcagacctacctgcagaaggagaccagcaccctgcaggtggagcagaatggagactatggccggggccgccgcaccctcttccggggcagaagaagaagagaagatgaccgcatcagccggccccaccccagcacagctgagagcaaggcccccacccccaagtttgacctgctggccagcaacttcccccccctgcccggcagcagcagcaggatgcctggagagctggtgctggagaacaggatgtctgatgtggtgaagggcgtgtacaaggagaaggacaatgaggagctgaccatcagctgccctgtgcctgcagatgagcagacagagtgcaccagcgcccagcagctgaacatgagcaccagcagcccctgtgccgctgagctgacagccctgagcaccacccagcaggagaaggacctgattgaggacagctctgtgcagaaggatggcctgaaccagaccaccatccctgtgtccccacccagcaccaccaagcccagccgggccagcacagccagcccctgcaacaacaacatcaatgctgccacagctgtggccctgcaggagcccaggaagctgtcctatgcagaggtgtgccagaagccacccaaggagcccagctctgtgctggtgcagcccctgcgggagctgcggagcaatgtggtgagccccaccaagaatgaagataatggagccccagaaaattctgtggagaagccccatgagaagccagaggcccgggccagcaaggactacagcggcttccggggcaacatcatccccagaggagctgctgggaagatccgggagcagaggcggcagttcagccaccgggccatcccccagggcgtgaccaggagaaatggcaaggagcagtatgtgccccccaggagccccaagtag

SEQ ID NO: 261194 - DNA, 3621 bp, Artificial Sequence
  derived and/or modified sequence
aacgattgggctgagcagaggacgacatgttgcttttcgtggagcaggtagcatctaaaggaactggtttaaatcctaatgccaaagtatggcaagaaattgctcctggaaatactgatgccaccccagtaactcatggaactgaaagctcttggcatgaaatagcagctacatcaggtgctcatcctgagggtaatgcagagctctcagaagatatatgtaaagaatatgaagtaatgtattcttcatcttgtgaaaccacaagaaatactacaggcattgaagaatcaactgatgggatgattttaggaccagaagatctgagttaccaaatatatgatgtttccggagaaagcaattcagcagtttctacagaagacctaaaagaatgtctgaagaaacaattagaattctgtttttcacgagaaaatttgtcaaaggatctttacttgatatctcaaatggatagtgatcagttcatcccaatttggacagttgccaacatggaagaaataaaaaagttgactacagaccctgatctaattcttgaagtgttaagatcttctcccatggtacaagttgatgagaagggtgagaaagtgagaccaagtcataagcgttgtattgtaattcttagagagattcctgaaacaacaccaatagaggaagtgaaaggtttgttcaaaagtgaaaactgccccaaagtgataagctgtgagtttgcacacaatagcaactggtatatcactttccagtcagacacagatgcacaacaggcttttaaatacttaagagaagaagttaaaacatttcagggcaagccaattatggctccctttcccaatggtagttttgtgaatggctttaattcgccaggatcttataaaacaaatgctgctgctatgaatatgggtcgaccattccaaaaaaatcgtgtgaagcctcagtttaggtcatctggtggttcagaacactcaacagagggctctgtatccttgggggatggacagttgaacagatatagttcaagaaactttccagctgaacggcataaccccacagtaactgggcatcaggagcaaacttaccttcagaaggagacttccactttgcaggtggaacagaatggggactatggtaggggcaggagaactctcttcagaggtcgaagacgacgagaagatgacaggatctcaagacctcatccttcaacagctgaatcaaaggctccaacaccaaagtttgacttattagcctcaaattttccacctttacctggaagttcatcaagaatgccaggtgaactcgttttggagaataggatgtctgatgttgttaaaggtgtctacaaagaaaaggataatgaagagttgacaattagttgcccagtgcctgcagatgagcagacagaatgcacttctgcccagcaactcaatatgagtaccagttctccatgtgctgctgagcttactgcattaagcacaactcagcaagaaaaggatctaatagaagattcctctgttcagaaggatggtctcaatcagacaactataccagtttctcctccaagtactacaaagccatcgagggcaagtactgcttcaccatgtaataataacataaatgcagctacagctgtggctctacaggaaccccgaaagttaagttatgctgaagtgtgccagaagccccctaaagagccatcttcagttcttgtgcagccactacgggaacttcgctccaatgtggtgtctcccaccaaaaatgaagacaatggagctcctgagaactccgttgagaaaccacatgagaagccagaagcaagggctagtaaggattattctggcttccgaggcaatataatccccaggggagcagcaggaaaaatcagggaacagagacgccagtttagccatagggctatacctcagggagtgactcgacgtaatggcaaagagcaatatgtgccacccagatcaccaaagtaaaaaacaacaaaactattcaaaaacttcactctcttcccattaaacttgaactgtggctatattgaactgttttggaggggagggggtagccaggaaggaaacaagagaaagtacgtccatttcattatggattttggagttgtgagtgataggatcccaaaattcatctctaatgtggtttttaaatgctggaggattccaatcaatataaatatatatatatatatacacacacatatataaaaagtataatttttctatttttgtttttggttttaatttgcagagatttgctgccaggaatcaattttgagggttcagatttagcttggaagaaaaaaaagaaacatacatccttcagtataggagatgagggaatgagagaaaatattttttgaagaagcatttctgtaaaattagaaattactttttttaatctatttaaagtttggcttgaagaatgccatctctgactatatggccttgtattgcaaagcggatcagtggctggggtgcctgttgtgggtgtgagtgtgtacaagagcgattgaagccaaatctgttgtcatgttagtaaatgatttgaaaactgaatgtaatacttgagtagatttttttttctagtttgaaatttagtctgtctttttgaccttactaatatttcatttaacaagttgtaaaactctgattgtacttagagatgtgactaccaatcagtttgatactcaaggaaagggggttattcaagaaattgaaaatttcatcttggacctcagtgcataggtcaaatggatttcagaggtttaaacttccctgtgattcccccgaatacccccaaaatgagaaacaaaattttttttcttactccatttgttactctctgttctttgactgcccacccacagaaaagcaaaataaccaactacctactcaattgtgtgtttgtaattgctttgagcagtctagtcaaatcatataaattgttctaaatttcagaattgaacattgaagtattaactcttctgttcacacatttagaattttagctcccaagatggtagggcagactgaccgtacagtaatttatttgtcgttagtgttaaagattaagcatagtaactgactcttaagtgttaaataatgtagaagtaaaaaaattttttttaaaggcttaatttgggaggggggacttatttctgtttacagtgtattaccttccttccctcctcttctccccccacacccaacaaaatacagtttggaattcactgaaacagtaccagcaagtcatgagattttttagtaaagatgagaaagatggttgaagaaaattagtgcataatttctcagtgaataaagttgtagctctcatatactaaatagacaagtttacatgctgttatttagaaaatgactaaaatattaaaaaccgtgttgtgttaatctgttttaagtcataccatgttcagagttctatgtaaggtgggttttatttttcttttaagggatagtttgtaatagtaagaactgtcccatatgttagtaaattacatatgtacaaattgaaactgtaaattgtgaacactggaaagcaccattgtgacatagagtaaacatcttagtaatatattaa

SEQ ID NO: 261195 - DNA, 1962 bp, Artificial Sequence
  derived and/or modified sequence
atgctgctgttcgtggagcaggtggccagcaagggcaccggcctgaaccccaacgcaaaagtatggcaggaaatagccccaggaaatactgacgccacccctgtgacacacggcaccgaaagcagctggcacgaaatcgccgccacatctggagcacatccagagggaaatgcggagcttagtgaagacatctgcaaggaatatgaggtgatgtatagcagttcttgtgaaacaacaaggaataccacaggcatcgaggagtccactgacggcatgatactggggcccgaggatttgtcttaccagatctatgatgtgtctggagagtcaaattcagccgtctctaccgaagatttgaaggagtgtttaaagaaacagctagagttctgcttttctagggagaatctctctaaggacctgtacctgatcagccagatggattctgatcagttcatcccaatctggaccgtagccaatatggaagagataaaaaagctcaccaccgaccccgatctgatcttagaggtactgaggagttcccccatggtgcaggtggacgagaagggcgagaaggtgagacctagtcataagaggtgtattgtgatcctgagggagattccagagactacccctatcgaggaggtcaagggcttgttcaagagcgaaaactgcccgaaggtcatctcatgcgagtttgcccacaactcaaattggtatattacctttcagtcagacaccgacgcacaacaggctttcaaatatcttcgtgaggaggtgaaaacctttcagggcaaacccatcatggcacctttcccaaatggctccttcgtcaatgggttcaactctcccggctcatataagactaacgccgccgccatgaacatggggcgcccttttcaaaagaatcgggtgaaacctcagtttcgctcctctgggggatcggagcactcaaccgaagggagtgtgagcttgggcgacggccaattgaataggtactcgtcacgcaattttcccgcggagcgtcacaacccgaccgtaaccggacatcaggagcagacatacttgcagaaagagacatcaacactgcaagtggaacaaaacggcgattacggacgaggccgcaggaccctttttcgcgggcgcaggagaagagaagacgatcggatctcacgaccacacccctcaaccgcagagagtaaagcccctacacctaagttcgacttactcgcatccaacttcccacccttaccagggagctccagtagaatgcctggcgaactggtactggaaaaccggatgtccgatgtggtcaagggagtgtataaagaaaaagataacgaggaactcaccatctcgtgcccagtccccgccgatgagcagaccgaatgcacttccgcgcaacagcttaacatgagcacatcatcaccatgtgccgcagaactgaccgccttgtctacaactcagcaggaaaaagacctcattgaggacagcagtgtacagaaagacgggctgaaccagaccacaattccggtctcccccccgtcaactaccaagcctagtcgagcatcaacagcttccccctgtaataacaacattaacgccgcaaccgccgttgctctgcaggaacctcgcaagttgtcttacgctgaggtctgtcagaaaccacctaaggaaccgtcatccgtcttagtccaaccccttcgcgagctcagaagcaacgttgtcagccccacaaaaaatgaggataacggggcacccgagaactcagtcgaaaagccccatgagaagcccgaggcccgtgccagcaaagattactctggtttcagaggaaatattatccctcgaggagctgccggaaagattcgcgaacagcgtaggcagtttagccaccgggccataccccagggagtgacaaggaggaatggaaaggagcagtacgtgcctccgcgtagccccaagtag

SEQ ID NO: 261196 - DNA, 1962 bp, Artificial Sequence
  derived and/or modified sequence
atgttactctttgtggaacaagtggccagtaagggaacaggactgaaccctaatgccaaagtatggcaggaaatcgcccctggaaacacagacgctacccctgtcactcacggcacagagagtagttggcacgagatcgctgcaacttcaggtgcccaccctgagggtaacgcagagctgtccgaagacatatgcaaggaatatgaagtaatgtactcttcgagttgcgagaccaccagaaatacgaccggaattgaggaaagtaccgatgggatgatcctcggcccagaagacctctcttatcagatatacgatgtgagtggggagtccaacagcgccgtttctaccgaagacttgaaagagtgcctcaagaaacaattagaattctgtttttcccgggagaacctcagcaaagatctgtatttgatatcacagatggattcagaccagttcatcccaatctggaccgtggcgaacatggaagaaattaaaaaactgaccactgacccagatttgatcctagaggtgcttcggtcttctccaatggtgcaggtagatgaaaaaggagaaaaagtacgcccatctcataaacggtgtattgtcattctaagagaaattcccgagacaacacccatcgaggaggttaaggggctattcaaaagcgaaaattgtcccaaagtaattagctgcgagtttgcgcacaacagtaactggtacatcacgttccagtctgataccgatgcccagcaggccttcaagtatctcagagaggaggttaagacatttcagggaaagcctataatggcgccttttccgaacggtagcttcgtcaacggtttcaacagtcccggttcgtacaagactaatgccgcagccatgaatatggggaggccgttccagaagaatcgagtgaaacctcagttcagatcttccggaggctccgagcatagtacagaaggctctgtaagcctgggtgacggccagctcaatcgctacagcagccgtaacttcccagctgaaagacataatccaacagtgacaggccaccaggagcagacttacctccagaaggaaacttctaccttgcaggtggaacagaatggggattacgggaggggccgacgtactcttttccgtggaaggcgtcgccgagaagatgacaggatttccagaccacacccctcaactgctgagagcaaagctcctactccaaagtttgatctgttagcgagcaatttccccccactccccggatccagctcccgaatgcctggtgagctcgtactggaaaaccggatgtcagatgtggtgaagggtgtctacaaggaaaaagacaatgaggagctgactatcagctgcccagtgcccgcagatgagcagactgagtgtactagtgcccaacagctaaacatgagtacctcgtctccttgtgcagccgaactaactgctttgtcaaccactcagcaagagaaagacctgattgaggactccagcgtccagaaagacggcttaaaccagaccacaataccagtgtccccaccctccactacaaagccctctcgggcatctacagccagtccttgcaacaacaacattaatgcagccacagccgtggccttgcaagagccgagaaagctgtcttacgctgaggtgtgtcagaagccacctaaagagccgtccagcgtgcttgtccagcctctcagggagcttcgttcgaatgttgtaagccccacaaagaacgaagacaacggagcacccgaaaactccgtggagaaaccccatgagaaaccagaagcccgagcaagtaaagattattccggatttagaggcaatataatccctaggggggcagcgggtaaaattagagagcagcggagacagttctcccaccgcgcaatccctcagggcgtcacccgtcggaacggcaaagaacagtacgttccacccagaagccctaagtag

SEQ ID NO: 261197 - protein, 376 aa, Artificial Sequence
  derived and/or modified sequence
MSPEVALNRISPMLSPFISSVVRNGKVGLDATNCLRITDLKSGCTSLTPGPNCDRFKLHIPYAGETLKWDIIFNAQYPELPPDFIFGEDAEFLPDPSALQNLASWNPSNPECLLLVVKELVQQYHQFQCSRLRESSRLMFEYQTLLEEPQYGENMEIYAGKKNNWTGEFSARFLLKLPVDFSNIPTYLLKDVNEDPGEDVALLSVSFEDTEATQVYPKLYLSPRIEHALGGSSALHIPAFPGGGCLIDYVPQVCHLLTNKVQYVIQGYHKRREYIAAFLSHFGTGVVEYDAEGFTKLTLLLMWKDFCFLVHIDLPLFFPRDQPTLTFQSVYHFTNSGQLYSQAQKNYPYSPRWDGNEMAKRAKRESNRDGEESSSA

SEQ ID NO: 261198 - protein, 153 aa, Artificial Sequence
  derived and/or modified sequence
MSPEVALNRISPMLSPFISSVVRNGKVGLDATNCLRITDLKSGCTSLTPGPNCDRFKLHIPYAGETLKWDIIFNAQYPELPPDFIFGEDAEFLPDPSALQNLASWNPSNPECLLLVVKELVQQYHQFQCSRLRESSRLMFEYQTLLEEPQYGE

SEQ ID NO: 261199 - DNA, 1131 bp, Artificial Sequence
  derived and/or modified sequence
atgagccccgaggtggccctgaacagaatcagccccatgctgagccccttcatcagcagcgtggtgagaaacggcaaggtgggcctggacgccaccaactgcctgagaatcaccgacctgaagagcggctgcaccagcctgacccccggccccaactgcgacagattcaagctgcacatcccctacgccggcgagaccctgaagtgggacatcatcttcaacgcccagtaccccgagctgccccccgacttcatcttcggcgaggacgccgagttcctgcccgaccccagcgccctgcagaacctggccagctggaaccccagcaaccccgagtgcctgctgctggtggtgaaggagctggtgcagcagtaccaccagttccagtgcagcagactgagagagagcagcagactgatgttcgagtaccagaccctgctggaggagccccagtacggcgagaacatggagatctacgccggcaagaagaacaactggaccggcgagttcagcgccagattcctgctgaagctgcccgtggacttcagcaacatccccacctacctgctgaaggacgtgaacgaggaccccggcgaggacgtggccctgctgagcgtgagcttcgaggacaccgaggccacccaggtgtaccccaagctgtacctgagccccagaatcgagcacgccctgggcggcagcagcgccctgcacatccccgccttccccggcggcggctgcctgatcgactacgtgccccaggtgtgccacctgctgaccaacaaggtgcagtacgtgatccagggctaccacaagagaagagagtacatcgccgccttcctgagccacttcggcaccggcgtggtggagtacgacgccgagggcttcaccaagctgaccctgctgctgatgtggaaggacttctgcttcctggtgcacatcgacctgcccctgttcttccccagagaccagcccaccctgaccttccagagcgtgtaccacttcaccaacagcggccagctgtacagccaggcccagaagaactacccctacagccccagatgggacggcaacgagatggccaagagagccaagagagagagcaacagagacggcgaggagagcagcagcgcctag

SEQ ID NO: 261200 - DNA, 462 bp, Artificial Sequence
  derived and/or modified sequence
atgagccccgaggtggccctgaacagaatcagccccatgctgagccccttcatcagcagcgtggtgagaaacggcaaggtgggcctggacgccaccaactgcctgagaatcaccgacctgaagagcggctgcaccagcctgacccccggccccaactgcgacagattcaagctgcacatcccctacgccggcgagaccctgaagtgggacatcatcttcaacgcccagtaccccgagctgccccccgacttcatcttcggcgaggacgccgagttcctgcccgaccccagcgccctgcagaacctggccagctggaaccccagcaaccccgagtgcctgctgctggtggtgaaggagctggtgcagcagtaccaccagttccagtgcagcagactgagagagagcagcagactgatgttcgagtaccagaccctgctggaggagccccagtacggcgagtag

SEQ ID NO: 261201 - DNA, 1131 bp, Artificial Sequence
  derived and/or modified sequence
atgtcaccggaagtcgccctcaaccgcatctcgcctatgctatctccttttatatcctccgtggtgcggaacggaaaagtggggctagatgcgacaaactgcctgaggattaccgatcttaaatctgggtgtacaagtctgactcccggtcctaactgtgacaggtttaaacttcatataccttacgctggcgagacactgaagtgggatattattttcaacgcccaatatcctgagctgccacctgatttcatttttggagaggacgcggagttcttgccagacccgagtgctctccagaacttagcttcctggaatccatctaaccccgaatgtttactgttagtggtgaaagagctggtccagcagtaccatcagtttcaatgctctcgcctgcgcgaaagttcaaggctgatgtttgaataccagacattactggaggagccccaatatggagagaacatggaaatatatgcaggtaagaaaaacaactggacaggcgaattctctgcccggtttctgctgaagctaccagtggatttctcgaacattcccacatacttgctcaaagacgtaaatgaggatcccggcgaagacgtcgcccttctgtctgtctcatttgaggatacagaagcaacacaagtgtaccccaagctgtatctgtctccccgtattgaacacgcacttggaggcagctccgcactccacattccagcctttcctggaggagggtgcctaatcgactacgttccgcaagtgtgccacctgctgaccaataaggtgcagtatgtaatccaggggtaccacaaaagacgggaatacatagccgctttcctatcccacttcggtacgggtgtagtggagtacgatgcagaagggtttactaaactgactctgctgctgatgtggaaggacttctgttttctcgtacacatcgacctgccattgttctttccacgggaccagccgacgctcacttttcagtcagtctaccattttaccaactccgggcagctctattctcaggcccagaagaattacccgtacagtccccggtgggatggcaatgagatggcaaagcgtgccaaacgggagtctaaccgagacggcgaagagtcttcttccgcgtag

SEQ ID NO: 261202 - DNA, 1131 bp, Artificial Sequence
  derived and/or modified sequence
atgagccccgaggtggccctgaatcgcattagtcccatgctgtcaccgttcattagttctgtggtgcgcaatggtaaggtcgggctcgatgccactaattgcctgcgcatcaccgacctgaagtctgggtgtaccagtctgacccccggaccaaattgcgatcgcttcaagcttcatataccatatgctggggagactctcaagtgggacattatatttaacgctcagtatccagagctgccgcccgattttatcttcggcgaggatgccgaatttttgcctgacccttcagcactccaaaatttggcttcttggaatcccagtaaccccgagtgcctccttctagtagtcaaggagctagtgcagcaatatcaccagtttcaatgctcccgtctacgagaatcctcacgattgatgtttgagtatcagacgctcctggaggaaccccagtacggggagaacatggagatttacgccgggaagaagaacaactggacgggggagttctctgctcgttttcttctgaaactgccggtggacttttctaacatcccgacatacctgcttaaggacgtgaacgaggatcccggcgaagacgttgccctcctatcggtatcatttgaagacaccgaagcgacccaggtgtaccctaagctgtatctctcaccacggatcgaacacgctcttggtgggagtagtgctctccatatccccgctttccccggcggcgggtgcctgatagattacgtccctcaggtgtgtcacctactcactaataaggtgcagtatgtgattcagggttaccacaagcggagagaatacatagctgcatttctgtctcatttcggcactggggtcgttgaatatgatgccgaaggcttcacaaaactgacccttctcttgatgtggaaagatttttgcttcctcgtgcacatcgacctgccattattctttcctcgcgaccaaccgacactgacattccagagtgtctaccacttcacaaactccgggcagctttacagccaggcccaaaaaaactacccctacagtcctaggtgggacggaaatgaaatggcaaaaagagcaaaacgagaatccaatagagacggcgaagaatcaagctctgcctag

SEQ ID NO: 261203 - DNA, 462 bp, Artificial Sequence
  derived and/or modified sequence
atgagcccggaagtggcgttgaacagaatctcacccatgctgagtccatttataagtagcgtcgtgaggaatggcaaggtcggattggacgcgactaactgtttgagaatcacggatcttaagagcggatgtaccagcctgactcctggaccaaattgtgataggttcaaacttcatatcccctatgccggtgaaacgctgaagtgggacatcatcttcaatgcacagtacccggagctgccccccgattttatcttcggcgaagatgctgagttccttccagacccctctgccctgcagaatctggcctcgtggaatccgtctaacccagagtgtctgttgcttgtcgtcaaggagctcgtacagcagtatcatcagttccaatgtagccgccttcgcgagtcctcacgcttgatgttcgaataccaaaccttgctagaggagccccagtacggcgagtag

SEQ ID NO: 261204 - DNA, 1131 bp, Artificial Sequence
  derived and/or modified sequence
atgagccctgaggtggccctgaaccgcatcagccccatgctgagccccttcatcagctctgtggtgagaaatggcaaggtgggcctggatgccaccaactgcctgcgcatcacagacctgaagagcggctgcaccagcctgaccccaggccccaactgtgaccgcttcaagctgcacatcccctatgctggggagaccctgaagtgggacatcatcttcaatgcccagtacccagagctgcccccagacttcatctttggagaagatgctgagttcctgcctgaccccagcgccctgcagaacctggcctcctggaaccccagcaacccagaatgtctgctgctggtggtgaaggagctggtgcagcagtaccaccagttccagtgcagccggctgcgggagagcagccggctgatgtttgagtaccagaccctgctggaggagccccagtatggagagaacatggagatctatgccggcaagaagaacaactggacaggagagttcagcgcccgcttcctgctgaagctgcctgtggacttcagcaacatccccacctacctgctgaaggatgtgaatgaagaccccggggaggatgtggccctgctgtctgtgtcctttgaggacacagaggccacccaggtgtaccccaagctgtacctgagccccagaattgaacatgccctgggcggcagcagcgccctgcacatcccagccttccctgggggcggctgcctgattgattatgtgccccaggtgtgccacctgctgaccaacaaggtgcagtatgtgatccagggctaccacaagagaagagagtacatcgccgccttcctgagccacttcggcaccggggtggtggagtatgatgctgagggcttcaccaagctgaccctgctgctgatgtggaaggacttctgcttcctggtgcacatcgacctgcccctcttcttcccccgggaccagcccaccctgaccttccagagcgtgtaccacttcaccaacagcggccagctgtacagccaggcccagaagaactacccctacagcccccgctgggatggaaatgagatggccaagagggccaagcgggagagcaacagagatggagaggagagcagcagcgcctag

SEQ ID NO: 261205 - DNA, 462 bp, Artificial Sequence
  derived and/or modified sequence
atgagccctgaggtggccctgaaccgcatcagccccatgctgagccccttcatcagctctgtggtgagaaatggcaaggtgggcctggatgccaccaactgcctgcgcatcacagacctgaagagcggctgcaccagcctgaccccaggccccaactgtgaccgcttcaagctgcacatcccctatgctggggagaccctgaagtgggacatcatcttcaatgcccagtacccagagctgcccccagacttcatctttggagaagatgctgagttcctgcctgaccccagcgccctgcagaacctggcctcctggaaccccagcaacccagaatgtctgctgctggtggtgaaggagctggtgcagcagtaccaccagttccagtgcagccggctgcgggagagcagccggctgatgtttgagtaccagaccctgctggaggagccccagtatggagagtag

SEQ ID NO: 261206 - DNA, 1131 bp, Artificial Sequence
  derived and/or modified sequence
atgagccccgaggtggccctgaaccggatcagccccatgctgagccctttcatctccagtgtggtgaggaacggaaaggttgggttggatgccacgaactgtttaaggatcacagacttgaagagtgggtgtacctctttgactcctggccctaattgtgaccgctttaagctccacataccatatgcaggagagaccttaaaatgggacatcatattcaacgcgcagtacccagaactgcctcccgacttcatattcggggaggacgccgagtttctgccagatccttctgctttgcaaaatctggctagctggaacccatcaaaccccgagtgcctgcttctggtcgttaaggagctggttcagcaataccaccagttccagtgttcccgactgagggaatccagccgtctcatgtttgagtaccagaccctgctagaagaaccacagtacggcgagaacatggagatttacgctggcaagaaaaacaactggaccggcgagtttagtgcccgcttcctcctgaagctccccgtagacttttcaaatatccccacatatttgcttaaagacgttaatgaggatccaggagaggatgtcgccctactatccgtctcattcgaggacaccgaagctactcaggtgtatcccaagctctacctttcccccaggattgaacacgcattagggggatcaagtgctctgcacatcccagccttcccaggaggcggatgcctgatcgactatgtccctcaagtctgccacctcctaacgaacaaagtgcagtacgtaatccaaggctaccacaagcggcgcgagtatattgcagccttcctctcacattttggaacaggagtcgtcgaatacgatgcggagggcttcacaaaattaacacttctgctgatgtggaaagatttctgctttctggtccacatagatctgcccctgttctttcctagggaccagcccacactgacctttcagtctgtttatcacttcactaatagcgggcagctgtactctcaagctcagaaaaactacccatacagtcccaggtgggacggcaacgagatggccaaaagggctaagagagagagtaaccgggatggcgaggaatcttcaagcgcgtag

SEQ ID NO: 261207 - DNA, 1131 bp, Artificial Sequence
  derived and/or modified sequence
atgagccccgaggtggccctgaaccggatcagccccatgctgagcccttttatctcttcagtggtgcgaaacggaaaagtggggcttgatgccacaaactgtcttagaattaccgatttgaagtctggctgcacctcactgactcccgggccgaattgtgataggtttaagctgcacatcccttatgcgggagagaccctcaaatgggacatcattttcaacgcccaatatcctgagctgccgcctgatttcatctttggggaagacgccgagttcctaccagacccgtctgccctgcagaatcttgccagttggaacccatctaaccccgagtgcctgctgctcgtggtgaaagagctcgtgcagcagtaccaccagttccagtgctcccgccttagggagtcgtctcgactgatgttcgaatatcaaactctgttagaggagccacagtacggagaaaatatggaaatctacgccgggaagaaaaacaactggaccggcgagtttagtgcccgctttctcctgaagctaccggtcgacttctcaaacattcctacctatttactcaaggatgtgaatgaggaccccggggaggatgtcgctctactttccgtctccttcgaggatactgaagctacccaggtttacccgaaactctatctctctccaaggatcgaacatgcgctcggcggatcttcagcattacacattcctgcgtttccggggggcggctgcttaattgactacgtaccccaggtgtgtcatctgttgaccaacaaagtgcagtacgtcatccaagggtaccacaagcggcgggagtacatcgctgcattcctgagccatttcggtaccggtgtagtggagtacgacgccgaaggattcacaaaactgacgttgctgttgatgtggaaagacttctgcttcttggtccacatcgacctgccgctattcttcccgcgcgaccagccaaccttgacctttcagtcagtgtaccacttcactaacagtggtcagctctatagtcaggcccagaaaaattacccctattccccgagatgggatggcaatgagatggcaaaacgggccaaacgggaaagtaacagagatggggaagagagcagctccgcctag

SEQ ID NO: 261208 - DNA, 462 bp, Artificial Sequence
  derived and/or modified sequence
atgagccccgaggtggccctgaaccggatcagccccatgctgagcccgtttatctccagcgtggtgcggaacggcaaggtcgggcttgatgctacaaactgcctacgaataacagatcttaaaagtggatgtacttctttgactccagggccgaattgcgaccgctttaagctgcacataccttatgccggtgagactctgaagtgggatatcatttttaacgctcagtatccggagttgcccccagatttcatattcggtgaagacgccgaatttttacccgacccgagcgcattgcaaaatttggcgtcctggaacccctcgaaccccgagtgtctacttctggtcgtgaaagaactggtacaacagtaccatcaattccaatgctctcgattacgtgaatcaagccgcctcatgtttgaataccagaccttgttagaggaaccacagtacggggagtag

SEQ ID NO: 261209 - DNA, 1131 bp, Artificial Sequence
  derived and/or modified sequence
atgtcccctgaggtggccctgaaccgaatttcaccaatgctcagccctttcattagctccgtcgtcaggaacggtaaggtcggactcgacgcaactaattgccttcggatcaccgatctgaagagtgggtgcacttccctcaccccaggcccaaactgcgatcgattcaaattgcatatcccctatgcaggtgaaactcttaagtgggatataatctttaatgcccagtatcctgagctgccgccagactttattttcggtgaggatgcagaatttctaccagatccaagtgcccttcagaatctcgcctcctggaatcctagcaaccctgagtgtcttttgctcgtcgtgaaggagcttgttcagcagtaccaccagtttcagtgttcgcgtctaagagagtccagccgcttaatgttcgagtaccagacacttcttgaggaaccgcagtatggcgaaaatatggagatctatgccggaaagaagaataattggaccggggagttctctgccagattcttactgaagcttcccgtggacttttcaaacatacctacctacttgctgaaggatgtcaacgaggaccctggagaggatgtggcgcttttgtcagtcagttttgaggatactgaagccactcaggtttatcccaagttgtacctgtcaccccgtatcgagcatgccttgggcggaagtagcgccctccatattccagccttcccagggggtggctgcttgattgattacgtcccccaggtgtgccacctcttgaccaacaaagtccagtacgttatccagggataccataaacggagggaatatattgcagctttcctgtctcatttcggcactggcgtagtcgaatacgatgcagaagggttcacgaagctcacactcctgttaatgtggaaagacttttgtttccttgtgcacattgatttacccctgtttttcccgagagatcagccaacactgacttttcaaagcgtgtaccacttcaccaatagtggacagttgtattcacaggcccagaaaaattatccttattctccccgttgggatggtaacgagatggctaagcgagcaaaaagggagagcaacagagatggcgaagaaagctcatcggcctag

SEQ ID NO: 261210 - DNA, 1131 bp, Artificial Sequence
  derived and/or modified sequence
atgagccctgaagtcgctctcaacaggatatccccaatgctgagcccttttatttcttcagtggtccggaatggcaaggtgggcttagacgcaacaaactgcctcagaattacggatctgaagtctggatgtaccagccttacccccggaccaaattgcgacaggttcaagttgcacatcccttacgcaggagaaacgctgaaatgggatataatcttcaacgcccagtatcctgagcttccacctgatttcatcttcggagaagatgccgagtttctccctgacccttcggcattgcagaatctggcctcttggaatcctagcaaccccgagtgcctgctcctcgtcgtgaaagagctggtacaacagtatcatcagttccagtgcagcaggctgcgcgagtcaagcaggctcatgtttgagtatcagacgcttctggaagagccacagtacggtgaaaatatggaaatttacgcgggaaagaagaataattggacaggcgaatttagcgctcgctttcttctgaagctgcctgtagacttctccaacatcccgacttacttgttgaaagatgttaatgaagatcctggagaagacgtcgcactactctccgtcagcttcgaagatacagaggccacacaagtctatcccaagctgtacctgtcacccagaattgaacacgcactgggagggtcgtccgccctgcacattcctgccttccctggcggaggatgtctgatcgattatgtcccccaggtgtgtcatctattaaccaataaagtgcagtacgttattcagggttatcacaagcgccgtgagtacattgccgcttttctttctcactttggcactggagtagtggagtatgatgccgagggcttcacaaaactgaccctgctcctgatgtggaaggacttctgctttctggtccacattgatttaccattatttttcccccgagaccaaccaacactcacattccagtcggtttatcatttcacaaacagcggtcaactatattctcaggcgcagaaaaattacccctattcccccagatgggacggtaacgagatggctaagcgcgcaaagagagaatccaaccgagatggcgaggaaagctcaagcgcctag

SEQ ID NO: 261211 - DNA, 462 bp, Artificial Sequence
  derived and/or modified sequence
atgagcccggaagtcgctctcaatagaatttctccaatgctcagtccgttcatttcttcggtggtgcggaacggtaaggtaggtttagacgccaccaattgcttaaggatcactgatttgaagagtggctgtacttctctcacacccggtcccaactgtgataggttcaagctgcatattccttatgccggagagactcttaaatgggatattatcttcaacgctcaataccctgagctaccacccgattttatctttggagaggacgcggaattcctgcccgaccccagtgcccttcagaacctcgccagttggaatccgagtaatcccgagtgcctgttgcttgtggtcaaagagttggttcaacagtaccatcagttccagtgctctcggctgagggagagttctcgcctaatgtttgagtatcagaccctgctggaggagccacaatatggcgaatag

SEQ ID NO: 261212 - DNA, 874 bp, Artificial Sequence
  derived and/or modified sequence
ctcagcagccgggccaagaaaggtctttgggggcgcaagtctttggagggcaggtctttggggagcgctttgagtaatattagagctttcactaaaccctggcctattacgtcccctcccctgagatttacctttatatactcaagttctttcatgccaggaaggtaggctgaaggcttcgaaaacctgcagctcatacccaaagctagcactgtctatccctggagacccagcgcccaaaagctccactgggcgcatagcgcacggcacgcctcctcccccgagccgcagactgagtaactggccccggactaacctgaccagaagcaagagataaagtaataatgggtactgtggggaaaaacacagaagaacaattcggtaatatagtggtgatttacaagtcaagttaaaatgtccccagaagtggccttgaaccgaatatctccaatgctctcccctttcatatctagcgtggtccggaatggaaaagtgggactggatgctacaaactgtttgaggataactgacttaaaatctggctgcacatcattgactcctgggcccaactgtgaccgatttaaactgcacataccatatgctggagagacattaaagtgggatatcattttcaatgcccaatacccagaactgcctcccgattttatctttggagaagatgctgaattcctgccagacccctcagctttgcagaatcttgcctcctggaatccttcaaatcctgaatgtctcttacttgtggtgaaggaacttgtgcaacaatatcaccaattccaatgtagccgcctccgggagagctcccgcctcatgtttgaataccagacattactggaggagccacagtatggagaga

SEQ ID NO: 261213 - protein, 383 aa, Artificial Sequence
  derived and/or modified sequence
MSPEVALNRISPMLSPFISSVVRNGKVGLDATNCLRITDLKSGCTSLTPGPNCDRFKLHIPYAGETLKWDIIFNAQYPELPPDFIFGEDAEFLPDPSALQNLASWNPSNPECLLLVVKELVQQYHQFQCSRLRESSRLMFEYQTLLEEPQYGENMEIYAGKKNNWTGEFSARFLLKLPVDFSNIPTYLLKDVNEDPGEDVALLSVSFEDTEATQVYPKLYLSPRIEHALGGSSALHIPAFPGGGCLIDYVPQVCHLLTNKVQYVIQGYHKRREYIAAFLSHFGTGVVEYDAEGFTKLTLLLMWKDFCFLVHIDLPLFFPRDQPTLTFQSVYHFTNSGQLYSQAQKNYPYSPRWDGNEMAKRAKAYFKTFVPQFQEAAFANGKL

SEQ ID NO: 261214 - protein, 285 aa, Artificial Sequence
  derived and/or modified sequence
NWNLASWNPSNPECLLLVVKELVQQYHQFQCSRLRESSRLMFEYQTLLEEPQYGENMEIYAGKKNNWTGEFSARFLLKLPVDFSNIPTYLLKDVNEDPGEDVALLSVSFEDTEATQVYPKLYLSPRIEHALGGSSALHIPAFPGGGCLIDYVPQVCHLLTNKVQYVIQGYHKRREYIAAFLSHFGTGVVEYDAEGFTKLTLLLMWKDFCFLVHIDLPLFFPRDQPTLTFQSVYHFTNSGQLYSQAQKNYPYSPRWDGNEMAKRAKAYFKTFVPQFQEAAFANGKL

SEQ ID NO: 261215 - DNA, 1152 bp, Artificial Sequence
  derived and/or modified sequence
atgagccccgaggtggccctgaacagaatcagccccatgctgagccccttcatcagcagcgtggtgagaaacggcaaggtgggcctggacgccaccaactgcctgagaatcaccgacctgaagagcggctgcaccagcctgacccccggccccaactgcgacagattcaagctgcacatcccctacgccggcgagaccctgaagtgggacatcatcttcaacgcccagtaccccgagctgccccccgacttcatcttcggcgaggacgccgagttcctgcccgaccccagcgccctgcagaacctggccagctggaaccccagcaaccccgagtgcctgctgctggtggtgaaggagctggtgcagcagtaccaccagttccagtgcagcagactgagagagagcagcagactgatgttcgagtaccagaccctgctggaggagccccagtacggcgagaacatggagatctacgccggcaagaagaacaactggaccggcgagttcagcgccagattcctgctgaagctgcccgtggacttcagcaacatccccacctacctgctgaaggacgtgaacgaggaccccggcgaggacgtggccctgctgagcgtgagcttcgaggacaccgaggccacccaggtgtaccccaagctgtacctgagccccagaatcgagcacgccctgggcggcagcagcgccctgcacatccccgccttccccggcggcggctgcctgatcgactacgtgccccaggtgtgccacctgctgaccaacaaggtgcagtacgtgatccagggctaccacaagagaagagagtacatcgccgccttcctgagccacttcggcaccggcgtggtggagtacgacgccgagggcttcaccaagctgaccctgctgctgatgtggaaggacttctgcttcctggtgcacatcgacctgcccctgttcttccccagagaccagcccaccctgaccttccagagcgtgtaccacttcaccaacagcggccagctgtacagccaggcccagaagaactacccctacagccccagatgggacggcaacgagatggccaagagagccaaggcctacttcaagaccttcgtgccccagttccaggaggccgccttcgccaacggcaagctgtag

SEQ ID NO: 261216 - DNA, 858 bp, Artificial Sequence
  derived and/or modified sequence
aactggaacctggccagctggaaccccagcaaccccgagtgcctgctgctggtggtgaaggagctggtgcagcagtaccaccagttccagtgcagcagactgagagagagcagcagactgatgttcgagtaccagaccctgctggaggagccccagtacggcgagaacatggagatctacgccggcaagaagaacaactggaccggcgagttcagcgccagattcctgctgaagctgcccgtggacttcagcaacatccccacctacctgctgaaggacgtgaacgaggaccccggcgaggacgtggccctgctgagcgtgagcttcgaggacaccgaggccacccaggtgtaccccaagctgtacctgagccccagaatcgagcacgccctgggcggcagcagcgccctgcacatccccgccttccccggcggcggctgcctgatcgactacgtgccccaggtgtgccacctgctgaccaacaaggtgcagtacgtgatccagggctaccacaagagaagagagtacatcgccgccttcctgagccacttcggcaccggcgtggtggagtacgacgccgagggcttcaccaagctgaccctgctgctgatgtggaaggacttctgcttcctggtgcacatcgacctgcccctgttcttccccagagaccagcccaccctgaccttccagagcgtgtaccacttcaccaacagcggccagctgtacagccaggcccagaagaactacccctacagccccagatgggacggcaacgagatggccaagagagccaaggcctacttcaagaccttcgtgccccagttccaggaggccgccttcgccaacggcaagctgtag

SEQ ID NO: 261217 - DNA, 1681 bp, Artificial Sequence
  derived and/or modified sequence
gggtacctgtaccccacgtagtcgccggttaccgatcggactaagttccagaagcaagagataaagtaataatgggtactgtggggaaaaacacagaagaacaattcggtaatatagtggtgatttacaagtcaagttaaaatgtccccagaagtggccttgaaccgaatatctccaatgctctcccctttcatatctagcgtggtccggaatggaaaagtgggactggatgctacaaactgtttgaggataactgacttaaaatctggctgcacatcattgactcctgggcccaactgtgaccgatttaaactgcacataccatatgctggagagacattaaagtgggatatcattttcaatgcccaatacccagaactgcctcccgattttatctttggagaagatgctgaattcctgccagacccctcagctttgcagaatcttgcctcctggaatccttcaaatcctgaatgtctcttacttgtggtgaaggaacttgtgcaacaatatcaccaattccaatgtagccgcctccgggagagctcccgcctcatgtttgaataccagacattactggaggagccacagtatggagagaacatggaaatttatgctgggaaaaaaaacaactggactggtgaattttcagctcgtttccttttgaagctgcccgtagatttcagcaatatccccacataccttctcaaggatgtaaatgaagaccctggagaagatgtggccctcctctctgttagttttgaggacactgaagccacccaggtgtaccccaagctgtacttgtcacctcgaattgagcatgcacttggaggctcctcagctcttcatatcccagcttttccaggaggaggatgtctcattgattacgttcctcaagtatgccacctgctcaccaacaaggtgcagtacgtgattcaagggtatcacaaaagaagagagtatattgctgcttttctcagtcactttggcacaggtgtcgtggaatatgatgcagaaggctttacaaaactcactctgctgctgatgtggaaagatttttgttttcttgtacacattgacctgcctctgtttttccctcgagaccagccaactctcacatttcagtccgtttatcactttaccaacagtggacagctttactcccaggcccaaaaaaattatccgtacagccccagatgggatggaaatgaaatggccaaaagagcaaaggcttatttcaaaacctttgtccctcagttccaggaggcagcatttgccaatggaaagctctaggaaacaccagtcttgagaggtggccagccagactgcctgtccacatgcgtgtcagcacatacagccgcttcctggaagccgcctggaatgtcttcacggcagcgttttgctcacacagcagcttttgcacgccccaggcagccccgactgctgaaatccaacttgagctggctggtggtccctggatcctagagcccttcacttcgggttactccctctttcttgcctctatttcttagttggaagaaataaactcacaaattatggtgcagtaattttccggggaaagtaaagcctcaggaatgcccacgcctttcttccaaagcctttgtctctgagacctcttaagttctaagattaaatgcccctcgctgttcttcctctgaaa

SEQ ID NO: 261218 - DNA, 1152 bp, Artificial Sequence
  derived and/or modified sequence
atgagtcccgaagtagcccttaatcgcatcagccccatgctttctcccttcatctcttccgtggtccgcaacggaaaggtggggctcgacgccacaaactgcctaaggataactgaccttaagtcaggttgcaccagcctgacccctggacccaattgtgaccgcttcaaacttcatatcccttacgcaggcgaaacgctcaaatgggatattatctttaatgcacaatatcccgaactcccgccggacttcatctttggggaagatgctgagttcctgccagacccttctgccttgcagaatttggccagctggaacccatctaaccccgaatgcttgctgctggtggtgaaggaactggtgcaacagtaccaccagtttcagtgctcacggctccgagaatcttctcggcttatgttcgagtaccagaccctgttggaagaaccccaatacggagaaaacatggagatctacgcaggaaagaagaacaactggaccggagagtttagtgccaggtttctgctgaagctgccggttgacttctcgaatattccgacatatctgctgaaggacgtaaatgaggatccgggggaggacgtagccttacttagcgtatcctttgaggacactgaggcgactcaggtttaccccaagctttacctttcccccagaattgagcacgctctgggggggagctctgcactacatatcccagcttttcctgggggcggctgcctcatcgactacgtaccccaggtgtgccacctcctgaccaacaaggtgcaatatgtgatccagggatatcacaaacgaagagaatacatcgcggccttcctgtcccattttggcacaggggttgtggagtacgatgccgaggggttcacgaaactgaccctgctcttaatgtggaaggacttttgtttcctcgtgcatattgacctccctctgtttttccctagggatcagccgactcttacttttcaatccgtgtaccacttcaccaattctgggcaactgtattctcaggctcaaaagaactacccctactccccccgctgggatggcaatgagatggctaagcgtgccaaggcttactttaagaccttcgtcccacagttccaggaagcagcatttgctaatgggaaactctag

SEQ ID NO: 261219 - DNA, 1686 bp, Artificial Sequence
  derived and/or modified sequence
ggtacctgtaccccacgtagtcgccggttaccgatcggactaagttccagtggtgatttacaagtcaagttaaaatgtccccagaagtggccttgaaccgaatatctccaatgctctcccctttcatatctagcgtggtccggaatggaaaagtgggactggatgctacaaactgtttgaggataactgacttaaaatctggctgcacatcattgactcctgggcccaactgtgaccgatttaaactgcacataccatatgctggagagacattaaagtgggatatcattttcaatgcccaatacccagaactgcctcccgattttatctttggagaagatgctgaattcctgccagacccctcagctttgcagaatcttgcctcctggaatccttcaaatcctgaatgtctcttacttgtggtgaaggaacttgtgcaacaatatcaccaattccaatgtagccgcctccgggagagctcccgcctcatgtttgaataccagacattactggaggagccacagtatggagagaacatggaaatttatgctgggaaaaaaaacaactggactggtgaattttcagctcgtttccttttgaagctgcccgtagatttcagcaatatccccacataccttctcaaggatgtaaatgaagaccctggagaagatgtggccctcctctctgttagttttgaggacactgaagccacccaggtgtaccccaagctgtacttgtcacctcgaattgagcatgcacttggaggctcctcagctcttcatatcccagcttttccaggaggaggatgtctcattgattacgttcctcaagtatgccacctgctcaccaacaaggtgcagtacgtgattcaagggtatcacaaaagaagagagtatattgctgcttttctcagtcactttggcacaggtgtcgtggaatatgatgcagaaggctttacaaaactcactctgctgctgatgtggaaagatttttgttttcttgtacacattgacctgcctctgtttttccctcgagaccagccaactctcacatttcagtccgtttatcactttaccaacagtggacagctttactcccaggcccaaaaaaattatccgtacagccccagatgggatggaaatgaaatggccaaaagagcaaaaagagagagcaacagagatggggaggaatccagctctgcctgacatccaggcatcctctccaaattgcatagggcttatttcaaaacctttgtccctcagttccaggaggcagcatttgccaatggaaagctctaggaaacaccagtcttgagaggtggccagccagactgcctgtccacatgcgtgtcagcacatacagccgcttcctggaagccgcctggaatgtcttcacggcagcgttttgctcacacagcagcttttgcacgccccaggcagccccgactgctgaaatccaacttgagctggctggtggtccctggatcctagagcccttcacttcgggttactccctctttcttgcctctatttcttagttggaagaaataaactcacaaattatggtgcagtaattttccggggaaagtaaagcctcaggaatgcccacgcctttcttccaaagcctttgtctctgagacctcttaagttctaagattaaatgcccctcgctgttcttcctctgaaa

SEQ ID NO: 261220 - DNA, 858 bp, Artificial Sequence
  derived and/or modified sequence
aattggaatctggcgtcttggaatccttcaaaccccgagtgtctgttactcgtggtcaaggagctggtgcagcagtatcaccaatttcagtgttcgaggctgcgcgagagctcccgtctcatgttcgaataccaaacccttttagaggagcctcagtacggtgaaaacatggagatttacgcagggaagaagaacaattggactggggagtttagtgcgcggttcctgctcaaactaccagtagactttagcaacatcccaacatatctactgaaggatgtcaacgaggatcccggagaggatgtggcccttctgtcagtgagttttgaggataccgaagctacccaggtctatcctaagctgtacctgtcgccccgtattgagcatgcactcgggggcagtagtgcactgcacatcccggcctttcccgggggcggatgcttaatagattacgtgccccaggtttgtcatcttctaactaacaaagtgcagtatgtcatacagggttatcacaagcggcgggagtacatcgctgcattcttgagccatttcggtactggggtggtggaatatgacgcagaaggcttcactaagttaactctcctgttaatgtggaaggacttctgctttcttgtacacatcgatctcccccttttctttccgcgcgatcagccgaccttgacctttcagagtgtttaccacttcactaacagtggccagctttatagtcaggcccagaagaactacccctacagcccccggtgggacgggaatgagatggccaaacgagctaaggcctatttcaagacattcgtgcctcaattccaggaggcagccttcgcgaatggaaagctctag

SEQ ID NO: 261221 - DNA, 1152 bp, Artificial Sequence
  derived and/or modified sequence
atgtcccctgaagttgccttgaatcgcatctcgcctatgttatctccctttattagttccgtagtaagaaacggcaaggtaggacttgacgccacaaattgtttgaggatcactgatctgaagagtgggtgtacttctctgacccccggccctaattgcgacaggttcaagttacacataccgtacgctggcgaaactctgaaatgggatattattttcaatgcccagtatccagagctgcctcctgactttattttcggagaggacgctgaatttctgcccgatccctccgctcttcaaaatttggctagttggaacccaagcaaccccgagtgcttgctgttagttgtaaaggagctagtgcaacagtaccaccagtttcagtgttcccggctgagggagtcttcaaggctcatgttcgagtaccaaactcttctggaggagccccagtacggggagaacatggaaatttacgcaggcaagaagaataactggacaggggagttctccgcacggtttctgctcaaactgcctgtcgatttcagtaatataccaacttaccttcttaaggacgtgaacgaggacccgggcgaagatgtcgctttgctgtctgtgagctttgaggatactgaagctactcaggtgtatcccaagctttacctttcgccccgcatcgagcatgctctgggggggtctagtgccttgcatattccggcgttccctggagggggctgtctgattgactacgtcccccaggtctgtcatctgctgaccaataaagtgcagtacgtcatccaggggtaccataagaggagggaatacatcgcagcgtttctgtctcacttcgggaccggggttgtggaatatgacgctgaggggttcacaaagttaacactgctccttatgtggaaggatttctgtttcctcgttcacattgatcttccactattcttcccgagggatcagccaaccctgacttttcagagtgtttatcatttcactaactctgggcagctctactcacaagcccagaagaactacccttacagtccaagatgggacggtaacgagatggccaagcgggctaaggcatacttcaaaactttcgttccacagtttcaggaagccgccttcgcaaacgggaaactgtag

SEQ ID NO: 261222 - DNA, 1152 bp, Artificial Sequence
  derived and/or modified sequence
atgagccctgaggtggccctgaaccgcatcagccccatgctgagccccttcatcagctctgtggtgagaaatggcaaggtgggcctggatgccaccaactgcctgcgcatcacagacctgaagagcggctgcaccagcctgaccccaggccccaactgtgaccgcttcaagctgcacatcccctatgctggggagaccctgaagtgggacatcatcttcaatgcccagtacccagagctgcccccagacttcatctttggagaagatgctgagttcctgcctgaccccagcgccctgcagaacctggcctcctggaaccccagcaacccagaatgtctgctgctggtggtgaaggagctggtgcagcagtaccaccagttccagtgcagccggctgcgggagagcagccggctgatgtttgagtaccagaccctgctggaggagccccagtatggagagaacatggagatctatgccggcaagaagaacaactggacaggagagttcagcgcccgcttcctgctgaagctgcctgtggacttcagcaacatccccacctacctgctgaaggatgtgaatgaagaccccggggaggatgtggccctgctgtctgtgtcctttgaggacacagaggccacccaggtgtaccccaagctgtacctgagccccagaattgaacatgccctgggcggcagcagcgccctgcacatcccagccttccctgggggcggctgcctgattgattatgtgccccaggtgtgccacctgctgaccaacaaggtgcagtatgtgatccagggctaccacaagagaagagagtacatcgccgccttcctgagccacttcggcaccggggtggtggagtatgatgctgagggcttcaccaagctgaccctgctgctgatgtggaaggacttctgcttcctggtgcacatcgacctgcccctcttcttcccccgggaccagcccaccctgaccttccagagcgtgtaccacttcaccaacagcggccagctgtacagccaggcccagaagaactacccctacagcccccgctgggatggaaatgagatggccaagagggccaaggcctacttcaagacctttgtgccccagttccaggaggccgcctttgccaacgggaagctgtag

SEQ ID NO: 261223 - DNA, 858 bp, Artificial Sequence
  derived and/or modified sequence
aactggaacctggcctcctggaaccccagcaacccagaatgtctgctgctggtggtgaaggagctggtgcagcagtaccaccagttccagtgcagccggctgcgggagagcagccggctgatgtttgagtaccagaccctgctggaggagccccagtatggagagaacatggagatctatgccggcaagaagaacaactggacaggagagttcagcgcccgcttcctgctgaagctgcctgtggacttcagcaacatccccacctacctgctgaaggatgtgaatgaagaccccggggaggatgtggccctgctgtctgtgtcctttgaggacacagaggccacccaggtgtaccccaagctgtacctgagccccagaattgaacatgccctgggcggcagcagcgccctgcacatcccagccttccctgggggcggctgcctgattgattatgtgccccaggtgtgccacctgctgaccaacaaggtgcagtatgtgatccagggctaccacaagagaagagagtacatcgccgccttcctgagccacttcggcaccggggtggtggagtatgatgctgagggcttcaccaagctgaccctgctgctgatgtggaaggacttctgcttcctggtgcacatcgacctgcccctcttcttcccccgggaccagcccaccctgaccttccagagcgtgtaccacttcaccaacagcggccagctgtacagccaggcccagaagaactacccctacagcccccgctgggatggaaatgagatggccaagagggccaaggcctacttcaagacctttgtgccccagttccaggaggccgcctttgccaacgggaagctgtag

SEQ ID NO: 261224 - DNA, 1243 bp, Artificial Sequence
  derived and/or modified sequence
aactggaatcttgcctcctggaatccttcaaatcctgaatgtctcttacttgtggtgaaggaacttgtgcaacaatatcaccaattccaatgtagccgcctccgggagagctcccgcctcatgtttgaataccagacattactggaggagccacagtatggagagaacatggaaatttatgctgggaaaaaaaacaactggactggtgaattttcagctcgtttccttttgaagctgcccgtagatttcagcaatatccccacataccttctcaaggatgtaaatgaagaccctggagaagatgtggccctcctctctgttagttttgaggacactgaagccacccaggtgtaccccaagctgtacttgtcacctcgaattgagcatgcacttggaggctcctcagctcttcatatcccagcttttccaggaggaggatgtctcattgattacgttcctcaagtatgccacctgctcaccaacaaggtgcagtacgtgattcaagggtatcacaaaagaagagagtatattgctgcttttctcagtcactttggcacaggtgtcgtggaatatgatgcagaaggctttacaaaactcactctgctgctgatgtggaaagatttttgttttcttgtacacattgacctgcctctgtttttccctcgagaccagccaactctcacatttcagtccgtttatcactttaccaacagtggacagctttactcccaggcccaaaaaaattatccgtacagccccagatgggatggaaatgaaatggccaaaagagcaaaggcttatttcaaaacctttgtccctcagttccaggaggcagcatttgccaatggaaagctctaggaaacaccagtcttgagaggtggccagccagactgcctgtccacatgcgtgtcagcacatacagccgcttcctggaagccgcctggaatgtcttcacggcagcgttttgctcacacagcagcttttgcacgccccaggcagccccgactgctgaaatccaacttgagctggctggtggtccctggatcctagagcccttcacttcgggttactccctctttcttgcctctatttcttagttggaagaaataaactcacaaattatggtgcagtaattttccggggaaagtaaagcctcaggaatgcccacgcctttcttccaaagcctttgtctctgagacctcttaagttctaagattaaatgcccctcgctgttcttcctctg

SEQ ID NO: 261225 - DNA, 1657 bp, Artificial Sequence
  derived and/or modified sequence
gcggcgcgcgcgcaggtcggtgcgtctgtcgggggcgcgctcgggtacctgtaccccacgtagtcgccggttaccgatcggactaagttccagtggtgatttacaagtcaagttaaaatgtccccagaagtggccttgaaccgaatatctccaatgctctcccctttcatatctagcgtggtccggaatggaaaagtgggactggatgctacaaactgtttgaggataactgacttaaaatctggctgcacatcattgactcctgggcccaactgtgaccgatttaaactgcacataccatatgctggagagacattaaagtgggatatcattttcaatgcccaatacccagaactgcctcccgattttatctttggagaagatgctgaattcctgccagacccctcagctttgcagaatcttgcctcctggaatccttcaaatcctgaatgtctcttacttgtggtgaaggaacttgtgcaacaatatcaccaattccaatgtagccgcctccgggagagctcccgcctcatgtttgaataccagacattactggaggagccacagtatggagagaacatggaaatttatgctgggaaaaaaaacaactggactggtgaattttcagctcgtttccttttgaagctgcccgtagatttcagcaatatccccacataccttctcaaggatgtaaatgaagaccctggagaagatgtggccctcctctctgttagttttgaggacactgaagccacccaggtgtaccccaagctgtacttgtcacctcgaattgagcatgcacttggaggctcctcagctcttcatatcccagcttttccaggaggaggatgtctcattgattacgttcctcaagtatgccacctgctcaccaacaaggtgcagtacgtgattcaagggtatcacaaaagaagagagtatattgctgcttttctcagtcactttggcacaggtgtcgtggaatatgatgcagaaggctttacaaaactcactctgctgctgatgtggaaagatttttgttttcttgtacacattgacctgcctctgtttttccctcgagaccagccaactctcacatttcagtccgtttatcactttaccaacagtggacagctttactcccaggcccaaaaaaattatccgtacagccccagatgggatggaaatgaaatggccaaaagagcaaaggcttatttcaaaacctttgtccctcagttccaggaggcagcatttgccaatggaaagctctaggaaacaccagtcttgagaggtggccagccagactgcctgtccacatgcgtgtcagcacatacagccgcttcctggaagccgcctggaatgtcttcacggcagcgttttgctcacacagcagcttttgcacgccccaggcagccccgactgctgaaatccaacttgagctggctggtggtccctggatcctagagcccttcacttcgggttactccctctttcttgcctctatttcttagttggaagaaataaactcacaaattatggtgcagtaattttccggggaaagtaaagcctcaggaatgcccacgcctttcttccaaagcctttgtctctgagacctcttaagttctaagattaaatgcccctcgctgttcttcctctgaaa

SEQ ID NO: 261226 - DNA, 1752 bp, Artificial Sequence
  derived and/or modified sequence
ggtacctgtaccccacgtagtcgccggttaccgatcggactaagttccagaagcaagagataaagtaataatgggtactgtggggaaaaacacagaagaacaattcggtaatatagtggtgatttacaagtcaagttaaaatgtccccagaagtggccttgaaccgaatatctccaatgctctcccctttcatatctagcgtggtccggaatggaaaagtgggactggatgctacaaactgtttgaggataactgacttaaaatctggctgcacatcattgactcctgggcccaactgtgaccgatttaaactgcacataccatatgctggagagacattaaagtgggatatcattttcaatgcccaatacccagaactgcctcccgattttatctttggagaagatgctgaattcctgccagacccctcagctttgcagaatcttgcctcctggaatccttcaaatcctgaatgtctcttacttgtggtgaaggaacttgtgcaacaatatcaccaattccaatgtagccgcctccgggagagctcccgcctcatgtttgaataccagacattactggaggagccacagtatggagagaacatggaaatttatgctgggaaaaaaaacaactggactggtgaattttcagctcgtttccttttgaagctgcccgtagatttcagcaatatccccacataccttctcaaggatgtaaatgaagaccctggagaagatgtggccctcctctctgttagttttgaggacactgaagccacccaggtgtaccccaagctgtacttgtcacctcgaattgagcatgcacttggaggctcctcagctcttcatatcccagcttttccaggaggaggatgtctcattgattacgttcctcaagtatgccacctgctcaccaacaaggtgcagtacgtgattcaagggtatcacaaaagaagagagtatattgctgcttttctcagtcactttggcacaggtgtcgtggaatatgatgcagaaggctttacaaaactcactctgctgctgatgtggaaagatttttgttttcttgtacacattgacctgcctctgtttttccctcgagaccagccaactctcacatttcagtccgtttatcactttaccaacagtggacagctttactcccaggcccaaaaaaattatccgtacagccccagatgggatggaaatgaaatggccaaaagagcaaaaagagagagcaacagagatggggaggaatccagctctgcctgacatccaggcatcctctccaaattgcatagggcttatttcaaaacctttgtccctcagttccaggaggcagcatttgccaatggaaagctctaggaaacaccagtcttgagaggtggccagccagactgcctgtccacatgcgtgtcagcacatacagccgcttcctggaagccgcctggaatgtcttcacggcagcgttttgctcacacagcagcttttgcacgccccaggcagccccgactgctgaaatccaacttgagctggctggtggtccctggatcctagagcccttcacttcgggttactccctctttcttgcctctatttcttagttggaagaaataaactcacaaattatggtgcagtaattttccggggaaagtaaagcctcaggaatgcccacgcctttcttccaaagcctttgtctctgagacctcttaagttctaagattaaatgcccctcgctgttcttcctctgaaa

SEQ ID NO: 261227 - DNA, 1152 bp, Artificial Sequence
  derived and/or modified sequence
atgagccccgaggtggccctgaaccggatcagccccatgctgagcccatttatctcttccgttgtcaggaacggcaaggtgggcttggatgctaccaattgtctcagaatcaccgatctgaagtcagggtgtacttcccttacacctggcccaaactgtgacaggtttaagctccacatcccatacgccggagaaacgctgaagtgggacatcattttcaacgcccaatatcccgagctgccaccagatttcattttcggggaagacgccgaatttctgccagacccatctgccttacaaaacctggctagctggaacccgtccaatcccgaatgcctcctcctcgttgtaaaagagctggtccagcagtatcaccagtttcagtgctctagactgagggaatcctctagactcatgttcgaataccagaccctgctggaggaacctcaatacggagagaatatggagatttatgcaggcaagaagaataactggaccggggaattcagcgcaagattcttgctcaagctccccgtggattttagcaacatccccacatatttacttaaggacgtaaacgaagacccaggcgaggatgtggcactcctgtctgtgtcattcgaggataccgaggcgactcaggtgtatccaaagttgtacttatcacctcgcattgaacatgctctgggagggagctcggctctccatatcccagctttccctgggggcggatgcctgattgattacgttccccaggtgtgtcatctcttaaccaacaaggtgcagtatgtgatacagggctaccataagcgaagagagtacatcgctgcctttctttcccacttcggaaccggcgtggtcgaatacgacgccgaaggctttactaaactgacgctgttacttatgtggaaagacttctgttttctggttcacatcgacctgcctctttttttcccacgagaccaaccaacattgacattccagtccgtgtatcatttcaccaactccggccaattgtactcacaggctcagaagaactatccttattcccccagatgggatgggaatgaaatggccaaacgggccaaagcctatttcaaaaccttcgtaccacagtttcaggaggcggcttttgcgaatggaaagctgtag

SEQ ID NO: 261228 - DNA, 858 bp, Artificial Sequence
  derived and/or modified sequence
aactggaacctggccagctggaaccccagcaaccccgagtgcctgctgcttgtagtaaaagaattagtgcagcagtaccatcagtttcagtgcagtagactgcgtgaaagctctcggctgatgttcgaataccagacgttactggaggagccccaatacggagagaatatggaaatatacgcgggcaagaagaataactggacaggagagttctccgctagattcctgctcaaactgcctgtggacttcagcaatatccccacctacctcctcaaggatgtgaacgaagatcccggcgaggacgtggcgctgctctctgtttctttcgaggacactgaagcaacacaagtttatccaaaattatatctgagcccccgaatcgagcacgcacttggcgggagcagcgcgcttcatatcccggccttcccaggcggcggttgtctgattgattacgtcccccaagtttgtcacctgctcactaataaagtgcaatacgtgatccaaggttaccacaagaggagggagtatatcgccgcgttcctgagtcactttggcactggtgtagtggagtatgacgccgaaggctttaccaaactcaccctgttgctgatgtggaaggacttctgtttcctggtacacatcgacctaccactcttttttccaagagaccagcccaccctgacgttccagtcagtgtaccacttcaccaactccggccagctttattcacaggcccaaaagaattatccctacagtccccgctgggatgggaacgagatggctaagcgggccaaggcatactttaagaccttcgtgccacaatttcaagaggctgcgttcgccaatggaaaactatag

SEQ ID NO: 261229 - DNA, 1152 bp, Artificial Sequence
  derived and/or modified sequence
atgagccccgaggtggccctgaaccggatcagccccatgctgagccccttcatatccagcgtggtgcggaacggcaaagtaggcctagacgcaacaaattgccttagaattactgatctgaaaagcggctgtactagccttactcccggtccaaattgtgatagatttaagctgcatatcccctacgccggtgagactctgaagtgggatattatatttaatgctcagtatcctgagctgccaccagattttatctttggggaggatgcggaattcctccctgatccatcagcgctgcaaaatttagctagttggaatccctcgaatcccgaatgtttacttctggtagtgaaggagctcgtgcagcagtaccatcaattccagtgctctcgattgcgcgagtcttcccgacttatgttcgaataccagactttattggaagagccgcagtatggcgagaatatggagatatacgcggggaagaagaacaattggaccggcgaatttagcgcccgattcctgctcaagcttccagtggacttttcaaatatccccacctacctcctaaaggatgtcaatgaagaccctggggaagatgtcgcacttttgtctgtaagttttgaagacacggaggcaacccaggtttaccccaaattgtacctgtctccaaggattgaacatgcactgggaggcagcagcgcactgcatatcccggctttcccaggggggggctgcctgattgactatgtgccccaagtgtgccatctgctgacaaataaggtgcagtacgtgatccaggggtaccacaagcggagggagtatatcgcggccttcctttctcacttcgggaccggtgttgtggagtacgacgccgagggctttacaaagttaacactgctcctgatgtggaaagacttctgctttctagtgcacatagacctgcctctgttcttcccacgagatcagccaaccctgaccttccagtcagtgtaccactttaccaactcagggcagctgtatagccaggcacagaaaaattatccatacagccctcgctgggatggtaatgagatggccaagcgggctaaggcatacttcaagacatttgtgccccagtttcaggaggccgcgttcgctaatggcaaactgtag

SEQ ID NO: 261230 - DNA, 1152 bp, Artificial Sequence
  derived and/or modified sequence
atgagcccagaggtggctctcaacagaataagtcccatgcttagcccgttcatcagttcggtggtgcggaatggtaaggtaggactggacgcgacaaactgccttcgcattacagatctcaagtccggttgcacttcgttgacccccggtcctaattgtgataggttcaaattgcacataccctacgccggagagaccttaaagtgggacatcatttttaatgcacagtacccagaactaccgcctgatttcatcttcggagaagacgctgaattcctgcctgatccgtctgccctacagaacttagccagttggaacccgagtaaccccgagtgtctgctgctggtggttaaagagctggttcaacagtaccaccaatttcagtgcagccgactgagagagtcctcgaggctcatgtttgagtatcagacgctcctcgaggaaccgcagtatggggaaaatatggaaatttatgccggtaagaaaaacaattggacaggagaatttagcgctaggtttctgttgaagttgccagttgatttcagcaacatacctacgtatctactgaaggacgtcaacgaggaccccggagaagatgtcgctctgctctcagtgagctttgaagacactgaggccacacaggtgtaccccaaactttatttgtcgccgcgtatcgaacatgcccttggcggatcatcggcacttcacatccccgctttccctggtggagggtgtctgatagattatgtgccacaggtatgtcacttgttgacgaacaaagtccagtatgtcatccagggctaccataagaggagagagtacatagcggcatttctctcgcattttggcacaggagtggttgagtatgacgccgaaggctttactaagctcaccctcttattgatgtggaaggacttttgctttctagttcatatagatctacccctctttttcccacgagatcagcccactctaaccttccagtctgtttatcatttcactaactctgggcagctctattctcaagctcagaaaaattatccatatagtccgaggtgggatggtaatgagatggccaagagagcaaaggcctacttcaaaacgtttgttccccagttccaagaagccgcattcgctaacggtaaactatag

SEQ ID NO: 261231 - DNA, 858 bp, Artificial Sequence
  derived and/or modified sequence
aactggaacctggcctcttggaacccaagcaatccagagtgcctgctgttagtcgtgaaggagttagtgcagcagtaccatcagtttcagtgtagccgtttgcgcgagagttctcgcttgatgttcgaataccagacactgctagaagagccgcaatatggcgagaatatggagatctatgccggaaagaaaaataattggaccggggaatttagcgcaaggtttctgctgaaattgccggtggactttagcaacatcccaacctacctccttaaggacgtcaatgaggatccaggagaagatgtggctttgctttcagtgtcctttgaagacaccgaagccactcaggtataccctaagctgtatctgtcacccagaattgaacacgcattgggcggttcctcagccttgcatatacccgcattccccggtgggggttgtctcatcgattatgtccctcaggtctgtcatctgttgacaaacaaagtgcagtacgttatccaaggctatcacaaaagacgagagtacattgctgcattcctttcccatttcgggacaggcgtggttgagtatgatgccgagggctttactaagctgaccttgctgctgatgtggaaagacttctgctttctggtgcacatcgacctgcctcttttcttccctagggatcaacctactttaactttccagtctgtgtatcactttacgaactcagggcagctttacagccaggcccaaaaaaattatccatactcacccagatgggacgggaatgagatggccaagcgcgctaaggcctattttaagacgtttgtgccacagttccaggaggctgcatttgcgaatggcaagctgtag

SEQ ID NO: 261232 - DNA, 1152 bp, Artificial Sequence
  derived and/or modified sequence
atgagcccggaagtggcattgaaccggattagccccatgctaagcccgttcattagtagcgttgtccgtaatggcaaggtcggcctggatgcaacaaattgccttcgtattaccgacctcaagtcgggatgcaccagtctaacgcctggccctaattgcgacaggttcaagttgcacattccctatgccggtgagaccctgaaatgggatataatatttaatgcccaataccctgaactgccccctgacttcatattcggggaggatgccgagttcctgcccgaccccagcgccctgcagaacctggcctcatggaacccttctaatccagagtgtttactgctggtcgtgaaagagctggtgcagcagtatcaccaattccagtgctctcgtctgcgggagtccagtaggctgatgttcgaataccaaaccttgttggaggaaccacagtacggagagaacatggagatatacgcaggaaagaagaataactggaccggagagttttcagcccgatttctgctgaagttgcccgttgacttctccaacatacctacgtacctgctcaaggatgtgaacgaggatcctggagaagatgttgcgcttctctccgttagttttgaggacacagaggcaacccaggtgtatcccaaactgtatctcagccccaggatcgagcatgcactaggtgggagctcagcactgcacatccccgcattcccgggtggcggatgtctcattgattacgttccccaggtttgccacctcctgacaaacaaggtacagtacgtgatacagggctaccacaaaaggagagagtacatcgccgcttttctatcccacttcggtaccggagtggtggagtatgatgccgaggggttcacaaagctgaccctcttgttgatgtggaaggatttttgcttccttgtgcatatcgatctgccacttttcttcccacgcgaccagcctacacttacttttcagtctgtttatcattttactaactcgggtcagttgtactctcaggctcagaagaactacccctacagcccaaggtgggacggcaatgaaatggccaagagagctaaagcctactttaaaactttcgtaccccagtttcaggaggccgctttcgctaacggcaaattatag

SEQ ID NO: 261233 - protein, 355 aa, Artificial Sequence
  derived and/or modified sequence
MGDSRRRSLGNQPSSEAAGRSEREQDGDPRGLQSSVYESRRVTDPERQDLDNAELGPEDPEEELPPEEVAGEEFPETLDPKEALSELERVLDKDLEEDIPEISRLSISQKLPSTTMTKARKRRRRRRLMELAEPKINWQVLKDRPSVYWTERFLEDTTLTITVPAVSRRVEELSRPKRFYLEYYNNNRTTPVWPIPRSSLEYRASSRLKELAAPKIRDNFWSMPMSEVSQVSRAAQMAVPSSRILQLSKPKAPATLLEEWDPVPKPKPHVSDHNRLLHLARPKAQSDKCVPDRDPRWEVLDVTKKVVASPRIISLAKPKVRKGLNEGYDRRPLASMSLPPPKASPEKCDQPRPGL

SEQ ID NO: 261234 - DNA, 1068 bp, Artificial Sequence
  derived and/or modified sequence
atgggcgactccaggcggcgctcacttggaaaccagccttccagtgaagccgccggccggtctgagagagaacaggacggagacccgcgcggcctgcagagttcagtgtacgaatcccgccgtgtcactgatccagaaaggcaggacctcgacaatgcagaacttgggccagaggatcctgaggaggaacttcctcccgaagaggtggctggcgaggagtttcctgagacactcgaccctaaagaggctctgagcgagttggaacgagtgcttgacaaggacctggaagaggatatccctgagatatcccgcctctcaattagccaaaagctaccaagcaccacaatgaccaaggccaggaaacggcgacgcagacgcagactgatggaactggctgagcctaagatcaactggcaggtactgaaagatagaccgtctgtgtactggacagaacgattcctggaagacaccacgctcacaatcaccgttccagccgtgtcccgtagagtggaagagctgagcagacccaagaggttttacctggaatactataacaataaccgaacaaccccggtatggccaatacctagatctagcttagaatatcgcgcctcatcccggctgaaggagcttgcagcaccaaaaataagagataacttctggagcatgcctatgtccgaggtgtcgcaggttagtcgggccgcacaaatggcagtgccaagctcccgtatcctccagctctccaagcctaaggcccctgccaccttattagaggagtgggatcccgtacccaaacctaaacctcatgtttcagaccataatcgtttgctgcatctagcacgccccaaggcgcagtctgataagtgcgtgcctgacagggacccacggtgggaggttttagacgtgactaaaaaggtggtggcaagccccaggattatttccctcgccaagcctaaggtgaggaaagggctgaatgaaggatacgacagaaggcccctagctagcatgagcctgccgccccccaaggccagtcctgagaaatgtgaccagcccagacctggactgtag

SEQ ID NO: 261235 - DNA, 1068 bp, Artificial Sequence
  derived and/or modified sequence
atgggagacagcagaagaagaagcctgggcaaccagcccagcagcgaggccgccggccgctctgagcgggagcaggatggagacccccggggcctgcagagctctgtgtatgagagccggcgggtgacagatcctgagcggcaggacctggacaatgctgagctgggccctgaggaccctgaggaggagctgcccccagaggaggtggccggggaggagttccctgagaccctggaccccaaggaggccctgtctgagctggagcgggtgctggacaaggacctggaggaggacatccctgagatcagccggctgagcatcagccagaagctgcccagcaccaccatgaccaaggccaggaagagaagaagaagaagaaggctgatggagctggccgagcccaagatcaactggcaggtgctgaaggaccggcccagcgtgtactggacagagcgcttcctggaggacaccaccctgaccatcaccgtgcctgctgtgtcccggcgggtggaggagctgagccggcccaagcgcttctacctggagtactacaacaacaacagaaccacccctgtgtggcccatccccaggagcagcctggagtaccgggccagcagccggctgaaggagctggccgcccccaagatccgggacaacttctggagcatgcccatgtctgaggtgtcccaggtgtcccgggccgcccagatggctgtgcccagcagccgcatcctgcagctgagcaagcccaaggccccagccaccctgctggaggagtgggaccctgtgcccaagcccaagccccacgtgtctgaccacaaccggctgctgcacctggcccggcccaaggcccagagcgacaagtgtgtgcctgaccgggacccccgctgggaggtgctggatgtgaccaagaaggtggtggccagcccccgcatcatcagcctggccaagcccaaggtgaggaagggcctgaatgaaggctatgaccggcggcccctggcctccatgagcctgcccccacccaaggccagccctgagaagtgtgaccagcccaggcctggcctgtag

SEQ ID NO: 261236 - DNA, 1068 bp, Artificial Sequence
  derived and/or modified sequence
atgggcgacagccggcggcggagcctgggcaaccagcccagcagcgaagctgccgggcgatctgagagagagcaggacggtgaccctagaggattacaatccagcgtgtacgagtctcggagggtcactgatcccgaacgccaggacttggataacgctgaactaggaccagaagaccctgaggaagagttgccaccagaagaagtggcaggcgaagaatttcccgagactctcgatcccaaagaagcactatcggagctggaaagagttttggacaaagacttagaagaggatattccagagatatcccggttatctatctctcagaaactcccgagtaccaccatgacaaaggcacgcaaacgtcggaggaggcgccgcttgatggagctggctgagcccaagattaactggcaggttttaaaggatagaccctctgtctactggacagagaggtttctggaggacaccacgctcaccatcaccgtaccggcagtaagtcggcgggtggaagaactgagtagacctaaacggttctacctggagtactataataataaccggactaccccagtgtggccaattcctcgctctagtctcgagtaccgcgctagtagcagattgaaagagctagccgcaccaaaaatcagggataatttctggtcgatgccaatgagtgaggtgtctcaagtgtcacgagcagcacagatggccgtgccttctagcagaatactgcagctgtctaaacccaaggctcccgctacactcctcgaggagtgggatccagttcccaagcctaaacctcatgtgtccgaccataatcgattgctgcatcttgctaggcccaaagcccagagtgataaatgtgtccccgatcgcgatccaagatgggaagttctcgacgtgaccaagaaagtcgtggcctctcctaggatcatatctctcgcaaagccaaaggttcggaaagggctcaatgaggggtatgacagacggcccctggcctccatgtcactaccgcctcccaaggcctcacccgaaaagtgtgatcagcctagacctgggctctag

SEQ ID NO: 261237 - DNA, 1068 bp, Artificial Sequence
  derived and/or modified sequence
atgggggacagcaggcgaaggtcactcgggaaccagcccagctctgaggctgcgggcaggtcggaaagggagcaggacggcgacccccgtggcctccagagctctgtgtacgagagccggcgggtcacagaccccgaacgccaggacctggacaatgcagagctgggaccagaagacccagaagaggagcttccccccgaggaggtggccggggaggagttcccggagaccctggatcccaaagaggcactttctgagttggagagagtcctggacaaggacttggaagaggacattcctgaaatcagccggctgtccatcagccagaagctccccagcaccaccatgaccaaagcaaggaagaggaggaggcggaggaggctcatggagctggcagagcccaagataaactggcaagtcctgaaagacaggccctctgtgtactggaccgagcggttccttgaggacaccaccctcaccatcacagtgcccgcggtgtcccgccgcgtggaggaactgtctcggcccaagagattctacctggaatattacaacaacaacaggacgactcctgtctggcccattcctcggtcctccctggaatacagagcgtcgagtcgcctgaaggaactggccgccccgaagattcgtgataacttctggagcatgcccatgtctgaggtgtcccaggtatccagggcagcccaaatggcagtccccagctcgcggatcctccagttgtcaaagccgaaggccccagccaccctcttggaagagtgggaccccgtgccaaaacccaagccacatgtgtcagaccataaccgcctccttcacttggccaggcccaaagctcagtcggacaagtgcgttcctgaccgagatcctcgctgggaggtgctggatgtcaccaagaaggtggtggccagcccccggatcatctccctggccaagcccaaagtgcgcaagggcctcaacgagggatacgacaggcgtcccctcgcctctatgagcttgccacccccaaaagcatcaccagaaaagtgtgatcaacccaggcctggcctctaa

SEQ ID NO: 261238 - DNA, 1068 bp, Artificial Sequence
  derived and/or modified sequence
atgggggactcgaggcggagaagcctggggaatcagccatcgagtgaagccgctgggagatccgagcgtgaacaagatggcgatccccgaggactccagtcaagcgtgtacgaaagtcgacgagttacagatcccgaacgccaggatctggataacgccgagttgggccctgaagatcccgaggaagagctgccgccagaggaagtggctggggaggagttccccgaaaccctcgatcctaaggaggccctttccgagttggagcgtgtccttgacaaagacctggaagaggacatccctgaaatctcacgactgtccatatcacaaaagctcccctctacaacaatgacaaaagcccgaaagagacgaaggcggaggaggttaatggagttggcggagccaaaaatcaattggcaggtgctaaaagatcgcccaagtgtttattggaccgagcggttcctggaagacaccacactcacaattacagtccctgccgtctcccgccgagtggaggaactgtcaaggcccaaaagattttatctggagtactacaacaataatcgaactacccctgtttggcctattccccgatcgagtttagaataccgcgcatcaagtcgcctcaaggagttggcagctccgaagataagggacaacttctggagtatgcctatgtcagaagtatcccaggtcagccgcgcagctcagatggctgttccctctagccggatcctgcagctgtcaaagcccaaggcccctgccactctcttggaggaatgggatcctgtccccaagcctaagccccacgtctctgaccataacagactgctgcacctggcgagacccaaagctcagagcgacaagtgcgtcccagacagggatcctaggtgggaggtgctggacgtcacaaagaaagtggtggcttcgcccagaatcatctccctagccaaacccaaggtcaggaagggtttgaacgaggggtatgaccgcaggccactggcctccatgtcgctgccaccgccaaaggcctcacctgagaagtgcgaccaaccccgacccggtctctag

SEQ ID NO: 261239 - DNA, 1068 bp, Artificial Sequence
  derived and/or modified sequence
atgggcgacagcagaagaagaagcctgggcaaccagcccagcagcgaggccgccggcagaagcgagagagagcaggacggcgaccccagaggcctgcagagcagcgtgtacgagagcagaagagtgaccgaccccgagagacaggacctggacaacgccgagctgggccccgaggaccccgaggaggagctgccccccgaggaggtggccggcgaggagttccccgagaccctggaccccaaggaggccctgagcgagctggagagagtgctggacaaggacctggaggaggacatccccgagatcagcagactgagcatcagccagaagctgcccagcaccaccatgaccaaggccagaaagagaagaagaagaagaagactgatggagctggccgagcccaagatcaactggcaggtgctgaaggacagacccagcgtgtactggaccgagagattcctggaggacaccaccctgaccatcaccgtgcccgccgtgagcagaagagtggaggagctgagcagacccaagagattctacctggagtactacaacaacaacagaaccacccccgtgtggcccatccccagaagcagcctggagtacagagccagcagcagactgaaggagctggccgcccccaagatcagagacaacttctggagcatgcccatgagcgaggtgagccaggtgagcagagccgcccagatggccgtgcccagcagcagaatcctgcagctgagcaagcccaaggcccccgccaccctgctggaggagtgggaccccgtgcccaagcccaagccccacgtgagcgaccacaacagactgctgcacctggccagacccaaggcccagagcgacaagtgcgtgcccgacagagaccccagatgggaggtgctggacgtgaccaagaaggtggtggccagccccagaatcatcagcctggccaagcccaaggtgagaaagggcctgaacgagggctacgacagaagacccctggccagcatgagcctgcccccccccaaggccagccccgagaagtgcgaccagcccagacccggcctgtag

SEQ ID NO: 261240 - protein, 370 aa, Artificial Sequence
  derived and/or modified sequence
MAGAENWPGQQLELDEDEASCCRWGAQHAGARELAALYSPGKRLQEWCSVILCFSLIAHNLVHLLLLARWEDTPLVILGVVAGALIADFLSGLVHWGADTWGSVELPIVGKAFIRPFREHHIDPTAITRHDFIETNGDNCLVTLLPLLNMAYKFRTHSPEALEQLYPWECFVFCLIIFGTFTNQIHKWSHTYFGLPRWVTLLQDWHVILPRKHHRIHHVSPHETYFCITTGVKVPRNFRLLEELEEGQKGVGDGTVSWGLEDDEDMTLTRWTGMIIGPPRTIYENRIYSLKIECGPKYPEAPPFVRFVTKINMNGVNSSNGVVDPRAISVLAKWQNSYSIKVVLQELRRLMMSKENMKLPQPPEGQCYSN

SEQ ID NO: 261241 - DNA, 1113 bp, Artificial Sequence
  derived and/or modified sequence
atggccggcgccgagaactggcccggccagcagctggagctggacgaggacgaggccagctgctgcagatggggcgcccagcacgccggcgccagagagctggccgccctgtacagccccggcaagagactgcaggagtggtgcagcgtgatcctgtgcttcagcctgatcgcccacaacctggtgcacctgctgctgctggccagatgggaggacacccccctggtgatcctgggcgtggtggccggcgccctgatcgccgacttcctgagcggcctggtgcactggggcgccgacacctggggcagcgtggagctgcccatcgtgggcaaggccttcatcagacccttcagagagcaccacatcgaccccaccgccatcaccagacacgacttcatcgagaccaacggcgacaactgcctggtgaccctgctgcccctgctgaacatggcctacaagttcagaacccacagccccgaggccctggagcagctgtacccctgggagtgcttcgtgttctgcctgatcatcttcggcaccttcaccaaccagatccacaagtggagccacacctacttcggcctgcccagatgggtgaccctgctgcaggactggcacgtgatcctgcccagaaagcaccacagaatccaccacgtgagcccccacgagacctacttctgcatcaccaccggcgtgaaggtgcccagaaacttcagactgctggaggagctggaggagggccagaagggcgtgggcgacggcaccgtgagctggggcctggaggacgacgaggacatgaccctgaccagatggaccggcatgatcatcggcccccccagaaccatctacgagaacagaatctacagcctgaagatcgagtgcggccccaagtaccccgaggccccccccttcgtgagattcgtgaccaagatcaacatgaacggcgtgaacagcagcaacggcgtggtggaccccagagccatcagcgtgctggccaagtggcagaacagctacagcatcaaggtggtgctgcaggagctgagaagactgatgatgagcaaggagaacatgaagctgccccagccccccgagggccagtgctacagcaactag

SEQ ID NO: 261242 - DNA, 1113 bp, Artificial Sequence
  derived and/or modified sequence
atggccggggcggagaactggccagggcagcagctcgagttggatgaggacgaggcctcgtgttgccgatggggcgcccaacatgcaggcgcaagggaactggccgcattgtactcccccggtaaacgacttcaggaatggtgtagcgtgatcctgtgcttttccctaatcgctcacaatcttgtacacctccttctattggctagatgggaggataccccactggtcatcctcggcgtcgtcgctggtgcattgatcgctgacttcctctctggtctggttcattggggagcagacacttggggctcggttgaactgcccatcgtcggcaaggcctttatccggccatttagggaacaccatattgacccaaccgcgatcacacggcatgacttcattgaaactaatggggataattgcttggttacactgctcccccttctgaacatggcctacaagtttcggacccacagcccggaggccctagagcagctgtatccctgggaatgtttcgtattctgtcttatcatcttcggaacattcaccaaccaaattcacaagtggtcgcacacatattttggcctgcctcgctgggtaaccttactgcaggattggcacgtgatactgcctcgcaaacaccacagaatccaccacgtgtctccacatgagacatatttctgcatcacaactggcgtgaaggtgccacgtaactttcggttactcgaggaattggaagagggtcaaaagggtgtgggcgacggcaccgtctcttggggcctggaggatgatgaagacatgacccttactcgctggaccggcatgatcattgggccacctagaactatctatgaaaatcgcatttacagcttaaagattgagtgtgggcctaaataccctgaggccccaccttttgtgcggttcgtgaccaaaattaatatgaacggggtgaacagcagtaacggtgtggttgaccctcgggcaatatcggtgttagctaaatggcagaattcatatagcatcaaagttgtgctccaggagctcaggagactgatgatgtcgaaggagaatatgaagctgccgcagcctccagagggtcagtgttactcaaactag

SEQ ID NO: 261243 - DNA, 1113 bp, Artificial Sequence
  derived and/or modified sequence
atggccggggctgagaactggccaggccagcagctggagctggatgaagatgaggccagctgctgccgctggggcgcccagcacgccggggcccgggagctggccgccctgtacagccctgggaagaggctgcaggagtggtgcagcgtcatcctgtgcttcagcctgattgcccacaacctggtgcacctgctgctgctggcccgctgggaggacacccccctggtgatcctgggcgtggtggccggggccctgattgctgacttcctgagcggcctggtgcactggggcgctgacacctggggctctgtggagctgcccatcgtgggcaaggccttcatccggcccttccgggagcaccacatcgaccccacagccatcaccaggcatgacttcatcgagaccaacggggacaactgcctggtgaccctgctgcccctgctgaacatggcctacaagttccgcacccacagccctgaggccctggagcagctgtacccctgggagtgctttgtgttctgcctgatcatcttcggcaccttcaccaaccagatccacaagtggagccacacctacttcggcctgccccgctgggtgaccctgctgcaggactggcacgtgatcctgcccaggaagcaccaccgcatccaccacgtgagcccccatgagacctacttctgcatcaccaccggggtgaaggtgcccaggaacttccggctgctggaggagctggaggagggccagaagggcgtgggagatggcaccgtgtcctggggcctggaggatgatgaggacatgaccctgacccgctggacaggcatgatcatcggcccccccaggaccatctatgagaaccgcatctacagcctgaagattgaatgtggccccaagtacccagaggcccccccatttgtgcgctttgtgaccaagatcaacatgaatggagtgaacagcagcaatggagtggtggacccccgggccatctctgtgctggccaagtggcagaacagctacagcatcaaggtggtgctgcaggagctgcggcggctgatgatgagcaaagaaaacatgaagctgccccagcccccagagggccagtgctacagcaactag

SEQ ID NO: 261244 - DNA, 1113 bp, Artificial Sequence
  derived and/or modified sequence
atggccggcgccgagaactggcccggccagcagctggagctggacgaggacgaggcatcttgttgtagatggggagcccaacatgctggcgcaagggaactggccgccctgtactctcctggcaaacgcctgcaagagtggtgttccgtaattctgtgcttctcactcatcgcacataatctagtgcacttgttgctgctcgccaggtgggaggacactcctctggtaatcttgggcgttgttgcaggcgccctcattgccgatttcctgtcgggtctggtccactggggagctgacacgtggggaagtgtcgaattgcctatagtgggcaaggccttcattcgcccattcagagagcaccatatcgaccctaccgccatcactcgacatgattttatcgaaacaaacggcgataactgtctggtaaccctgctgccactgcttaacatggcgtacaagttccggacccacagccccgaggccttggagcagttgtacccatgggagtgctttgtgttctgcctaatcatatttggcacatttactaatcagatccataaatggtcgcacacttactttggactccccagatgggttacattactccaagattggcatgtcatcctgccacggaagcaccacaggatccaccatgtaagcccccatgagacatacttctgcattacgaccggggtgaaggtgccgagaaacttcagactgctagaagaattagaagaaggacagaagggagttggcgatggaacagttagctggggactagaggacgacgaagacatgactctgacgagatggacaggcatgattataggacctccccggacaatttatgaaaatagaatttactctctgaaaatagaatgtgggcctaagtaccccgaagcacctccctttgtacgctttgtaacaaaaatcaacatgaacggtgtcaactcctccaacggagttgtggacccaagggccatctctgttctggccaaatggcagaactcatattcgatcaaggtggttctccaggagctgcgcaggttgatgatgagcaaggagaatatgaaactgccgcagcctccagaagggcaatgttactcgaactag

SEQ ID NO: 261245 - DNA, 1113 bp, Artificial Sequence
  derived and/or modified sequence
atggcgggtgccgaaaattggcccggacagcaattggagctggacgaagacgaggcgagttgttgtaggtggggagcccagcatgctggcgctcgtgaactagccgctctatactctcctggcaaaagactgcaggagtggtgttccgtaatcctgtgtttttcacttattgcgcataatctggtgcacctgctgctattggccagatgggaagacacacctcttgtgatcctgggagttgtggccggagccctcatcgcagatttcctgtccggcttggtgcattggggagctgacacctgggggtcagtggaattacccatcgttgggaaggccttcatccgaccattcagggagcaccatatagaccctactgcaatcacacgtcacgacttcatcgagaccaatggggataactgccttgtgactttgttgccgctgctgaacatggcgtataaattcaggactcacagtccagaagccctcgagcagctgtatccatgggaatgtttcgttttctgcctcatcatcttcggcacatttaccaatcagattcataagtggagccacacctattttggactgcccagatgggtgaccctactgcaagactggcacgtcatcttgccgaggaaacatcaccggatccatcatgtatcgcctcatgagacctacttctgcataaccaccggcgtgaaggtgcccaggaactttagactgctggaagaactcgaggagggacaaaaaggggttggggacggtacagtttcctgggggttggaagacgacgaagatatgaccttaactcgttggaccgggatgatcatcgggcctccgagaactatctacgagaatcgcatctattcactgaaaattgagtgtgggcctaagtaccctgaggctccacctttcgtgaggttcgtgacgaagattaatatgaacggtgtcaactcctccaacggcgttgtggatccacgggcaattagcgtgcttgcaaagtggcagaattcatacagcattaaggtcgtgctgcaggaactgaggaggctgatgatgagtaaggagaatatgaagctgccacagcccccagagggccaatgttatagcaactag

SEQ ID NO: 261246 - DNA, 2916 bp, Artificial Sequence
  derived and/or modified sequence
agccccgattggctgtgacgcgcggccgggcgaggaccccgcccgcgccgccgccgcgcccggcgctgggcggtcattgggcggcgtgatctcgccgcggttccgcggccctgccgccgccgccgccagcagagcgcaccgggccgatcgggcgagtggccatggcgggcgccgagaactggccgggccagcagctggagctggacgaggacgaggcgtcttgttgccgctggggcgcgcagcacgccggggcccgcgagctggctgcgctctactcgccaggcaagcgcctccaggagtggtgctctgtgatcctgtgcttcagcctcatcgcccacaacctggtccatctcctgctgctggcccgctgggaggacacacccctcgtcatactcggtgttgttgcaggggctctcattgctgacttcttgtctggcctggtacactggggtgctgacacatggggctctgtggagctgcccattgtggggaaggctttcatccgacccttccgggagcaccacattgacccgacagctatcacacggcacgacttcatcgagaccaacggggacaactgcctggtgacactgctgccgctgctaaacatggcctacaagttccgcacccacagccctgaagccctggagcagctatacccctgggagtgcttcgtcttctgcctgatcatcttcggcaccttcaccaaccagatccacaagtggtcgcacacgtactttgggctgccacgctgggtcaccctcctgcaggactggcatgtcatcctgccacgtaaacaccatcgcatccaccacgtctcaccccacgagacctacttctgcatcaccacaggagtaaaagtccctcgcaatttccgactgttggaagaactcgaagaaggccagaaaggagtaggagatggcacagttagctggggtctagaagatgacgaagacatgacacttacaagatggacagggatgataattgggcctccaagaacaatttatgaaaaccgaatatacagccttaaaatagaatgtggacctaaatacccagaagcacccccctttgtaagatttgtaacaaaaattaatatgaatggagtaaatagttctaatggagtggtggacccaagagccatatcagtgctagcaaaatggcagaattcatatagcatcaaagttgtcctgcaagagcttcggcgcctaatgatgtctaaagaaaatatgaaactccctcagccgcccgaaggacagtgttacagcaattaatcaaaaagaaaaaccacaggcccttccccttccccccaattcgatttaatcagtcttcattttccacagtagtaaattttctagatacgtcttgtagacctcaaagtaccggaaaggaagctcccattcaaaggaaatttatcttaagatactgtaaatgatactaattttttgtccatttgaaatatataagttgtgctataacaaatcatcctgtcaagtgtaaccactgtccacgtagttgaacttctgggatcaagaaagtctatttaaattgattcccatcataactggtggggcacatctaactcaactgtgaaaagacacatcacacaatcaccttgctgctgattacacggcctggggtctctgccttctccccttaccctcccgcctcccaccctccctgcaacaacagccctctagcctggggggcttgttagagtagatgtgaaggtttcaggtcgcagcctgtgggactactgctaggtgtgtggggtgtttcgcctgcacccctggtttctttaagtcttaagtgatgccccttccaaaccatcatcctgtccccacgctcctccactcccgcccttggccgaagcatagattgtaacccctccactcccctctgagattggccttcggtgaggaattcagggctttccccatatcttctctcccccacctttatcgaggggtgctgctttttctccctcctcctcaagttcctttttgcaccgtcaccacccaacaccttccatgacacttccttgctttggccagaagccatcaggtaaggttggaaagagcctctgacctcccttgtttagttttggaaccatactcactcactctccaccagcctgggaaatgaatattgggtcctcagccctgccaccctctgctgtcatcagctgatgcattgtttttagctcaggttttgataaggtgaaaagaatagtcaccagggttactcagacctgccagctctcggagtccttggtggttgaacttggagaaagaccgcatgaagatacttgtaagcacacatgatccctctgaattgttttactttcctgtaactgcttttgcttttaaaaattgaagaagttttaaacagggctttcatttggtcatccttgcaatccattggggtctagtttggaatctgacaactggaacaaaaagaaccttgaatccggtgcatgccttggttttggtgctgctgctgcttcccaagatcctcagcagggattaagaaggaacccggtgtgcacagcagatccccgaaattggtgggcttgacctcctggcaaattgctgcgtctttccacttgctgttcaggaccactaaatgctgaaatgtggatgcataccgaaataaaagcaattcattgtgtactaaaggttttttttttttttttaatttagtatttgtgtaaaaccaccttttgaagcagcaactatcaagtctgaaaagcaattgatgtttccattaatctttttctggggggaaaaccttagttctaaggatttaacatcctgtaagtgaagtttaacataacagtattccataagcagcctttttattgtcagaccattgcctgattttaatataataaaaaaaaagtgtgcgttaatattt

SEQ ID NO: 261247 - DNA, 1113 bp, Artificial Sequence
  derived and/or modified sequence
atggcaggtgcagaaaattggcccggacagcagctggaacttgacgaagatgaggccagttgctgcagatggggcgcccagcacgcaggtgcccgagagctggccgcgctatacagccccggcaaacgcctccaagagtggtgctccgtgattctttgcttctctctaattgctcataacctggtgcatttgctactgctggctagatgggaggacaccccactggtgatcttgggagtggtggctggtgcgctgatcgcggatttcctgagcggcctggtccattggggagccgatacttggggttctgtggagctacccatagtgggcaaagcattcatacgtccttttcgcgagcatcacattgatccaacagccattacaaggcacgacttcatagaaactaacggcgataactgcctcgttacacttttaccactgctgaacatggcttacaagtttagaactcattctcctgaagcactcgagcaactgtacccgtgggagtgttttgttttttgccttatcattttcgggacattcacaaatcagatacacaagtggagccatacatatttcggcctgccccgatgggttacactgttgcaggattggcacgttatcttaccacgcaagcatcaccgaatccaccatgttagcccccacgagacctacttttgcattactacaggcgtcaaggtcccacgaaactttcgacttctggaggagctcgaagagggccaaaaaggagtgggagacggcaccgtgagctggggactggaagatgatgaggacatgaccctaacccgttggactggcatgatcatcgggcccccgcgtacaatttatgagaacaggatttattcactgaagatcgaatgtggccccaaatatccagaagcaccacccttcgtccgatttgttacaaaaatcaacatgaacggcgtgaactcctctaatggcgtggttgacccaagggctataagcgtcctcgcaaagtggcagaattcttactcaatcaaggtggtgctccaggagttaaggcgcttgatgatgtcaaaggaaaacatgaaactcccccagcccccagaagggcagtgctatagcaactag

SEQ ID NO: 261248 - DNA, 1113 bp, Artificial Sequence
  derived and/or modified sequence
atggccggcgccgagaactggcccggccagcagctggagctggacgaagatgaagcctcttgttgcagatggggagcacagcacgctggagcccgggaactggccgccctgtactctcctggaaagcggctccaggagtggtgcagcgtcattctgtgtttctctctgatcgcacataatcttgtacatctcctgttgctcgcacgttgggaggatactccactggttattctgggagtcgtggccggtgcactgattgccgattttttgtctggcctggttcactggggcgccgatacatgggggagcgtcgaactgcctattgtcggtaaagccttcattcgaccatttcgcgagcaccatattgaccctaccgcaataacgcgacacgattttatcgagacaaatggagacaattgcctggttaccttgctccccctcctcaatatggcctataaattccgaacccacagtcccgaggccttggagcagctctacccatgggaatgtttcgtcttctgtctaataatctttgggaccttcacaaaccagattcataagtggagccacacttattttggcttacctcgatgggtcactctgctgcaggattggcacgtgattctcccacgcaagcatcacaggattcatcatgtgagtccacacgagacctacttctgcataaccacaggcgtcaaagttccacgtaattttagactgctggaggagctggaagagggacaaaagggagttggggatgggaccgtcagttggggactcgaggacgacgaggatatgacactcacgagatggaccggaatgatcattggacccccgcgaacaatctacgagaatagaatctatagtctgaagattgagtgcggtccaaaatacccggaagcgcccccatttgtgcgctttgtgacgaagataaacatgaacggcgttaattcttcaaacggggtggtcgacccccgcgctatatctgtgctggccaagtggcaaaatagctactccatcaaagtcgtactacaggaactgcgccgtctgatgatgagcaaagagaatatgaagctccctcagccaccggagggccagtgctattccaactag

SEQ ID NO: 261249 - DNA, 1113 bp, Artificial Sequence
  derived and/or modified sequence
atggcgggagctgaaaattggccgggtcagcaactcgagctcgacgaggatgaagcctcctgctgtcggtggggggctcagcacgcgggagcccgtgagctggccgctctctactctccgggaaaaagactgcaagagtggtgctccgtgatcctgtgcttcagtctgatcgcacacaacctggttcacctgcttctgctagcccgatgggaggatactccactcgtgatccttggggtcgtcgcaggcgcattgatcgcggatttcctcagcggtttagttcactggggagccgacacctggggctctgttgagcttcctatcgtcgggaaagctttcattaggcctttcagagagcaccacatcgatcctaccgccataactcgacacgatttcatcgagaccaacggagacaattgtcttgtcacactgctgccgctgctgaatatggcgtataagtttagaacccactcccccgaggccctcgaacagctctacccctgggagtgctttgtcttttgcctcatcatttttggaacctttaccaaccagatccacaagtggagccatacatacttcggccttccgcgatgggttaccctgctgcaggactggcacgtgatattacctagaaaacatcatcgcatccatcacgtgtctccccatgaaacatacttttgcatcaccacaggtgtgaaggtccctagaaactttcgcctgctggaagagctagaggagggtcagaagggcgtgggagacggcaccgtgtcttgggggttggaggacgatgaagacatgaccttgacaagatggacaggcatgatcatcggccctcccagaacaatatatgagaacaggatctacagcttaaaaatcgaatgcggtccgaagtatcccgaggctcctcccttcgtcaggttcgtcaccaaaatcaatatgaacggggtgaattcgagtaatggggtggtcgatcccagagcaatcagcgtgctagccaaatggcaaaatagctacagcatcaaggtagtcctccaggagttacgtcggctaatgatgtctaaggagaacatgaaattgccccagcccccagaggggcagtgctactccaactag

SEQ ID NO: 261250 - DNA, 2757 bp, Artificial Sequence
  derived and/or modified sequence
atggcgggcgccgagaactggccgggccagcagctggagctggacgaggacgaggcgtcttgttgccgctggggcgcgcagcacgccggggcccgcgagctggctgcgctctactcgccaggcaagcgcctccaggagtggtgctctgtgatcctgtgcttcagcctcatcgcccacaacctggtccatctcctgctgctggcccgctgggaggacacacccctcgtcatactcggtgttgttgcaggggctctcattgctgacttcttgtctggcctggtacactggggtgctgacacatggggctctgtggagctgcccattgtggggaaggctttcatccgacccttccgggagcaccacattgacccgacagctatcacacggcacgacttcatcgagaccaacggggacaactgcctggtgacactgctgccgctgctaaacatggcctacaagttccgcacccacagccctgaagccctggagcagctatacccctgggagtgcttcgtcttctgcctgatcatcttcggcaccttcaccaaccagatccacaagtggtcgcacacgtactttgggctgccacgctgggtcaccctcctgcaggactggcatgtcatcctgccacgtaaacaccatcgcatccaccacgtctcaccccacgagacctacttctgcatcaccacaggagtaaaagtccctcgcaatttccgactgttggaagaactcgaagaaggccagaaaggagtaggagatggcacagttagctggggtctagaagatgacgaagacatgacacttacaagatggacagggatgataattgggcctccaagaacaatttatgaaaaccgaatatacagccttaaaatagaatgtggacctaaatacccagaagcacccccctttgtaagatttgtaacaaaaattaatatgaatggagtaaatagttctaatggagtggtggacccaagagccatatcagtgctagcaaaatggcagaattcatatagcatcaaagttgtcctgcaagagcttcggcgcctaatgatgtctaaagaaaatatgaaactccctcagccgcccgaaggacagtgttacagcaattaatcaaaaagaaaaaccacaggcccttccccttccccccaattcgatttaatcagtcttcattttccacagtagtaaattttctagatacgtcttgtagacctcaaagtaccggaaaggaagctcccattcaaaggaaatttatcttaagatactgtaaatgatactaattttttgtccatttgaaatatataagttgtgctataacaaatcatcctgtcaagtgtaaccactgtccacgtagttgaacttctgggatcaagaaagtctatttaaattgattcccatcataactggtggggcacatctaactcaactgtgaaaagacacatcacacaatcaccttgctgctgattacacggcctggggtctctgccttctccccttaccctcccgcctcccaccctccctgcaacaacagccctctagcctggggggcttgttagagtagatgtgaaggtttcaggtcgcagcctgtgggactactgctaggtgtgtggggtgtttcgcctgcacccctggtttctttaagtcttaagtgatgccccttccaaaccatcatcctgtccccacgctcctccactcccgcccttggccgaagcatagattgtaacccctccactcccctctgagattggccttcggtgaggaattcagggctttccccatatcttctctcccccacctttatcgaggggtgctgctttttctccctcctcctcaagttcctttttgcaccgtcaccacccaacaccttccatgacacttccttgctttggccagaagccatcaggtaaggttggaaagagcctctgacctcccttgtttagttttggaaccatactcactcactctccaccagcctgggaaatgaatattgggtcctcagccctgccaccctctgctgtcatcagctgatgcattgtttttagctcaggttttgataaggtgaaaagaatagtcaccagggttactcagacctgccagctctcggagtccttggtggttgaacttggagaaagaccgcatgaagatacttgtaagcacacatgatccctctgaattgttttactttcctgtaactgcttttgcttttaaaaattgaagaagttttaaacagggctttcatttggtcatccttgcaatccattggggtctagtttggaatctgacaactggaacaaaaagaaccttgaatccggtgcatgccttggttttggtgctgctgctgcttcccaagatcctcagcagggattaagaaggaacccggtgtgcacagcagatccccgaaattggtgggcttgacctcctggcaaattgctgcgtctttccacttgctgttcaggaccactaaatgctgaaatgtggatgcataccgaaataaaagcaattcattgtgtactaaaggttttttttttttttttaatttagtatttgtgtaaaaccaccttttgaagcagcaactatcaagtctgaaaagcaattgatgtttccattaatctttttctggggggaaaaccttagttctaaggatttaacatcctgtaagtgaagtttaacataacagtattccataagcagcctttttattgtcagaccattgcctgattttaatataataaaaaaaaagtgtgcgttaatatttaa

SEQ ID NO: 261251 - protein, 172 aa, Artificial Sequence
  derived and/or modified sequence
MLPLVKKAQGRVINVSSVGGRLAIVGGGYTPSKYAVEGFNDSLRRDMKAFGVHVSCIEPGLFKTNLADPVKVIEKKLAIWEQLSPDIKQQYGEGYIEKSLDKLKGNKSYVNMDLSPVVECMDHALTSLFPKTHYAAGKDAKIFWIPLSHMPAALQDFLLLKQKAELANPKAV

SEQ ID NO: 261252 - DNA, 960 bp, Artificial Sequence
  derived and/or modified sequence
atgctcttttgggtgctgggcttgttgatcctctgtggcttcctgtggacaagaaaaggaaagctcaagatcgaggatattacagataaatacatcttcatcacgggatgcgactcaggcttcggtaacctggccgcccgaacattcgataagaaagggtttcatgtgattgccgcctgtttaaccgaaagcggtagtacagctctgaaagctgaaacatcagagcgcctgcgcaccgtgctgttggatgtcacagaccccgagaatgttaaacgaacagcccagtgggtgaagaatcaggttggcgaaaagggcctatggggcctcatcaataatgccggcgtgccaggtgtactagcccctacagactggttgaccttggaagactaccgggagcctattgaggttaacctgtttgggctcatttccgtgaccctgaacatgctccccctggtgaaaaaggcccaaggacgggttattaacgtgtcttcagtcggcgggcgcctggccatcgtcggaggaggatatactcccagtaagtacgccgttgagggattcaatgacagcctgcggcgagacatgaaagcttttggtgttcatgtctcatgcatcgaaccaggcttatttaaaactaacctcgccgatccggtgaaagtgattgaaaaaaaattggcaatatgggagcagctttctcctgacatcaagcagcagtatggagagggatatatcgagaagtcgctggacaaactaaaaggaaacaagtcttatgtcaacatggatctttctcccgtggttgagtgcatggatcacgcacttacctctttgttcccaaagactcactacgccgcggggaaggacgccaagatattttggataccattgtcccacatgcctgccgccctgcaggactttctcctcctgaagcaaaaagccgaattagccaaccccaaagcagtgtag

SEQ ID NO: 261253 - DNA, 960 bp, Artificial Sequence
  derived and/or modified sequence
atgctgttctgggtactaggcttgttgatactctgtggcttcctttggacccgtaaaggtaagctaaaaatcgaagatattactgataagtacatttttatcaccgggtgtgactccggcttcgggaatcttgctgcgaggacatttgacaaaaagggcttccatgtgatcgctgcttgtctgaccgaaagcgggagtaccgctctgaaggctgaaacaagcgaaagactgagaactgtattgctcgatgtgaccgaccccgagaacgtaaagaggactgctcagtgggtcaaaaatcaggtgggggagaagggattgtggggtctcatcaataacgccggagtacctggagtcctggccccaactgattggttgaccttggaagactaccgtgaaccgatcgaagtgaacctatttggcctgatcagtgtcacgctcaatatgctgccgctagtgaaaaaggcccaagggagagtgatcaacgttagcagtgtcggcggccgcttagccattgtgggtggaggatatactcctagtaagtacgcggtcgagggattcaacgattcactccgcagagacatgaaagcctttggtgtgcatgtgagttgcatagagcccggcctgtttaagactaacctcgccgatcctgttaaagtcatcgaaaagaaattggccatctgggagcagctgagcccggacatcaagcagcagtacggtgagggttacatagaaaagagcttagataagctaaagggcaacaagtcgtacgtaaatatggacctatcccctgttgtcgaatgtatggatcacgctctgacctcactcttcccaaaaacacattatgcggccggcaaggatgcaaaaatcttttggatacccctcagccacatgcctgccgcgctgcaggacttcctgcttctgaaacagaaagcagaactcgctaacccaaaagccgtctag

SEQ ID NO: 261254 - DNA, 960 bp, Artificial Sequence
  derived and/or modified sequence
atgctgttttgggtccttggactattgattttatgcggcttcctttggacgagaaaagggaagctcaagatcgaggatatcacagacaaatatatcttcatcactggatgtgattcaggcttcggtaacctggccgcccgcactttcgataaaaagggcttccacgtgatcgctgcatgcctcaccgagagcggcagcacagcgttaaaggctgaaacctctgagcgactgcgaactgtcctgctggatgtcaccgaccccgaaaacgtcaaaagaaccgcccaatgggtcaaaaaccaggtaggagagaaaggcctatgggggttgatcaacaacgctggcgttcccggggtgctggccccaacagattggctgaccctcgaagattaccgcgaaccaattgaggtaaatctatttgggctcatcagtgtcactcttaacatgctgccactcgtgaagaaggcccaggggagggtgataaacgtcagtagcgtcgggggaaggcttgccattgtcggcggaggctatacacctagcaagtacgcagttgagggcttcaatgattcactgaggcgggacatgaaagcctttggcgtgcatgtctcttgcattgagccagggctttttaagactaaccttgcagatccagtcaaggtcattgagaagaagctggctatctgggagcaattaagccctgacattaagcaacagtacggtgagggatacattgagaagagcctggacaaacttaaagggaacaaaagctacgtgaatatggatctttcgcctgtagtggagtgtatggatcatgcactaaccagcctcttccctaaaactcattatgctgctgggaaagatgccaagatcttctggattccgctttctcatatgcccgctgcattacaggactttctgttgctaaaacagaaggccgagcttgctaaccccaaggccgtgtag

SEQ ID NO: 261255 - DNA, 519 bp, Artificial Sequence
  derived and/or modified sequence
atgttgcccctggttaagaaggcccaaggtcgtgtgatcaatgtaagctccgtggggggaagactggctatcgtcgggggcggatacacaccgagcaaatatgccgtggaaggttttaacgactctctacggagagacatgaaggccttcggggttcacgtgtcttgtatcgaaccaggactctttaaaactaaccttgcagatccagtgaaggtgatcgaaaagaagctggctatctgggagcagttatctcccgacatcaaacaacagtacggagagggttacatagaaaagtctctggacaaactgaaagggaacaagagctatgttaacatggaccttagccctgtagtcgaatgtatggatcatgccttgacttccctcttcccgaaaactcactatgccgcagggaaagacgcgaaaatcttctggatacctctttcacacatgcctgcagctctacaggactttcttctactcaagcaaaaggccgagctcgccaatcctaaggccgtgtag

SEQ ID NO: 261256 - DNA, 960 bp, Artificial Sequence
  derived and/or modified sequence
atgttgttttgggtgctgggactgttaattctatgcggctttctatggactcggaagggaaaattaaaaatagaagacataacagacaagtacatattcattaccggctgtgactctggtttcggaaacttggcagcccgtacattcgataaaaagggcttccacgtgatcgctgcatgcctcacagaatctggcagtactgcactgaaagccgagacttcagagcggctgaggacagtgcttctcgacgtaacagatcccgagaatgtgaagcgcaccgcccagtgggtcaagaatcaggtcggcgagaaggggctgtggggcctgattaacaatgctggcgtgccgggcgttctggctcctacggactggcttactctggaagactatagggaacccattgaagtgaacctgttcggtctcatctctgtgactctcaacatgctgccactggtgaagaaggctcagggcagggtgatcaacgtgtctagcgtcggtggccgtctcgcaatcgttggcggcgggtatacaccttctaaatacgctgtcgaaggattcaacgatagcttgcgccgggacatgaaagcctttggggtgcacgtgtcctgtatcgagccaggactgtttaaaaccaatctggcagacccggttaaggttattgagaagaagctggccatttgggaacagctctctcccgacataaaacagcagtatggagaaggctacattgaaaagagcctggataaattaaagggaaacaagagctatgtgaacatggatctgtctcctgttgtcgagtgcatggaccacgccctgacatctctctttccaaagacacactacgctgccggcaaagatgcaaaaattttctggatacctctcagtcacatgcctgctgctttgcaggacttcttactgttgaaacagaaggctgaactcgcaaacccaaaggccgtgtag

SEQ ID NO: 261257 - DNA, 960 bp, Artificial Sequence
  derived and/or modified sequence
atgctgttttgggtgctgggacttctgatcctctgtggctttctctggacccggaagggcaagctgaagatcgaggatatcacagacaagtatatatttatcaccgggtgcgactctggctttggaaatctggcagcccggactttcgacaagaaggggttccatgtgattgccgcatgcctaaccgagagcggatctacagccctgaaagctgaaacctccgaacggttgcgcaccgtgctgctggacgtaaccgatcctgagaacgtcaagagaaccgcacagtgggttaagaaccaagtaggagagaaaggtctctggggactgatcaataatgccggcgtgcctggggtcctagctcctaccgattggctgaccttggaagattatagagagccaatagaagtgaatttgttcggattgataagcgttacactgaatatgctcccgctcgtgaagaaagcccaggggagagtcattaacgtgagctccgtggggggacggcttgcaatcgtgggaggaggctatactccttccaagtatgccgtggagggatttaacgactcgcttagaagggacatgaaagccttcggcgtccacgtgtcgtgcattgagcccgggctgtttaaaactaatctggccgatcctgtcaaagtaattgagaagaagctggctatatgggaacagttgtcccctgacattaagcagcaatacggcgagggttatatcgagaagtctctggataaactcaaaggcaacaagagctacgtgaacatggatctcagtcctgtcgtcgagtgtatggaccacgcgcttacctccctcttccctaagacccactacgccgccggtaaggacgccaagattttctggatacccctgtctcacatgcccgccgccttgcaggattttctgctgctgaagcagaaggctgagctcgctaaccctaaagcagtctag

SEQ ID NO: 261258 - DNA, 960 bp, Artificial Sequence
  derived and/or modified sequence
atgctgttctgggtgctgggcctgctgatcctgtgtggcttcctgtggaccaggaagggcaagctgaagattgaggacatcacagacaagtacatcttcatcaccggctgtgacagcggctttggaaacctggccgcccggacctttgacaagaagggcttccacgtgattgctgcctgcctgacagagagcggcagcacagccctgaaggccgagaccagcgagcggctgaggacagtgctgctggatgtgacagatcctgaaaatgtgaagaggacagcccagtgggtgaagaaccaggtgggggagaagggcctgtggggcctcatcaacaatgccggcgtgcctggggtgctggcccccacagactggctgaccctggaggactaccgggagcccatcgaggtgaacctgtttggcctcatctctgtgaccctgaacatgctgcccctggtgaagaaggcccagggccgggtcatcaacgtgtcctctgtgggcggccgcctggccatcgtgggcggcggctacacccccagcaaatatgctgtggagggcttcaatgacagcctgcggcgggacatgaaggcctttggagtgcacgtgtcctgcatcgagcccggcctcttcaagaccaacctggccgaccctgtgaaggtgattgagaagaagctggccatctgggagcagctgagcccagacatcaagcagcagtacggggagggctacatcgagaagagcctggacaagctgaagggcaacaagagctatgtgaacatggacctgagccctgtggtggagtgcatggaccacgccctgaccagcctcttccccaagacccactacgccgccggcaaggatgccaagatcttctggatccccctgagccacatgcctgctgccctgcaggacttcctgctgctgaagcagaaggccgagctggccaaccccaaggctgtgtag

SEQ ID NO: 261259 - DNA, 519 bp, Artificial Sequence
  derived and/or modified sequence
atgctgcccctggtgaagaaggcccagggccgggtcatcaacgtgtcctctgtgggcggccgcctggccatcgtgggcggcggctacacccccagcaaatatgctgtggagggcttcaatgacagcctgcggcgggacatgaaggccttcggcgtgcacgtgtcctgcatcgagcccggcctcttcaagaccaacctggccgaccctgtgaaggtgattgagaagaagctggccatctgggagcagctgagcccagacatcaagcagcagtatggagagggctacatcgagaagagcctggacaagctgaagggcaacaagagctatgtgaacatggacctgagccctgtggtggagtgcatggaccacgccctgaccagcctcttccccaagacccactatgctgctgggaaggatgccaagatcttctggatccccctgagccacatgcctgctgccctgcaggacttcctgctgctgaagcagaaggccgagctggccaaccccaaggctgtgtag

SEQ ID NO: 261260 - DNA, 960 bp, Artificial Sequence
  derived and/or modified sequence
atgctgttctgggtgctgggcctgctgatcctgtgcggcttcctgtggacccgtaaggggaagcttaagatagaagacataacggacaaatacatctttattacggggtgtgacagtggcttcgggaatctggctgcccggacattcgataagaagggttttcacgtaatcgctgcctgtttgactgaatcaggaagcactgctctgaaagctgaaactagtgagcgtctccgcacagtgcttctagacgtgacagatccggaaaatgtaaagcgcaccgcacagtgggtgaagaaccaggtgggcgaaaaggggctgtggggtctgattaataatgcaggcgtgccgggggtgctggcccctaccgattggttaacactggaagattacagggaacctattgaggtgaacctgttcggcctgatctccgtgactctgaacatgttgccactggtgaagaaggcacaagggagagtgataaacgtcagctcagtcggaggccggctggccatcgtgggcgggggatataccccgtccaaatacgccgtcgaaggatttaacgacagtctccggagggacatgaaggcatttggggttcatgtcagctgtattgagccaggactattcaaaaccaatctcgccgatccggtcaaagttatcgagaaaaagctggctatttgggaacagttgtcaccagacattaaacagcagtacggagaaggatacatagagaaatctctggacaaactcaagggtaacaaaagctacgtgaacatggacctgagtccagttgttgaatgcatggaccacgcactgacttccctcttccccaaaacccactacgcagccggcaaagacgctaaaattttttggatcccactcagccacatgcccgcggctctgcaagatttccttctccttaaacaaaaagctgaactagccaatccaaaagccgtatag

SEQ ID NO: 261261 - DNA, 960 bp, Artificial Sequence
  derived and/or modified sequence
atgctgttctgggtgctgggcctgctgatcctgtgcggcttcctgtggaccaggaaaggaaagctgaaaatcgaggacataacagacaagtatatcttcataacagggtgcgactcgggttttggcaacttagctgcaagaactttcgacaagaagggcttccacgtaattgctgcttgtctgacagagtcggggtctaccgcattgaaagcagagacctcagagcgcctgagaaccgtgctccttgacgtgacagatcctgaaaatgtgaagcgcaccgcgcagtgggttaagaatcaagtgggcgagaaggggctgtgggggctcatcaataacgcaggggtccctggtgttctggctcctacagattggcttacgctcgaggattaccgagaacctatcgaagtcaaccttttcggtcttatctccgttacgcttaacatgctgccactggtcaagaaagctcaggggcgcgtgatcaacgtgtcctctgttggcgggcgtttggcaattgtgggaggaggctacacgccatccaaatacgccgtggagggctttaatgattccctgcggagagacatgaaagcattcggagttcacgtgtcatgtatagagccggggttgttcaaaactaatctggctgaccccgtgaaggtgatcgagaagaagctggccatctgggagcagctgtcccccgatatcaagcagcagtacggcgagggttacatcgagaagagtctggataaattaaaaggaaacaagagttacgttaatatggacttgagccccgtagtcgagtgcatggaccacgctctgacttcactgttcccaaagacccactatgctgccggaaaggacgccaagatcttctggatcccgctctcccatatgcctgcggctctgcaggacttcttattattaaagcagaaggctgagttggccaatcccaaagccgtgtag

SEQ ID NO: 261262 - DNA, 960 bp, Artificial Sequence
  derived and/or modified sequence
atgctgttctgggtgctgggcctgctgatcctgtgcggcttcctgtggacgcgtaaagggaagctaaaaatcgaggatatcacagataaatacattttcattacaggatgtgattctggctttggcaatttggcagcaaggactttcgacaagaagggatttcacgtgatcgcggcttgtctcaccgagtcagggtctacagccctgaaggccgaaacctctgagaggctccgaacagtcctattggatgtgactgatccagagaacgtgaagcggaccgcacagtgggtgaagaatcaagtcggagagaagggcctgtggggcttaataaacaatgccggagttcctggcgtgctcgcaccaactgattggctaacgctcgaggattacagagaaccaatagaggtaaatttgttcggtctgatctcagtcaccctgaatatgttgcctctggttaaaaaggcccagggtagagtaattaacgtgtccagcgtgggaggcagactggccatagtcggaggtggttacacgcctagcaaatacgctgtcgaaggattcaatgactctcttcgaagggacatgaaagcctttggggtgcatgtgtcgtgtatcgaacccggtttgtttaagactaacctggcagatcccgtgaaagtgattgaaaaaaagttggccatctgggaacaactgagccccgacataaaacagcagtacggcgaaggctatatcgagaaatctctggacaaattgaaaggcaataaaagttatgtgaacatggacctcagcccagtcgtggaatgcatggatcacgcccttacctctctgttccccaagactcattacgccgccggcaaagacgccaaaatcttctggattcccttaagtcacatgcctgccgccctccaagactttttacttctgaaacaaaaagcggaactggctaatcccaaggctgtgtag

SEQ ID NO: 261263 - DNA, 519 bp, Artificial Sequence
  derived and/or modified sequence
atgctgcccctggtgaagaaggcccagggccgggtgatcaacgtgtcgagcgtgggaggcagactggccatagtgggtggtgggtacactcccagcaaatatgcagttgagggcttcaacgactctctgagacgagatatgaaggcattcggggttcacgtgtcttgcatcgagcctgggctgttcaagacaaacctagctgatccagtgaaggtgatcgaaaagaagctagcaatttgggagcaactttcccctgacattaagcagcagtacggggaagggtacatagagaagagcctggacaagctcaaaggaaacaagtcatacgtcaatatggatctttcacccgtggttgagtgtatggatcacgccttgaccagtcttttcccaaagacgcactacgcggccgggaaagatgccaaaatattctggattcccctgagccatatgcctgccgcacttcaggatttccttttgctgaaacagaaggccgaattggccaaccccaaagccgtgtag

SEQ ID NO: 261264 - DNA, 960 bp, Artificial Sequence
  derived and/or modified sequence
atgctgttctgggtgctgggcctgctgatcctgtgcggcttcctgtggacccgcaaggggaagcttaagatagaagatattacagacaagtatattttcattacaggctgcgattcaggttttggcaacttagcagcccgcacattcgacaaaaagggatttcatgtcatcgccgcttgcctgacagagagcggctctactgccctaaaggctgaaacatctgagcgactgcggactgtactcctcgatgtcactgatccagagaatgtcaagcgtactgcccaatgggtgaaaaatcaggtaggcgaaaaaggattgtggggtctgattaataatgctggtgttcccggcgtactggccccgaccgattggctgactctggaagattatcgtgaaccaatcgaagtaaatctgtttgggctcattagcgtaaccctgaatatgctaccattggtcaagaaggcccagggcagggtgattaacgttagctccgtggggggccgtttagccatcgttggagggggctatacccctagtaagtacgcagtcgagggatttaacgacagcctgcgtagagatatgaaggcttttggagtgcacgtcagctgcattgagccagggctgtttaaaaccaatcttgcggacccggtgaaggttatcgagaagaagctggccatctgggaacaactgtctcctgacatcaaacagcagtatggggaaggctacattgaaaagagcctcgataagctgaaagggaacaagtcatacgtgaatatggacctctcacccgtggttgaatgcatggaccacgccctcacatccctgtttcctaaaacccactacgctgccggaaaagacgccaagattttctggatcccgcttagccacatgccggccgcacttcaggactttcttcttctaaagcagaaagctgaactggccaatcctaaggcagtgtag

SEQ ID NO: 261265 - DNA, 960 bp, Artificial Sequence
  derived and/or modified sequence
atgctgttctgggtgctgggcctgctgatcctgtgcggcttcctgtggactcgcaagggcaagctcaagatcgaggatattaccgataaatacatcttcattaccggctgtgactctgggttcgggaatttagctgcgaggaccttcgataagaaaggatttcacgtcatcgccgcttgtctaactgagagcgggagtactgctttaaaagctgaaacctcagagcgactgagaactgtattgctggacgtgacagacccagaaaatgtaaagaggaccgcccagtgggtgaaaaaccaggtcggggagaaaggcttatgggggctcatcaataacgctggggtaccgggagttctcgcccccacagactggctgacgctggaagactacagggaaccaatcgaggtaaacttgtttggattgatttcagtgactctgaatatgctgcctctggtgaagaaggctcaggggcgcgtcattaacgtcagcagcgtcggcggaagacttgctatcgtggggggtggatatactccctcaaagtacgccgtcgagggcttcaatgactcacttagacgagatatgaaggccttcggagtccacgtgtcttgtatcgagcccggactgttcaagaccaaccttgcggatcccgtgaaggtgatcgaaaaaaagctggccatttgggagcagctctccccagacatcaaacagcagtacggggaagggtacatagagaaaagtctcgacaagctgaaaggtaataaatcctatgtgaatatggacttgtctcctgttgttgaatgcatggatcacgctcttaccagtctgtttcccaagacgcactatgctgcgggcaaggatgccaagatattttggattcctttgagtcacatgcccgccgcgctgcaagacttcctgctcctgaaacagaaggctgagctggccaaccccaaggccgtctag

SEQ ID NO: 261266 - DNA, 960 bp, Artificial Sequence
  derived and/or modified sequence
atgttgttttgggtcctgggactgctgatactttgtggctttttatggacccgaaaagggaaactcaagatcgaagatattaccgataagtacattttcataacaggatgcgattctggcttcggtaacctggctgcacggacttttgacaagaagggcttccacgtgatcgccgcatgcttgactgaatctggctcaactgccctcaaggcagagacctctgagcgactaagaacagtccttctggatgtcactgatcctgagaacgttaagcgcacagcccagtgggtgaagaaccaggtaggtgagaagggactctggggcctgatcaataatgccggtgtgccaggcgtccttgcacctaccgactggctgactctggaagattacagagagcccattgaagtgaacctctttggattaatatccgtaacgctgaatatgttacctttagtaaagaaggcccaggggagggtcattaacgtgagcagcgtagggggtcggctggctatcgtgggaggcggatatacgcctagtaaatacgccgtggaggggttcaacgacagtcttagacgagatatgaaagcattcggagtccacgtgtcgtgtattgaaccaggtttgttcaagacgaatctcgcagatcccgtgaaagtgatcgaaaagaagctggcgatttgggagcagttgagtcccgacattaagcagcagtacggtgagggctacatagagaagtctttagataagctgaaaggtaacaagtcatacgtgaatatggaccttagtccagtcgtcgagtgcatggaccatgctctgacaagtctgtttccaaaaacccactacgcagctgggaaggacgccaagattttctggatcccgctgagtcatatgccagcagccttgcaagattttctgctcctcaagcaaaaggcagagctggccaatcccaaggcagtgtag

SEQ ID NO: 261267 - DNA, 960 bp, Artificial Sequence
  derived and/or modified sequence
atgcttttctgggtgctcggattgttaattctgtgcggctttttatggaccaggaagggaaaactgaaaattgaagatataactgacaaatacatattcattaccgggtgcgattcaggctttggcaacttagcagcaagaacctttgacaagaagggcttccacgtgatagctgcatgccttacggaatctggctctactgcccttaaagccgaaacaagcgaaaggctcaggaccgtgttgcttgacgtgacagaccccgagaatgtgaagaggaccgcgcagtgggttaagaaccaggtgggagaaaaggggctgtgggggctcatcaacaatgccggagtccctggagtactggcaccaactgattggctgaccttagaagattaccgtgagccgatcgaagttaacctgttcggattgatctctgtgaccctgaatatgctgcctctcgtaaagaaggcccaggggagggttattaatgtttctagcgtgggaggccgactggcgatcgtgggcggagggtatacgccaagcaaatatgctgtcgagggtttcaacgattcactgaggcgtgacatgaaggctttcggcgtacatgtgagctgtatagaacccggtctgttcaagaccaacctcgctgacccggttaaggtgattgaaaaaaagctggctatttgggaacagttgtccccagatatcaaacagcagtatggcgaaggctatatcgaaaagtccctggacaagctgaagggcaataagagttacgttaatatggacctgagtcctgtggttgaatgcatggatcacgccctaacttctcttttccctaagacgcactacgctgcaggtaaggatgcaaaaatcttctggatacccttgagtcatatgcccgctgcacttcaggactttctgctccttaaacagaaggctgagcttgccaacccaaaggccgtctag

SEQ ID NO: 261268 - DNA, 960 bp, Artificial Sequence
  derived and/or modified sequence
atgctgttttgggtcctgggcctgctcattctgtgcgggttcttgtggactcgtaagggcaaactgaagatagaagacattaccgacaagtacatcttcatcaccggctgtgattccggttttggaaaccttgctgcccgaacatttgataagaagggttttcatgtgatcgcagcttgtctgactgagtctgggagcacagcactcaaggccgagacctcggaacggttgcgcactgtgctccttgatgtgacagatcctgagaacgtaaaacgtacagcgcaatgggtgaaaaatcaagtcggcgagaaggggctgtggggactcatcaataatgctggcgtgcctggcgtgttggctccgacggactggcttacactggaagattaccgcgaaccgatcgaagttaacttgtttggactgatttccgtgactcttaatatgctgccactggtgaaaaaagcccagggacgtgtcataaatgtgtcatcagtcgggggacgactggctatcgtcggaggcggatacacgccctccaagtacgctgtggaagggttcaatgatagcctccggagggatatgaaagccttcggggtgcacgttagctgtatcgagccaggtcttttcaaaactaatttggctgaccctgtgaaagttattgagaaaaagctcgctatttgggagcaactttccccagatatcaagcagcagtatggggagggatacattgaaaaatccctggacaagctaaaagggaataaaagttacgtgaacatggatctctctcctgtggtggagtgcatggaccacgccttaacctccctgttccctaaaacacactatgcggctggaaaagacgcgaagatcttctggatccccctctcacacatgcccgctgctctccaggactttctgcttctgaagcagaaggccgaacttgccaatccaaaagccgtctag

SEQ ID NO: 261269 - DNA, 519 bp, Artificial Sequence
  derived and/or modified sequence
atgcttccactcgtcaagaaggcccagggaagggtcatcaatgtgtcttccgtaggagggcgactcgcaatcgtggggggaggttataccccaagtaagtatgccgtagaaggattcaacgactccctgcggcgagacatgaaagcgtttggtgtacacgtgtcatgtatcgaacctggtttatttaagaccaatttggcggaccctgtcaaggtgatcgaaaagaagctcgctatctgggaacagcttagccccgatatcaaacagcagtatggagaggggtatatcgagaagagtctcgacaagctcaagggcaacaaatcctacgttaacatggacctaagccctgtcgtcgagtgtatggaccacgcacttacctcgctgttccctaagactcactacgcggcaggcaaggatgcaaaaatcttctggatccctctgtcacacatgccggctgccctgcaggactttctccttttgaagcaaaaggctgagctcgccaaccctaaagcagtgtag

SEQ ID NO: 261270 - DNA, 960 bp, Artificial Sequence
  derived and/or modified sequence
atgctcttctgggtcttagggctgctgatcctctgtggtttcctctggacccgaaagggaaaactgaaaatcgaggatattactgataaatacatatttatcacaggatgcgatagcgggttcggaaatttggctgcgaggactttcgataaaaaagggtttcacgtgatcgcggcttgcctgacggagtcaggtagcaccgccctaaaagcagagacctctgaacgactgcggacggtactcttggacgtgacggaccctgagaacgtcaagcgcaccgcgcagtgggtgaagaaccaagtgggcgaaaagggcctgtggggcctgatcaataatgctggagtgcccggtgttctcgcccctaccgattggttgacgctggaagactacagagagcctattgaggttaatctcttcggcctgatttctgtgactctgaacatgctgcccttggtgaaaaaagcacaagggagggtcatcaatgtgagcagtgtcggtggacgcctcgctattgtgggtggtggatacacgccatccaaatatgccgtggaaggtttcaatgacagcctacggcgtgatatgaaggccttcggggtccatgtgagctgtatcgagccaggcctttttaagaccaatctggcagatccagtcaaggtgattgaaaagaagctcgccatttgggaacagctctcacctgacattaaacaacagtatggggaaggttacatcgaaaagagtctggataagttgaagggtaataaaagctatgtcaacatggacttgagtccagtcgtggagtgtatggatcacgcccttacttctctgtttccaaagacccactacgctgccggaaaggatgcaaaaatcttttggatacccctctcacacatgcccgcagcacttcaggattttctccttcttaagcagaaagctgagctggctaatccgaaagccgtgtag

SEQ ID NO: 261271 - DNA, 960 bp, Artificial Sequence
  derived and/or modified sequence
atgttgttttgggtgctgggacttctgatactgtgtggttttctgtggaccagaaagggcaagctgaaaatagaggacatcacagacaaatatatatttatcaccgggtgcgatagcggcttcggcaacttagcagctcgcacctttgataagaaggggtttcacgttatcgccgcttgtctgaccgaatcggggagcaccgccctcaaggccgaaacatccgagcgactcaggacagtgctcctggacgttacggatcctgagaatgtcaagcgtacagcacagtgggtgaagaatcaagtcggcgaaaaagggctttggggcctgattaacaacgctggggtgccaggtgtcctggcccctaccgattggctgaccctcgaggattatagggaacccatcgaagtgaatctgttcggtctgattagtgttaccttgaacatgctgccactggttaaaaaggctcagggcagagttattaatgtttcctccgtgggcggtcgactcgccatcgttgggggagggtacacacccagcaagtacgccgttgaaggattcaatgactctctgcgccgagatatgaaagcctttggggttcatgtctcttgtatagaacccggtttgtttaagactaacctggccgatccagtaaaggtcatcgaaaagaagttggctatctgggagcagctgtcaccagatatcaagcaacaatatggagaggggtatattgagaagagtctcgacaaactcaagggaaataaaagctatgtgaacatggacctcagtccggtggtcgagtgcatggaccatgcactgaccagcctatttccaaagacccattatgctgctggcaaggacgccaagatcttctggatccccctctctcacatgccggcagccctgcaagacttcttgctgttgaaacagaaagccgaacttgccaaccccaaagcagtatag

SEQ ID NO: 261272 - DNA, 960 bp, Artificial Sequence
  derived and/or modified sequence
atgctgttctgggtgctgggcctgctgatcctgtgcggcttcctgtggaccagaaagggcaagctgaagatcgaggacatcaccgacaagtacatcttcatcaccggctgcgacagcggcttcggcaacctggccgccagaaccttcgacaagaagggcttccacgtgatcgccgcctgcctgaccgagagcggcagcaccgccctgaaggccgagaccagcgagagactgagaaccgtgctgctggacgtgaccgaccccgagaacgtgaagagaaccgcccagtgggtgaagaaccaggtgggcgagaagggcctgtggggcctgatcaacaacgccggcgtgcccggcgtgctggcccccaccgactggctgaccctggaggactacagagagcccatcgaggtgaacctgttcggcctgatcagcgtgaccctgaacatgctgcccctggtgaagaaggcccagggcagagtgatcaacgtgagcagcgtgggcggcagactggccatcgtgggcggcggctacacccccagcaagtacgccgtggagggcttcaacgacagcctgagaagagacatgaaggccttcggcgtgcacgtgagctgcatcgagcccggcctgttcaagaccaacctggccgaccccgtgaaggtgatcgagaagaagctggccatctgggagcagctgagccccgacatcaagcagcagtacggcgagggctacatcgagaagagcctggacaagctgaagggcaacaagagctacgtgaacatggacctgagccccgtggtggagtgcatggaccacgccctgaccagcctgttccccaagacccactacgccgccggcaaggacgccaagatcttctggatccccctgagccacatgcccgccgccctgcaggacttcctgctgctgaagcagaaggccgagctggccaaccccaaggccgtgtag

SEQ ID NO: 261273 - DNA, 519 bp, Artificial Sequence
  derived and/or modified sequence
atgctgcccctggtgaagaaggcccagggcagagtgatcaacgtgagcagcgtgggcggcagactggccatcgtgggcggcggctacacccccagcaagtacgccgtggagggcttcaacgacagcctgagaagagacatgaaggccttcggcgtgcacgtgagctgcatcgagcccggcctgttcaagaccaacctggccgaccccgtgaaggtgatcgagaagaagctggccatctgggagcagctgagccccgacatcaagcagcagtacggcgagggctacatcgagaagagcctggacaagctgaagggcaacaagagctacgtgaacatggacctgagccccgtggtggagtgcatggaccacgccctgaccagcctgttccccaagacccactacgccgccggcaaggacgccaagatcttctggatccccctgagccacatgcccgccgccctgcaggacttcctgctgctgaagcagaaggccgagctggccaaccccaaggccgtgtag

SEQ ID NO: 261274 - DNA, 1044 bp, Artificial Sequence
  derived and/or modified sequence
cggaaacccaggcacctcgacctcaagaggatcagcctggccagggtggcacaactcttccttccccgtgcacagcaggaaagctgccatcagctgagcaagtccaccaacagtttctgtgtcccacttcatctttaataaggaaaactaaagattgaagacatcactgataagtacatttttatcactggatgtgactcgggctttggaaacttggcagccagaacttttgataaaaagggatttcatgtaatcgctgcctgtctgactgaatcaggatcaacagctttaaaggcagaaacctcagagagacttcgtactgtgcttctggatgtgaccgacccagagaatgtcaagaggactgcccagtgggtgaagaaccaagttggggagaaaggtctctggggtctgatcaataatgctggtgttcccggcgtgctggctcccactgactggctgacactagaggactacagagaacctattgaagtgaacctgtttggactcatcagtgtgacactaaatatgcttcctttggtcaagaaagctcaagggagagttattaatgtctccagtgttggaggtcgccttgcaatcgttggagggggctatactccatccaaatatgcagtggaaggtttcaatgacagcttaagacgggacatgaaagcttttggtgtgcacgtctcatgcattgaaccaggattgttcaaaacaaacttggcagatccagtaaaggtaattgaaaaaaaactcgccatttgggagcagctgtctccagacatcaaacaacaatatggagaaggttacattgaaaaaagtctagacaaactgaaaggcaataaatcctatgtgaacatggacctctctccggtggtagagtgcatggaccacgctctaacaagtctcttccctaagactcattatgccgctggaaaagatgccaaaattttctggatacctctgtctcacatgccagcagctttgcaagactttttattgttgaaacagaaagcagagctggctaatcccaaggcagtgtga

SEQ ID NO: 261275 - protein, 335 aa, Artificial Sequence
  derived and/or modified sequence
MAAPSGVHLLVRRGSHRIFSSPLNHIYLHKQSSSQQRRNFFFRRQRDISHSIVLPAAVSSAHPVPKHIKKPDYVTTGIVPDWGDSIEVKNEDQIQGLHQACQLARHVLLLAGKSLKVDMTTEEIDALVHREIISHNAYPSPLGYGGFPKSVCTSVNNVLCHGIPDSRPLQDGDIINIDVTVYYNGYHGDTSETFLVGNVDECGKKLVEVARRCRDEAIAACRAGAPFSVIGNTISHITHQNGFQVCPHFVGHGIGSYFHGHPEIWHHANDSDLPMEEGMAFTIEPIITEGSPEFKVLEDAWTVVSLDNQRSAQFEHTVLITSRGAQILTKLPHEA

SEQ ID NO: 261276 - DNA, 1008 bp, Artificial Sequence
  derived and/or modified sequence
atggccgcccccagcggcgtgcacctgctggtgagaagaggcagccacagaatcttcagcagccccctgaaccacatctacctgcacaagcagagcagcagccagcagagaagaaacttcttcttcagaagacagagagacatcagccacagcatcgtgctgcccgccgccgtgagcagcgcccaccccgtgcccaagcacatcaagaagcccgactacgtgaccaccggcatcgtgcccgactggggcgacagcatcgaggtgaagaacgaggaccagatccagggcctgcaccaggcctgccagctggccagacacgtgctgctgctggccggcaagagcctgaaggtggacatgaccaccgaggagatcgacgccctggtgcacagagagatcatcagccacaacgcctaccccagccccctgggctacggcggcttccccaagagcgtgtgcaccagcgtgaacaacgtgctgtgccacggcatccccgacagcagacccctgcaggacggcgacatcatcaacatcgacgtgaccgtgtactacaacggctaccacggcgacaccagcgagaccttcctggtgggcaacgtggacgagtgcggcaagaagctggtggaggtggccagaagatgcagagacgaggccatcgccgcctgcagagccggcgcccccttcagcgtgatcggcaacaccatcagccacatcacccaccagaacggcttccaggtgtgcccccacttcgtgggccacggcatcggcagctacttccacggccaccccgagatctggcaccacgccaacgacagcgacctgcccatggaggagggcatggccttcaccatcgagcccatcatcaccgagggcagccccgagttcaaggtgctggaggacgcctggaccgtggtgagcctggacaaccagagaagcgcccagttcgagcacaccgtgctgatcaccagcagaggcgcccagatcctgaccaagctgccccacgaggcctag

SEQ ID NO: 261277 - DNA, 1008 bp, Artificial Sequence
  derived and/or modified sequence
atggcggcaccctctggggtccacctcctggtgcggcggggctcccaccgtattttcagcagccctctgaaccatatctacttacataaacaaagttcttcacagcagcggaggaattttttttttcgtcggcagagagatatcagtcacagcattgtcttaccagccgccgtgagtagcgcacacccggtgccaaagcatatcaaaaagcctgattacgtgactactggcatcgtgccagactggggggacagcatcgaagtgaagaacgaggatcaaattcagggtctacaccaagcttgtcaacttgcacggcacgtgcttttactcgcaggcaagtctttgaaagtggacatgaccactgaggagatagatgctctggttcaccgcgaaataatatcacacaatgcgtaccccagccccctaggttatggaggattcccaaagtctgtgtgcacttccgttaataacgtgctgtgccacgggattccagacagcaggcccctgcaagatggggacatcattaacatagatgtcacggtgtattataacgggtaccacggtgatacatctgaaacatttctcgttgggaacgtagacgaatgcggaaagaaactggtcgaagtggctagaagatgtcgggatgaggccattgcggcatgtagagcaggagcccccttctctgtaattgggaatacgatctcgcacatcacacatcagaacgggttccaggtgtgtccccactttgtaggtcacgggataggaagctatttccacggccaccctgagatctggcaccacgccaacgatagcgatttacctatggaggaaggcatggcatttaccatcgagcccatcattacagagggttcccccgagttcaaggtccttgaagatgcatggactgtcgtgagcttagacaatcaacggtcagcccagttcgagcatactgtcctaataacaagcaggggtgcccagatacttacaaaactgccacacgaggcttag

SEQ ID NO: 261278 - DNA, 1008 bp, Artificial Sequence
  derived and/or modified sequence
atggccgcccccagcggcgtgcacctgctggtgcggcggggcagccaccgcatcttcagcagccccctgaaccacatctacctgcacaagcagagcagcagccagcagaggaggaacttcttcttccggcggcagagggacatcagccacagcatcgtgctgcctgctgctgtgagcagcgcccaccctgtgcccaagcacatcaagaagccagactatgtgaccaccggcatcgtgcctgactggggagacagcattgaggtgaagaatgaagaccagatccagggcctgcaccaggcctgccagctggcccggcacgtgctgctgctggccggcaagagcctgaaggtggacatgaccacagaggagattgatgccctggtgcaccgggagatcatcagccacaatgcctaccccagccccctgggctacggcggcttccccaagtctgtgtgcacctctgtgaacaacgtgctgtgccacggcatcccagacagccggcccctgcaggatggagacatcatcaacattgatgtgacagtgtactacaacggctaccatggagacaccagcgagaccttcctggtgggcaatgtggatgaatgtgggaagaagctggtggaggtggcccggcgctgcagagatgaggccatcgccgcctgcagagctggggcccccttcagcgtcatcggcaacaccatcagccacatcacccaccagaatggcttccaggtgtgcccccactttgtgggccacggcatcggcagctacttccacggccaccctgagatctggcaccacgccaatgacagcgacctgcccatggaggagggcatggccttcaccatcgagcccatcatcacagagggcagccctgagttcaaggtgctggaggatgcctggacagtggtgtccctggacaaccagaggtctgcccagtttgagcacacagtgctgatcaccagcagaggagcccagatcctgaccaagctgccccatgaggcctag

SEQ ID NO: 261279 - DNA, 3419 bp, Artificial Sequence
  derived and/or modified sequence
atgttgaacactagattgtgctttattttttccgcccaacttcacgtttccatgcaccaaaatgttgatgctataaatattggatgccacgcttacctgacaggcttcttccatcccacctgggcgcgggggctcagagcgagcgcgcgagccgcggctggagcccgcctctcgcggctggagaggactcagccggccgcgggttctgctgcttgcccgggtgccctagccgcttcccagccagggctcccgcagtcagccccgcgcgcgcacgcgcgctcccctcgggcggcctcgacgcctcagggcttcggcagggctgcgactggccggctccagcgggcggggcggcgagcgagtgctcgcggccacgtgaccgacgccaacatggcggcgcccagtggcgtccacctgctcgtccgcagaggttctcatagaattttctcttcaccactcaatcatatctacttacacaagcagtcaagcagtcaacaaagaagaaatttcttttttcggagacaaagagatatttcacacagtatagttttgccggctgcagtttcttcagctcatccggttcctaagcacataaagaagccagactatgtgacgacaggcattgtaccagactggggagacagcatagaagttaagaatgaagatcagattcaagggcttcatcaggcttgtcagctggcccgccacgtcctcctcttggctgggaagagtttaaaggttgacatgacaactgaagagatagatgctcttgttcatcgggaaatcatcagtcataatgcctatccctcacctctaggctatggaggttttccaaaatctgtttgtacctctgtaaacaacgtgctctgtcatggtattcctgacagtcgacctcttcaggatggagatattatcaacattgatgtcacagtctattacaatggctaccatggagacacctctgaaacatttttggtgggcaatgtggacgaatgtggtaaaaagttagtggaggttgccaggaggtgtagagatgaagcaattgcagcttgcagagcaggggctcccttctctgtaattggaaacacaatcagccacataactcatcagaatggttttcaagtctgtccacattttgtgggacatggaataggatcttactttcatggacatccagaaatttggcatcatgcaaacgacagtgatctacccatggaggagggcatggcattcactatagagccaatcatcacggagggatcccctgaatttaaagtcctggaggatgcatggactgtggtctccctagacaatcaaaggtcggcgcagttcgagcacacggttctgatcacgtcgaggggcgcgcagatcctgaccaaactaccccatgaggcctgaggagccgcccgaaggtcgcggtgacctggtgcctttttaaataaattgctgaaatttggctggagaacttttagaagaaacagggaaatgaccggtggtgcggtaacctgcgtggctcctgatagcgtttggaagaacgcgggggagactgaagagcaactgggaactcggatctgaagccctgctggggtcgcgcggctttggaaaaacaaatcctggccctggactcggtttcccagcgcggtcaacgcatctggaggggactggaggaaacccccttgttggaagagattccaagagaagcacggttttctctttcccttgccctgactgttggagtaaaaaacctcttaaatccattgtatcagaggtccttacctctctgacagttacagtgatctttgtatctgaactttgcacgtctgccgaaaaatccgaacctgttgactgggatttttaagaatccgtttctcccttttgtgtattccatattggccggccccaaggatgctcgcagaagccagcccccaaccccagcccttccgtatctttcccctccatcgcggctttgcgatgaaagattagcccgcgaacagaggcattgattacaaacatgtccttggcagtggactctgggcctggccattcttcaggtttctgtcaatccagaaacgcgactttcctggacccctgcggctcttcctcccccgcccacatccagccctccaaggccagtccagaggtgaagtttgaggccctccccccacccaccccacacgcacgcacgcacgctagaccgtttgctgcactaggaattcgagcttgggccccactcgcccaggtgtgaacagtggctgattagtgggcggtctagtctctaaaatgacccctccccagactggcccttctcgcatcgggacccgcgcttgcacgctgcaggagccgcaaacgtcagctgttctggaaaccgagagggtcccagagagaggagatacgggcgcatttgagagcaagggcctacttggccgggactgaagcttgcgagttgagctccagttcggccggcagttccatcccgcttcaggaacaggaatccaagggcccacgctctgtctgccaagggccattcctgcccggagcaccctcctttcccttgcgcttgctctccggtacctgttcctcacctgagctcaagggcagggagaggccgggcctctggcagtccacgaaggaagccgtctgccttcggttatgattttaggaacaagtccaacgagggtgttcaagcagttaatggttgtgctaactcttgtttctactgaagcgggttttgcaaagctgacatcccttaaagataacttgggctttcggaagcggcaaggaaatggcacctgtagttgccaggacaggtggtgtcctcggccaggactaagagccagctcatctttgtaacattcataatacgggaaactgaggaccaggtggctcggaaaagagatgagttccagcttttacctaacacagggttctctcgtcgtcccccaacccctccagctcggcttctttgtgtccagggttgtagatttttggatagaggtgtttctgattctagtgagtctgagaactggaaaagaccaaggaggggttgatgatttacaaggtccatagaaaaactttttgtgtggtcggaagttggccaagcagaggcccacagcctgatgctactgccccccacccccccaaagatctgaattccctaaagatcaagagggttcagctggccttgggagatgtttgctggagaatgacttcagttttctcctaaggcaatcagattgcaaccattagcattgtatcttatctgcaaatcagtttactccgaggttccccaaggatagttttattaggaccacaggactttactaaccactgaggtaacacgctgcttgtgcagcaattattttgaggtggaggtatttatgggacaagtttataattccatttattaaagggactaacctaaa

SEQ ID NO: 261280 - DNA, 1008 bp, Artificial Sequence
  derived and/or modified sequence
atggccgcccccagcggcgtgcacctgctggtgcggcggggcagccaccggatcttttcatcccccctcaaccatatttacctacataagcaaagcagttctcagcaaaggcgaaacttttttttcagacgacagagggacattagccactcgatcgttctgcctgccgccgtctcttccgcgcatccagtgccaaaacacatcaagaagccagactacgtgaccaccggcattgtcccagattggggcgactctatcgaggtgaaaaacgaagaccagatccagggccttcaccaggcatgtcagttggcccggcatgtcctcttgctggccggaaaatctctgaaggtggatatgaccacggaggagattgacgctctggtccatcgggagatcatctcccacaacgcctatcctagccctttagggtacggcggatttccaaagtcggtatgtacatcggtgaacaacgtgctctgccacggcattcctgatagtcgaccgcttcaggacggtgatatcatcaatatcgatgttacagtttattataatggctatcatggggacacgtctgaaaccttcctagtcgggaatgtggacgagtgcggtaaaaagcttgtggaagttgccaggcggtgcagggacgaggcgatcgcagcatgccgggcaggggccccattttccgtgattggtaatactattagtcacatcacccaccaaaacggattccaggtgtgcccgcacttcgtgggtcacgggatcggatcgtactttcacggacacccagaaatctggcaccacgcaaacgattcggatctccccatggaggaagggatggcctttactatcgaaccaattatcacagagggttctccagagttcaaggtgctggaagatgcctggacggtcgtgtctttggataatcagagatccgcacagttcgaacatacagtgctcattaccagtcgcggcgctcagattctgaccaaacttcctcatgaggcctag

SEQ ID NO: 261281 - DNA, 1008 bp, Artificial Sequence
  derived and/or modified sequence
atggcagccccatctggcgttcatctgcttgtgaggagaggtagccatcgcatcttctcctccccacttaaccatatctatcttcacaagcagtcatcctctcaacagaggaggaatttcttctttagacgccagagagacatctcccactctatagtcttgccagctgccgtttcctccgctcacccagttcccaaacacatcaagaaacctgattatgtgacgacaggcatcgtccccgattggggggattctatcgaggtgaagaatgaagaccaaatacaagggctgcaccaggcttgtcagcttgcaagacacgtacttttacttgccggtaaatctctgaaggtggacatgacaaccgaggagattgatgccttggttcaccgggagatcatctcccataacgcttacccttctcctttgggttatgggggatttccaaagtctgtttgcacaagcgtcaataatgtgttgtgtcatggcatacctgactcaaggcctctccaggatggggatatcatcaatatcgatgtcacagtttattataacgggtatcatggagacacctctgagactttcttggtaggcaacgtggacgagtgcgggaaaaagctcgtggaagtagcacgacgatgtcgtgacgaggcgatcgctgcctgcagagcgggtgcccctttctcagtcatcggcaataccatttctcacattacgcaccagaacggattccaagtctgccctcatttcgtgggccacggaattggctcatactttcacggccatcctgagatttggcatcacgctaacgatagcgacctgcccatggaggaagggatggccttcacaattgaaccaatcattactgagggctcccctgagtttaaagtgctcgaagacgcctggacggttgtgtcactggataatcaaagatcagcccaatttgagcacaccgttcttataacctctcgtggggctcagatccttaccaagctgcctcatgaggcctag

SEQ ID NO: 261282 - protein, 220 aa, Artificial Sequence
  derived and/or modified sequence
MASGCKIGPSILNSDLANLGAECLRMLDSGADYLHLDVMDGYMHMMVSKPEQWVKPMAVAGANQYTFHLEATENPGALIKDIRENGMKSCSVTQAEVQWHSQGPLQVGLAIKPGTSVEYLAPWANQIDMALVMTVEPGFGGQKFMEDMMPKVHWLRTQFPSLDIEVDGGVGPDTVHKCAEAGANMIVSGSAIMRSEDPRSVINLLRNVCSEAAQKRSLDR

SEQ ID NO: 261283 - protein, 228 aa, Artificial Sequence
  derived and/or modified sequence
MASGCKIGPSILNSDLANLGAECLRMLDSGADYLHLDVMDGHFVPNITFGHPVVESLRKQLGQDPFFDMHMMVSKPEQWVKPMAVAGANQYTFHLEATENPGALIKDIRENGMKVGLAIKPGTSVEYLAPWANQIDMALVMTVEPGFGGQKFMEDMMPKVHWLRTQFPSLDIEVDGGVGPDTVHKCAEAGANMIVSGSAIMRSEDPRSVINLLRNVCSEAAQKRSLDR

SEQ ID NO: 261284 - DNA, 663 bp, Artificial Sequence
  derived and/or modified sequence
atggcttccgggtgtaagatcggccccagcatccttaactcggacctggcaaatctcggcgcagagtgcctcagaatgctcgacagtggcgcagactatctccacctggacgtgatggacggctatatgcacatgatggtttcaaaacccgagcagtgggtgaaacccatggcagtggcaggggcgaatcaatacacctttcatctggaagctaccgagaaccccggcgctctgattaaagatatcagagaaaatggaatgaaaagttgctctgtcacgcaagctgaggtccagtggcactcccagggccccctacaggtcggattagcaattaagccaggcacctccgtggaatacttagcaccgtgggcaaatcaaatcgatatggcgttggtcatgactgtagagcctggcttcggagggcaaaaattcatggaagacatgatgcccaaagtgcattggttaaggacccaattccctagcctggacatcgaggtagatgggggcgtggggcccgataccgtgcacaagtgtgctgaagctggcgctaacatgattgtatcagggtccgcgattatgaggtccgaggatccaagatccgtcatcaacctgctgaggaatgtctgctccgaggccgctcaaaaacgttcactggatcggtag

SEQ ID NO: 261285 - DNA, 687 bp, Artificial Sequence
  derived and/or modified sequence
atggccagtggctgcaaaataggaccctccatcttgaattcagatctggctaatctgggggccgaatgtctgagaatgctggattcaggggcggactacttgcacctggacgttatggatgggcattttgtgcccaatataacatttggtcacccagtggtcgagtcattgcgtaagcagctgggccaggaccctttttttgatatgcacatgatggtatccaaacccgagcagtgggtcaagccaatggctgtggctggcgctaatcagtacacttttcatcttgaggccaccgaaaaccctggcgcgctgattaaagacatccgagagaacggtatgaaggtgggccttgcgatcaagcccggcacctcagttgagtatctcgccccgtgggctaatcagatcgacatggctctggtgatgaccgtggagccgggctttgggggtcaaaagtttatggaggacatgatgcctaaagtgcactggctccgcacccagtttccaagtctggatatagaggttgatggaggcgtgggcccagacactgtgcacaaatgcgcagaagccggcgccaacatgattgtgtcaggatctgccatcatgcgctcagaagatccgcgctccgtcatcaacctgttacgcaacgtgtgttctgaagccgcgcagaagcgctctctggacagatag

SEQ ID NO: 261286 - DNA, 663 bp, Artificial Sequence
  derived and/or modified sequence
atggccagcggctgcaagattggccccagcatcctgaacagcgacctggccaacctgggcgctgagtgcctgaggatgctggacagcggggctgactacctgcacctggatgtgatggatggctacatgcacatgatggtgtccaagccagagcagtgggtgaagcccatggctgtggccggggccaaccagtacaccttccacctggaggccacagaaaatcctggggccctgatcaaggacatccgggagaatggcatgaagagctgcagcgtgacccaggccgaggtgcagtggcacagccagggccccctgcaggtgggcctggccatcaagccaggcacctctgtggagtacctggccccctgggccaaccagattgacatggccctggtgatgacagtggagcccggctttggaggccagaagttcatggaggacatgatgcccaaggtgcactggctgcggacccagttccccagcctggacatcgaggtggatggaggagtgggccctgacacagtgcacaagtgtgccgaggccggggccaacatgattgtgtctggcagcgccatcatgaggtctgaggaccccaggagcgtcatcaacctgctgagaaatgtgtgcagcgaggccgcccagaagaggagcctggacagatag

SEQ ID NO: 261287 - DNA, 687 bp, Artificial Sequence
  derived and/or modified sequence
atggccagcggctgcaagattggccccagcatcctgaacagcgacctggccaacctgggcgctgagtgcctgaggatgctggacagcggggctgactacctgcacctggatgtgatggatggccactttgtgcccaacatcaccttcggccaccctgtggtggagagcctgaggaagcagctgggccaggaccccttctttgacatgcacatgatggtgtccaagccagagcagtgggtgaagcccatggctgtggccggggccaaccagtacaccttccacctggaggccacagaaaatcctggggccctgatcaaggacatccgggagaatggcatgaaggtgggcctggccatcaagccaggcacctctgtggagtacctggccccctgggccaaccagattgacatggccctggtgatgacagtggagcccggctttggaggccagaagttcatggaggacatgatgcccaaggtgcactggctgcggacccagttccccagcctggacatcgaggtggatggaggagtgggccctgacacagtgcacaagtgtgccgaggccggggccaacatgattgtgtctggcagcgccatcatgaggtctgaggaccccaggagcgtcatcaacctgctgagaaatgtgtgcagcgaggccgcccagaagaggagcctggacagatag

SEQ ID NO: 261288 - DNA, 663 bp, Artificial Sequence
  derived and/or modified sequence
atggccagcggctgcaagatcggccccagcatcctgaacagcgacttagccaacctgggcgcagagtgtctgcgaatgctcgattccggagctgactatctacatctcgacgttatggatggatacatgcacatgatggtctctaagcccgaacaatgggtgaaaccaatggccgttgcaggggccaatcagtacacattccacttggaggcaacagagaacccaggagccctgattaaagatattcgcgaaaatgggatgaagtcctgcagcgttactcaggctgaggtacaatggcactcccagggacccctgcaagtcggtctcgccatcaaacctggaactagcgtggaatacctagccccctgggctaatcagatagacatggcgctagttatgactgtagagcctggattcggaggccagaaatttatggaagacatgatgcccaaggtacactggctgcgcactcaatttcccagcctcgatattgaggtcgacggcggggtggggcccgacaccgtgcataagtgcgctgaagccggagccaacatgatcgtgagcgggagcgccatcatgcgatctgaggaccctaggtccgttatcaacttgttacgaaatgtctgtagcgaagcagcccagaaaaggtctctcgaccggtag

SEQ ID NO: 261289 - DNA, 687 bp, Artificial Sequence
  derived and/or modified sequence
atggccagcggctgcaagatcggccccagcatcctgaacagcgacctggccaacttaggtgcagagtgcctccgcatgcttgactcaggggccgactaccttcacctcgacgtcatggatggccatttcgttcccaatatcaccttcggccaccccgtcgtcgagtctttacggaaacagttgggccaagatccattctttgatatgcacatgatggtgagtaagcctgagcagtgggtgaaaccaatggccgtcgcgggggccaaccagtacacatttcacctcgaggccactgagaatcctggcgccctcattaaagacatcagggagaacggcatgaaagttggattagccatcaaaccggggacttctgtcgagtacctcgcaccctgggcgaatcagatagatatggccctggtgatgacggttgagcctggctttgggggccagaagttcatggaagacatgatgcctaaggtgcactggctgaggactcagttcccatctttggacatagaggtcgacggtggggtgggcccagatacagtgcataaatgtgccgaggccggcgctaatatgatagtcagcggcagtgctatcatgcggtcagaagaccccagaagcgtgatcaacctcctaaggaacgtgtgctctgaagccgcccaaaagcggtcccttgatcgatag

SEQ ID NO: 261290 - DNA, 663 bp, Artificial Sequence
  derived and/or modified sequence
atggcatcaggatgtaaaatcggcccttcaatcctcaattctgatttggccaacctgggtgcggagtgtctgaggatgctagattcaggcgcagattacctacatctcgatgtgatggatggctatatgcatatgatggtgagcaagccagaacagtgggtgaagcctatggcagtcgctggcgcaaaccagtatacattccacctggaggcgaccgagaaccctggagcgctaattaaggatatacgggaaaatggcatgaaaagctgttccgtgacacaggctgaagtacagtggcacagtcaaggtccgcttcaggtgggattggccataaaaccgggaacctctgtggagtatttggccccttgggccaaccaaatcgacatggccctcgtgatgactgttgagccgggatttggaggtcagaagttcatggaggatatgatgccaaaggtgcattggctgcgcacgcaattcccctctctggatattgaggtggacgggggtgtggggcctgacaccgtacataagtgcgccgaggcgggagcaaacatgatagtgtccggttctgcaataatgaggtctgaagatcccaggtcagtgattaacttgttgcgaaacgtgtgcagtgaggccgctcaaaagcgttcactggataggtag

SEQ ID NO: 261291 - DNA, 687 bp, Artificial Sequence
  derived and/or modified sequence
atggccagtggctgcaaaattggcccttcaatcctaaactctgatttggcaaatttgggagccgagtgcctcagaatgctggacagcggagcagattacctccacctggacgtgatggacggccactttgttccgaacataacattcggtcaccctgttgtggaatcactcagaaagcagctgggccaggacccgttttttgacatgcacatgatggtgtccaagcccgagcaatgggttaaacccatggcagtcgctggcgcaaatcaatacactttccacctcgaggcaacggagaacccaggcgctctgatcaaagatatccgtgagaacggcatgaaagtgggcctggcaataaagcccggaacgtctgtggaatatctggctccatgggcgaatcaaattgacatggctctagtgatgaccgtcgaacccggattcgggggacaaaaattcatggaggatatgatgccaaaggtccattggctccgcactcagtttccttcgctggatatcgaagtggacggcggtgttggccctgacacggtgcataagtgcgccgaagcaggagccaacatgatcgtgagcggatcagctatcatgcgtagcgaggatcctcgctctgtaattaatctccttaggaatgtgtgctccgaggctgcccagaagagaagcctggacagatag

SEQ ID NO: 261292 - DNA, 2415 bp, Artificial Sequence
  derived and/or modified sequence
atggcgtcgggctgcaagattggcccgtccatcctcaacagcgacctggccaatttaggggccgagtgcctccggatgctagactctggggccgattatctgcacctggacgtaatggacgggtacatgcacatgatggtgtccaagccagaacagtgggtaaagccaatggctgtagcaggagccaatcagtacacctttcatctcgaggctactgagaacccaggggctttgattaaagacattcgggagaatgggatgaagtcttgctctgtcacccaggctgaagtgcagtggcacagtcagggcccattgcaggttggccttgccatcaaaccaggaacctcagttgagtatttggcaccatgggctaatcagatagatatggccttggttatgacagtggaaccggggtttggagggcagaaattcatggaagatatgatgccaaaggttcactggttgaggacccagttcccatctttggatatagaggtcgatggtggagtaggtcctgacactgtccataaatgtgcagaggcaggagctaacatgattgtgtctggcagtgctattatgaggagtgaagaccccagatctgtgatcaatctattaagaaatgtttgctcagaagctgctcagaaacgttctcttgatcggtgaaaccataaggagcccagtgttcctgttcatgaaatctcccttttactggaaaacaggaatattgactaccaaatcacaatgcaattgaagccgtactgcttttttgagcagttattcattccagtgattaaaactgattgtgcagaatattctaagaggtcagaaattggtgtgtataactacatttttagtgatgcaatttattgattagtgagtaagatactgtttttattgagagatttgatttttataaagtaaaaatacggctgcattagggttacaaacagaaaagtgtcttaatgtctaaggagggcatattagctacactacaaaaacaaattttgtctgtacttctgaaaagaattttgttgtttctcagctgttttccaaaagcaaaggaagtctttatggtttttttctatttcatgttattgtgatttgtttataagtttgggtggggtgcataccatattcttggttcttaaaatctatcacttttcaccttacacttgatgtgtgaaaactataaaaacaatgtgtgaaacccaggggttctaaaatacaagcatagattttatcagggtgttttgtcaaagcaggttattcagtgattcctccccaccattcttaagaacgttaaataatgctgttgtgttagctctgagtagaaaggaaaaagtaaaacctctgtttggaggtaatattgggttgaattctgactgcccctttctagctggacctttaacaaatcacccaatcttttttgtgtttctctaaagtcatttatacattaaatgtaattatagcaactgtggggttctgttgagaattaagagctaacactatatatgtaaagtttccagtactagtcccagaatttagaatatgctcaacacaaagtaaacagcattatataagtttatatttttgtgagttataaagtactttgatatattctcattaaatctgtaaatcacctctataagtaagtggtaataataaagcagatatttttgtccccatttaaaaaatgaagaaattaatgcttaatagggtggtaccctggaaaggatctgggaagtggtagaatttctggtctgtacttttacaaatggagcccttgggaggtgggttaggtaaaagaagctttttacttaacgttgtcttatttccagtctaattttacgctgtagcagaaccagatggctgagaaaattctggaactatggatcttgaccccaaggatatattattttattccaagaaagatcaggtaggcgaaaagatgacaggatacagagtcaatccataaactaaatatttataactgttctgaattatacagagtctaaaaatatgtgtcagctacttcattcctgtaaatactcttgctgtgttataaatatggcaagaaataaacatgaccaatatcaatagacttcttgaggctactataagttttgagaaataaggttcaaaaaataagaatgctaacacttaagcacagactagagcttgcttgggtttcttcctgcattacaaggtaaaaatttgttaatgtttgtttttattcagcttgggaaagctttgtgccatgaatacgtcgcatttaataacaagcaacacacggcatatagaaataactttaattaaaaaacttacatagaagattataatatcagacgtgacaaagatttgagtttatttgcctggacaacttgggtttgtctggcttttgttttctttttcttt

SEQ ID NO: 261293 - DNA, 2569 bp, Artificial Sequence
  derived and/or modified sequence
acggagaaggggcggggccaaaactgcgcgcccaatcggggtgacgctctagccttgccggggactcgtgggtaacttgcttttgggagccagcggtatggcgtcgggctgcaagattggcccgtccatcctcaacagcgacctggccaatttaggggccgagtgcctccggatgctagactctggggccgattatctgcacctggacgtaatggacgggcattttgttcccaacatcacctttggtcaccctgtggtagaaagccttcgaaagcagctaggccaggaccctttctttgacatgcacatgatggtgtccaagccagaacagtgggtaaagccaatggctgtagcaggagccaatcagtacacctttcatctcgaggctactgagaacccaggggctttgattaaagacattcgggagaatgggatgaaggttggccttgccatcaaaccaggaacctcagttgagtatttggcaccatgggctaatcagatagatatggccttggttatgacagtggaaccggggtttggagggcagaaattcatggaagatatgatgccaaaggttcactggttgaggacccagttcccatctttggatatagaggtcgatggtggagtaggtcctgacactgtccataaatgtgcagaggcaggagctaacatgattgtgtctggcagtgctattatgaggagtgaagaccccagatctgtgatcaatctattaagaaatgtttgctcagaagctgctcagaaacgttctcttgatcggtgaaaccataaggagcccagtgttcctgttcatgaaatctcccttttactggaaaacaggaatattgactaccaaatcacaatgcaattgaagccgtactgcttttttgagcagttattcattccagtgattaaaactgattgtgcagaatattctaagaggtcagaaattggtgtgtataactacatttttagtgatgcaatttattgattagtgagtaagatactgtttttattgagagatttgatttttataaagtaaaaatacggctgcattagggttacaaacagaaaagtgtcttaatgtctaaggagggcatattagctacactacaaaaacaaattttgtctgtacttctgaaaagaattttgttgtttctcagctgttttccaaaagcaaaggaagtctttatggtttttttctatttcatgttattgtgatttgtttataagtttgggtggggtgcataccatattcttggttcttaaaatctatcacttttcaccttacacttgatgtgtgaaaactataaaaacaatgtgtgaaacccaggggttctaaaatacaagcatagattttatcagggtgttttgtcaaagcaggttattcagtgattcctccccaccattcttaagaacgttaaataatgctgttgtgttagctctgagtagaaaggaaaaagtaaaacctctgtttggaggtaatattgggttgaattctgactgcccctttctagctggacctttaacaaatcacccaatcttttttgtgtttctctaaagtcatttatacattaaatgtaattatagcaactgtggggttctgttgagaattaagagctaacactatatatgtaaagtttccagtactagtcccagaatttagaatatgctcaacacaaagtaaacagcattatataagtttatatttttgtgagttataaagtactttgatatattctcattaaatctgtaaatcacctctataagtaagtggtaataataaagcagatatttttgtccccatttaaaaaatgaagaaattaatgcttaatagggtggtaccctggaaaggatctgggaagtggtagaatttctggtctgtacttttacaaatggagcccttgggaggtgggttaggtaaaagaagctttttacttaacgttgtcttatttccagtctaattttacgctgtagcagaaccagatggctgagaaaattctggaactatggatcttgaccccaaggatatattattttattccaagaaagatcaggtaggcgaaaagatgacaggatacagagtcaatccataaactaaatatttataactgttctgaattatacagagtctaaaaatatgtgtcagctacttcattcctgtaaatactcttgctgtgttataaatatggcaagaaataaacatgaccaatatcaatagacttcttgaggctactataagttttgagaaataaggttcaaaaaataagaatgctaacacttaagcacagactagagcttgcttgggtttcttcctgcattacaaggtaaaaatttgttaatgtttgtttttattcagcttgggaaagctttgtgccatgaatacgtcgcatttaataacaagcaacacacggcatatagaaataactttaattaaaaaacttacatagaagattataatatcagacgtgacaaagatttgagtttatttgcctggacaacttgggtttgtctggcttttgttttctttttctttaaaaataaatgtacagtaaaactacaagcaaaa

SEQ ID NO: 261294 - DNA, 1128 bp, Artificial Sequence
  derived and/or modified sequence
aaaactgcgcgcccaatcggggtgacgctctagccttgccggggactcgtgggtaacttgcttttgggagccagcggtatggcgtcgggctgcaagattggcccgtccatcctcaacagcgacctggccaatttaggggccgagtgcctccggatgctagactctggggccgattatctgcacctggacgtaatggacgggcattttgttcccaacatcacctttggtcaccctgtggtagaaagccttcgaaagcagctaggccaggaccctttctttgacatgcacatgatggtgtccaagccagaacagtgggtaaagccaatggctgtagcaggagccaatcagtacacctttcatctcgaggctactgagaacccaggggctttgattaaagacattcgggagaatgggatgaagtcttgctctgtcacccaggctgaagtgcagtggcacagtcagggcccattgcaggttggccttgccatcaaaccaggaacctcagttgagtatttggcaccatgggctaatcagatagatatggccttggttatgacagtggaaccggggtttggagggcagaaattcatggaagatatgatgccaaaggttcactggttgaggacccagttcccatctttggatatagaggtcgatggtggagtaggtcctgacactgtccataaatgtgcagaggcaggagctaacatgattgtgtctggcagtgctattatgaggagtgaagaccccagatctgtgatcaatctattaagaaatgtttgctcagaagctgctcagaaacgttctcttgatcggtgaaaccataaggagcccagtgttcctgttcatgaaatctcccttttactggaaaacaggaatattgactaccaaatcacaatgcaattgaagccgtactgcttttttgagcagttattcattccagtgattaaaactgattgtgcagaatattctaagaggtcagaaattggtgtgtataactacatttttagtgatgcaatttattgattagtgagtaagatactgtttttattgagagatttgatttttataaagtaaaaatacggctgcattagggttacaaacagaaaagtgtcttaatgtctaagg

SEQ ID NO: 261295 - DNA, 546 bp, Artificial Sequence
  derived and/or modified sequence
gggtaacttgcttttgggagccagcggtatggcgtcgggctgcaagattggcccgtccatcctcaacagcgacctggccaatttaggggccgagtgcctccggatgctagactctggggccgattatctgcacctggacgtaatggacgggcaccctgctcttcagggaggtcagttttttgcattttgttcccaacatcacctttggtcaccctgtggtagaaagccttcgaaagcagctaggccaggaccctttctttgacatgcacatgatggtgtccaagccagaacagtgggtaaagccaatggctgtagcaggagccaatcagtacacctttcatctcgaggctactgagaacccaggggctttgattaaagacattcgggagaatgggatgaagtcttgctctgtcacccaggctgaagtgcagtggcacagtcagggcccattgcaggttggccttgccatcaaaccaggaacctcagttgagtatttggcaccatgggctaatcagatagatatggccttggttatgacagtggaac

SEQ ID NO: 261296 - DNA, 663 bp, Artificial Sequence
  derived and/or modified sequence
atggccagcggctgcaagatcggccccagcatcctgaacagcgacctggccaacctgggcgccgagtgcctgagaatgctggacagcggcgccgactacctgcacctggacgtgatggacggctacatgcacatgatggtgagcaagcccgagcagtgggtgaagcccatggccgtggccggcgccaaccagtacaccttccacctggaggccaccgagaaccccggcgccctgatcaaggacatcagagagaacggcatgaagagctgcagcgtgacccaggccgaggtgcagtggcacagccagggccccctgcaggtgggcctggccatcaagcccggcaccagcgtggagtacctggccccctgggccaaccagatcgacatggccctggtgatgaccgtggagcccggcttcggcggccagaagttcatggaggacatgatgcccaaggtgcactggctgagaacccagttccccagcctggacatcgaggtggacggcggcgtgggccccgacaccgtgcacaagtgcgccgaggccggcgccaacatgatcgtgagcggcagcgccatcatgagaagcgaggaccccagaagcgtgatcaacctgctgagaaacgtgtgcagcgaggccgcccagaagagaagcctggacagatag

SEQ ID NO: 261297 - DNA, 687 bp, Artificial Sequence
  derived and/or modified sequence
atggccagcggctgcaagatcggccccagcatcctgaacagcgacctggccaacctgggcgccgagtgcctgagaatgctggacagcggcgccgactacctgcacctggacgtgatggacggccacttcgtgcccaacatcaccttcggccaccccgtggtggagagcctgagaaagcagctgggccaggaccccttcttcgacatgcacatgatggtgagcaagcccgagcagtgggtgaagcccatggccgtggccggcgccaaccagtacaccttccacctggaggccaccgagaaccccggcgccctgatcaaggacatcagagagaacggcatgaaggtgggcctggccatcaagcccggcaccagcgtggagtacctggccccctgggccaaccagatcgacatggccctggtgatgaccgtggagcccggcttcggcggccagaagttcatggaggacatgatgcccaaggtgcactggctgagaacccagttccccagcctggacatcgaggtggacggcggcgtgggccccgacaccgtgcacaagtgcgccgaggccggcgccaacatgatcgtgagcggcagcgccatcatgagaagcgaggaccccagaagcgtgatcaacctgctgagaaacgtgtgcagcgaggccgcccagaagagaagcctggacagatag

SEQ ID NO: 261298 - DNA, 558 bp, Artificial Sequence
  derived and/or modified sequence
atgaagctgtgggacgtggtggccgtgtgcctggtgctgctgcacaccgccagcgccttccccctgcccgccgccaacatgcccgaggactaccccgaccagttcgacgacgtgatggacttcatccaggccaccatcaagagactgaagagaagccccgacaagcagatggccgtgctgcccagaagagagagaaacagacaggccgccgccgccaaccccgagaacagcagaggcaagggcagaagaggccagagaggcaagaacagaggctgcgtgctgaccgccatccacctgaacgtgaccgacctgggcctgggctacgagaccaaggaggagctgatcttcagatactgcagcggcagctgcgacgccgccgagaccacctacgacaagatcctgaagaacctgagcagaaacagaagactggtgagcgacaaggtgggccaggcctgctgcagacccatcgccttcgacgacgacctgagcttcctggacgacaacctggtgtaccacatcctgagaaagcacagcgccaagagatgcggctgcatctag

SEQ ID NO: 261299 - DNA, 186 bp, Artificial Sequence
  derived and/or modified sequence
atgaagctgtgggacgtggtggccgtgtgcctggtgctgctgcacaccgccagcgccttccccctgcccgccgccaacatgcccgaggactaccccgaccagttcgacgacgtgatggacttcatccaggccaccatcaagagactgaagagaagccccgacaagcagatggccgtgctgccctag

SEQ ID NO: 261300 - DNA, 558 bp, Artificial Sequence
  derived and/or modified sequence
atgaagctttgggacgtcgtagcagtctgcctggtgctcctacacaccgcttccgcgtttccgttacctgctgccaacatgccggaggattaccctgatcagtttgacgatgtgatggatttcatccaagctacaattaagcggctgaaaagaagtcctgataagcagatggccgtgctgcctcgcagggagcggaacaggcaggccgctgcagcaaatcccgagaattcacggggcaaaggaagaagaggccagagaggtaaaaaccgcggctgcgtgctgaccgcaatacatctcaatgtgacggatctaggcttgggatacgagaccaaagaagaactcattttccgttactgtagcggatcttgtgacgccgctgaaactacatacgataagatcctgaaaaacctaagccgcaatcgacgactggtgtccgacaaagtcggccaggcctgctgtagaccgatcgcctttgatgacgatctgtccttcctggacgataatttggtctatcatattctcagaaagcattcggcgaagcgatgcgggtgcatctag

SEQ ID NO: 261301 - DNA, 186 bp, Artificial Sequence
  derived and/or modified sequence
atgaaattgtgggacgtggtcgccgtttgcctggtgctcttacatactgcttcggccttccccttgcccgccgccaatatgcccgaggactacccagaccaatttgacgatgtgatggatttcatccaagccacaatcaaacgccttaaaaggtcccctgacaagcagatggccgttctgccatag

SEQ ID NO: 261302 - DNA, 186 bp, Artificial Sequence
  derived and/or modified sequence
atgaagctttgggatgtggtggctgtgtgtttggtcctcttacacaccgcttcagcgttccccttgcccgccgcgaacatgccggaggactacccagaccaattcgatgatgttatggattttatccaggctaccatcaagcggctcaaaagatccccagacaaacagatggctgttctgccatag

SEQ ID NO: 261303 - DNA, 558 bp, Artificial Sequence
  derived and/or modified sequence
atgaagctctgggatgttgtcgccgtatgcttggttttactgcacactgcttcagcttttccgctgcctgcagcgaatatgcctgaagattaccccgaccagtttgatgatgtcatggatttcatccaggctaccattaaacgcctgaaaagatccccagacaagcagatggcagtccttccccgcagagagaggaatcggcaggctgccgcagcaaatcccgagaattctagaggcaagggaagacgaggacagcgcggcaagaatagggggtgcgtgctgaccgccatccatctgaacgtcaccgacctgggcctcggctatgagactaaggaagaactgatctttagatactgttcaggatcttgcgatgcggctgagactacttacgacaaaatactgaagaatctcagtaggaatagacgcctcgtgagcgataaggtgggtcaggcatgttgtcgtcccatcgcgtttgatgacgatctgagcttcctggacgacaacctggtgtaccatatactccgcaagcacagcgcaaagcggtgcggctgtatctag

SEQ ID NO: 261304 - DNA, 558 bp, Artificial Sequence
  derived and/or modified sequence
atgaagctgtgggatgtggtggccgtgtgcctggtgctgctgcacacagccagcgccttccccctgcctgctgccaacatgcctgaggactacccagaccagtttgatgatgtgatggacttcatccaggccaccatcaagaggctgaagaggagcccagacaagcagatggctgtgctgccccggcgggagaggaaccggcaggccgctgctgccaaccctgagaacagccggggcaagggccggcggggccagaggggcaagaacagaggctgtgtgctgacagccatccacctgaatgtgacagacctgggcctgggctatgagaccaaggaggagctgatcttccgctactgcagcggcagctgtgatgctgctgagaccacctatgacaagatcctgaagaacctgagcaggaacagaaggctggtgtctgacaaggtgggccaggcctgctgccggcccatcgcctttgatgatgacctgtccttcctggatgacaacctggtgtaccacatcctgaggaagcacagcgccaagagatgtggctgcatctag

SEQ ID NO: 261305 - DNA, 186 bp, Artificial Sequence
  derived and/or modified sequence
atgaagctgtgggatgtggtggccgtgtgcctggtgctgctgcacacagccagcgccttccccctgcctgctgccaacatgcctgaggactacccagaccagtttgatgatgtgatggacttcatccaggccaccatcaagaggctgaagaggagcccagacaagcagatggctgtgctgccctag

SEQ ID NO: 261306 - DNA, 558 bp, Artificial Sequence
  derived and/or modified sequence
atgaagctgtgggacgtggtggccgtgtgcctggtgctgctgcacaccgcctcggcattccctctgcctgccgctaatatgccagaagactaccccgaccagtttgacgacgttatggacttcatccaggccacgatcaagcggctgaagcgctcccctgataaacaaatggctgtccttcctagacgagaaaggaatagacaggccgccgctgccaatccggaaaactcacgaggtaaaggcaggaggggtcagcgtggaaagaatagaggatgcgtgttgacagctattcatctgaatgtgactgacctgggtctgggctatgaaacgaaagaggaactgatatttcgctactgttccggttcctgcgacgctgcagagaccacttacgataagatcctgaaaaacttatccagaaaccggaggttagtgtccgataaagtcggtcaggcctgttgtcgcccaattgctttcgacgacgacctctccttcctagacgataacctggtgtaccatatcctcaggaaacacagtgctaaacgttgtggttgtatctag

SEQ ID NO: 261307 - DNA, 186 bp, Artificial Sequence
  derived and/or modified sequence
atgaagctgtgggacgtggtggccgtgtgcctggtgctgctgcacaccgcttcagcatttccacttcccgctgcaaatatgccagaggactatcctgaccaatttgacgacgttatggatttcatccaggcaacaattaagcgactgaagcgaagccctgataagcagatggctgtgctcccctag

SEQ ID NO: 261308 - DNA, 186 bp, Artificial Sequence
  derived and/or modified sequence
atgaagctgtgggacgtggtggccgtgtgcctggtgctgctgcacaccgcatctgctttcccactgccggcggctaacatgcccgaggattaccccgatcaattcgacgatgttatggacttcatccaggccacaattaagagattgaagagatctcctgataagcaaatggccgtgctgccctag

SEQ ID NO: 261309 - DNA, 558 bp, Artificial Sequence
  derived and/or modified sequence
atgaagctgtgggacgtggtggccgtgtgcctggtgctgctgcacacagcttccgcatttcctctgcccgcggctaatatgcctgaggattatcccgatcagttcgatgacgttatggacttcatccaggccacaataaaacgtttgaaacggtcaccagacaagcaaatggccgtcctgcctcgtagggagagaaatagacaagcagccgccgctaatcctgagaattcccgcggaaaggggcgcaggggacagcgcggaaagaaccgtggctgcgttctcacagcaatacaccttaatgtcactgacctcggactcgggtacgagacaaaagaagagctcatttttcgatattgcagtggaagctgtgacgcagcagagacaacctacgacaagattctaaagaacttgtccaggaaccggagattagtctctgataaagtcggacaggcttgctgtcgccccattgcctttgatgacgacctgagtttcctcgatgacaacttagtttatcatattctgaggaagcactccgcaaaacgatgtggttgtatttag

SEQ ID NO: 261310 - DNA, 558 bp, Artificial Sequence
  derived and/or modified sequence
atgaaactttgggacgtggtcgcagtctgtttagtgcttctccatacagcatctgcgttcccactgcctgcagccaatatgcccgaggattatcctgaccagtttgacgatgtaatggactttattcaggccaccatcaagcgtctgaagcgaagtcctgataaacagatggcagtcctacctcgtagagagcgcaatagacaggctgcggctgccaatcccgagaactctaggggaaaaggcaggcggggacagcgaggaaaaaaccggggatgtgtgcttaccgccatccacctgaacgtaactgatcttggactggggtatgagacaaaagaggagctgatttttaggtactgctctgggtcgtgcgatgccgctgaaacaacctatgacaagatcctaaagaacttatcccgtaaccgcagactcgtaagtgacaaggtgggccaggcttgttgtcggccaatcgccttcgatgacgacctgagtttcctcgacgacaacctggtgtaccacattctgagaaaacacagcgctaagagatgcgggtgcatttag

SEQ ID NO: 261311 - DNA, 186 bp, Artificial Sequence
  derived and/or modified sequence
atgaaactttgggacgtcgtcgcggtgtgcctggttctgttgcacaccgcttccgcctttcccctgcctgccgcaaacatgcccgaggactatcctgaccaattcgacgatgtaatggatttcatacaggccactatcaaacgtcttaagcggagccccgacaagcagatggcagtcctaccctag

SEQ ID NO: 261312 - DNA, 186 bp, Artificial Sequence
  derived and/or modified sequence
atgaaactttgggacgtggtcgccgtgtgtctggtgctgttacatactgcttctgctttcccgctgccggctgctaacatgcccgaggattaccccgaccaattcgacgatgtgatggattttatacaggcaaccattaaaagactgaagcggtcccccgacaagcagatggctgtgctcccctag

SEQ ID NO: 261313 - DNA, 558 bp, Artificial Sequence
  derived and/or modified sequence
atgaagctatgggatgtcgtcgccgtgtgtctcgtgctgctccacactgcgagcgctttccctcttcccgcagcaaacatgccagaggactaccccgatcagttcgatgacgtgatggacttcatccaggccacaatcaaaagactcaagcgctcaccagacaaacagatggccgtcctgccgcgacgggagaggaataggcaggcagctgctgctaacccagagaactccagaggtaaggggagacgtggccagaggggtaagaatagagggtgtgtgctgactgcaatccacttgaacgtgacggatttgggcctgggctatgaaactaaggaagagctcatttttagatactgtagtggatcctgcgatgctgcagagactacgtacgacaaaattttgaaaaacctctctcgtaacagacggcttgtttctgataaggtcggtcaggcttgctgtcgacccattgctttcgatgacgatctctcattcttggatgacaatctcgtctaccatatcctgcggaaacatagcgccaaaaggtgtggctgcatctag

SEQ ID NO: 261314 - DNA, 558 bp, Artificial Sequence
  derived and/or modified sequence
atgaagctttgggacgtcgtggcagtgtgcttagtgctgctgcatactgcctcagccttcccattaccagccgccaacatgcccgaggattaccccgatcaattcgacgacgtcatggactttatacaggcaactataaagcggttaaagaggtcaccagacaaacaaatggctgtcttaccaagaagagagcgcaaccgccaggccgccgccgctaaccctgaaaactcgcgcggtaaaggccggagaggacagcgtggcaaaaatagagggtgtgtgctcaccgcaatccacctgaacgttacagacctgggactggggtatgaaacaaaggaggagttgatatttaggtactgttcaggttcatgcgatgccgccgaaacgacatatgacaaaattctgaaaaacttgagtcgcaatcgacgcctcgtgagtgataaagtcggacaagcttgttgtcgaccgatcgcctttgacgatgacctctccttcctagatgataatctggtgtaccacatattgagaaagcacagcgcgaagagatgtggctgcatatag

SEQ ID NO: 261315 - DNA, 186 bp, Artificial Sequence
  derived and/or modified sequence
atgaaactttgggacgtagtagctgtttgcctcgtgctgcttcacactgctagtgctttccccctccctgcggccaacatgcccgaagactatcctgaccaatttgacgacgttatggattttatccaagctaccatcaaacgcctgaaaagatcacccgacaaacaaatggcagtgttgccttag

SEQ ID NO: 261316 - DNA, 186 bp, Artificial Sequence
  derived and/or modified sequence
atgaagctatgggacgtggttgccgtttgcctagttctacttcacactgcctctgccttccccttgccagctgccaacatgccagaggattatcctgatcaatttgatgacgtaatggattttatccaggccacaattaaacgtctcaagcgttctccagataaacagatggccgtactgccttag

SEQ ID NO: 261317 - DNA, 558 bp, Artificial Sequence
  derived and/or modified sequence
atgaagttatgggacgttgttgccgtttgtcttgtactgttgcatacagcatccgcattcccgttgcccgctgctaatatgccagaggattatcccgaccaattcgacgacgtcatggattttattcaagccaccattaagcgcctgaaaaggtctccggacaagcagatggcagtactgccccggagagaacgtaaccggcaggcagccgccgcaaaccccgagaattcccgtggaaaaggacgtcgtggtcagcgaggcaaaaaccgtggatgtgtccttacggcgattcatctgaacgtgacagatttaggacttgggtacgaaaccaaggaggagctcatatttcgctattgttccgggtcctgcgatgctgcagaaacgacgtacgacaaaattctgaagaacctgtcgagaaaccgacgtctggtttctgacaaggttggccaggcctgttgtcggcctatcgctttcgatgatgatcttagcttcctcgacgataatcttgtttaccatattctccgcaaacattcagctaaaaggtgtggatgtatctag

SEQ ID NO: 261318 - DNA, 558 bp, Artificial Sequence
  derived and/or modified sequence
atgaagctgtgggacgtagtagcagtgtgtctcgtcctgctgcacactgctagcgcgttccctctcccagccgctaacatgccagaggactacccggatcagttcgacgatgttatggatttcatccaggctactataaaaagattgaagcggagccccgataaacagatggctgtgctccccagaagagagagaaacagacaggcagctgccgccaatccagaaaacagccggggcaaggggcgaagaggacaacggggtaaaaataggggctgtgtcttgactgcaatccacctgaacgtcaccgatttagggttagggtacgaaactaaggaggaattgatctttaggtattgctcgggaagttgtgatgccgccgaaacaacttatgataaaatcctgaagaacttgtctcgtaaccgccggcttgtgagcgataaggtgggacaggcctgttgcagacccattgcctttgatgatgatttgtcctttctggatgataatttggtttaccatattttacggaaacattctgcaaaaagatgcggctgtatatag

SEQ ID NO: 261319 - DNA, 558 bp, Artificial Sequence
  derived and/or modified sequence
atgaaattgtgggacgtcgtggccgtatgcctcgtactactgcatacagcttcagctttccccctcccagccgccaacatgccagaggattatcctgatcaattcgacgatgtcatggacttcatccaagcgactattaagcggcttaaaagatctcctgataaacagatggcagtcctgccacgaagagaacgtaaccgtcaggctgccgcagctaatcctgaaaattcacggggcaagggccggagaggtcaacgcggcaagaatcgtgggtgcgtgctaactgcaattcatctaaacgtcaccgatttaggtctgggctatgaaaccaaggaggagctgatttttaggtactgtagcggttcgtgtgatgcagctgaaaccacctacgataaaatcctgaaaaatctgtcacgcaaccggcgtctggtctctgataaagtcggacaagcttgttgtcgcccgattgcattcgatgacgatctgagctttcttgacgacaatctagtttaccacatactgagaaaacactccgccaagcgctgcgggtgcatttag

SEQ ID NO: 261320 - RNA, 558 nt, Artificial Sequence
  derived and/or modified sequence
augaagcuuugggacgucguggcagugugcuuagugcugcugcauacugccucagccuucccauuaccagccgccaacaugcccgaggauuaccccgaucaauucgacgacgucauggacuuuauacaggcaacuauaaagcgguuaaagaggucaccagacaaacaaauggcugucuuaccaagaagagagcgcaaccgccaggccgccgccgcuaacccugaaaacucgcgcgguaaaggccggagaggacagcguggcaaaaauagagggugugugcucaccgcaauccaccugaacguuacagaccugggacugggguaugaaacaaaggaggaguugauauuuagguacuguucagguucaugcgaugccgccgaaacgacauaugacaaaauucugaaaaacuugagucgcaaucgacgccucgugagugauaaagucggacaagcuuguugucgaccgaucgccuuugacgaugaccucuccuuccuagaugauaaucugguguaccacauauugagaaagcacagcgcgaagagauguggcugcauauag

SEQ ID NO: 261321 - RNA, 186 nt, Artificial Sequence
  derived and/or modified sequence
augaaacuuugggacguaguagcuguuugccucgugcugcuucacacugcuagugcuuucccccucccugcggccaacaugcccgaagacuauccugaccaauuugacgacguuauggauuuuauccaagcuaccaucaaacgccugaaaagaucacccgacaaacaaauggcaguguugccuuag

SEQ ID NO: 261322 - RNA, 186 nt, Artificial Sequence
  derived and/or modified sequence
augaagcuaugggacgugguugccguuugccuaguucuacuucacacugccucugccuuccccuugccagcugccaacaugccagaggauuauccugaucaauuugaugacguaauggauuuuauccaggccacaauuaaacgucucaagcguucuccagauaaacagauggccguacugccuuag

SEQ ID NO: 261323 - RNA, 558 nt, Artificial Sequence
  derived and/or modified sequence
augaaguuaugggacguuguugccguuugucuuguacuguugcauacagcauccgcauucccguugcccgcugcuaauaugccagaggauuaucccgaccaauucgacgacgucauggauuuuauucaagccaccauuaagcgccugaaaaggucuccggacaagcagauggcaguacugccccggagagaacguaaccggcaggcagccgccgcaaaccccgagaauucccguggaaaaggacgucguggucagcgaggcaaaaaccguggauguguccuuacggcgauucaucugaacgugacagauuuaggacuuggguacgaaaccaaggaggagcucauauuucgcuauuguuccggguccugcgaugcugcagaaacgacguacgacaaaauucugaagaaccugucgagaaaccgacgucugguuucugacaagguuggccaggccuguugucggccuaucgcuuucgaugaugaucuuagcuuccucgacgauaaucuuguuuaccauauucuccgcaaacauucagcuaaaagguguggauguaucuag

SEQ ID NO: 261324 - RNA, 558 nt, Artificial Sequence
  derived and/or modified sequence
augaagcugugggacguaguagcagugugucucguccugcugcacacugcuagcgcguucccucucccagccgcuaacaugccagaggacuacccggaucaguucgacgauguuauggauuucauccaggcuacuauaaaaagauugaagcggagccccgauaaacagauggcugugcuccccagaagagagagaaacagacaggcagcugccgccaauccagaaaacagccggggcaaggggcgaagaggacaacgggguaaaaauaggggcugugucuugacugcaauccaccugaacgucaccgauuuaggguuaggguacgaaacuaaggaggaauugaucuuuagguauugcucgggaaguugugaugccgccgaaacaacuuaugauaaaauccugaagaacuugucucguaaccgccggcuugugagcgauaaggugggacaggccuguugcagacccauugccuuugaugaugauuuguccuuucuggaugauaauuugguuuaccauauuuuacggaaacauucugcaaaaagaugcggcuguauauag

SEQ ID NO: 261325 - RNA, 558 nt, Artificial Sequence
  derived and/or modified sequence
augaaauugugggacgucguggccguaugccucguacuacugcauacagcuucagcuuucccccucccagccgccaacaugccagaggauuauccugaucaauucgacgaugucauggacuucauccaagcgacuauuaagcggcuuaaaagaucuccugauaaacagauggcaguccugccacgaagagaacguaaccgucaggcugccgcagcuaauccugaaaauucacggggcaagggccggagaggucaacgcggcaagaaucgugggugcgugcuaacugcaauucaucuaaacgucaccgauuuaggucugggcuaugaaaccaaggaggagcugauuuuuagguacuguagcgguucgugugaugcagcugaaaccaccuacgauaaaauccugaaaaaucugucacgcaaccggcgucuggucucugauaaagucggacaagcuuguugucgcccgauugcauucgaugacgaucugagcuuucuugacgacaaucuaguuuaccacauacugagaaaacacuccgccaagcgcugcgggugcauuuag

SEQ ID NO: 261326 - protein, 268 aa, Artificial Sequence
  derived and/or modified sequence
MTPALCRSSSLASKGMRERRETKAPPDGLEESAPREKKQSQPVVTASDISKRKCTSSFVEMGSQGDMGDKGQKGSVGRHGKIGPIGSKGEKGDSGDIGPPGPNGEPGLPCECSQLRKAIGEMDNQVSQLTSELKFIKNAVAGVRETESKIYLLVKEEKRYADAQLSCQGRGGTLSMPKDEAANGLMAAYLAQAGLARVFIGINDLEKEGAFVYSDHSPMRTFNKWRSGEPNNAYDEEDCVEMVASGGWNDVACHTTMYFMCEFDKENM

SEQ ID NO: 261327 - DNA, 807 bp, Artificial Sequence
  derived and/or modified sequence
atgactcctgccctttgcagatcatcttctctggcttcgaagggtatgagggaacgccgagaaaccaaagccccaccagatggtcttgaggaaagcgccccccgcgagaaaaaacagagccagcccgttgtaaccgcatccgacatatctaaacggaaatgtacctcgtcctttgtcgaaatgggctcccagggtgatatgggtgataaaggccagaaagggtcggtgggccgacacggtaagattggacccataggctctaaaggagaaaaaggcgactctggcgacatcggccctccaggtccaaacggcgaacccggcctaccctgcgaatgcagtcagctgcgcaaagccataggcgagatggacaatcaggtgtcccagctgacatcagagctgaaattcataaagaacgctgtggcgggagtcagggagaccgagtccaaaatctatctcctggtcaaagaagaaaagagatacgccgacgcccagctctcctgccagggcagaggcggaacattaagcatgcctaaggatgaggctgctaatgggcttatggccgcttatctggcacaggccggtttggcccgtgtgtttataggaattaatgacttggagaaagaaggagcattcgtctacagcgatcacagccctatgcggacctttaacaagtggagatcgggcgagccaaataatgcctacgacgaggaagattgtgtggagatggtagcctctggtggctggaacgacgttgcttgtcacactaccatgtactttatgtgcgagtttgataaggagaacatgtag

SEQ ID NO: 261328 - DNA, 807 bp, Artificial Sequence
  derived and/or modified sequence
atgaccccagccctgtgccgcagcagcagcctggccagcaagggcatgagggagcggcgggagaccaaggcccccccagatggcctggaggagagcgccccccgggagaagaagcagagccagcctgtggtgacagccagtgacatcagcaagaggaagtgcaccagcagctttgtggagatgggcagccagggcgacatgggagacaagggccagaagggctctgtgggcagacatggcaagattggccccatcggcagcaagggggagaagggggacagcggggacatcggccccccaggccccaatggagagcccggcctgccctgtgaatgttcccagctgaggaaggccatcggggagatggacaaccaggtgtcccagctgaccagcgagctgaagttcatcaagaatgctgtggccggcgtgcgggagacagagagcaagatctacctgctggtgaaggaggagaagagatatgcagatgcccagctgagctgccagggccggggcggcaccctgtccatgcccaaggatgaagctgccaacggcctgatggccgcctacctggcccaggccggcctggcccgggtcttcatcggcatcaatgacctggagaaggagggcgcctttgtgtacagcgaccacagccccatgaggaccttcaacaagtggaggtctggagagcccaacaatgcctatgatgaggaggactgtgtggagatggtggccagcggcggctggaatgatgtggcctgccacaccaccatgtacttcatgtgtgaatttgacaaggagaacatgtag

SEQ ID NO: 261329 - DNA, 807 bp, Artificial Sequence
  derived and/or modified sequence
atgacccccgccctgtgccggagcagcagcctggccagcaagggcatgagagagcggagggagaccaaagctcctccagacggcctggaggagtcagctccacgggaaaagaagcaatcccagcctgtcgtgacggctagtgacatttcaaaacggaagtgtacctctagtttcgtcgagatgggaagccagggcgacatgggcgataagggccagaaggggagcgttggacgccatggcaagatagggcccatcggctcaaagggggaaaagggggatagcggggacattggtccaccaggccctaacggcgaaccaggtctgccatgcgagtgtagccagcttcgcaaagcgattggtgagatggataaccaggtgagccagctgacgtcagagctgaagttcattaaaaatgcagtcgcaggagtgagggagaccgagtcgaaaatctacctgctagttaaggaggagaaaaggtacgccgatgctcagctctcctgccaggggagagggggcaccctgagcatgcctaaggacgaggccgctaatggactgatggctgcatacctcgcccaggcaggactcgccagagtgttcattggaatcaacgacctggaaaaggagggtgccttcgtttattctgaccatagtccaatgagaaccttcaacaagtggagatcaggggagccgaataatgcttatgacgaggaagattgcgtagagatggttgcgtctggtggatggaacgatgtcgcgtgccacacaacaatgtactttatgtgcgagttcgataaggagaacatgtag

SEQ ID NO: 261330 - DNA, 807 bp, Artificial Sequence
  derived and/or modified sequence
atgactcctgccttgtgcagaagctcctctctcgccagtaaagggatgagagagcgcagagagacaaaggcgccaccagatggtctggaagaaagtgcaccccgtgaaaaaaaacagtctcagcctgtggtaacagctagcgacattagtaagaggaagtgcaccagctccttcgttgagatgggatcacaaggagacatgggagataaaggtcagaagggttcagtggggaggcatggtaagattggtccaatcggaagtaagggggagaaaggtgattccggcgacatcggaccgccaggccctaacggggaacctggcctcccttgtgagtgctcgcagctgcggaaggccattggggagatggataatcaggtatctcagctcacaagcgaactgaagttcatcaaaaacgccgtggctggggttcgtgaaactgaaagcaagatttatttgctggttaaagaggaaaagaggtacgcggatgctcagttatcttgtcagggtcgtggcggaacgctgtccatgccgaaagatgaagctgcaaacggcctgatggcagcctatctggctcaggccggtctggcaagagtctttatcggtatcaatgatctggagaaggaaggcgctttcgtgtatagtgatcactctcctatgaggactttcaacaaatggcggtccggcgagcctaataacgcatacgatgaagaggactgcgtggaaatggtcgcctcaggaggctggaacgatgtggcgtgtcacaccactatgtactttatgtgtgagtttgataaggaaaatatgtag

SEQ ID NO: 261331 - DNA, 1381 bp, Artificial Sequence
  derived and/or modified sequence
cttctccctgcgcctgggactgcggccgcctctctaaatagcagccatgaggcgcctgggggcagtgtcctcgcgggccagcgacgggcaggacgccccgttcgcctagcgcgtgctcaggagttggtgtcctgcctgcgctcaggatgagggggaatctggccctggtgggcgttctaatcagcctggccttcctgtcactgctgccatctggacatcctcagccggctggcgatgacgcctgctctgtgcagatcctcgtccctggcctcaaaggggatgcgggagagaagggagacaaaggcgcccccggacggcctggaagagtcggccccacgggagaaaaagcagtcacagccagtcgtgacagcttctgacatctccaaaaggaagtgcacctcgtcctttgtagaaatgggatcacagggagacatgggggacaaaggacagaaaggcagtgtgggtcgtcatggaaaaattggtcccattggctctaaaggtgagaaaggagattccggtgacataggaccccctggtcctaatggagaaccaggcctcccatgtgagtgcagccagctgcgcaaggccatcggggagatggacaaccaggtctctcagctgaccagcgagctcaagttcatcaagaatgctgtcgccggtgtgcgcgagacggagagcaagatctacctgctggtgaaggaggagaagcgctacgcggacgcccagctgtcctgccagggccgcgggggcacgctgagcatgcccaaggacgaggctgccaatggcctgatggccgcatacctggcgcaagccggcctggcccgtgtcttcatcggcatcaacgacctggagaaggagggcgccttcgtgtactctgaccactcccccatgcggaccttcaacaagtggcgcagcggtgagcccaacaatgcctacgacgaggaggactgcgtggagatggtggcctcgggcggctggaacgacgtggcctgccacaccaccatgtacttcatgtgtgagtttgacaaggagaacatgtgagcctcaggctggggctgcccattgggggccccacatgtccctgcagggttggcagggacagagcccagaccatggtgccagccagggagctgtccctctgtgaagggtggaggctcactgagtagagggctgttgtctaaactgagaaaatggcctatgcttaagaggaaaatgaaagtgttcctggggtgctgtctctgaagaagcagagtttcattacctgtattgtagccccaatgtcattatgtaattattacccagaattgctcttccataaagcttgtgcctttgtccaagctatacaataaaatctttaagtagtgcagtagttaagtccaaa

SEQ ID NO: 261332 - DNA, 807 bp, Artificial Sequence
  derived and/or modified sequence
atgacccccgccctgtgcagaagcagcagcctggccagcaagggcatgagagagagaagagagaccaaggccccccccgacggcctggaggagagcgcccccagagagaagaagcagagccagcccgtggtgaccgccagcgacatcagcaagagaaagtgcaccagcagcttcgtggagatgggcagccagggcgacatgggcgacaagggccagaagggcagcgtgggcagacacggcaagatcggccccatcggcagcaagggcgagaagggcgacagcggcgacatcggcccccccggccccaacggcgagcccggcctgccctgcgagtgcagccagctgagaaaggccatcggcgagatggacaaccaggtgagccagctgaccagcgagctgaagttcatcaagaacgccgtggccggcgtgagagagaccgagagcaagatctacctgctggtgaaggaggagaagagatacgccgacgcccagctgagctgccagggcagaggcggcaccctgagcatgcccaaggacgaggccgccaacggcctgatggccgcctacctggcccaggccggcctggccagagtgttcatcggcatcaacgacctggagaaggagggcgccttcgtgtacagcgaccacagccccatgagaaccttcaacaagtggagaagcggcgagcccaacaacgcctacgacgaggaggactgcgtggagatggtggccagcggcggctggaacgacgtggcctgccacaccaccatgtacttcatgtgcgagttcgacaaggagaacatgtag

SEQ ID NO: 261333 - protein, 1090 aa, Artificial Sequence
  derived and/or modified sequence
MATLLSHPQQRPPFLRQAIKIRRRRVRDLQDPPPQMAPEIQPPSHHFSPEQRALLYEDALYTVLHRLGHPEPNHVTEASELLRYLQEAFHVEPEEHQQTLQRVRELEKPIFCLKATVKQAKGILGKDVSGFSDPYCLLGIEQGVGVPGGSPGSRHRQKAVVRHTIPEEETHRTQVITQTLNPVWDETFILEFEDITNASFHLDMWDLDTVESVRQKLGELTDLHGLRRIFKEARKDKGQDDFLGNVVLRLQDLRCREDQWYPLEPRTETYPDRGQCHLQFQLIHKRRATSASRSQPSYTVHLHLLQQLVSHEVTQHEAGSTSWDGSLSPQAATVLFLHATQKDLSDFHQSMAQWLAYSRLYQSLEFPSSCLLHPITSIEYQWIQGRLKAEQQEELAASFSSLLTYGLSLIRRFRSVFPLSVSDSPARLQSLLRVLVQMCKMKAFGELCPNTAPLPQLVTEALQTGTTEWFHLKQQHHQPMVQGIPEAGKALLGLVQDVIGDLHQCQRTWDKIFHNTLKIHLFSMAFRELQWLVAKRVQDHTTVVGDVVSPEMGESLFQLYISLKELCQLRMSSSERDGVLALDNFHRWFQPAIPSWLQKTYNEALARVQRAVQMDELVPLGELTKHSTSAVDLSTCFAQISHTARQLDWPDPEEAFMITVKFVEDTCRLALVYCSLIKARARELSSGQKDQGQAANMLCVVVNDMEQLRLVIGKLPAQLAWEALEQRVGAVLEQGQLQNTLHAQLQSALAGLGHEIRTGVRTLAEQLEVGIAKHIQKLVGVRESVLPEDAILPLMKFLEVELCYMNTNLVQENFSSLLTLLWTHTLTVLVEAAASQRSSSLASNRLKIALQNLEICFHAEGCGLPPKALHTATFQALQRDLELQAASSRELIRKYFCSRIQQQAETTSEELGAVTVKASYRASEQKLRVELLSASSLLPLDSNGSSDPFVQLTLEPRHEFPELAARETQKHKKDLHPLFDETFEFLVPAEPCRKAGACLLLTVLDYDTLGADDLEGEAFLPLREVPGLSGSEEPGEVPQTRLPLTYPAPNGDPILQLLEGRKGDREAQVFVRLRRHRAKQASQHALRPAP

SEQ ID NO: 261334 - protein, 1142 aa, Artificial Sequence
  derived and/or modified sequence
MATLLSHPQQRPPFLRQAIKIRRRRVRDLQDPPPQMAPEIQPPSHHFSPEQRALLYEDALYTVLHRLGHPEPNHVTEASELLRYLQEAFHVEPEEHQQTLQRVRELEKPIFCLKATVKQAKGILGKDVSGFSDPYCLLGIEQGVGVPGGSPGSRHRQKAVVRHTIPEEETHRTQVITQTLNPVWDETFILEFEDITNASFHLDMWDLDTVESVRQKLGELTDLHGLRRIFKEARKDKGQDDFLGNVVLRLQDLRCREDQWYPLEPRTETYPDRGQCHLQFQLIHKRRATSASRSQPSYTVHLHLLQQLVSHEVTQHEAGSTSWDGSLSPQAATVLFLHATQKDLSDFHQSMAQWLAYSRLYQSLEFPSSCLLHPITSIEYQWIQGRLKAEQQEELAASFSSLLTYGLSLIRRFRSVFPLSVSDSPARLQSLLRVLVQMCKMKAFGELCPNTAPLPQLVTEALQTGTTEWFHLKQQHHQPMVQGIPEAGKALLGLVQDVIGDLHQCQRTWDKIFHNTLKIHLFSMAFRELQWLVAKRVQDHTTVVGDVVSPEMGESLFQLYISLKELCQLRMSSSERDGVLALDNFHRWFQPAIPSWLQKTYNEALARVQRAVQMDELVPLGELTKHSTSAVDLSTCFAQISHTARQLDWPDPEEAFMITVKFVEDTCRLALVYCSLIKARARELSSGQKDQGQAANMLCVVVNDMEQLRLVIGKLPAQLAWEALEQRVGAVLEQGQLQNTLHAQLQSALAGLGHEIRTGVRTLAEQLEVGIAKHIQKLVGVRESVLPEDAILPLMKFLEVELCYMNTNLVQENFSSLLTLLWTHTLTVLVEAAASQRSSSLASNRLKIALQNLEICFHAEGCGLPPKALHTATFQALQRDLELQAASSRELIRKYFCSRIQQQAETTSEELGAVTVKASYRASEQKLRVELLSASSLLPLDSNGSSDPFVQLTLEPRHEFPELAARETQKHKKDLHPLFDETFEFLVPAEPCRKAGACLLLTVLDYDTLGADDLEGEAFLPLREVPGLSGSEEPGEVPQTRLPLTYPAPNGDPILQLLEGRKGDREAQVFVRLRRHRAKQGIGPSVSWPWPICLLAFLFQPLGWGPGSLGPGLQAQSLLEKGEGTLPKMRLQLPWGEGGGHY

SEQ ID NO: 261335 - protein, 944 aa, Artificial Sequence
  derived and/or modified sequence
MATLLSHPQQRPPFLRQAIKIRRRRVRDLQDPPPQMAPEIQPPSHHFSPEQRALLYEDALYTVLHRLGHPEPNHVTEASELLRYLQEAFHVEPEEHQQTLQRVRELEKPIFCLKATVKQAKGILGKDVSGFSDPYCLLGIEQGVGVPGGSPGSRHRQKAVVRHTIPEEETHRTQVITQTLNPVWDETFILEFEDITNASFHLDMWDLDTVESVRQKLGELTDLHGLRRIFKEARKDKGQDDFLGNVVLRLQDLRCREDQWYPLEPRTETYPDRGQCHLQFQLIHKRRATSASRSQPSYTVHLHLLQQLVSHEVTQHEAGSTSWDGSLSPQAATVLFLHATQKDLSDFHQSMAQWLAYSRLYQSLEFPSSCLLHPITSIEYQWIQGRLKAEQQEELAASFSSLLTYGLSLIRRFRSVFPLSVSDSPARLQSLLRVLVQMCKMKAFGELCPNTAPLPQLVTEALQTGTTEWFHLKQQHHQPMVQGIPEAGKALLGLVQDVIGDLHQCQRTWDKIFHNTLKIHLFSMAFRELQWLVAKRVQDHTTVVGDVVSPEMGESLFQLYISLKELCQLRMSSSERDGVLALDNFHRWFQPAIPSWLQKTYNEALARVQRAVQMDELVPLGELTKHSTSAVDLSTCFAQISHTARQLDWPDPEEAFMITVKFVEDTCRLALVYCSLIKARARELSSGQKDQGQAANMLCVVVNDMEQLRLVIGKLPAQLAWEALEQRVGAVLEQGQLQNTLHAQLQSALAGLGHEIRTGVRTLAEQLEVGIAKHIQKLVGVRESVLPEDAILPLMKFLEVELCYMNTNLVQENFSSLLTLLWTHTLTVLVEAAASQRSSSLASNRLKIALQNLEICFHAEGCGLPPKTLPLPASQKSCCGGQGIGPSVSWPWPICLLAFLFQPLGWGPGSLGPGLQAQSLLEKGEGTLPKMRLQLPWGEGGGHY

SEQ ID NO: 261336 - DNA, 3429 bp, Artificial Sequence
  derived and/or modified sequence
atggccaccctgctgagccacccccagcagagaccccccttcctgagacaggccatcaagatcagaagaagaagagtgagagacctgcaggacccccccccccagatggcccccgagatccagccccccagccaccacttcagccccgagcagagagccctgctgtacgaggacgccctgtacaccgtgctgcacagactgggccaccccgagcccaaccacgtgaccgaggccagcgagctgctgagatacctgcaggaggccttccacgtggagcccgaggagcaccagcagaccctgcagagagtgagagagctggagaagcccatcttctgcctgaaggccaccgtgaagcaggccaagggcatcctgggcaaggacgtgagcggcttcagcgacccctactgcctgctgggcatcgagcagggcgtgggcgtgcccggcggcagccccggcagcagacacagacagaaggccgtggtgagacacaccatccccgaggaggagacccacagaacccaggtgatcacccagaccctgaaccccgtgtgggacgagaccttcatcctggagttcgaggacatcaccaacgccagcttccacctggacatgtgggacctggacaccgtggagagcgtgagacagaagctgggcgagctgaccgacctgcacggcctgagaagaatcttcaaggaggccagaaaggacaagggccaggacgacttcctgggcaacgtggtgctgagactgcaggacctgagatgcagagaggaccagtggtaccccctggagcccagaaccgagacctaccccgacagaggccagtgccacctgcagttccagctgatccacaagagaagagccaccagcgccagcagaagccagcccagctacaccgtgcacctgcacctgctgcagcagctggtgagccacgaggtgacccagcacgaggccggcagcaccagctgggacggcagcctgagcccccaggccgccaccgtgctgttcctgcacgccacccagaaggacctgagcgacttccaccagagcatggcccagtggctggcctacagcagactgtaccagagcctggagttccccagcagctgcctgctgcaccccatcaccagcatcgagtaccagtggatccagggcagactgaaggccgagcagcaggaggagctggccgccagcttcagcagcctgctgacctacggcctgagcctgatcagaagattcagaagcgtgttccccctgagcgtgagcgacagccccgccagactgcagagcctgctgagagtgctggtgcagatgtgcaagatgaaggccttcggcgagctgtgccccaacaccgcccccctgccccagctggtgaccgaggccctgcagaccggcaccaccgagtggttccacctgaagcagcagcaccaccagcccatggtgcagggcatccccgaggccggcaaggccctgctgggcctggtgcaggacgtgatcggcgacctgcaccagtgccagagaacctgggacaagatcttccacaacaccctgaagatccacctgttcagcatggccttcagagagctgcagtggctggtggccaagagagtgcaggaccacaccaccgtggtgggcgacgtggtgagccccgagatgggcgagagcctgttccagctgtacatcagcctgaaggagctgtgccagctgagaatgagcagcagcgagagagacggcgtgctggccctggacaacttccacagatggttccagcccgccatccccagctggctgcagaagacctacaacgaggccctggccagagtgcagagagccgtgcagatggacgagctggtgcccctgggcgagctgaccaagcacagcaccagcgccgtggacctgagcacctgcttcgcccagatcagccacaccgccagacagctggactggcccgaccccgaggaggccttcatgatcaccgtgaagttcgtggaggacacctgcagactggccctggtgtactgcagcctgatcaaggccagagccagagagctgagcagcggccagaaggaccagggccaggccgccaacatgctgtgcgtggtggtgaacgacatggagcagctgagactggtgatcggcaagctgcccgcccagctggcctgggaggccctggagcagagagtgggcgccgtgctggagcagggccagctgcagaacaccctgcacgcccagctgcagagcgccctggccggcctgggccacgagatcagaaccggcgtgagaaccctggccgagcagctggaggtgggcatcgccaagcacatccagaagctggtgggcgtgagagagagcgtgctgcccgaggacgccatcctgcccctgatgaagttcctggaggtggagctgtgctacatgaacaccaacctggtgcaggagaacttcagcagcctgctgaccctgctgtggacccacaccctgaccgtgctggtggaggccgccgccagccagagaagcagcagcctggccagcaacagactgaagatcgccctgcagaacctggagatctgcttccacgccgagggctgcggcctgccccccaaggccctgcacaccgccaccttccaggccctgcagagagacctggagctgcaggccgccagcagcagagagctgatcagaaagtacttctgcagcagaatccagcagcaggccgagaccaccagcgaggagctgggcgccgtgaccgtgaaggccagctacagagccagcgagcagaagctgagagtggagctgctgagcgccagcagcctgctgcccctggacagcaacggcagcagcgaccccttcgtgcagctgaccctggagcccagacacgagttccccgagctggccgccagagagacccagaagcacaagaaggacctgcaccccctgttcgacgagaccttcgagttcctggtgcccgccgagccctgcagaaaggccggcgcctgcctgctgctgaccgtgctggactacgacaccctgggcgccgacgacctggagggcgaggccttcctgcccctgagagaggtgcccggcctgagcggcagcgaggagcccggcgaggtgccccagaccagactgcccctgacctaccccgcccccaacggcgaccccatcctgcagctgctggagggcagaaagggcgacagagaggcccaggtgttcgtgagactgagaagacacagagccaagcagggcatcggccccagcgtgagctggccctggcccatctgcctgctggccttcctgttccagcccctgggctggggccccggcagcctgggccccggcctgcaggcccagagcctgctggagaagggcgagggcaccctgcccaagatgagactgcagctgccctggggcgagggcggcggccactactag

SEQ ID NO: 261337 - DNA, 2835 bp, Artificial Sequence
  derived and/or modified sequence
atggccaccctgctgagccacccccagcagagaccccccttcctgagacaggccatcaagatcagaagaagaagagtgagagacctgcaggacccccccccccagatggcccccgagatccagccccccagccaccacttcagccccgagcagagagccctgctgtacgaggacgccctgtacaccgtgctgcacagactgggccaccccgagcccaaccacgtgaccgaggccagcgagctgctgagatacctgcaggaggccttccacgtggagcccgaggagcaccagcagaccctgcagagagtgagagagctggagaagcccatcttctgcctgaaggccaccgtgaagcaggccaagggcatcctgggcaaggacgtgagcggcttcagcgacccctactgcctgctgggcatcgagcagggcgtgggcgtgcccggcggcagccccggcagcagacacagacagaaggccgtggtgagacacaccatccccgaggaggagacccacagaacccaggtgatcacccagaccctgaaccccgtgtgggacgagaccttcatcctggagttcgaggacatcaccaacgccagcttccacctggacatgtgggacctggacaccgtggagagcgtgagacagaagctgggcgagctgaccgacctgcacggcctgagaagaatcttcaaggaggccagaaaggacaagggccaggacgacttcctgggcaacgtggtgctgagactgcaggacctgagatgcagagaggaccagtggtaccccctggagcccagaaccgagacctaccccgacagaggccagtgccacctgcagttccagctgatccacaagagaagagccaccagcgccagcagaagccagcccagctacaccgtgcacctgcacctgctgcagcagctggtgagccacgaggtgacccagcacgaggccggcagcaccagctgggacggcagcctgagcccccaggccgccaccgtgctgttcctgcacgccacccagaaggacctgagcgacttccaccagagcatggcccagtggctggcctacagcagactgtaccagagcctggagttccccagcagctgcctgctgcaccccatcaccagcatcgagtaccagtggatccagggcagactgaaggccgagcagcaggaggagctggccgccagcttcagcagcctgctgacctacggcctgagcctgatcagaagattcagaagcgtgttccccctgagcgtgagcgacagccccgccagactgcagagcctgctgagagtgctggtgcagatgtgcaagatgaaggccttcggcgagctgtgccccaacaccgcccccctgccccagctggtgaccgaggccctgcagaccggcaccaccgagtggttccacctgaagcagcagcaccaccagcccatggtgcagggcatccccgaggccggcaaggccctgctgggcctggtgcaggacgtgatcggcgacctgcaccagtgccagagaacctgggacaagatcttccacaacaccctgaagatccacctgttcagcatggccttcagagagctgcagtggctggtggccaagagagtgcaggaccacaccaccgtggtgggcgacgtggtgagccccgagatgggcgagagcctgttccagctgtacatcagcctgaaggagctgtgccagctgagaatgagcagcagcgagagagacggcgtgctggccctggacaacttccacagatggttccagcccgccatccccagctggctgcagaagacctacaacgaggccctggccagagtgcagagagccgtgcagatggacgagctggtgcccctgggcgagctgaccaagcacagcaccagcgccgtggacctgagcacctgcttcgcccagatcagccacaccgccagacagctggactggcccgaccccgaggaggccttcatgatcaccgtgaagttcgtggaggacacctgcagactggccctggtgtactgcagcctgatcaaggccagagccagagagctgagcagcggccagaaggaccagggccaggccgccaacatgctgtgcgtggtggtgaacgacatggagcagctgagactggtgatcggcaagctgcccgcccagctggcctgggaggccctggagcagagagtgggcgccgtgctggagcagggccagctgcagaacaccctgcacgcccagctgcagagcgccctggccggcctgggccacgagatcagaaccggcgtgagaaccctggccgagcagctggaggtgggcatcgccaagcacatccagaagctggtgggcgtgagagagagcgtgctgcccgaggacgccatcctgcccctgatgaagttcctggaggtggagctgtgctacatgaacaccaacctggtgcaggagaacttcagcagcctgctgaccctgctgtggacccacaccctgaccgtgctggtggaggccgccgccagccagagaagcagcagcctggccagcaacagactgaagatcgccctgcagaacctggagatctgcttccacgccgagggctgcggcctgccccccaagaccctgcccctgcccgccagccagaagagctgctgcggcggccagggcatcggccccagcgtgagctggccctggcccatctgcctgctggccttcctgttccagcccctgggctggggccccggcagcctgggccccggcctgcaggcccagagcctgctggagaagggcgagggcaccctgcccaagatgagactgcagctgccctggggcgagggcggcggccactactag

SEQ ID NO: 261338 - DNA, 3273 bp, Artificial Sequence
  derived and/or modified sequence
atggccaccctactaagccatcctcagcagaggccccctttccttcggcaggctattaagatccggagacgaagggttagggatctgcaggaccctccccctcagatggcccctgaaatacagccaccatctcatcacttttcacccgaacaaagggccctgctgtatgaagacgccttatacactgttctgcaccgactggggcacccagaaccaaatcacgtgacggaggcatctgaactgctacgctacctgcaggaggccttccatgtagaaccagaggaacatcagcaaaccttacaacgggtgagagagctggagaagccgattttttgcctcaaagcgaccgtgaaacaggccaagggcatcctgggaaaagatgtatctgggttttcagacccgtactgtctcctggggattgagcagggagtgggggtccccggcggcagcccagggtctcgccatcggcaaaaagctgtagttcggcacactatcccagaagaggagacccaccgaacacaggtcataacccagaccctgaaccccgtctgggacgagacattcatcttagagttcgaggacattaccaacgcgagtttccacctggatatgtgggacctcgacaccgtggaatccgtgcgccagaagctcggcgaattaactgacttacacggtctccggcgaatctttaaggaggcacggaaggacaagggacaggacgacttcttgggcaatgtggtcctgcggttacaagacttaaggtgccgagaggatcagtggtatccactggagcctaggacggagacttacccagacaggggacagtgtcatctgcagtttcaactcatccataagcgtcgcgcgaccagtgcttcaagatcacagcctagctatacagtacatctgcaccttctgcagcagctggtttctcacgaagtgacacagcacgaagccgggtctaccagttgggacggatctctaagcccacaggcggcaaccgtgttattcttacatgccacccagaaggatctgagtgattttcatcagtcaatggcccagtggctggcatactcacgcctttatcaatcccttgagtttccttcttcatgcctgttacaccccatcacatcaattgagtatcagtggatacaggggcgcctcaaagccgagcagcaggaagagctagctgcttccttttcttccttgctaacgtacggtctgtctttaataaggcgattccgctccgtgtttcctctctcagtgtcagatagccctgcccgcctgcagtctctgttgagggtgctggttcagatgtgtaaaatgaaagccttcggagagctgtgtcctaacactgctcccctaccacagctggtcaccgaggctctgcagaccggcacaactgaatggtttcatctgaagcagcagcatcatcagcccatggtgcaggggattccagaggcaggaaaggcccttttgggtcttgtgcaagacgtgataggagatctccaccaatgccagagaacctgggataaaatcttccacaatacactgaaaattcacttgtttagcatggcctttagggaactgcaatggctcgtggcgaaaagagttcaggaccacactaccgtggtgggcgatgttgtaagccccgaaatgggagagagcctgttccagctctatatatctctgaaggaactgtgccagctccgcatgtcatcctccgagagggatggcgttctggcactggacaacttccatagatggttccagccagccattcctagctggcttcaaaaaacatataatgaagccctggccagagtgcagagagctgtccagatggacgagctagttcctttaggagagctcacaaagcacagcacctccgccgtggatctgtccacatgctttgcccagatttcccacaccgcacgccagctggattggcccgacccagaggaggcattcatgatcacggtcaagttcgttgaagatacttgtaggttggcactggtctattgttcattgatcaaagcccgggctcgcgagcttagttcgggacagaaagaccagggacaggctgctaatatgctttgcgtggtagtcaatgatatggaacagctgcgccttgtgatcgggaaattacccgcgcagctggcttgggaggccctggaacagcgggtaggcgccgtattggagcagggacaacttcagaacacgctgcatgctcaacttcaaagcgcacttgccggcctggggcacgaaatcaggaccggggtccggactctcgctgagcagttagaggtaggaatagcaaagcacattcagaagctggtgggggtgagagagtcggtccttcccgaagacgcaatcttgccactaatgaagtttctcgaagtagagttatgctatatgaacaccaacctggtgcaggaaaatttctcttccctgctgacactcctgtggacacatactttgactgtgctggtagaggctgcggcctcccagagatcgtcatcacttgcctctaatagactcaaaatagcactgcagaatttagaaatttgctttcacgccgagggctgcggtctccccccaaaagcactgcacactgccactttccaggcccttcagagggatctggagttgcaggcggcatcctccagagagttgatccgtaaatacttctgttccagaatccagcagcaagctgaaactacatcggaagagctcggggcagtcacagtgaaggcctcttaccgcgcctctgagcaaaaattgcgggttgagctcctctccgctagctcattactgcctctggattccaatggaagttctgatccctttgtgcagctaaccctcgagcctcggcacgagtttcccgagctcgccgctagggaaacccagaagcacaagaaggatttgcaccctctgttcgacgaaacattcgagttcctggtcccggctgaaccctgtcgaaaggctggggcctgtctgctcctaaccgttctggactacgataccctcggggccgatgatttggagggagaagcctttctgccactgagggaggtgccgggcctgagcggaagtgaagagccgggtgaggtgccacagacccgcctgccgctgacttatcctgcgcccaacggcgacccgattcttcagctcctggagggcaggaaaggagacagggaagcccaggtcttcgtgcgcttgcgccggcaccgcgcaaagcaggccagccaacatgccttaagaccagctccttag

SEQ ID NO: 261339 - DNA, 3429 bp, Artificial Sequence
  derived and/or modified sequence
atggccacacttttgagtcatccccagcagcgaccaccttttctgcgccaggcgatcaagattcggagaaggagggtgcgggatcttcaggatcctccacctcagatggcgcccgagattcagccgccaagccatcatttttcgcccgagcagagggccctactttatgaggatgcactgtataccgtgcttcatcggctgggccaccctgagccaaaccatgtgacagaggcatcagaactcctgcggtacttgcaggaagccttccacgtggaacccgaggagcatcagcagactctccagcgtgtccgggagctggagaagccgattttttgcctcaaggcaacagtgaagcaggctaagggcatcttgggaaaagacgtgagcgggtttagtgatccttactgcctgctggggatcgaacagggggtcggagtgccaggcggaagccccgggagccgtcacaggcaaaaggcagtggtgcggcatacgattcccgaggaagagactcatcgcacacaggtgattacccagactttgaatccggtgtgggatgaaacattcatcctggagttcgaagatatcaccaacgccagcttccatctggacatgtgggacctcgacacagttgaaagcgtgagacagaagctcggcgagctgaccgaccttcacggactgagacgtatcttcaaggaagcccggaaagataagggtcaggacgattttctgggaaatgtggtactacgactgcaggacctgcgatgtcgagaagatcagtggtacccccttgaacctagaacagagacatatcccgacagaggacaatgccacttgcagttccagctgatccacaaacggcgggccacctctgcgtctcggtcgcagcctagttacacggttcacctgcacttactacaacagcttgtgtcccacgaggtgacacagcatgaagcaggctccacttcttgggacgggtctctgtcccctcaggctgccacggttttgttcctccatgcaacccagaaagacttatccgactttcaccaatcaatggcccaatggctggcctattcacgcctgtaccaaagcctcgagtttccctcttcttgcctactgcatcccataacttctatcgaatatcagtggatccagggtcgccttaaggctgaacaacaagaagaacttgcggctagcttctcatccctgctaacttacggtctgtcgctcattcgtcgttttagaagcgtgttccccctgtcagtgagcgactcgcccgcacgcctacaaagcctccttcgggtgcttgtccagatgtgcaagatgaaggcttttggagaactctgccccaacactgcaccccttccacagctggtgaccgaagctctccagaccgggacgaccgaatggtttcacctgaagcagcagcatcaccagcctatggtgcaaggaatccccgaggctggcaaagccttactaggcttagtgcaggatgtcataggagatctgcaccaatgccaacgcacctgggacaagatcttccataacacgttgaagattcacctgttcagtatggcttttagggagctacagtggctcgtggcgaaaagagttcaggatcacaccactgttgtgggagacgtggtttcacctgagatgggggaatctctgtttcaactgtacatatcgttaaaagagttgtgtcagcttcgaatgagcagctccgaaagggatggcgtgctcgccctggacaacttccatagatggttccagcccgccatcccatcatggttacagaaaacctacaatgaggccctggctcgggtgcagcgtgcggtccaaatggacgaattagtgcctctgggggagcttactaagcacagcacctcagcggtcgatcttagtacctgtttcgcacagatcagccataccgcgcggcaactggattggcctgatcctgaggaggcctttatgatcacggtgaagttcgtcgaggatacctgccgcttagccttggtgtactgttccttgatcaaggcacgggccagggagctgtcgagcggccagaaggaccagggtcaggctgctaacatgctctgcgttgtggtcaacgacatggagcagcttagattggtcatcgggaaactcccagcacagctagcctgggaggcgctcgagcagcgcgtgggagctgttctggagcagggccagctgcaaaatactctacacgcacagttgcagagtgccttggccgggctaggacatgaaatccggactggtgttcgcaccctcgccgagcagttggaggttggcatagccaaacacatccagaaactggtgggcgtccgtgaatctgtattgccagaggacgccattttgccactcatgaaattcctcgaagtggagctgtgctacatgaacaccaatctggtccaagagaacttctcttctctcttaaccctgctgtggacccataccctgactgtgctggtggaagctgccgcatcccaacgctcatccagtttggcctctaaccgtcttaaaatcgcactgcagaatctggagatctgtttccacgcagagggatgcggccttccacctaaagcactccatacagccacgttccaagccctgcagagggatctagaactccaggccgcatcttcacgggaactgatacggaaatacttctgctcgaggatccagcaacaagctgaaactacctccgaggagctgggggctgtgaccgtgaaagcgtcctaccgcgcctccgagcagaaactacgtgtggagctcctttccgcttcatcactgctgccgcttgactccaatggatccagtgacccatttgtccagctcacccttgagccacgccatgaattccccgagttggccgctagggagacccaaaagcataaaaaggacctgcacccactgttcgacgagacctttgagtttctcgtacccgccgaaccatgcaggaaagcaggggcctgcctgctgctaacagtgcttgattacgatactcttggcgcagacgatttggagggggaggcctttctgccactgagggaggtccccggcctgagcggctccgaggagcctggcgaggtgcctcagactcgacttcccctcacttacccagcaccaaatggggaccccatattacagcttctggaagggaggaaaggagaccgggaagcacaggtgtttgtcagactgaggcggcaccgggcaaagcaaggcattggcccgagcgtgtcctggccatggccaatctgcctcctcgcctttttgtttcagcctctgggatggggacctgggtcccttggccccgggttgcaagctcaaagcctcctcgaaaagggcgaaggcactctgccaaaaatgagacttcagctgccctggggcgaaggagggggccattattag

SEQ ID NO: 261340 - DNA, 2835 bp, Artificial Sequence
  derived and/or modified sequence
atggccacgctcctgagccacccgcagcagcggccccccttcctccgacaggctataaagatcagaagacgccgggttcgtgatctgcaggatccccccccgcagatggccccagaaatccagccacctagccaccatttctctccggagcagcgcgccctgctgtatgaggacgcactttacactgtgctgcacagactgggccatccggaacccaaccacgttaccgaagctagcgagctactccgttacctccaggaagcatttcacgtggagcctgaagagcaccagcagaccctacaacgagtgcgcgaactggaaaagccgatcttctgtcttaaggccaccgtgaaacaggctaaaggcatcttaggcaaggacgtttcaggcttttccgacccgtactgcctgctgggaattgagcagggcgtgggagtaccgggtggctctccaggcagtagacacaggcaaaaagctgtggtgaggcacacaattccggaggaagaaacccatcgtactcaggtgatcacacagaccctaaatccagtgtgggatgagaccttcatcctggaattcgaggacatcacaaatgcctcatttcatctggatatgtgggacctggacactgtcgagtctgtccggcagaaactgggggaattaactgaccttcacggccttcggcggatatttaaagaagccaggaaagataaggggcaggatgacttcttagggaacgtcgtgctgaggctccaagatctcaggtgcagggaagaccagtggtacccactcgaacctagaaccgaaacatacccagatcgcgggcaatgtcatctgcagtttcagctgattcacaaaaggagagcaactagtgcttcgagatcccagccaagctacaccgttcacctgcacctgctacagcagctcgtgtctcacgaggtgactcagcacgaagccgggtccacatcatgggatggctctctgtcaccgcaggccgctaccgtactgttcctacacgctacccagaaggacctgtccgatttccaccagtctatggcccagtggctggcatattctcgcctgtaccagagtctggagtttcccagctcttgcctgctgcatccgattacatctattgaatatcagtggattcagggcaggctgaaagccgagcagcaagaggaattggctgctagcttcagctccttgcttacgtatggccttagtctgatcagacggtttagaagtgttttccctctgtcagtttccgattcgcccgctagactccaaagcctgttaagagttctcgtgcagatgtgcaagatgaaagcttttggggagctgtgcccgaacacagcaccactacctcaacttgtgactgaggccctgcaaaccggaaccactgaatggttccacttgaagcagcagcaccatcagcccatggtgcagggcattccggaggccggaaaagcattacttgggctggtccaggatgtgatcggcgacttgcatcaatgccagcgaacatgggataaaatattccacaatacacttaaaatccatctgttttcaatggccttcagggaactccagtggctcgtcgcaaagagggtgcaggatcatacaacagtggttggagacgtggtgtcacctgaaatgggtgaaagtctgtttcagctttacattagtttgaaagagctgtgccaactgcgcatgtcctcgagtgagcgagacggagtgctggccctcgataatttccacaggtggtttcaacccgcaattccctcttggttacagaagacatataacgaggccctggctagagttcagagagcagtgcagatggacgagctcgtccccttgggtgagcttacaaaacattcaacgtcagcggttgatttatctacttgcttcgcccagatcagccacacggccagacagctggactggcctgaccctgaggaagcctttatgataacagttaaatttgtggaggacacatgccgcctggcgctcgtgtattgcagcctgatcaaggcgcgtgcccgggagctcagctccggacaaaaagaccaggggcaggctgctaatatgttgtgcgttgtcgttaacgatatggagcaactgcggctggtcattggcaagctgcccgcccagctggcttgggaggccctcgaacaacgggtcggagccgtgctggagcagggtcaactgcagaacacactccacgcccagcttcagtccgctctggccggcctgggccatgaaatccgaacaggagtacggactctggctgaacagctcgaagtcggaatagctaaacatattcaaaagctggtgggagtgagggagtccgtgctccctgaggatgcaatcctgccactgatgaaatttcttgaggttgagctttgctatatgaatactaatttagtgcaagaaaactttagctctttactgaccctactgtggactcacaccttgactgtcctggtggaggccgcagccagtcagcggtccagcagtctggcctccaaccgccttaagattgcgttgcagaaccttgagatctgttttcacgcggaagggtgtggccttccaccgaaaacgctacctttaccagctagtcaaaagagctgctgtggcggtcaagggattggtccctcggtttcttggccctggcccatttgccttctggcgttcctgtttcagcccctgggatggggccctgggtccctcggccccggtcttcaggcccagagcttactggagaaaggagagggaactttgcccaaaatgcgcttacagctaccatggggagagggaggaggacattattag

SEQ ID NO: 261341 - DNA, 3273 bp, Artificial Sequence
  derived and/or modified sequence
atggccaccctgctgagccacccccagcagaggcctcccttcctgcggcaggccatcaagatcagaagaagaagagtgcgggacctgcaggaccccccaccccagatggcccctgagatccagccccccagccaccacttcagccctgagcagagggccctgctgtatgaagatgccctgtacacagtgctgcaccggctgggccaccctgagcccaaccacgtgacagaggccagcgagctgctgcgctacctgcaggaggccttccacgtggagcctgaggagcaccagcagaccctgcagagggtgcgggagctggagaagcccatcttctgcctgaaggccaccgtgaagcaggccaagggcatcctgggcaaggatgtgtctggcttcagtgacccctactgcctgctgggcatcgagcagggcgtgggcgtgcctgggggcagccctggcagccgccaccggcagaaggctgtggtgcgccacaccatccctgaggaggagacccacaggacccaggtgatcacccagaccctgaaccctgtgtgggatgagaccttcatcctggagtttgaggacatcaccaatgccagcttccacctggacatgtgggacctggacacagtggagagcgtgcggcagaagctgggggagctgacagacctgcacggcctgcggcgcatcttcaaggaggccaggaaggacaagggccaggatgacttcctgggcaatgtggtgctgcggctgcaggacctgcgctgccgggaggaccagtggtaccccctggagcccaggacagagacctacccagaccggggccagtgccacctgcagttccagctgatccacaagaggcgggccaccagcgccagccgcagccagcccagctacacagtgcacctgcacctgctgcagcagctggtgtcccatgaggtgacccagcacgaggccggcagcacctcctgggatggcagcctgagcccccaggccgccaccgtgctcttcctgcacgccacccagaaggacctgagtgacttccaccagagcatggcccagtggctggcctacagccggctgtaccagagcctggagttccccagcagctgcctgctgcaccccatcaccagcattgagtaccagtggatccagggccgcctgaaggccgagcagcaggaggagctggccgccagcttcagcagcctgctgacctacggcctgagcctcatccgccgcttccgctctgtgttccccctgtctgtgtctgacagccctgcccggctgcagagcctgctgcgggtgctggtgcagatgtgcaagatgaaggccttcggggagctgtgccccaacacagcccccctgccccagctggtgacagaggccctgcagacaggcaccacagagtggttccacctgaagcagcagcaccaccagcccatggtgcagggcatccctgaggccggcaaggccctgctgggcctggtgcaggatgtgattggagacctgcaccagtgccagaggacctgggacaagatcttccacaacaccctgaagatccacctgttctccatggccttccgggagctgcagtggctggtggccaagagggtgcaggaccacaccaccgtggtgggagatgtggtgtccccagagatgggagagagcctcttccagctgtacatcagcctgaaggagctgtgccagctgaggatgagcagcagcgagagagatggagtgctggccctggacaacttccaccgctggttccagcctgccatccccagctggctgcagaagacctacaatgaggccctggcccgggtgcagagagctgtgcagatggatgagctggtgcccctgggggagctgaccaagcacagcaccagcgctgtggacctgagcacctgctttgcccagatcagccacacagcccggcagctggactggccagaccctgaggaggccttcatgatcaccgtgaagtttgtggaggacacctgccgcctggccctggtgtactgcagcctcatcaaggcccgggcccgggagctgagcagcggccagaaggaccagggccaggccgccaacatgctgtgtgtggtggtgaatgacatggagcagctgcggctggtgattggcaagctgcctgcccagctggcctgggaggccctggagcagagggtgggcgctgtgctggagcagggccagctgcagaacaccctgcacgcccagctgcagagcgccctggccggcctgggccacgagatcagaactggagtgaggaccctggccgagcagctggaggtgggcatcgccaagcacatccagaagctggtgggcgtgcgggagagcgtgctgcctgaagatgccatcctgcccctgatgaagttcctggaggtggagctgtgctacatgaacaccaacctggtgcaggagaacttcagcagcctgctgaccctgctgtggacccacaccctgactgtgctggtggaggccgccgccagccagaggagcagcagcctggccagcaaccggctgaagatcgccctgcagaacctggagatctgcttccacgccgagggctgcggcctgccccccaaggccctgcacacagccaccttccaggccctgcagagggacctggagctgcaggccgccagcagccgggagctgatcaggaagtacttctgcagccgcatccagcagcaggccgagaccaccagcgaggagctgggcgctgtgacagtgaaggccagctaccgggccagcgagcagaagctgcgggtggagctgctgagcgccagcagcctgctgcccctggacagcaatggcagcagtgacccctttgtgcagctgaccctggagcccaggcatgagttccctgagctggccgcccgggagacccagaagcacaagaaggacctgcaccccctgtttgatgagacctttgagttcctggtgcctgctgagccctgcaggaaggccggggcctgcctgctgctgactgtgctggactatgacaccctgggcgcagatgacctggagggggaggccttcctgcccctgcgggaggtgcccggcctgagcggcagcgaggagcccggggaggtgccccagacccggctgcccctgacctacccagcccccaacggggaccccatcctgcagctgctggagggcaggaagggggaccgggaggcccaggtgtttgtgcggctgcggcggcaccgggccaagcaggccagccagcacgccctgcggcctgccccctag

SEQ ID NO: 261342 - DNA, 3429 bp, Artificial Sequence
  derived and/or modified sequence
atggccaccctgctgagccacccccagcagaggcctcccttcctgcggcaggccatcaagatcagaagaagaagagtgcgggacctgcaggaccccccaccccagatggcccctgagatccagccccccagccaccacttcagccctgagcagagggccctgctgtatgaagatgccctgtacacagtgctgcaccggctgggccaccctgagcccaaccacgtgacagaggccagcgagctgctgcgctacctgcaggaggccttccacgtggagcctgaggagcaccagcagaccctgcagagggtgcgggagctggagaagcccatcttctgcctgaaggccaccgtgaagcaggccaagggcatcctgggcaaggatgtgtctggcttcagtgacccctactgcctgctgggcatcgagcagggcgtgggcgtgcctgggggcagccctggcagccgccaccggcagaaggctgtggtgcgccacaccatccctgaggaggagacccacaggacccaggtgatcacccagaccctgaaccctgtgtgggatgagaccttcatcctggagtttgaggacatcaccaatgccagcttccacctggacatgtgggacctggacacagtggagagcgtgcggcagaagctgggggagctgacagacctgcacggcctgcggcgcatcttcaaggaggccaggaaggacaagggccaggatgacttcctgggcaatgtggtgctgcggctgcaggacctgcgctgccgggaggaccagtggtaccccctggagcccaggacagagacctacccagaccggggccagtgccacctgcagttccagctgatccacaagaggcgggccaccagcgccagccgcagccagcccagctacacagtgcacctgcacctgctgcagcagctggtgtcccatgaggtgacccagcacgaggccggcagcacctcctgggatggcagcctgagcccccaggccgccaccgtgctcttcctgcacgccacccagaaggacctgagtgacttccaccagagcatggcccagtggctggcctacagccggctgtaccagagcctggagttccccagcagctgcctgctgcaccccatcaccagcattgagtaccagtggatccagggccgcctgaaggccgagcagcaggaggagctggccgccagcttcagcagcctgctgacctacggcctgagcctcatccgccgcttccgctctgtgttccccctgtctgtgtctgacagccctgcccggctgcagagcctgctgcgggtgctggtgcagatgtgcaagatgaaggccttcggggagctgtgccccaacacagcccccctgccccagctggtgacagaggccctgcagacaggcaccacagagtggttccacctgaagcagcagcaccaccagcccatggtgcagggcatccctgaggccggcaaggccctgctgggcctggtgcaggatgtgattggagacctgcaccagtgccagaggacctgggacaagatcttccacaacaccctgaagatccacctgttctccatggccttccgggagctgcagtggctggtggccaagagggtgcaggaccacaccaccgtggtgggagatgtggtgtccccagagatgggagagagcctcttccagctgtacatcagcctgaaggagctgtgccagctgaggatgagcagcagcgagagagatggagtgctggccctggacaacttccaccgctggttccagcctgccatccccagctggctgcagaagacctacaatgaggccctggcccgggtgcagagagctgtgcagatggatgagctggtgcccctgggggagctgaccaagcacagcaccagcgctgtggacctgagcacctgctttgcccagatcagccacacagcccggcagctggactggccagaccctgaggaggccttcatgatcaccgtgaagtttgtggaggacacctgccgcctggccctggtgtactgcagcctcatcaaggcccgggcccgggagctgagcagcggccagaaggaccagggccaggccgccaacatgctgtgtgtggtggtgaatgacatggagcagctgcggctggtgattggcaagctgcctgcccagctggcctgggaggccctggagcagagggtgggcgctgtgctggagcagggccagctgcagaacaccctgcacgcccagctgcagagcgccctggccggcctgggccacgagatcagaactggagtgaggaccctggccgagcagctggaggtgggcatcgccaagcacatccagaagctggtgggcgtgcgggagagcgtgctgcctgaagatgccatcctgcccctgatgaagttcctggaggtggagctgtgctacatgaacaccaacctggtgcaggagaacttcagcagcctgctgaccctgctgtggacccacaccctgactgtgctggtggaggccgccgccagccagaggagcagcagcctggccagcaaccggctgaagatcgccctgcagaacctggagatctgcttccacgccgagggctgcggcctgccccccaaggccctgcacacagccaccttccaggccctgcagagggacctggagctgcaggccgccagcagccgggagctgatcaggaagtacttctgcagccgcatccagcagcaggccgagaccaccagcgaggagctgggcgctgtgacagtgaaggccagctaccgggccagcgagcagaagctgcgggtggagctgctgagcgccagcagcctgctgcccctggacagcaatggcagcagtgacccctttgtgcagctgaccctggagcccaggcatgagttccctgagctggccgcccgggagacccagaagcacaagaaggacctgcaccccctgtttgatgagacctttgagttcctggtgcctgctgagccctgcaggaaggccggggcctgcctgctgctgactgtgctggactatgacaccctgggcgcagatgacctggagggggaggccttcctgcccctgcgggaggtgcccggcctgagcggcagcgaggagcccggggaggtgccccagacccggctgcccctgacctacccagcccccaacggggaccccatcctgcagctgctggagggcaggaagggggaccgggaggcccaggtgtttgtgcggctgcggcggcaccgggccaagcagggcatcggccccagcgtgtcctggccctggcccatctgcctgctggccttcctgttccagcccctgggctggggccctggcagcctgggccctggcctgcaggcccagagcctgctggagaagggggagggcaccctgcccaagatgaggctgcagctgccctggggcgagggcggcggccactactag

SEQ ID NO: 261343 - DNA, 2835 bp, Artificial Sequence
  derived and/or modified sequence
atggccaccctgctgagccacccccagcagaggcctcccttcctgcggcaggccatcaagatcagaagaagaagagtgcgggacctgcaggaccccccaccccagatggcccctgagatccagccccccagccaccacttcagccctgagcagagggccctgctgtatgaagatgccctgtacacagtgctgcaccggctgggccaccctgagcccaaccacgtgacagaggccagcgagctgctgcgctacctgcaggaggccttccacgtggagcctgaggagcaccagcagaccctgcagagggtgcgggagctggagaagcccatcttctgcctgaaggccaccgtgaagcaggccaagggcatcctgggcaaggatgtgtctggcttcagtgacccctactgcctgctgggcatcgagcagggcgtgggcgtgcctgggggcagccctggcagccgccaccggcagaaggctgtggtgcgccacaccatccctgaggaggagacccacaggacccaggtgatcacccagaccctgaaccctgtgtgggatgagaccttcatcctggagtttgaggacatcaccaatgccagcttccacctggacatgtgggacctggacacagtggagagcgtgcggcagaagctgggggagctgacagacctgcacggcctgcggcgcatcttcaaggaggccaggaaggacaagggccaggatgacttcctgggcaatgtggtgctgcggctgcaggacctgcgctgccgggaggaccagtggtaccccctggagcccaggacagagacctacccagaccggggccagtgccacctgcagttccagctgatccacaagaggcgggccaccagcgccagccgcagccagcccagctacacagtgcacctgcacctgctgcagcagctggtgtcccatgaggtgacccagcacgaggccggcagcacctcctgggatggcagcctgagcccccaggccgccaccgtgctcttcctgcacgccacccagaaggacctgagtgacttccaccagagcatggcccagtggctggcctacagccggctgtaccagagcctggagttccccagcagctgcctgctgcaccccatcaccagcattgagtaccagtggatccagggccgcctgaaggccgagcagcaggaggagctggccgccagcttcagcagcctgctgacctacggcctgagcctcatccgccgcttccgctctgtgttccccctgtctgtgtctgacagccctgcccggctgcagagcctgctgcgggtgctggtgcagatgtgcaagatgaaggccttcggggagctgtgccccaacacagcccccctgccccagctggtgacagaggccctgcagacaggcaccacagagtggttccacctgaagcagcagcaccaccagcccatggtgcagggcatccctgaggccggcaaggccctgctgggcctggtgcaggatgtgattggagacctgcaccagtgccagaggacctgggacaagatcttccacaacaccctgaagatccacctgttctccatggccttccgggagctgcagtggctggtggccaagagggtgcaggaccacaccaccgtggtgggagatgtggtgtccccagagatgggagagagcctcttccagctgtacatcagcctgaaggagctgtgccagctgaggatgagcagcagcgagagagatggagtgctggccctggacaacttccaccgctggttccagcctgccatccccagctggctgcagaagacctacaatgaggccctggcccgggtgcagagagctgtgcagatggatgagctggtgcccctgggggagctgaccaagcacagcaccagcgctgtggacctgagcacctgctttgcccagatcagccacacagcccggcagctggactggccagaccctgaggaggccttcatgatcaccgtgaagtttgtggaggacacctgccgcctggccctggtgtactgcagcctcatcaaggcccgggcccgggagctgagcagcggccagaaggaccagggccaggccgccaacatgctgtgtgtggtggtgaatgacatggagcagctgcggctggtgattggcaagctgcctgcccagctggcctgggaggccctggagcagagggtgggcgctgtgctggagcagggccagctgcagaacaccctgcacgcccagctgcagagcgccctggccggcctgggccacgagatcagaactggagtgaggaccctggccgagcagctggaggtgggcatcgccaagcacatccagaagctggtgggcgtgcgggagagcgtgctgcctgaagatgccatcctgcccctgatgaagttcctggaggtggagctgtgctacatgaacaccaacctggtgcaggagaacttcagcagcctgctgaccctgctgtggacccacaccctgactgtgctggtggaggccgccgccagccagaggagcagcagcctggccagcaaccggctgaagatcgccctgcagaacctggagatctgcttccacgccgagggctgcggcctgccccccaagaccctgcccctgcctgccagccagaagagctgctgcggcggccagggcatcggccccagcgtgtcctggccctggcccatctgcctgctggccttcctgttccagcccctgggctggggccctggcagcctgggccctggcctgcaggcccagagcctgctggagaagggggagggcaccctgcccaagatgaggctgcagctgccctggggcgagggcggcggccactactag

SEQ ID NO: 261344 - DNA, 3273 bp, Artificial Sequence
  derived and/or modified sequence
atggccaccctgctgagccacccccagcagcggccccccttcctgcgacaggccattaaaatcaggagaagacgggttcgcgacttacaggatcccccgccccaaatggcacccgagatccagccgccatcccaccacttcagtcccgagcaaagagctcttctctatgaagacgctctgtacacggtccttcaccgattagggcaccccgagcctaaccatgttacagaggcctccgagttgctccgatatctgcaagaggctttccacgtagaacccgaagaacatcagcagaccctgcaacgcgtccgtgaactggaaaagccaatcttttgcctgaaggccactgtcaagcaggctaagggaattctcgggaaggacgtgtcggggttctctgacccctactgcctgcttggcattgagcaaggggtaggagtcccgggcggctcccctggctcgcgacaccgccagaaggccgtcgttaggcacactattcctgaggaggagacccatcggacccaggtgattacacaaactctgaatcctgtgtgggacgagactttcatcttggagttcgaagatatcacaaatgcgagcttccatctcgatatgtgggatctggatacagtcgagagcgtgagacaaaaattgggcgagctgacagatctacacgggctgcgtcgcatttttaaggaagcaagaaaggacaagggacaagacgacttcttggggaacgtcgtactgcggctgcaggatttgcggtgtcgggaagatcagtggtaccctcttgaacctcggactgagacctatcccgataggggtcaatgtcatcttcaatttcagcttattcataaacgcagagccaccagcgcgtcaagatcccagccgagctacaccgttcacttgcacctactgcagcaactggtcagtcatgaagtgacacaacatgaagcgggaagtaccagctgggatgggagtcttagccctcaggctgccacggtgctgtttctgcacgccacgcagaaggacctcagtgactttcatcagtcgatggcgcagtggctggcttactcccggttatatcagagcctggagttcccatccagctgtttattacaccctattacatccattgagtaccaatggatccagggaagactgaaggccgagcagcaggaggaactggcagcctctttcagctccctgctgacttacggtctcagtcttatccgccggtttaggtctgtgttcccattgtccgtctccgattcacctgcgcggctgcagtcactgctgagagtcctggtccagatgtgcaagatgaaggcttttggtgagctttgtcccaacacagctccactccctcagcttgttaccgaagccttgcagacggggacaacggagtggttccacctgaagcagcagcaccatcagcctatggtacagggcatccccgaggccggcaaagcgctgttagggttggttcaggatgtgattggggatttgcatcaatgtcagcgcacctgggataagatcttccataacacgctgaagatacacttatttagcatggcctttcgagagctgcagtggctggtggctaaacgtgtccaggaccatacaaccgttgtcggcgatgtagtaagcccagaaatgggtgagtcactgtttcaattatatatctcacttaaagagctgtgccagctgcggatgtcgagcagcgagcgggatggcgtcttagccctggacaatttccacagatggtttcaacctgctatcccttcttggctgcagaagacctataatgaggcactggcgcgagtccaacgtgccgtccaaatggacgaactggtcccacttggagagctgacaaaacactccacatctgccgtggatttgagcacctgcttcgctcagatctcgcatactgccagacagctggattggcccgatccagaagaagcatttatgatcactgtaaaattcgtagaggatacctgccgattagcgctcgtgtattgctccctcattaaagccagagccagagagctctcttctgggcagaaggatcaggggcaagctgccaatatgctgtgcgttgtagttaacgatatggagcagttgcggctggttatcgggaagttgcccgctcagctcgcctgggaagctcttgaacagagagtcggcgctgtccttgagcaggggcagctgcagaatactttgcacgcccaactgcagagcgcactggctgggttaggccacgagatcagaaccggcgtgaggactctggcagagcagttggaggtgggcattgccaagcatattcaaaagctcgtgggtgttagggagtccgtgctccccgaggacgcaattctgccactgatgaagttcttggaggtagagctctgttatatgaacaccaatctagtccaggagaacttcagcagtctgctgactctgctatggactcacaccctaacagtactggtagaagctgccgcaagccagagaagttccagcctagccagtaacaggctaaaaattgccctccagaatcttgagatctgcttccacgctgagggctgcggcctcccccctaaagccctccataccgccactttccaagcactccagcgggatctggaactgcaggcagccagctctcgggagctgattaggaagtatttttgctctagaatccaacagcaggccgaaactacctctgaggagttgggtgctgttacagtcaaggcgtcatatcgggcatctgagcagaaactaagagtcgaactgctcagcgcaagcagtctgctgcctctggactcaaacggatccagtgatccttttgtccagcttactctggagccccgacacgagtttccggagttagctgctagggagacacagaagcataaaaaggacttgcatcccctgtttgatgagacattcgagttcttagtgccggcggagccgtgtcgcaaggctggagcatgtctgctgctcacagtgctcgactatgacacgctcggggccgacgatctggaaggcgaggctttcttgccactcagagaggtgcccggccttagcggcagtgaagagcccggagaggtgccccagactcgccttccattgacatacccggcacctaacggagaccccatcttacagctcttagagggacggaagggagacagagaagcacaggtgttcgtgagattaaggcgccaccgagcaaagcaggccagccaacacgctctccgaccagcaccgtag

SEQ ID NO: 261345 - DNA, 3429 bp, Artificial Sequence
  derived and/or modified sequence
atggccaccctgctgagccacccccagcagcggccccccttcctgagacaggctataaagatcagaagaaggagggtgagggacctacaggaccccccccctcagatggcaccggaaattcagcctccatcgcatcatttttctcctgagcaaagagcactactttatgaggatgcgttgtacaccgtcctgcaccgcttgggacatccagagccaaaccacgtgaccgaggcctctgagctgctccgctatctgcaggaggcctttcatgtggagcctgaagaacaccagcaaacgcttcaacgtgtcagggaactggaaaagccaattttttgtctcaaagccaccgttaagcaggccaaaggtatcctggggaaagacgtgagcggtttcagtgatccatattgcttgctcgggatcgagcaaggggtgggagtccctggcgggtcacctgggagccggcaccggcaaaaggcagtggtgcgtcacactatccccgaggaagaaacacatcgaacccaggttataacccaaaccctgaaccccgtgtgggatgaaacattcatactcgagttcgaagacattacaaacgcatcatttcatctggacatgtgggatctggatactgtcgaaagtgtgcgtcagaaactgggagagctgacagacctccacggtctccggcgaatcttcaaagaggccagaaaggacaagggccaggacgacttccttggaaatgtggtcctgaggctgcaggaccttcgctgccgggaagatcagtggtaccctctggagcccaggaccgagacctaccctgaccggggacagtgtcacctgcaattccagctcatccacaagcgtcgggcgacctcggctagccgcagccagccgagttacacagtgcatctgcatctattgcagcagctcgtcagccatgaggtcacacagcatgaagccggaagtacttcttgggatggcagtctgtccccacaggcagccactgtgctgttcctccatgccactcagaaagatctgtccgacttccatcagtcaatggcacagtggctcgcttattctcgcctgtatcagtctctggagttcccgtccagttgcctgttgcaccccattacaagtattgagtatcaatggatacaggggcgactgaaagccgagcagcaggaggagctcgccgcctcatttagcagtctcctaacctacggcctctctttgattaggcgcttcaggtctgtgtttcctttgtccgtgagtgatagtccagcgcggctgcaatccctcctgagggtcttagtgcagatgtgtaagatgaaagcctttggcgaactgtgccctaacaccgctccccttccgcagctcgtgacagaggcactgcagacggggaccaccgaatggttccacctgaagcagcagcatcatcagcctatggtgcagggtatccctgaagctggaaaagctctgcttgggttggtccaggacgttatcggagatttgcaccaatgccagcgcacatgggacaagatatttcacaatacactgaagatccacctgttcagcatggccttccgtgagctgcaatggttggtcgctaagagggtgcaggatcataccaccgtggtaggggatgtcgtgtccccagagatgggagaatcactctttcagctatatattagcttaaaagagctctgccagctgcgtatgtcctccagtgagagggatggggtccttgcgctcgataacttccataggtggttccaacccgcaatcccctcctggttacagaaaacctacaatgaggccctggcccgggtgcagagagcagtacaaatggacgagctcgtccctcttggggagttgaccaagcacagcacttcagccgtagatctctcaacctgttttgcccagatctcccatactgcgaggcagctcgactggcccgacccagaagaagctttcatgataaccgtcaaattcgtggaagatacgtgcaggcttgccctggtgtactgctccctgatcaaggcccgcgcaagggaactgtcctctggtcagaaagatcagggccaggccgcaaatatgctctgtgtagtcgtgaatgatatggagcagctgagactggtaataggcaaactgccagcccagttggcttgggaagcccttgagcaacgtgtcggagccgtcctagaacaagggcagcttcaaaacacacttcacgctcagttacagtctgccttggccggtctggggcatgaaattcggaccggagtccgaaccctagctgaacagctggaagttgggatcgctaagcatattcagaagttggtgggtgtccgcgaatccgtcctccctgaggacgctatcctgccccttatgaaatttctggaggttgagctctgttatatgaacactaatctcgttcaggagaatttctccagcctgttaactctgttatggacccacacattaacagtgctggtcgaagctgccgcaagccagcggtcctcatccctggcatctaatcgcctaaagattgccctgcagaacctagaaatctgctttcacgccgaaggctgcggactaccccctaaggcccttcatacggcaactttccaggccttgcaaagagaccttgaactccaggccgcctcctctcgcgagctgatccgtaaatatttttgcagtagaattcagcagcaggccgaaactacttctgaagagctcggggcagtgactgtgaaggcctcatatagggcatccgagcaaaagcttcgtgttgaattattgtccgcctcctctctcctgcccctggattccaatggatctagcgacccttttgtgcaactgacattggagcctagacacgagtttcctgaattagcagctagagagactcagaaacataagaaagatctgcatcccctgttcgatgagacttttgagtttcttgtccctgctgaaccctgccgcaaggccggcgcatgcctgcttctgactgtacttgattatgatacactgggagcggatgacctggagggcgaggcctttctgccattgcgggaagtcccaggcctcagtggctctgaagaaccgggggaagtgcctcagacccgcctgcctctcacctatcccgctcccaacggagacccgatactgcagttattagaagggcggaagggagatagggaagcgcaggtgtttgtcagactgcggcggcatcgagctaagcaggggatcggtccttctgtatcctggccttggcctatttgtttattagcatttctgtttcagccactgggctggggaccaggcagcctcgggcctggattgcaggcacagtcacttttggagaagggcgagggcacgctgcccaaaatgcgacttcagttgccctggggtgagggaggagggcattactag

SEQ ID NO: 261346 - DNA, 2835 bp, Artificial Sequence
  derived and/or modified sequence
atggccaccctgctgagccacccccagcagcggccccccttcctgaggcaggcaattaagattcggcggcgaagggtgagagatcttcaggacccgccccctcagatggcaccagagattcaaccgccctctcatcacttctcccctgagcagagagcccttctgtatgaggatgccctgtatactgtcttgcacagacttggacacccggagcccaatcacgtgacggaggcatccgaactcttaagatacctccaggaagcttttcacgtagagcccgaggagcatcagcagactctccagcgagttagggagttggaaaagccaattttttgcctgaaggccactgtgaaacaagcgaagggtatccttgggaaagatgttagcggctttagtgatccatactgtctgttgggcatagagcagggcgtaggcgtgcctggtggttcccctggctcccgccacagacagaaagcggtggttcgtcacactatccccgaagaggagactcatagaacccaggtcattacacagaccttgaacccagtctgggacgagacatttatcctggagttcgaggatatcacaaatgcaagctttcacttggatatgtgggacctagataccgtggagagtgttagacagaaattaggcgagctaacagacttgcacgggcttagaaggatattcaaggaagcccgcaaggacaagggacaggatgactttctgggcaacgtggttttaaggttgcaagacctgcggtgtagagaggaccagtggtaccctcttgagccgcggacagaaacatatcccgataggggccagtgccacctgcagtttcagctaattcacaagaggcgcgccacctccgcctcccggtcgcagccttcctacacagtccacctgcacctccttcagcaacttgtgtctcacgaagtgacacagcacgaagctggtagtactagctgggacggaagcctcagccctcaggcagctacagttctgttcctgcacgccacccagaaggatctcagcgacttccatcagtccatggcgcaatggctggcctattcacgcttgtaccagagcctcgagttcccgtcatcttgtctgctccaccccatcacttccatcgagtatcagtggatccagggcagactgaaagctgagcagcaggaagaactcgccgcatctttctcctctctgcttacttatggattgagtctgatcaggaggttccgctcagtgtttccgttgtccgtcagcgactcaccagccaggctccagtcccttctgcgtgtgttggtgcagatgtgcaagatgaaggcctttggggagctgtgccccaataccgccccgctgccgcaactcgtgactgaagccctgcagaccgggaccacagaatggtttcacctaaagcaacaacaccaccaacccatggtgcagggaattccagaggcaggaaaagcactgctagggttggtgcaggatgtcattggtgacttacatcagtgtcagcgaacatgggataagatcttccacaatacactgaagattcacctattttccatggctttccgagaattgcaatggttggttgctaagagggtgcaggaccataccacagtggtgggagacgtcgtgtctcctgagatgggtgaaagtttgttccaactttacatcagtctaaaggaattatgccagttacggatgtcctcatctgagcgcgatggagtgctggctctggacaatttccaccgctggttccagcccgccatcccatcatggctgcagaagacatataacgaggctctcgcacgtgttcagcgtgccgtgcagatggacgagctggttcccctcggagagctgaccaagcactctacatccgctgttgacctgtctacctgttttgcccagatctcacatactgcaagacagttagactggccggaccccgaagaagctttcatgatcactgttaagttcgttgaggatacatgccgtctggcacttgtgtactgctccctgatcaaggcgagagctcgcgaactctcttccggccagaaagatcagggccaggccgccaacatgctgtgcgtcgtggtaaatgacatggagcagttacggctggtgatcgggaagctaccagcgcagctggcttgggaggccttggagcaacgggtcggagcagtgctcgaacagggtcagctccaaaacaccctgcatgcgcagctgcaatctgcgttggccgggcttgggcatgagatcaggaccggggttaggacgttggccgagcaactagaggtcggcatcgccaaacatatacagaaactggtcggagttcgcgaatcagtgctgcccgaggatgctatcctccctctgatgaaatttttggaggtcgaactttgttacatgaacaccaatctggtccaagaaaacttttctagtctgctgactctgctgtggactcatacacttactgtgctcgtcgaagccgccgccagtcagcgttccagctcattggctagtaacaggctcaaaatagcactgcagaatctggaaatttgtttccacgccgagggctgtggcctgcccccaaaaaccctgccacttcctgcctcacagaaatcttgttgcggaggccaggggatcggcccgagcgtgtcttggccatggccaatttgtttgctggctttcctattccagcccttagggtggggccctggctctctcggccctggcctccaagctcagtcgcttctggagaagggtgaaggaacgctgcctaaaatgaggctccagttaccctggggagaaggagggggacattactag

SEQ ID NO: 261347 - DNA, 3273 bp, Artificial Sequence
  derived and/or modified sequence
atggccaccttgctctcacaccctcaacagaggcctcctttcctgagacaagccatcaagatccgccgaagaagggtaagagatttacaggatcccccaccccagatggcccctgagattcaacctccctcccaccatttttcgccagagcagcgggcactcctatacgaggacgcgctgtacacagttctgcatagacttggtcaccctgagcctaatcatgtaactgaagcctccgaactgttgagatatttgcaggaggccttccacgtagagcccgaagaacaccagcagaccctccaacgggtgcgagagctggaaaagcctattttttgcctgaaggccactgtgaagcaagccaagggaattcttgggaaggacgtgtccggctttagcgacccatattgcctcttgggtatcgagcaaggcgttggggtgccagggggaagtccaggatctaggcaccgccaaaaggcagtagtcagacacacaattccagaggaagagacccataggacacaggtcatcacgcaaacgctcaatcctgtctgggatgagaccttcatcctggaatttgaagatatcacaaacgcttcctttcacctggatatgtgggacctggacacagtggaaagtgtacgccagaagctgggagaactcacagatctgcacggcttaagacgcattttcaaggaggctaggaaagacaagggacaggatgactttcttggtaacgtggttctgcggttacaggacctgcgctgcagggaagatcaatggtaccctctcgaacctagaaccgagacgtatccagacagaggacagtgtcacctgcaatttcagctcatccataaacgcagagccacaagcgcctcaaggtcccagccatcctacaccgtgcacctgcacctactgcagcagctggtgtcacatgaagtaacccagcacgaggcagggtctacctcatgggatggctcactgagtccacaggctgccacagtcctgtttctgcacgccactcagaaggatctttcagattttcaccagtcaatggcgcaatggctggcctacagtcgcctttaccagagtctggaatttccatcgagttgcttgcttcatccaatcacctctattgaatatcagtggatccagggtcggctgaaggccgaacaacaggaggagttagccgctagttttagcagtctgttgacctatgggttgtcactcattaggcgcttccgctccgtgtttccgctcagcgtgtctgacagcccagccagacttcagtctcttctcagagtgctggtgcaaatgtgtaaaatgaaggcattcggagagctgtgcccaaacactgcacccctgccccaacttgttacggaagcccttcaaacagggaccacagaatggttccaccttaagcagcagcaccaccagcccatggtccagggtatccctgaagcgggtaaagctctcctgggattagtacaggacgtgatcggtgacttgcaccaatgccagaggacctgggacaaaattttccacaacacccttaagattcatttattttccatggctttccgagagctccagtggctcgtagctaagcgggtccaggaccataccacagtggtaggcgatgttgtcagccccgagatgggagagtcactgtttcagctctacatatctctgaaggaactctgccagctacggatgtcgagctccgagagggacggggtgttggcacttgataattttcataggtggttccagcctgctattccttcttggctccagaagacctataatgaagcactggcccgtgtacaaagagccgtgcagatggatgaattagtcccgctcggcgaacttacaaagcacagcacttctgccgtggacctcagcacttgttttgcgcaaatttcgcacaccgctaggcagctggattggcccgatcctgaagaggcctttatgattactgttaaattcgtggaagatacctgtcgtctggctctagtctactgctctctaattaaagccagggctagagagttgtcgtctgggcagaaagaccagggccaggctgcaaacatgctgtgcgtggtggtaaacgatatggaacagctccggctcgtaattgggaagctgccagcgcaacttgcatgggaagccctagagcagagggtgggggcagtgcttgaacagggacagctacagaacacactccatgcccagttgcaaagcgccctggcagggctgggacatgagatcaggactggggttcggacccttgctgaacaactcgaggtcggaatcgccaagcatatccaaaagttggtgggagttagggagtctgtactcccggaggatgccatactccctctcatgaaattcctggaggtcgagctgtgctatatgaacacaaatctggttcaagagaattttagtagtctgctgacactgttgtggactcatactctgaccgtgcttgttgaagcagctgcatcacaacgcagctcgtcccttgccagcaacagacttaaaatagccttgcaaaatctcgaaatctgtttccacgcagaaggatgtggactcccccctaaagccttacacacagctacattccaggcccttcagcgtgatctcgaactgcaggcggcatcctcaagagaactcatacgaaaatatttttgtagccgaatccagcagcaggcagaaaccacctccgaggagcttggcgcagtgaccgtcaaagccagttaccgcgcatcagaacaaaagctaagagtcgagttattaagcgcgtcgagcctgcttcctctcgattccaatggtagttctgatccatttgtacaactaacactcgagcctaggcacgaattccccgaacttgctgctcgcgaaacccagaagcacaagaaagatctgcacccgctcttcgatgagacctttgagtttctagtaccagcagaaccctgcagaaaggcaggcgcatgtttactcctcaccgtgctggattacgacaccctaggtgccgacgaccttgaaggcgaggcatttctgcccctccgggaagtcccaggcctcagtgggtcagaggagccgggagaggtgccccagacgaggctgccattaacctatcccgctcccaacggtgacccgattctacagttgctggaaggtaggaaaggcgatagggaggcacaggtctttgtgagactcaggcgtcacagggccaaacaggcttcccagcacgccctgcggccagcgccatag

SEQ ID NO: 261348 - DNA, 3429 bp, Artificial Sequence
  derived and/or modified sequence
atggccacactcctttctcatcctcagcagcgacctccgtttctgaggcaggcgataaagattcgacggaggcgagtgagagatctgcaggatccacccccacaaatggctcctgaaattcagcccccatcacaccactttagccctgagcagcgagccctcctttacgaggacgccctgtataccgtcttacacaggctgggccaccctgaacctaaccatgtcactgaagcaagcgagctcctgcggtaccttcaagaagccttccacgttgagcccgaggaacaccagcaaaccttgcagagggtacgggaactagaaaaacccattttctgcctgaaggccactgttaaacaggcaaaagggatcctgggcaaggatgtgtcaggcttttctgatccgtattgcctccttgggattgaacagggggtgggtgttcccggaggcagccccggtagcagacacagacagaaggctgtggtgagacatactatcccagaggaggagacccatagaacccaggtgatcacccaaacattaaatccagtgtgggacgagacctttatcctcgaatttgaagacataaccaacgctagtttccacctggacatgtgggacttggataccgttgagagcgtgcgccagaaactcggggagttaacagatctgcatggattgcgacgtatctttaaggaggccagaaaggataagggccaagatgatttcctaggcaacgttgtattaagactgcaggacctgcgatgtagggaagaccagtggtatccgctggaaccacggactgagacgtacccggatcgtggccaatgccatcttcagttccaactgattcataagagaagggccaccagcgcctcacgctcgcagccgagctacactgtccacctccacctgttgcagcaattagtatctcatgaggtgacccagcatgaggctggaagcacaagctgggacggaagcctgtctcctcaggcagccaccgttctgtttctgcacgctacccagaaggatctgtcagatttccaccagagcatggcacaatggttggcctacagcagactttatcaatccctggaattcccttctagttgtctgcttcacccaatcacatccatcgagtatcagtggatccagggacgtctgaaagcagaacaacaggaagagttggccgcttctttttcatctctcttaacctacggcctctctctgatcaggcggttcaggagtgtttttcccctttctgtaagtgactctccagccagactgcaatcactgctcagagtgttggtacagatgtgtaagatgaaggcgttcggcgaactgtgccccaatactgctccactgccgcaactagttaccgaggccttacaaactggaactacagaatggttccacctgaaacaacaacatcaccaaccgatggtgcagggtatacccgaggcagggaaggcgttgcttgggctcgtgcaggacgtcattggcgacctccatcaatgtcagcgtacatgggacaaaatctttcataatactctgaagatacatctgttctctatggcgttcagggaactccagtggctggtagccaagcgcgtccaggaccatactacagttgtaggcgatgtggtctccccggagatgggggaaagcctgttccagctttacatatctctcaaagaattatgtcaactgagaatgagctcaagcgaacgcgacggcgtgttagcactcgacaatttccacaggtggttccaacccgcaatacccagttggttacaaaagacttacaatgaggctctggctagggttcagcgggcagtccagatggacgagctcgtcccactgggagagttgacgaagcatagcacaagcgctgttgatttgtccacatgcttcgcacagattagccataccgctcggcaactcgattggcctgatcctgaggaggcattcatgataactgtgaaatttgtggaggacacgtgtagactggccctagtgtattgttcactgattaaggctagagctcgggaattatcctccggccaaaaagatcagggtcaggcagctaacatgctttgtgtggtggttaacgacatggaacagttacgcctcgttataggcaagcttccagcccaactcgcctgggaggcactcgaacagagagttggcgcagtgctcgagcaaggccagctccagaatacactccacgcccagctgcagagcgccctggccggtctgggccatgaaattaggactggggtccggactctggccgaacagttagaggtcggaatcgccaagcacattcaaaaactcgtgggagtacgcgaatcagtgctcccagaggacgccatcctacccctcatgaagtttcttgaagtagagctgtgttacatgaacactaatcttgttcaagagaatttctcctctctcttgaccctgctgtggactcacactctcaccgttcttgtcgaagctgccgcttcacaaaggtcttctagcttggccagcaaccggttgaaaattgccctgcaaaatctcgaaatttgtttccatgccgagggatgcggacttccccctaaagcgctgcatacagccacttttcaggccctgcagcgcgatctggagctacaggctgcttcaagccgggagctgatccggaagtacttctgctccagaatccagcagcaagccgagactactagcgaagagctgggcgcagtgactgtgaaggctagctaccgggcaagcgagcagaagctgagagtcgagttactgtctgcctcttccctgttgccactggactcaaatggcagtagcgatccttttgtccagctcacacttgagcccaggcacgagtttccggagctcgccgctcgagaaacacaaaaacataagaaggacctgcaccctcttttcgacgagactttcgaatttctcgtccccgctgaaccttgtcgcaaggccggtgcctgcctgttgttgaccgtactggactatgatacgttgggtgcagatgatctggagggagaagcattcctgcccctgcgagaagtgccagggctgtctggaagcgaggagcccggagaagtcccacaaacgagactgcccttaacttatcctgcccctaacggcgaccctatcctgcagctgttggaaggcagaaagggcgatagggaggcgcaggtgttcgtccgacttagacgccaccgcgcaaaacagggcatcggcccttcagtgagttggccatggccaatttgcctgctcgcctttctgttccagccactgggctggggtcctgggtccctgggacccggactgcaggcccagtctctgctcgaaaaaggggaggggacattacctaagatgcggctgcagttgccctggggtgagggtggcggacattattag

SEQ ID NO: 261349 - DNA, 2835 bp, Artificial Sequence
  derived and/or modified sequence
atggccaccctgctgagtcacccacagcagcggccacccttcctgcgacaggccattaagatacggcgtaggcgagtgagagatctacaggatccaccaccgcagatggcccctgaaattcagcccccatctcaccacttttccccagagcagcgggcactgttgtacgaggacgcattgtacacggtgttacaccggttgggtcaccccgagcccaatcatgtcacagaggccagcgaactgctgcggtacctgcaagaagccttccacgtggaacccgaggagcatcagcaaactctccagcgtgttcgagaactggagaaacccatcttttgccttaaggcaaccgtcaagcaggccaagggaatccttggaaaggacgtctctggtttttctgacccttattgtctgctaggtatcgaacagggcgtaggagtaccgggtggttctccagggtcccgtcaccgccagaaagctgtagtcagacataccatccccgaggaggaaacccaccggacccaggtgatcactcaaactttgaatccagtctgggacgaaacctttatactggagtttgaagacatcacaaatgctagctttcacctggacatgtgggatctggatactgttgagtcagtccgccaaaaacttggtgagcttaccgacctgcacggcctgcgacggatcttcaaggaagctcggaaagataagggtcaggacgattttctggggaacgtcgtgctccggctgcaagacttgcgatgccgggaagaccagtggtatccgctggagccacgcactgaaacgtatcccgacagaggtcagtgtcatctgcagttccagctcatacacaaacgaagagctacctcggctagccgctcccaaccctcttataccgtgcaccttcatctgctgcagcagttggtgtcacatgaggtgacacagcatgaagccggaagtacatcctgggacgggtcactcagcccgcaagccgctacggttctgtttctgcacgcaacacaaaaggacctgagcgattttcaccagtccatggcacagtggctggcttacagtcgactgtaccaatcactggaattcccgagtagttgtctgctccaccccataacaagtattgaatatcaatggatccagggtcggctcaaagccgagcagcaggaggagctggctgcttctttttcctcactgctcacttatggcctctctctcatccggaggtttaggtcagtttttcccctgtctgtctctgacagtccagcacgtctccaatcactcctgagggtcctggttcagatgtgcaagatgaaggctttcggagagttgtgcccaaatactgccccactgcctcagctggtgaccgaagcgttgcagacaggcaccacagaatggttccatcttaagcagcagcaccatcagcctatggtccagggaattcctgaggctggaaaggcactgctgggtctcgtgcaagacgttattggcgacctgcatcaatgtcagcgaacctgggataaaatctttcacaacacccttaagatccacttattctccatggccttcagggaactgcagtggcttgtggctaaacgtgttcaggatcacactaccgtggtgggagacgtggtgtccccggaaatgggggagagtcttttccagctttacatttcactcaaggaattgtgtcagctgcgtatgtcgtctagcgaaagagacggggtgcttgctctggacaactttcaccgttggttccagccagcgataccgtcttggctccaaaagacttacaacgaagcgctcgcacgggtgcagcgcgcagtgcaaatggatgaactggtgcccctgggtgagttgacaaaacattccacgagcgccgttgacctgagtacctgttttgctcagatttcccacactgcccgtcaacttgattggccagatcccgaggaagcgtttatgatcaccgtgaaatttgtcgaagacacctgtcggttggctctggtatactgttcattaatcaaggcacgggctcgcgagctgagcagcgggcaaaaggatcagggccaggccgctaatatgctgtgtgtggtggtcaatgacatggagcagctaaggctggtgatcggaaagttgcctgcacagctcgcctgggaggctttggaacagagggtgggcgcagtgctcgagcagggacagttacagaatactctgcatgctcagcttcagtccgctcttgcgggactgggtcatgagatccgcaccggcgtacgcacactcgctgagcagctagaagtgggcatagcaaaacatatccagaaactcgtgggtgtgagggagagtgtattgcccgaagatgccatcctgcctctcatgaagttcctggaagtcgagttatgttatatgaatacaaatctggtgcaagaaaacttttccagtcttctgactcttctctggactcatacccttacagtcctggttgaggcagccgcatcccagcgctcctctagcctggcgtctaataggttgaagattgcactgcagaacctggagatttgctttcacgccgagggctgcggccttccccctaaaactctgcctcttccggcttcacaaaagagctgctgtgggggtcagggcatcggaccatctgtgagctggccatggcctatctgtctgctcgcttttctttttcaaccactgggctggggcccaggaagcctcggtcctgggcttcaagcgcagagccttctagaaaaaggggaaggcaccctgccaaaaatgcgcttacagttaccctggggggagggtggcggtcattattag

SEQ ID NO: 261350 - DNA, 4389 bp, Artificial Sequence
  derived and/or modified sequence
gttcagcccagcctgggcacagcacatggatggggcaggatgctgcccgcctgttctgggcccccccgccccctgctgagagcgttgtccccttcccagggcctctgtaggagggtggggcggggccaggcctgcccacggggtccaccttctgctccagccagaggagggtcctgtagggatcccagctggggaaggtgcagggggcctgggagactgcctctccgaagcggtgaaaccctcacccttccgtccctcccagccaccctccctaaaacttcccctgacagagggtggcagccccaggctctttgcataatcctgtggcttcgctgtcttcacccagcaccagcggacagggaagggcagagaaggccaccatggcgacactcctctcccatccgcagcagcgccctcccttcttgcgccaggccatcaagataaggcgccgcagagtcagagatctacaggatcccccgccccaaatggccccggagatccagcctccatcccaccacttctcccccgagcagcgggccctgctctacgaggacgcactctacactgtcttgcaccgcctgggtcatcctgagcccaaccatgtgacggaggcctctgagctgctgcgatacctgcaggaggccttccacgtggagcccgaggagcaccagcagacactgcagcgggtcagggagcttgagaagccaatattttgtctgaaggcaacagtgaaacaggccaagggcattctgggcaaagatgtcagtgggttcagcgacccctactgcctgctgggcattgagcagggggtaggtgtgccagggggcagccccgggtcccggcatcggcagaaggctgtggtgaggcacaccatccccgaggaggagacccaccgcacgcaggtcatcacccagacactcaaccccgtctgggacgagaccttcatcctggagtttgaggacatcaccaatgcgagctttcatctggacatgtgggacctggacactgtggagtctgtccgacagaagcttggggagctcacggatctgcatgggcttcgcaggatctttaaagaggcccggaaggacaaaggccaggacgactttctggggaacgtggttctgaggctgcaggacctgcgctgccgagaggaccagtggtaccccctggaaccccgcactgagacctacccagaccgaggccagtgccacctccagttccaactcatccataagcggagagccacttcggccagccgctcgcagccgagctacaccgtgcacctccacctcctgcagcagcttgtgtcccacgaggtcacccagcacgaggcgggaagcacctcctgggacgggtcgctgagtccccaggctgccaccgtcctctttctgcacgccacacagaaggacctatccgacttccaccagtccatggcgcagtggctggcctacagccgcctctaccagagcctggagttccccagcagctgcctcctgcaccccatcaccagcatcgagtaccagtggatccagggtcggctcaaggcagaacagcaggaggagctggccgcctcattcagctccctgctgacctacggcctctccctcatccggaggttccgctctgtcttccccctctctgtctcggactccccagcccggctgcagtctcttctcagggtcctggtacagatgtgcaagatgaaggcctttggagaactgtgccccaacaccgccccattgccccagctggtgactgaggccctgcagactggcaccactgaatggttccacctgaagcagcagcaccatcaacccatggtgcagggcatcccggaggcaggcaaggccttgctgggcctggtacaggatgtcattggcgacctgcaccagtgccagcgcacatgggacaagatcttccacaataccctcaagatccacctcttctccatggctttccgggagctgcagtggctggtggccaagcgggtgcaggaccacacgacggttgtgggtgatgtagtgtccccagagatgggcgagagtctgttccagctctacatcagcctcaaggagctctgccagctgcgcatgagctcctcagagagggatggagtcctggccctggataatttccaccgctggttccagccggccatcccctcctggctgcagaagacgtacaacgaggccctggcgcgggtgcagcgcgctgtgcagatggatgagctggtgcccctgggtgaactgaccaagcacagcacatcagcggtggatctatccacctgctttgcccagatcagccacactgcccggcagctggactggccagacccagaggaggccttcatgattaccgtcaagtttgtggaggacacctgtcgcctggccctggtgtactgcagccttataaaggcccgggcccgcgagctctcttcaggccagaaggaccaaggccaggcagccaacatgctgtgtgtggtggtgaatgacatggagcagctgcggctggtgatcggcaagttgcccgcccagctggcatgggaggccctggagcagcgggtaggggccgtgctggagcaggggcagctgcagaacacgctgcatgcccagctgcagagcgcgctggccgggctgggccatgagatccgcactggcgtccgcaccctggccgagcagttggaggtgggcatcgccaagcacatccagaaactggtgggcgtcagggagtctgtcctgcctgaggatgccattctgcccctgatgaagttcctggaggtggagctttgctacatgaacaccaacttggtgcaggagaacttcagcagcctcctgaccctgctctggacccacacactcacagtgctggtggaggcggccgcctcccagcgcagctcatccctggcttccaacaggctgaagattgccctgcagaacctggagatctgcttccacgctgagggctgtggcctgccacccaaggccctgcacactgccaccttccaggctctgcagagggacctggagctgcaggcggcctccagccgggaactcatccggaagtacttctgcagccgaatccagcagcaggcagaaaccacctctgaggagctgggggctgtgacagtcaaggcctcctaccgcgcctctgagcagaagctgcgtgtggagctgctcagcgcctccagcctgctgcccctggactccaatggctccagcgacccctttgtccagctgaccttggagcccaggcatgagttccctgagctggccgcccgggagacccagaagcacaagaaggaccttcacccattgtttgatgagacctttgaattcctggtgcctgctgagccgtgccgcaaggctggggcatgcctcctgctcaccgtgctggactacgacacgctgggggccgacgacctggaaggcgaggccttcctgccgctgcgtgaggtgcccgggctgagtggctctgaggagcctggtgaggtgcctcagacccgcctgcccctcacgtaccccgcacccaacggggacccaatcctgcagctgctggagggccggaagggtgaccgagaagcccaggtctttgtgaggctgcggcggcaccgggccaagcaggcctcccagcatgccttgcggccggcaccgtagccgtagaggtttgcggtggggctgggtccccggtggggacttgcaagggctttcctgtagggtctggggcttccccgccacatcgcggccctccagcctggcctaacacttggggagccccagcatgcggagtgcccagagtgcagacctcccctgcctcccatggtgatgggggctcagcagcgacatctctactcccgcctccctgcctccagccctggctgcaatgtctctaccacatcccagcaccagggggagcaaaccctgcccctgcccgcctctcagaaaagctgctgtggtgggcaggggattgggccatctgtctcctggccctggcccatctgcctcctggccttcctgttccagccactggggtgggggccaggttcactgggaccagggctacaggcacagagtctcctggaaaagggagaggggaccctgccaaagatgaggctccagctgccctggggggagggtggtggccattactagagggggcctgggtcctctccccaggggctgccagcatccaggccaggaagcctggagccaagaaccttctggctctgagggagcaagagctggcaggcggcagggctggcacagacagacggaagcagaaaggacagtttggctgctgtgtctgctgcgcacgccccctccccggacagcacctgccacctagaaactttcttagcaaaaaaattaataaaaacaaatccattgtcctctt

SEQ ID NO: 261351 - DNA, 3809 bp, Artificial Sequence
  derived and/or modified sequence
gttcagcccagcctgggcacagcacatggatggggcaggatgctgcccgcctgttctgggcccccccgccccctgctgagagcgttgtccccttcccagggcctctgtaggagggtggggcggggccaggcctgcccacggggtccaccttctgctccagccagaggagggtcctgtagggatcccagctggggaaggtgcagggggcctgggagactgcctctccgaagcggtgaaaccctcacccttccgtccctcccagccaccctccctaaaacttcccctgacagagggtggcagccccaggctctttgcataatcctgtggcttcgctgtcttcacccagcaccagcggacagggaagggcagagaaggccaccatggcgacactcctctcccatccgcagcagcgccctcccttcttgcgccaggccatcaagataaggcgccgcagagtcagagatctacaggatcccccgccccaaatggccccggagatccagcctccatcccaccacttctcccccgagcagcgggccctgctctacgaggacgcactctacactgtcttgcaccgcctgggtcatcctgagcccaaccatgtgacggaggcctctgagctgctgcgatacctgcaggaggccttccacgtggagcccgaggagcaccagcagacactgcagcgggtcagggagcttgagaagccaatattttgtctgaaggcaacagtgaaacaggccaagggcattctgggcaaagatgtcagtgggttcagcgacccctactgcctgctgggcattgagcagggggtaggtgtgccagggggcagccccgggtcccggcatcggcagaaggctgtggtgaggcacaccatccccgaggaggagacccaccgcacgcaggtcatcacccagacactcaaccccgtctgggacgagaccttcatcctggagtttgaggacatcaccaatgcgagctttcatctggacatgtgggacctggacactgtggagtctgtccgacagaagcttggggagctcacggatctgcatgggcttcgcaggatctttaaagaggcccggaaggacaaaggccaggacgactttctggggaacgtggttctgaggctgcaggacctgcgctgccgagaggaccagtggtaccccctggaaccccgcactgagacctacccagaccgaggccagtgccacctccagttccaactcatccataagcggagagccacttcggccagccgctcgcagccgagctacaccgtgcacctccacctcctgcagcagcttgtgtcccacgaggtcacccagcacgaggcgggaagcacctcctgggacgggtcgctgagtccccaggctgccaccgtcctctttctgcacgccacacagaaggacctatccgacttccaccagtccatggcgcagtggctggcctacagccgcctctaccagagcctggagttccccagcagctgcctcctgcaccccatcaccagcatcgagtaccagtggatccagggtcggctcaaggcagaacagcaggaggagctggccgcctcattcagctccctgctgacctacggcctctccctcatccggaggttccgctctgtcttccccctctctgtctcggactccccagcccggctgcagtctcttctcagggtcctggtacagatgtgcaagatgaaggcctttggagaactgtgccccaacaccgccccattgccccagctggtgactgaggccctgcagactggcaccactgaatggttccacctgaagcagcagcaccatcaacccatggtgcagggcatcccggaggcaggcaaggccttgctgggcctggtacaggatgtcattggcgacctgcaccagtgccagcgcacatgggacaagatcttccacaataccctcaagatccacctcttctccatggctttccgggagctgcagtggctggtggccaagcgggtgcaggaccacacgacggttgtgggtgatgtagtgtccccagagatgggcgagagtctgttccagctctacatcagcctcaaggagctctgccagctgcgcatgagctcctcagagagggatggagtcctggccctggataatttccaccgctggttccagccggccatcccctcctggctgcagaagacgtacaacgaggccctggcgcgggtgcagcgcgctgtgcagatggatgagctggtgcccctgggtgaactgaccaagcacagcacatcagcggtggatctatccacctgctttgcccagatcagccacactgcccggcagctggactggccagacccagaggaggccttcatgattaccgtcaagtttgtggaggacacctgtcgcctggccctggtgtactgcagccttataaaggcccgggcccgcgagctctcttcaggccagaaggaccaaggccaggcagccaacatgctgtgtgtggtggtgaatgacatggagcagctgcggctggtgatcggcaagttgcccgcccagctggcatgggaggccctggagcagcgggtaggggccgtgctggagcaggggcagctgcagaacacgctgcatgcccagctgcagagcgcgctggccgggctgggccatgagatccgcactggcgtccgcaccctggccgagcagttggaggtgggcatcgccaagcacatccagaaactggtgggcgtcagggagtctgtcctgcctgaggatgccattctgcccctgatgaagttcctggaggtggagctttgctacatgaacaccaacttggtgcaggagaacttcagcagcctcctgaccctgctctggacccacacactcacagtgctggtggaggcggccgcctcccagcgcagctcatccctggcttccaacaggctgaagattgccctgcagaacctggagatctgcttccacgctgagggctgtggcctgccacccaaggccctgcacactgccaccttccaggctctgcagagggacctggagctgcaggcggcctccagccgggaactcatccggaagtacttctgcagccgaatccagcagcaggcagaaaccacctctgaggagctgggggctgtgacagtcaaggcctcctaccgcgcctctgagcagaagctgcgtgtggagctgctcagcgcctccagcctgctgcccctggactccaatggctccagcgacccctttgtccagctgaccttggagcccaggcatgagttccctgagctggccgcccgggagacccagaagcacaagaaggaccttcacccattgtttgatgagacctttgaattcctggtgcctgctgagccgtgccgcaaggctggggcatgcctcctgctcaccgtgctggactacgacacgctgggggccgacgacctggaaggcgaggccttcctgccgctgcgtgaggtgcccgggctgagtggctctgaggagcctggtgaggtgcctcagacccgcctgcccctcacgtaccccgcacccaacggggacccaatcctgcagctgctggagggccggaagggtgaccgagaagcccaggtctttgtgaggctgcggcggcaccgggccaagcaggggattgggccatctgtctcctggccctggcccatctgcctcctggccttcctgttccagccactggggtgggggccaggttcactgggaccagggctacaggcacagagtctcctggaaaagggagaggggaccctgccaaagatgaggctccagctgccctggggggagggtggtggccattactag

SEQ ID NO: 261352 - DNA, 3215 bp, Artificial Sequence
  derived and/or modified sequence
gttcagcccagcctgggcacagcacatggatggggcaggatgctgcccgcctgttctgggcccccccgccccctgctgagagcgttgtccccttcccagggcctctgtaggagggtggggcggggccaggcctgcccacggggtccaccttctgctccagccagaggagggtcctgtagggatcccagctggggaaggtgcagggggcctgggagactgcctctccgaagcggtgaaaccctcacccttccgtccctcccagccaccctccctaaaacttcccctgacagagggtggcagccccaggctctttgcataatcctgtggcttcgctgtcttcacccagcaccagcggacagggaagggcagagaaggccaccatggcgacactcctctcccatccgcagcagcgccctcccttcttgcgccaggccatcaagataaggcgccgcagagtcagagatctacaggatcccccgccccaaatggccccggagatccagcctccatcccaccacttctcccccgagcagcgggccctgctctacgaggacgcactctacactgtcttgcaccgcctgggtcatcctgagcccaaccatgtgacggaggcctctgagctgctgcgatacctgcaggaggccttccacgtggagcccgaggagcaccagcagacactgcagcgggtcagggagcttgagaagccaatattttgtctgaaggcaacagtgaaacaggccaagggcattctgggcaaagatgtcagtgggttcagcgacccctactgcctgctgggcattgagcagggggtaggtgtgccagggggcagccccgggtcccggcatcggcagaaggctgtggtgaggcacaccatccccgaggaggagacccaccgcacgcaggtcatcacccagacactcaaccccgtctgggacgagaccttcatcctggagtttgaggacatcaccaatgcgagctttcatctggacatgtgggacctggacactgtggagtctgtccgacagaagcttggggagctcacggatctgcatgggcttcgcaggatctttaaagaggcccggaaggacaaaggccaggacgactttctggggaacgtggttctgaggctgcaggacctgcgctgccgagaggaccagtggtaccccctggaaccccgcactgagacctacccagaccgaggccagtgccacctccagttccaactcatccataagcggagagccacttcggccagccgctcgcagccgagctacaccgtgcacctccacctcctgcagcagcttgtgtcccacgaggtcacccagcacgaggcgggaagcacctcctgggacgggtcgctgagtccccaggctgccaccgtcctctttctgcacgccacacagaaggacctatccgacttccaccagtccatggcgcagtggctggcctacagccgcctctaccagagcctggagttccccagcagctgcctcctgcaccccatcaccagcatcgagtaccagtggatccagggtcggctcaaggcagaacagcaggaggagctggccgcctcattcagctccctgctgacctacggcctctccctcatccggaggttccgctctgtcttccccctctctgtctcggactccccagcccggctgcagtctcttctcagggtcctggtacagatgtgcaagatgaaggcctttggagaactgtgccccaacaccgccccattgccccagctggtgactgaggccctgcagactggcaccactgaatggttccacctgaagcagcagcaccatcaacccatggtgcagggcatcccggaggcaggcaaggccttgctgggcctggtacaggatgtcattggcgacctgcaccagtgccagcgcacatgggacaagatcttccacaataccctcaagatccacctcttctccatggctttccgggagctgcagtggctggtggccaagcgggtgcaggaccacacgacggttgtgggtgatgtagtgtccccagagatgggcgagagtctgttccagctctacatcagcctcaaggagctctgccagctgcgcatgagctcctcagagagggatggagtcctggccctggataatttccaccgctggttccagccggccatcccctcctggctgcagaagacgtacaacgaggccctggcgcgggtgcagcgcgctgtgcagatggatgagctggtgcccctgggtgaactgaccaagcacagcacatcagcggtggatctatccacctgctttgcccagatcagccacactgcccggcagctggactggccagacccagaggaggccttcatgattaccgtcaagtttgtggaggacacctgtcgcctggccctggtgtactgcagccttataaaggcccgggcccgcgagctctcttcaggccagaaggaccaaggccaggcagccaacatgctgtgtgtggtggtgaatgacatggagcagctgcggctggtgatcggcaagttgcccgcccagctggcatgggaggccctggagcagcgggtaggggccgtgctggagcaggggcagctgcagaacacgctgcatgcccagctgcagagcgcgctggccgggctgggccatgagatccgcactggcgtccgcaccctggccgagcagttggaggtgggcatcgccaagcacatccagaaactggtgggcgtcagggagtctgtcctgcctgaggatgccattctgcccctgatgaagttcctggaggtggagctttgctacatgaacaccaacttggtgcaggagaacttcagcagcctcctgaccctgctctggacccacacactcacagtgctggtggaggcggccgcctcccagcgcagctcatccctggcttccaacaggctgaagattgccctgcagaacctggagatctgcttccacgctgagggctgtggcctgccacccaagaccctgcccctgcccgcctctcagaaaagctgctgtggtgggcaggggattgggccatctgtctcctggccctggcccatctgcctcctggccttcctgttccagccactggggtgggggccaggttcactgggaccagggctacaggcacagagtctcctggaaaagggagaggggaccctgccaaagatgaggctccagctgccctggggggagggtggtggccattactag

SEQ ID NO: 261353 - DNA, 3273 bp, Artificial Sequence
  derived and/or modified sequence
atggccaccctgctgagccacccccagcagagaccccccttcctgagacaggccatcaagatcagaagaagaagagtgagagacctgcaggacccccccccccagatggcccccgagatccagccccccagccaccacttcagccccgagcagagagccctgctgtacgaggacgccctgtacaccgtgctgcacagactgggccaccccgagcccaaccacgtgaccgaggccagcgagctgctgagatacctgcaggaggccttccacgtggagcccgaggagcaccagcagaccctgcagagagtgagagagctggagaagcccatcttctgcctgaaggccaccgtgaagcaggccaagggcatcctgggcaaggacgtgagcggcttcagcgacccctactgcctgctgggcatcgagcagggcgtgggcgtgcccggcggcagccccggcagcagacacagacagaaggccgtggtgagacacaccatccccgaggaggagacccacagaacccaggtgatcacccagaccctgaaccccgtgtgggacgagaccttcatcctggagttcgaggacatcaccaacgccagcttccacctggacatgtgggacctggacaccgtggagagcgtgagacagaagctgggcgagctgaccgacctgcacggcctgagaagaatcttcaaggaggccagaaaggacaagggccaggacgacttcctgggcaacgtggtgctgagactgcaggacctgagatgcagagaggaccagtggtaccccctggagcccagaaccgagacctaccccgacagaggccagtgccacctgcagttccagctgatccacaagagaagagccaccagcgccagcagaagccagcccagctacaccgtgcacctgcacctgctgcagcagctggtgagccacgaggtgacccagcacgaggccggcagcaccagctgggacggcagcctgagcccccaggccgccaccgtgctgttcctgcacgccacccagaaggacctgagcgacttccaccagagcatggcccagtggctggcctacagcagactgtaccagagcctggagttccccagcagctgcctgctgcaccccatcaccagcatcgagtaccagtggatccagggcagactgaaggccgagcagcaggaggagctggccgccagcttcagcagcctgctgacctacggcctgagcctgatcagaagattcagaagcgtgttccccctgagcgtgagcgacagccccgccagactgcagagcctgctgagagtgctggtgcagatgtgcaagatgaaggccttcggcgagctgtgccccaacaccgcccccctgccccagctggtgaccgaggccctgcagaccggcaccaccgagtggttccacctgaagcagcagcaccaccagcccatggtgcagggcatccccgaggccggcaaggccctgctgggcctggtgcaggacgtgatcggcgacctgcaccagtgccagagaacctgggacaagatcttccacaacaccctgaagatccacctgttcagcatggccttcagagagctgcagtggctggtggccaagagagtgcaggaccacaccaccgtggtgggcgacgtggtgagccccgagatgggcgagagcctgttccagctgtacatcagcctgaaggagctgtgccagctgagaatgagcagcagcgagagagacggcgtgctggccctggacaacttccacagatggttccagcccgccatccccagctggctgcagaagacctacaacgaggccctggccagagtgcagagagccgtgcagatggacgagctggtgcccctgggcgagctgaccaagcacagcaccagcgccgtggacctgagcacctgcttcgcccagatcagccacaccgccagacagctggactggcccgaccccgaggaggccttcatgatcaccgtgaagttcgtggaggacacctgcagactggccctggtgtactgcagcctgatcaaggccagagccagagagctgagcagcggccagaaggaccagggccaggccgccaacatgctgtgcgtggtggtgaacgacatggagcagctgagactggtgatcggcaagctgcccgcccagctggcctgggaggccctggagcagagagtgggcgccgtgctggagcagggccagctgcagaacaccctgcacgcccagctgcagagcgccctggccggcctgggccacgagatcagaaccggcgtgagaaccctggccgagcagctggaggtgggcatcgccaagcacatccagaagctggtgggcgtgagagagagcgtgctgcccgaggacgccatcctgcccctgatgaagttcctggaggtggagctgtgctacatgaacaccaacctggtgcaggagaacttcagcagcctgctgaccctgctgtggacccacaccctgaccgtgctggtggaggccgccgccagccagagaagcagcagcctggccagcaacagactgaagatcgccctgcagaacctggagatctgcttccacgccgagggctgcggcctgccccccaaggccctgcacaccgccaccttccaggccctgcagagagacctggagctgcaggccgccagcagcagagagctgatcagaaagtacttctgcagcagaatccagcagcaggccgagaccaccagcgaggagctgggcgccgtgaccgtgaaggccagctacagagccagcgagcagaagctgagagtggagctgctgagcgccagcagcctgctgcccctggacagcaacggcagcagcgaccccttcgtgcagctgaccctggagcccagacacgagttccccgagctggccgccagagagacccagaagcacaagaaggacctgcaccccctgttcgacgagaccttcgagttcctggtgcccgccgagccctgcagaaaggccggcgcctgcctgctgctgaccgtgctggactacgacaccctgggcgccgacgacctggagggcgaggccttcctgcccctgagagaggtgcccggcctgagcggcagcgaggagcccggcgaggtgccccagaccagactgcccctgacctaccccgcccccaacggcgaccccatcctgcagctgctggagggcagaaagggcgacagagaggcccaggtgttcgtgagactgagaagacacagagccaagcaggccagccagcacgccctgagacccgccccctag

SEQ ID NO: 261354 - protein, 434 aa, Artificial Sequence
  derived and/or modified sequence
MEDLFSPSILPPAPNISVPILLGWGLNLTLGQGAPASGPPSRRVRLVFLGVILVVAVAGNTTVLCRLCGGGGPWAGPKRRKMDFLLVQLALADLYACGGTALSQLAWELLGEPRAATGDLACRFLQLLQASGRGASAHLVVLIALERRRAVRLPHGRPLPARALAALGWLLALLLALPPAFVVRGDSPSPLPPPPPPTSLQPGAPPAARAWPGERRCHGIFAPLPRWHLQVYAFYEAVAGFVAPVTVLGVACGHLLSVWWRHRPQAPAAAAPWSASPGRAPAPSALPRAKVQSLKMSLLLALLFVGCELPYFAARLAAAWSSGPAGDWEGEGLSAALRVVAMANSALNPFVYLFFQAGDCRLRRQLRKRLGSLCCAPQGGAEDEEGPRGHQALYRQRWPHPHYHHARREPLDEGGLRPPPPRPRPLPCSCESAF

SEQ ID NO: 261355 - DNA, 1305 bp, Artificial Sequence
  derived and/or modified sequence
atggaggacctgttcagccccagcatcctgccccccgcccccaacatcagcgtgcccatcctgctgggctggggcctgaacctgaccctgggccagggcgcccccgccagcggcccccccagcagaagagtgagactggtgttcctgggcgtgatcctggtggtggccgtggccggcaacaccaccgtgctgtgcagactgtgcggcggcggcggcccctgggccggccccaagagaagaaagatggacttcctgctggtgcagctggccctggccgacctgtacgcctgcggcggcaccgccctgagccagctggcctgggagctgctgggcgagcccagagccgccaccggcgacctggcctgcagattcctgcagctgctgcaggccagcggcagaggcgccagcgcccacctggtggtgctgatcgccctggagagaagaagagccgtgagactgccccacggcagacccctgcccgccagagccctggccgccctgggctggctgctggccctgctgctggccctgccccccgccttcgtggtgagaggcgacagccccagccccctgccccccccccccccccccaccagcctgcagcccggcgccccccccgccgccagagcctggcccggcgagagaagatgccacggcatcttcgcccccctgcccagatggcacctgcaggtgtacgccttctacgaggccgtggccggcttcgtggcccccgtgaccgtgctgggcgtggcctgcggccacctgctgagcgtgtggtggagacacagaccccaggcccccgccgccgccgccccctggagcgccagccccggcagagcccccgcccccagcgccctgcccagagccaaggtgcagagcctgaagatgagcctgctgctggccctgctgttcgtgggctgcgagctgccctacttcgccgccagactggccgccgcctggagcagcggccccgccggcgactgggagggcgagggcctgagcgccgccctgagagtggtggccatggccaacagcgccctgaaccccttcgtgtacctgttcttccaggccggcgactgcagactgagaagacagctgagaaagagactgggcagcctgtgctgcgccccccagggcggcgccgaggacgaggagggccccagaggccaccaggccctgtacagacagagatggccccacccccactaccaccacgccagaagagagcccctggacgagggcggcctgagaccccccccccccagacccagacccctgccctgcagctgcgagagcgccttctag

SEQ ID NO: 261356 - DNA, 2065 bp, Artificial Sequence
  derived and/or modified sequence
caaatcacgaggacaatcgacaaaaacaactaagcgcaaagccgcccgaatccatctccctctctgtgcgtgtgccttttcaactaactttgggaactcgtatagacccagcgtcgctccccgcgccgcctcgcctccactttggtttcccgcgtcctgcccgccctcttcggtgcctcctcttcctccgggacaaggatggaggatctctttagcccctcaattctgccgccggcgcccaacatttccgtgcccatcttgctgggctggggtctcaacctgaccttggggcaaggagcccctgcctctgggccgcccagccgccgcgtccgcctggtgttcctgggggtcatcctggtggtggcggtggcaggcaacaccacagtgctgtgccgcctgtgcggcggcggcgggccctgggcgggccccaagcgtcgcaagatggacttcctgctggtgcagctggccctggcggacctgtacgcgtgcgggggcacggcgctgtcacagctggcctgggaactgctgggcgagccccgcgcggccacgggggacctggcgtgccgcttcctgcagctgctgcaggcatccgggcggggcgcctcggcccacctcgtggtgctcatcgccctcgagcgccggcgcgcggtgcgtcttccgcacggccggccgctgcccgcgcgtgccctcgccgccctgggctggctgctggcactgctgctggcgctgcccccggccttcgtggtgcgcggggactccccctcgccgctgccgccgccgccgccgccaacgtccctgcagccaggcgcgcccccggccgcccgcgcctggccgggggagcgtcgctgccacgggatcttcgcgcccctgccgcgctggcacctgcaggtctacgcgttctacgaggccgtcgcgggcttcgtcgcgcctgttacggtcctgggcgtcgcttgcggccacctactctccgtctggtggcggcaccggccgcaggcccccgcggctgcagcgccctggtcggcgagcccaggtcgagcccctgcgcccagcgcgctgccccgcgccaaggtgcagagcctgaagatgagcctgctgctggcgctgctgttcgtgggctgcgagctgccctactttgccgcccggctggcggccgcgtggtcgtccgggcccgcgggagactgggagggagagggcctgtcggcggcgctgcgcgtggtggcgatggccaacagcgctctcaatcccttcgtctacctcttcttccaggcgggcgactgccggctccggcgacagctgcggaagcggctgggctctctgtgctgcgcgccgcagggaggcgcggaggacgaggaggggccccggggccaccaggcgctctaccgccaacgctggccccaccctcattatcaccatgctcggcgggaaccgctggacgagggcggcttgcgcccaccccctccgcgccccagacccctgccttgctcctgcgaaagtgccttctaggtgcttggtggtcagagacgggtcatctgtcgctaaggcgcaacctccagggaactcgaggcctgccagggtctgtccagatcacaaggggcaggagagtctgtgagagagtgacactgaagttgtccccttcctccactctcctattcccttctcatgtttacatttccctatgctcttccagtttctcttcttccctacagttcctctcatatctccccatttggagacagtgagccactggaaagttgtaaaaacaaaaacagttatttttgcagttttctttcacgcatttatagtgctctggataatgccatttatttttgctgattacccaactttcagtatttgctgtgttatcatctgtatttacttattttgaatcgtgcttaaatcaaatgtaccttcagcacctgcaagtttgccttttctttccaggaggaaaatccccacgttgctctccctggggagtctgagaattataccagtgctgtcagaaatgtaatcatgctgtcatttcagagccacagagtatttataaaataaaaacctttcccacgga

SEQ ID NO: 261357 - DNA, 1305 bp, Artificial Sequence
  derived and/or modified sequence
atggaggatctcttcagcccgtctatactgccccctgccccaaacatttccgtgccaattcttttaggatgggggctcaacctgacactgggtcaaggggcccccgcgtccggccctccatcccggcgtgtccggctggttttccttggtgttattctggttgtggcagtggcaggaaataccactgtactatgtagattgtgcggcggaggaggcccttgggccgggcctaagcgaagaaaaatggacttcctactcgtgcagctggctctggcggacctgtatgcgtgcggcggtaccgccctgtctcagctagcctgggaacttttaggcgagccaagggctgccactggcgaccttgcatgtcggtttctccagctcttgcaggcgtcaggtcggggagcaagcgcacatctggtggtcctgattgccctcgaaaggcggcgggctgtccgcttgccgcatggtagaccattacctgcgagagccctcgccgccctcggttggcttctggcactgttactggctcttcctcccgcctttgtggtgcgcggtgattcgcccagtcccctgccccctccaccaccacctacatcactgcagcctggagccccccctgcagctagggcctggcccggagagaggcgttgtcacggtatttttgcccctctgcccagatggcatttgcaggtctatgctttttacgaagccgtagcgggcttcgtagctcccgtaaccgtgcttggcgttgcatgcggacacctcctgagtgtctggtggaggcacaggccgcaggcaccagctgctgccgccccttggtctgccagtcctggccgcgcaccggctccctccgctctgccacgcgccaaagtgcagagtttgaagatgagtctgttgttagcactcctcttcgtcgggtgtgaattgccatactttgcggccaggctggccgcagcatggtcgtctggacccgcgggcgattgggagggcgagggcctgtcagcggcattgcgcgtggttgccatggctaactcagcactaaatcccttcgtgtatctcttcttccaggctggggactgccgccttaggcgccaacttcgaaaacgtttgggaagtctgtgctgcgccccccagggcggggcggaggacgaggaaggccctcggggccaccaggcactctatcggcaacgatggccccatccacattaccaccatgcccggagagagcctctggatgaggggggcctcaggccacctccacccaggccccgccctttaccttgcagttgtgaatctgcattttag

SEQ ID NO: 261358 - DNA, 1305 bp, Artificial Sequence
  derived and/or modified sequence
atggaggacctcttcagccccagcatcctgcccccagcccccaacatctctgtgcccatcctgctgggctggggcctgaacctgaccctgggccagggcgccccagccagcggcccccccagccggcgggtgcggctggtgttcctgggcgtcatcctggtggtggccgtggccggcaacaccaccgtgctgtgccgcctgtgtggcggcggcggcccctgggccggccccaagaggaggaagatggacttcctgctggtgcagctggccctggccgacctgtatgcctgtggcggcacagccctgagccagctggcctgggagctgctgggggagcccagggctgccactggagacctggcctgccgcttcctgcagctgctgcaggccagcggccgcggggccagcgcccacctggtggtgctgattgccctggagcggcggcgggctgtgcggctgccccacggccggcccctgcctgcccgggccctggccgccctgggctggctgctggccctgctgctggccctgcccccagcctttgtggtgcggggggacagccccagccccctgcccccacctcctccacccaccagcctgcagcccggggcccctcctgctgcccgggcctggccaggagagcggcgctgccacggcatctttgcccccctgccccgctggcacctgcaggtgtatgccttctatgaagctgtggccggctttgtggcccctgtgacagtgctgggcgtggcctgtggccacctgctgtctgtgtggtggaggcaccggccccaggccccagctgctgctgccccctggagcgccagccctggccgggccccagcccccagcgccctgccccgggccaaggtgcagagcctgaagatgagcctgctgctggccctgctgtttgtgggctgtgagctgccctactttgctgcccggctggccgccgcctggagcagcggccctgctggggactgggagggggagggcctgtctgctgccctgcgggtggtggccatggccaacagcgccctgaacccctttgtgtacctgttcttccaggccggggactgccgcctgcggcggcagctgaggaagaggctgggcagcctgtgctgtgccccccagggcggcgcagaagatgaggagggcccccggggccaccaggccctgtaccggcagcgctggccccacccccactaccaccacgcccggcgggagcccctggatgagggcggcctgcggcccccaccaccccggccccggcccctgccctgcagctgtgagagcgccttctag

SEQ ID NO: 261359 - DNA, 1305 bp, Artificial Sequence
  derived and/or modified sequence
atggaggacctgttcagccccagcatcctgccccccgcccccaacatcagtgtgcccatcttgctcggttggggactgaatcttacattggggcaaggggcaccagcatccggcccaccaagccggcgcgtgagactcgtgtttcttggggtgattctggtcgtggccgttgccgggaatactactgtcctgtgcaggctgtgcggagggggtggcccatgggcgggccctaaaagaagaaagatggacttccttctagttcagctcgcactggcagatttatatgcctgcggcggcactgcactgtcacagcttgcgtgggagctgctgggggagccccgggcagccacaggagacctggcatgtcggttcctgcagctgctccaggctagcggcaggggcgctagcgcccatttggtagtattaattgccctggagcgccggcgcgcagtcaggttgccccacggaaggcctttacccgccagggcgctggccgcgctcggatggctactggctctcctgttagctctacctcctgccttcgttgtgcgtggtgattccccttctcctctgccacctccaccccccccaacaagcctacaaccaggggcccctcctgcagcccgtgcttggccgggtgaacgacggtgtcacggcatctttgctcccttgccgcggtggcatcttcaggtgtatgcattttacgaagccgtggctggttttgtcgctccagtgaccgtgctcggggttgcatgcggtcatctgctcagtgtgtggtggcggcatcgtccgcaagcccctgccgcagcagccccatggagcgccagccccggccgtgcccctgcaccctctgcattgccccgtgccaaggtccaatcccttaaaatgtcacttctgctggcactccttttcgtggggtgcgagctgccctactttgcagcacgtttggccgcagcttggtctagcggaccagctggagattgggagggtgaggggctgtctgctgctcttagggtcgtcgccatggcgaacagtgctttgaatccctttgtgtacctgttctttcaagctggtgactgccgcttacgccggcagctgcgtaaaagactggggtcactctgttgtgcgccccagggcggggcagaagacgaagaaggtcccagaggccatcaagctttatataggcagaggtggccacatcctcattatcatcacgctcgccgcgaaccactggatgaaggcggtctgcgaccgcctccaccgcgccctagaccactgccctgctcatgcgaaagtgctttctag

SEQ ID NO: 261360 - DNA, 1305 bp, Artificial Sequence
  derived and/or modified sequence
atggaggatctgttctcaccgtcaatcctccccccagcgcctaacatctccgtgccaattttgctcggctggggcctaaacctgacacttggtcagggcgcacctgcctccggtcctcctagcaggcgcgtgagactggtattccttggcgttatcctcgtagttgctgttgctggtaacaccaccgttctttgccggttgtgtggaggcggaggtccctgggcgggaccgaagaggcgaaaaatggacttccttttagttcagttggcgttggccgatctgtatgcatgtggagggaccgccttgagccagttagcttgggaacttctgggagaacccagggccgcaaccggcgatctcgcctgcaggtttctgcaattgttgcaagcctcggggaggggtgctagcgctcacctcgtggtgctgatcgctctggaacggagaagagccgtcaggctcccacacggccgtcctttgcctgcacgggctctggcagctctcgggtggctgcttgccttactgttggccctccccccagcttttgtggtaaggggcgattcacctagcccactgcctcccccaccccctccgactagtctgcagccaggggctcctccagctgctagggcatggcccggagagaggcggtgccatggcatattcgcgcctcttcccagatggcatctccaggtgtacgccttctacgaggcggtcgccggtttcgttgcacctgtcactgtgctgggtgtggcctgtgggcacctgctaagcgtttggtggcggcacaggcctcaggcgcctgccgcagcagcaccatggagtgcttctccaggacgggctccagccccatcggctttaccgagagcgaaggttcaatccctgaagatgagcctactgctggcccttctctttgtcggatgcgagctgccttacttcgccgcacggttagcggcagcttggagctctggcccagccggagactgggagggcgaaggcttatccgctgcactgagggtggtcgccatggccaatagcgcactgaatccttttgtttaccttttttttcaggctggggattgccggctccgacggcaactccgtaagaggttgggttcactgtgttgcgctccacagggaggggcagaagacgaggaggggcctcgcggacatcaggccctctacaggcaaagatggcctcacccccactaccatcatgccaggagagaacccctcgatgaagggggtcttaggcccccaccccctagacctagacccctgccatgttcctgcgaatccgccttttag

SEQ ID NO: 261361 - protein, 117 aa, Artificial Sequence
  derived and/or modified sequence
MSAPAQPPAEGTEGTAPGGGPPGPPPNMTSNRRLQQTQAQVEEVVDIIRVNVDKVLERDQKLSELDDRADALQAGASQFESSAAKLKRKYWWKNCKMMIMLGAICAIIVVVIVSKYR

SEQ ID NO: 261362 - DNA, 354 bp, Artificial Sequence
  derived and/or modified sequence
atgagcgcccccgcccagccccccgccgagggcaccgagggcaccgcccccggcggcggcccccccggccccccccccaacatgaccagcaacagaagactgcagcagacccaggcccaggtggaggaggtggtggacatcatcagagtgaacgtggacaaggtgctggagagagaccagaagctgagcgagctggacgacagagccgacgccctgcaggccggcgccagccagttcgagagcagcgccgccaagctgaagagaaagtactggtggaagaactgcaagatgatgatcatgctgggcgccatctgcgccatcatcgtggtggtgatcgtgagcaagtacagatag

SEQ ID NO: 261363 - DNA, 354 bp, Artificial Sequence
  derived and/or modified sequence
atgagcgccccagctcaaccgccagcagagggcactgagggcactgcccctggaggcggaccccctggcccccctcctaacatgacctcaaacagaagactccagcagacccaggcacaggtcgaggaagttgttgacattatcagggtaaatgtggataaggttctggaacgagatcagaagctgagtgaactggacgatagggctgatgctttacaggcaggtgcctctcagtttgaatcaagcgcagccaagttgaagagaaaatattggtggaaaaattgtaaaatgatgattatgctgggagcgatttgtgccatcatcgtagtagtaatcgtgtctaaatacagatag

SEQ ID NO: 261364 - DNA, 354 bp, Artificial Sequence
  derived and/or modified sequence
atgtctgccccagcccagcccccagctgagggcacagagggcacagcccctgggggcggccccccaggccccccacccaacatgaccagcaacagaaggctgcagcagacccaggcccaggtggaggaggtggtggacatcatccgggtgaatgtggacaaggtgctggagcgggaccagaagctgtctgagctggatgacagagcagatgccctgcaggccggggccagccagtttgagagcagcgctgccaagctgaagaggaagtactggtggaagaactgcaagatgatgatcatgctgggcgccatctgtgccatcatcgtggtggtgattgtgtccaagtacagatag

SEQ ID NO: 261365 - DNA, 354 bp, Artificial Sequence
  derived and/or modified sequence
atgagcgcccccgcccagccccccgccgagggcaccgagggcaccgcccccggtggtggcccacccggacctcccccaaacatgacatcaaacaggaggctccagcagactcaggctcaggtggaagaagtggttgacatcatccgggtaaacgttgacaaggtgctcgagagggatcagaagctatctgagctcgacgatagggcagacgccctgcaggctggcgcttcacaatttgaatccagcgccgctaagctcaagcgtaagtattggtggaaaaattgcaaaatgatgattatgttgggagccatttgtgccattattgtcgtggtcatcgtgtccaaatatagatag

SEQ ID NO: 261366 - DNA, 354 bp, Artificial Sequence
  derived and/or modified sequence
atgtctgctccggcacaacccccagccgagggtacagaaggaactgcacctggcggtggcccacccggacccccacctaatatgacgagtaataggcgactgcagcaaacccaggcccaggtggaagaagttgtcgatatcatccgggtgaatgtggataaggtactggagagagaccagaagttgagcgagctggatgacagggctgacgccctccaggcgggtgcttcccagtttgaaagcagcgctgcgaagttgaaaagaaagtattggtggaaaaactgtaagatgatgatcatgctcggagcaatttgcgccattatcgtggtagttatagtatctaaatatagatag

SEQ ID NO: 261367 - DNA, 3449 bp, Artificial Sequence
  derived and/or modified sequence
accacaaatgcctaacaaactgctgaagcgccctccgaagggacagacctcatctccaccccgccccgtccctccgccagactggagcgcaaactatggtcgcattgatcactgaaggatcctcacagcaaccgctcctttccggagtcggatgagaggagagttgtgactggcaattggcaggggcggggcgggctaggcctgtagcgctgggcgaccgtcctgggcatggattgggccgcggggttgtcaccgttatccgggaggcgtggtcagcactaataaaggcggaggccggcgcggcagctgcagtaagttccagcgcagctagaccgcggggtagtcggcgcgaggcggagcttggcagttccgtccacttcagccgcagcgtccctcaccgggtgtctcgccgcagcctccggagaggaacagaccctcactctctctgtcagaaaaatgtctgctccagctcagccacctgctgaagggacagaagggactgccccaggtgggggtccccctggccctcctcctaacatgaccagtaacagacgactacagcaaacccaggcacaagtggaggaggtggtggacatcatacgtgtgaacgtggacaaggtcctggagagggaccagaagctgtcagagctggatgaccgagctgatgccttgcaggcaggagcatcacaatttgagagcagtgctgccaagctaaagaggaagtattggtggaaaaactgcaagatgatgatcatgctgggagccatctgtgccatcatcgtggtagttattgtaagtaagtatcgctgaagttgctggtggggtgaagaggtgggaaggtcctggagtcttctccctgcctgcctgcctgcctggggagtggggctgctctgactgaggtatggagaccgctgctatgggatcgtcacctggttcgggacgggggaagggcagagacaagggatttctttgatggacaagccttccccctgcaacgcattgcagggagatggcgcctcctgttctgaggaagtggggctatgctgtgtgtcactggcttgggttggagggagaccatggggatggggcacttaacaatggagagacctgaatgtctggtaacttggtgtaattcaccctcttgttttctcctgtctctttctcttttccgtctgggacttcctgattcctgtgtccagtctacttttttacttgagaatgtaccaccccttccctgttgtccattgccatccacattcatgtcctctgccctctgtttgctctctcaacacacttccccacccaccgtcctccattccagcccaggcttctccatcacccattcctcctttttcgttgcgttcatttgcactctgtccctcaacactagaaatgctgctcgtggcacaatctaagtcattacccgaagagcaacagctggcgcctcctccctgcctgctttttctgtactctcaagttcccccaaagccccaaagagttggaggccaagggaaggggcagggaggggagtggctgaggcgaagtacccatgaagctgcccagacttgggaggagaagagtatcggtgcccatggtgacttctagaaaacctggccactggtaggagctagggaggggctgggaagatggcagctcactcagtactgcctggtcatgtggagctttccttcctggaccaggcctgaagagggtcctgggggtggaccaaagtccaacttggtttcagtgcagtacccttttcgaaagtaaaaacttgttttttgtagttatttctaatctgttcgtccaggattttccgtgtctttggggatcttacaactttactttgttctccagaggcctggagaacacttagggattgtgaaaatagcaggacttgtttccatcctagaagcagtcccatgtgcttctagctggaaggagctttctcttctttacattttctacagcattctgtatgagggcaccaaataaatccatctagctggtagttttatctagccaaataatttaacctagctcccagttaattgttggcataaagagagagattgcctgttagttatagagaaacagtgagtcaagtgcttaatttgaaagtaacaagctcagaggaagccactccttgccctcgttaaagagggtcctgttcctctcttcctgttgatgaaggagcgtgagggtgttagcagtgtgagatctttggacacccatggaatcctttcctccacaccacccgtgcacttgccaaagacagggatgaggcaagtggttcttcctggggcccggccgatcctcaggatgcagagaagtcatgtagacccaccagccccaccttggggggaggcgtgccagcctgtgtcaggtgtgcttgtgtattgctgtgctgtcatggggccctctccttgagagccgcctctctgttcttcctgtagtatattcccctttgaaccaccctttcctgtctgaattctactttgcctcctttctcttcctcctctttgcatggtttgtgtgtatagacagtggaacctgaggatgggatctgctcagcctatcttcggggcaattgctgagcttcaggatgggctattaatgtgggataagcccaggtgcaaggggaggagggcaggctgggaacagagcggagaatgcccatggccctttattccttcttccctcggtccacgaacaggaagaggctgaggccatgctgggcagggtctggatgcccactttccatgcagcagcatttcattgctcaaaaccatccttcctttcctttcgcccttgtttcccacattcccttcgtcctgcccaagggcgggactgaagagctggaagaaagcagtcagtaccctcccaacggcccccctcgaaggtctccactctcctctgggctcctccttgcctaatgcagggggtcaccgctggagaagaaccaccactgtcctcgatgtgtcccaagcctggagcgaatccgtcctcttggctctcccagccctatcacaggaatcattcctgggtttctgtccctctgaggctcaccaggtgtagttggccttgttctttgggggtattagcccttctactttctttctcacccaccctgtaccctcttctgtgtgtctctgctatccccctttcctcccaccacccatgtgcatgagcaaatgtgcaacaaaaccctgggactttgcagtcaaatgaagctgagcttcccacatcccgttcttcggtttgccatgagacgatgtggggtttccactgtgtgtctgtcatcacctctttgtctttttttcctaaccctgatctcatacttgtatagagtaataacaacagttgtacttccaccaaaggcatgtggcatatttaccaatgtcatgtattctgaacaaaggcaaaaaatacaaattcctaccattaaa

SEQ ID NO: 261368 - protein, 295 aa, Artificial Sequence
  derived and/or modified sequence
MIEVLTTTDSQKLLHQLNALLEQESRCQPKVCGLRLIESAHDNGLRMTARLRDFEVKDLLSLTQFFGFDTETFSLAVNLLDRFLSKMKVQPKHLGCVGLSCFYLAVKSIEEERNVPLATDLIRISQYRFTVSDLMRMEKIVLEKVCWKVKATTAFQFLQLYYSLLQENLPLERRNSINFERLEAQLKACHCRIIFSKAKPSVLALSIIALEIQAQKCVELTEGIECLQKHSKINGRDLTFWQELVSKCLTEYSSNKCSKPNVQKLKWIVSGRTARQLKHSYYRITHLPTIPEMVP

SEQ ID NO: 261369 - protein, 136 aa, Artificial Sequence
  derived and/or modified sequence
MIEVLTTTDSQKLLHQLNALLEQESRCQPKVCGLRLIESAHDNGLRMTARLRDFEVKDLLSLTQFFGFDTETFSLAVNLLDRFLSKMKVQPKHLGCVGLSCFYLAVKSIEEERNVPLATDLIRISQYRFTVSDLMR

SEQ ID NO: 261370 - protein, 167 aa, Artificial Sequence
  derived and/or modified sequence
MSAKDLMRMEKIVLEKVCWKVKATTAFQFLQLYYSLLQENLPLERRNSINFERLEAQLKACHCRIIFSKAKPSVLALSIIALEIQAQKCVELTEGIECLQKHSKINGRDLTFWQELVSKCLTEYSSNKCSKPNVQKLKWIVSGRTARQLKHSYYRITHLPTIPEMVP

SEQ ID NO: 261371 - protein, 115 aa, Artificial Sequence
  derived and/or modified sequence
MIEVLTTTDSQKLLHQLNALLEQESRCQPKVCGLRLIESAHDNGLRMTARLRDFEVKDLLSLTQFFGFDTETFSLAVNLLDRFLSKMKVQPKHLGCVGLSCFYLAVKSIEEERNV

SEQ ID NO: 261372 - protein, 161 aa, Artificial Sequence
  derived and/or modified sequence
MRMEKIVLEKVCWKVKATTAFQFLQLYYSLLQENLPLERRNSINFERLEAQLKACHCRIIFSKAKPSVLALSIIALEIQAQKCVELTEGIECLQKHSKINGRDLTFWQELVSKCLTEYSSNKCSKPNVQKLKWIVSGRTARQLKHSYYRITHLPTIPEMVP

SEQ ID NO: 261373 - protein, 34 aa, Artificial Sequence
  derived and/or modified sequence
MIEVLTTTDSQKLLHQLNALLEQESRCQPKRHFL

SEQ ID NO: 261374 - DNA, 888 bp, Artificial Sequence
  derived and/or modified sequence
atgatcgaggtgctgaccaccaccgacagccagaagctgctgcaccagctgaacgccctgctggagcaggagagcagatgccagcccaaggtgtgcggcctgagactgatcgagagcgcccacgacaacggcctgagaatgaccgccagactgagagacttcgaggtgaaggacctgctgagcctgacccagttcttcggcttcgacaccgagaccttcagcctggccgtgaacctgctggacagattcctgagcaagatgaaggtgcagcccaagcacctgggctgcgtgggcctgagctgcttctacctggccgtgaagagcatcgaggaggagagaaacgtgcccctggccaccgacctgatcagaatcagccagtacagattcaccgtgagcgacctgatgagaatggagaagatcgtgctggagaaggtgtgctggaaggtgaaggccaccaccgccttccagttcctgcagctgtactacagcctgctgcaggagaacctgcccctggagagaagaaacagcatcaacttcgagagactggaggcccagctgaaggcctgccactgcagaatcatcttcagcaaggccaagcccagcgtgctggccctgagcatcatcgccctggagatccaggcccagaagtgcgtggagctgaccgagggcatcgagtgcctgcagaagcacagcaagatcaacggcagagacctgaccttctggcaggagctggtgagcaagtgcctgaccgagtacagcagcaacaagtgcagcaagcccaacgtgcagaagctgaagtggatcgtgagcggcagaaccgccagacagctgaagcacagctactacagaatcacccacctgcccaccatccccgagatggtgccctag

SEQ ID NO: 261375 - DNA, 411 bp, Artificial Sequence
  derived and/or modified sequence
atgatcgaggtgctgaccaccaccgacagccagaagctgctgcaccagctgaacgccctgctggagcaggagagcagatgccagcccaaggtgtgcggcctgagactgatcgagagcgcccacgacaacggcctgagaatgaccgccagactgagagacttcgaggtgaaggacctgctgagcctgacccagttcttcggcttcgacaccgagaccttcagcctggccgtgaacctgctggacagattcctgagcaagatgaaggtgcagcccaagcacctgggctgcgtgggcctgagctgcttctacctggccgtgaagagcatcgaggaggagagaaacgtgcccctggccaccgacctgatcagaatcagccagtacagattcaccgtgagcgacctgatgagatag

SEQ ID NO: 261376 - DNA, 348 bp, Artificial Sequence
  derived and/or modified sequence
atgatcgaggtgctgaccaccaccgacagccagaagctgctgcaccagctgaacgccctgctggagcaggagagcagatgccagcccaaggtgtgcggcctgagactgatcgagagcgcccacgacaacggcctgagaatgaccgccagactgagagacttcgaggtgaaggacctgctgagcctgacccagttcttcggcttcgacaccgagaccttcagcctggccgtgaacctgctggacagattcctgagcaagatgaaggtgcagcccaagcacctgggctgcgtgggcctgagctgcttctacctggccgtgaagagcatcgaggaggagagaaacgtgtag

SEQ ID NO: 261377 - DNA, 105 bp, Artificial Sequence
  derived and/or modified sequence
atgatcgaggtgctgaccaccaccgacagccagaagctgctgcaccagctgaacgccctgctggagcaggagagcagatgccagcccaagagacacttcctgtag

SEQ ID NO: 261378 - DNA, 2458 bp, Artificial Sequence
  derived and/or modified sequence
agggcaggcgcggccccttcggctccgagctgaccctgatcagggccgagttgtctcggcggcgctgccgaggcctccacccaggacagtccccctccccgggcctctctcctcttgcctacgagtcccctctcctcgtaggcctctcggatctgatatcgtggggtgaggtgagcaggcccggggagggtggttaccgctgaggagctgcagtctctgtcaagatgatagaggtactgacaacaactgactctcagaaactgctacaccagctgaatgccctgttggaacaggagtctagatgtcagccaaaggtctgtggtttgagactaattgagtctgcacacgataatggcctcagaatgactgcaagactaagggactttgaagtaaaagatcttcttagtctaactcagttctttggctttgacacagagacattttctctagctgtgaatttactggacagattcctgtctaaaatgaaggtacagcccaagcaccttgggtgtgttggactgagctgcttttatttggctgtaaaatcaatagaagaggaaaggaatgtcccattggcaactgacttgatccgaataagtcaatataggtttacggtttcagacttgatgagaatggaaaagattgtattggagaaggtgtgttggaaagtcaaagctactactgcctttcaatttctgcaactgtattattcactccttcaagagaacttgccacttgaaaggagaaatagcattaattttgaaagactagaagctcaactgaaggcatgtcattgcaggatcatattttctaaagcaaagccttctgtgttggcattgtctatcattgcattagagatccaagcacagaagtgtgtagagttaacagaaggaatagaatgtcttcagaaacattccaagataaatggcagagatctgaccttctggcaagagcttgtatccaaatgtttaactgaatattcatcaaataagtgttccaaaccaaatgttcagaagttgaaatggattgtttctgggcgtactgcacggcaattgaagcatagctactacagaataactcaccttccaacaattcctgaaatggtcccttaactggattattacagcaccaaaaaacttctctgaagcctttctccacaaccttgttctatggattccataatgttacaatggatttaagctatgaagcctcaaaacatcacgagataagcatgatggtctcagacttgggaaaactgcctaatattatgctgtagtggaattatgtttagatttgaattcatctgtgaagcattcaaatcaaagctaaaagcctaaatgtgaaatgctaatgacaagcctgagaaggtaaactgtgaatcttcatttctatcattgatctaactttagatattggatcaatatatttaggtggtattgaaaatgctattggaggagtcacactaatactatcaactatcagtcttcccacagcttcaatcactgtcattattctaatcctactcctacttaaattttaagttatgaggtttatgtcaaaagcaacatttcacaaatgtacttttaaggcataataagggttaacattctaggcagtataaacacaccccataatgcaagtaataggtaatctagagatgtggactttattgctatatgggaattacatttaaatttgagggcattttatataaagaaaaatacagacctataaagtttggcatattcattaagttatcttttaatatttttttctagaaaacaggtgacatttgtatctacgataaaaatttttatacagaacctactgcctcaaactgaatcccatcaagaaaactagtttctattgtattagtaactcaaaataaattatcacttcgaaaacttgctttcccacactaaggtaagttcagactagattgaacactccagaattttttactacagactgtttttaagttagaagtgatggcaattttataaatagagaatatacttccactgatgcccttactgtgccaaaacaaaaatcttaagaaaagcaagtagacaccttcataactatgaatgaagctgctgaagtagtgtttaggatcctccatggcagttagtgaatgtaagaagtacagtgttaaagtgttgtaaacagttactcagtgcaatgtatagcctgagtctatccatgatggctatatccaatttgacatcacgttatggatcagtacacaatgaaaaaccaaagaaccacagtatatcttattcttaacttttgtaaaccatgttttatgggtaactttttagttttcccaaaaggctgataaatttcaatattttgaatacatcattgttaattttgagttggcagaggtaaactaaccaactaccattatgttttagtactaagggatatacctttcaataaagttaatgaaattcaa

SEQ ID NO: 261379 - DNA, 2366 bp, Artificial Sequence
  derived and/or modified sequence
attcctcgttagggcaggcgcggccccttcggctccgagctgaccctgatcagggccgagttgtctcggcggcgctgccgaggcctccacccagggagggtggttaccgctgaggagctgcagtctctgtcaagatgatagaggtactgacaacaactgactctcagaaactgctacaccagctgaatgccctgttggaacaggagtctagatgtcagccaaaggtctgtggtttgagactaattgagtctgcacacgataatggcctcagaatgactgcaagactaagggactttgaagtaaaagatcttcttagtctaactcagttctttggctttgacacagagacattttctctagctgtgaatttactggacagattcctgtctaaaatgaaggtacagcccaagcaccttgggtgtgttggactgagctgcttttatttggctgtaaaatcaatagaagaggaaaggaatgtcccattggcaactgacttgatccgaataagtcaatataggtttacggtttcagacttgatgagaatggaaaagattgtattggagaaggtgtgttggaaagtcaaagctactactgcctttcaatttctgcaactgtattattcactccttcaagagaacttgccacttgaaaggagaaatagcattaattttgaaagactagaagctcaactgaaggcatgtcattgcaggatcatattttctaaagcaaagccttctgtgttggcattgtctatcattgcattagagatccaagcacagaagtgtgtagagttaacagaaggaatagaatgtcttcagaaacattccaagataaatggcagagatctgaccttctggcaagagcttgtatccaaatgtttaactgaatattcatcaaataagtgttccaaaccaaatgttcagaagttgaaatggattgtttctgggcgtactgcacggcaattgaagcatagctactacagaataactcaccttccaacaattcctgaaatggtcccttaactggattattacagcaccaaaaaacttctctgaagcctttctccacaaccttgttctatggattccataatgttacaatggatttaagctatgaagcctcaaaacatcacgagataagcatgatggtctcagacttgggaaaactgcctaatattatgctgtagtggaattatgtttagatttgaattcatctgtgaagcattcaaatcaaagctaaaagcctaaatgtgaaatgctaatgacaagcctgagaaggtaaactgtgaatcttcatttctatcattgatctaactttagatattggatcaatatatttaggtggtattgaaaatgctattggaggagtcacactaatactatcaactatcagtcttcccacagcttcaatcactgtcattattctaatcctactcctacttaaattttaagttatgaggtttatgtcaaaagcaacatttcacaaatgtacttttaaggcataataagggttaacattctaggcagtataaacacaccccataatgcaagtaataggtaatctagagatgtggactttattgctatatgggaattacatttaaatttgagggcattttatataaagaaaaatacagacctataaagtttggcatattcattaagttatcttttaatatttttttctagaaaacaggtgacatttgtatctacgataaaaatttttatacagaacctactgcctcaaactgaatcccatcaagaaaactagtttctattgtattagtaactcaaaataaattatcacttcgaaaacttgctttcccacactaaggtaagttcagactagattgaacactccagaattttttactacagactgtttttaagttagaagtgatggcaattttataaatagagaatatacttccactgatgcccttactgtgccaaaacaaaaatcttaagaaaagcaagtagacaccttcataactatgaatgaagctgctgaagtagtgtttaggatcctccatggcagttagtgaatgtaagaagtacagtgttaaagtgttgtaaacagttactcagtgcaatgtatagcctgagtctatccatgatggctatatccaatttgacatcacgttatggatcagtacacaatgaaaaaccaaagaaccacagtatatcttattcttaacttttgtaaaccatgttttatgggtaactttttagttttcccaaaaggctgataaatttcaatattttgaatacatcattgttaattttgagttggcagaggtaaactaaccaactaccattatgttttagtactaagggatatacctttcaataaagttaatgaaattc

SEQ ID NO: 261380 - DNA, 564 bp, Artificial Sequence
  derived and/or modified sequence
cccttcggctccgagctgaccctgatcagggccgagttgtctcggcggcgctgccgaggcctccacccaggacagtccccctccccgggcctctctcctcttgcctacgagtcccctctcctcgtaggcctctcggatctgatatcgtggggtgagatgatagaggtactgacaacaactgactctcagaaactgctacaccagctgaatgccctgttggaacaggagtctagatgtcagccaaaggtctgtggtttgagactaattgagtctgcacacgataatggcctcagaatgactgcaagactaagggactttgaagtaaaagatcttcttagtctaactcagttctttggctttgacacagagacattttctctagctgtgaatttactggacagattcctgtctaaaatgaaggtacagcccaagcaccttgggtgtgttggactgagctgcttttatttggctgtaaaatcaatagaagaggaaaggaatgtcccattggcaactgacttgatccgaataagtcaatataggtttacggtttcagacttgatgaga

SEQ ID NO: 261381 - DNA, 418 bp, Artificial Sequence
  derived and/or modified sequence
gagctgaccctgatcagggccgagttgtctcggcggcgctgccgaggcctccacccaggacagtctctgtcaagatgatagaggtactgacaacaactgactctcagaaactgctacaccagctgaatgccctgttggaacaggagtctagatgtcagccaaaggtctgtggtttgagactaattgagtctgcacacgataatggcctcagaatgactgcaagactaagggactttgaagtaaaagatcttcttagtctaactcagttctttggctttgacacagagacattttctctagctgtgaatttactggacagattcctgtctaaaatgaaggtacagcccaagcaccttgggtgtgttggactgagctgcttttatttggctgtaaaatcaatagaagaggaaaggaatgt

SEQ ID NO: 261382 - DNA, 1143 bp, Artificial Sequence
  derived and/or modified sequence
ccccttcggctccgagctgaccctgatcagggccgagttgtctcggcggcgctgccgaggcctccacccagggagggtggttaccgctgaggagctgcagtctctgtcaaggtacagcccaagcaccttgggtgtgttggactgagctgcttttatttggctgtaaaatcaatagaagaggaaaggaatgtcccattggcaactgacttgatccgaataagtcaatataggtttacggtttcagacttgatgagaatggaaaagattgtattggagaaggtgtgttggaaagtcaaagctactactgcctttcaatttctgcaactgtattattcactccttcaagagaacttgccacttgaaaggagaaatagcattaattttgaaagactagaagctcaactgaaggcatgtcattgcaggatcatattttctaaagcaaagccttctgtgttggcattgtctatcattgcattagagatccaagcacagaagtgtgtagagttaacagaaggaatagaatgtcttcagaaacattccaagataaatggcagagatctgaccttctggcaagagcttgtatccaaatgtttaactgaatattcatcaaataagtgttccaaaccaaatgttcagaagttgaaatggattgtttctgggcgtactgcacggcaattgaagcatagctactacagaataactcaccttccaacaattcctgaaatggtcccttaactggattattacagcaccaaaaaacttctctgaagcctttctccacaaccttgttctatggattccataatgttacaatggatttaagctatgaagcctcaaaacatcacgagataagcatgatggtctcagacttgggaaaactgcctaatattatgctgtagtggaattatgtttagatttgaattcatctgtgaagcattcaaatcaaagctaaaagcctaaatgtgaaatgctaatgacaagcctgagaaggtaaactgtgaatcttcatttctatcattgatctaactttagatattggatcaatatatttaggtggtattgaaaatgctattggaggagtcacactaatactatcaactatcagtcttcccacagcttcaatcactgtcattattctaatcc

SEQ ID NO: 261383 - DNA, 919 bp, Artificial Sequence
  derived and/or modified sequence
atattcctcgttagggcaggcgcggccccttcggctccgagctgaccctgatcagggccgagttgtctcggcggcgctgccgaggcctccacccaggacagtccccctccccgggcctctctcctcttgcctacgagtcccctctcctcgtaggcctctcggatctgatatcgtggggtgaggtgagcaggcccggggagggtggttaccgctgaggagctgcagtctctgtcaaggtacagcccaagcaccttgggtgtgttggactgagctgcttttatttggctgtaaaatcaatagaagaggaaaggaatgtcccattggcaactgacttgatccgaataagtcaatataggtttacggtttcagacttgatgagaatggaaaagattgtattggagaaggtgtgttggaaagtcaaagctactactgcctttcaatttctgcaactgtattattcactccttcaagagaacttgccacttgaaaggagaaatagcattaattttgaaagactagaagctcaactgaaggcatgtcattgcaggatcatattttctaaagcaaagccttctgtgttggcattgtctatcattgcattagagatccaagcacagaagtgtgtagagttaacagaaggaatagaatgtcttcagaaacattccaagataaatggcagagatctgaccttctggcaagagcttgtatccaaatgtttaactgaatattcatcaaataagtgttccaaaccaaatgttcagaagttgaaatggattgtttctgggcgtactgcacggcaattgaagcatagctactacagaataactcaccttccaacaattcctgaaatggtcccttaactggattattacagcaccaaaaaacttctctgaagcctttctccacaaccttgttctat

SEQ ID NO: 261384 - DNA, 2796 bp, Artificial Sequence
  derived and/or modified sequence
ggccccttcggctccgagctgaccctgatcagggccgagttgtctcggcggcgctgccgaggcctccacccagggagggtggttaccgctgaggagctgcagtctctgtcaagatgatagaggtactgacaacaactgactctcagaaactgctacaccagctgaatgccctgttggaacaggagtctagatgtcagccaaagagacattttctctagctgtgaatttactggacagattcctgtctaaaatgaaggtacagcccaagcaccttgggtgtgttggactgagctgcttttatttggctgtaaaatcaatagaagaggaaaggaatgtcccattggcaactgacttgatccgaataagtcaatataggtttacggtttcagacttgatgagaatggaaaagattgtattggagaaggtgtgttggaaagtcaaagctactactgcctttcaatttctgcaactgtattattcactccttcaagagaacttgccacttgaaaggagaaatagcattaattttgaaagactagaagctcaactgaaggcatgtcattgcaggatcatattttctaaagcaaagccttctgtgttggcattgtctatcattgcattagagatccaagcacagaagtgtgtagagttaacagaaggaatagaatgtcttcagaaacattccaagataaatggcagagatctgaccttctggcaagagcttgtatccaaatgtttaactgaatattcatcaaataagtgttccaaaccaaatgttcagaagttgaaatggattgtttctgggcgtactgcacggcaattgaagcatagctactacagaataactcaccttccaacaattcctgaaatggtcccttaactggattattacagcaccaaaaaacttctctgaagcctttctccacaaccttgttctatggattccataatgttacaatggatttaagctatgaagcctcaaaacatcacgagataagcatgatggtctcagacttgggaaaactgcctaatattatgctgtagtggaattatgtttagatttgaattcatctgtgaagcattcaaatcaaagctaaaagcctaaatgtgaaatgctaatgacaagcctgagaagaaaacaggtgacatttgtatctacgataaaaatttttatacagaacctactgcctcaaactgaatcccatcaagaaaactagtttctattgtattagtaactcaaaataaattatcacttcgaaaacttgctttcccacactaagaaaccaaaaaacagtaaacatgagtcaagatgaattaaaagataagccaatttttaaggccgagcgcagtggctcacacctgtaatcccagcactttgggaggccaaggtggacggatcacttgaggccaggagttcgagaccagcatggccaacatggtgaaaccccatctctactaaaaatacaaaaatcagctgggtgtggtggcgcatgcctgtagtaccagttactccagagactgaggcaggagaattgcttgaacctgtgaggcagtgagacaagatcacaccactgctctccaacctgggcaacagagtgaggctcttgtctcaaaaaataaattaaaaagccatttttatattcatcaaagtagagttaggaacaaccaaaattgccaaggataattagggacattatataatgataaaattcaccaagacagtgctaaaagtgtaagcacttattatcagatcttaaaaatacatgaagagaccaggtacagagactcattcattcctgtaattccaatgctttgggaagccaaggtgggaggattgcttgaggccaagagttcaagaccagcctactcaacatagggagaccctatctctacaaaaaatcaaaaattagctaggcatagtgatatacatctgtagtcctaggtactgaggagcctgaggtgggaagactgtctgagcccaggagtttgaggctgcagtgaagcatgacagagttgctatgctccagcctgagtgacagggtaagactcaaaaaaaaaaaaaaaaacatgaagcaaaaagtggtagcattaaaaggaggactggacaaatcttcatttacagttggaaacttaaacattcctctctcagtagtccatagaattaatagaaaattagcaaagatgtaggaaaatggaataatactaataaccagctagatttaattgacataaaacccttctacctaaaacagcagaataagcattcttttcaagtacacatggaacactcaccaagataaaccacatcatgggtcttaaaccttaacaaatttaaaagagatgaaatcatataaaatatgttttttgaccataatctagaaatcagtaacagcaagaaaatctccaaacacttggaaattaaacaacacatttctaaataactcatgatactacagggaagtcttaaaaaatattttaaaataaatgaaaatatcaccgtgcttggaatgcagccatgctggtgctgcaatttataacaatcgactgctttttactaaacaagaaaaagttctcaaattaacactctaagctcccactttaagaaagtaggaaaatctaactgggtgtggtggcacaccactatagtcccagccactcagaaggctgaggtaggaggatcatgaccccacgagtttgaggctgcagtgagctatgatcataacactactccagtctgggtgatgaagtgagacctgtctacaaaaaaaagaagcccaaactaaacctaaagcaagc

SEQ ID NO: 261385 - DNA, 888 bp, Artificial Sequence
  derived and/or modified sequence
atgatcgaagtgctcacaaccactgactcacagaaactgctccatcaattgaatgccctgcttgagcaggagtctagatgccagccaaaggtttgtggcctccgccttattgagagcgcccacgataacggactccggatgactgctaggttgagagactttgaggtcaaagacctgttatcgcttacacaattcttcggctttgatactgagacattttccctggccgtgaatttgttagatcgcttcctgtcaaaaatgaaggtacagcctaaacatttaggctgtgtgggtctctcctgtttttacctcgctgttaaatcaatcgaagaggagcgcaacgttcctctggccactgaccttatccggattagtcagtacaggtttaccgtctccgacctcatgcgaatggaaaaaattgtgctggagaaggtgtgctggaaagtcaaagcaacaaccgcattccaattcctccagctctattactccttgctacaggagaacctgccgttggaaaggcggaattctataaattttgaaagactggaagctcagctgaaggcctgtcactgcaggattatcttctcgaaggcaaaaccttctgtgctggctttgtccattatcgcgctcgaaatccaggctcagaaatgcgtcgagctcaccgagggcattgagtgcctgcagaaacatagcaagatcaatgggcgggacctaactttctggcaggaactggttagcaagtgtctgacggaatactcgagcaacaagtgctccaaacccaatgttcagaagttaaagtggatcgtgtccggccggaccgctcgacaactgaagcactcttattatcggatcacgcatctgcccacaatcccggagatggtgccgtag

SEQ ID NO: 261386 - DNA, 888 bp, Artificial Sequence
  derived and/or modified sequence
atgatcgaagtactgaccacaacagactctcagaagctgctgcaccaactgaatgcacttctagagcaggagagccgttgtcagcccaaagtgtgtggcctacgactcattgaatctgcacacgataacggccttcggatgaccgcccgtctgcgggatttcgaggtgaaggatttactgtctctgactcagttctttggtttcgacactgagacctttagtttggcggttaatttgctggatagatttctgtctaaaatgaaagtgcagcccaaacacttaggatgcgtcgggctctcttgtttttatctcgcagtgaaatcaattgaggaggaaagaaacgtgccgctagcaacagacttgattaggatcagccagtatcggtttacagtgtccgacctaatgcggatggaaaagattgttctggagaaggtgtgttggaaggttaaggccacaacagcgtttcagtttctgcagctttactattcactactccaggaaaatctccctctggagagaagaaatagcatcaactttgagaggctagaagcccagctaaaagcgtgtcactgccggatcatattttcgaaggcaaagccaagcgtgttggcgctctccattatcgcattggagatacaagctcaaaaatgtgtcgaactgaccgaagggattgagtgcctgcaaaagcacagcaagataaacggcagagatctcaccttctggcaggagcttgtctcaaaatgcctgacagagtatagttccaataaatgttcaaaaccaaatgttcagaagctcaaatggatcgtgtctggtaggaccgcacgtcagctcaagcacagttattacaggatcacccatctacccacaattccagaaatggtcccctag

SEQ ID NO: 261387 - DNA, 411 bp, Artificial Sequence
  derived and/or modified sequence
atgatcgaggtcctgacaacgacagattcccagaagttgctgcatcaactgaatgcgctgctagaacaggaatctcgctgccagcccaaagtttgcggcctgcgcttgatcgagtcagcgcacgataatggcctgcgcatgactgccaggctccgggacttcgaagtcaaggacttactgtcactgacccagttctttgggttcgatacggagacattttccctcgctgtgaacctgttagacagatttttgagtaaaatgaaggtgcagccaaagcacttgggttgcgtcgggctgagctgtttctatcttgcagtgaagagtattgaggaggaacggaatgtaccgctggcaaccgacctgatcagaatcagccaatataggttcaccgtttctgacctgatgaggtag

SEQ ID NO: 261388 - DNA, 411 bp, Artificial Sequence
  derived and/or modified sequence
atgattgaggtcctgactaccactgattcccagaagctcctccatcaattgaacgctttattggaacaggaatctaggtgccagcctaaagtttgtgggctgcggctgattgaatccgcacacgacaatggacttagaatgacggctaggctgagagatttcgaggtaaaagacctgctgagcctcacccaattttttggtttcgacactgagacattctcactggcagtgaacctgctcgatcgattcttgtccaagatgaaggtgcagcccaaacatttgggctgtgtgggcctctcctgcttctatctagcagtgaagtccatcgaagaggagcggaacgtacctcttgctactgacctcattagaatctcccagtatcggtttaccgtctccgatttgatgcggtag

SEQ ID NO: 261389 - DNA, 348 bp, Artificial Sequence
  derived and/or modified sequence
atgatcgaagtgttgaccacgaccgattcacagaagctgctccaccaactgaatgcgctgctggagcaggaatctcgctgtcagcccaaggtgtgtgggctgcgactgatcgagtcagcacatgataacggcttacggatgactgcgcggcttcgagatttcgaagtgaaggatctcctgtcactgacacagtttttcgggtttgataccgaaacattcagccttgccgtcaatctccttgatcgctttctgtccaagatgaaggtgcagcccaaacatttggggtgtgtgggcctgtcatgcttttatttagccgtcaagtccatagaagaagaacgcaacgtttag

SEQ ID NO: 261390 - DNA, 105 bp, Artificial Sequence
  derived and/or modified sequence
atgatcgaggtgctgaccaccacggacagtcaaaagctgctacaccagcttaacgcgttactggagcaggagtctcggtgccaacccaaacgccactttttgtag

SEQ ID NO: 261391 - DNA, 888 bp, Artificial Sequence
  derived and/or modified sequence
atgattgaggtgctgaccaccacagacagccagaagctgctgcaccagctgaatgccctgctggagcaggagagccgctgccagcccaaggtgtgtggcctgcggctgattgaaagtgcccatgacaatggcctgaggatgacagcccggctgcgggactttgaggtgaaggacctgctgagcctgacccagttcttcggctttgacacagagaccttcagcctggccgtgaacctgctggaccgcttcctgagcaagatgaaggtgcagcccaagcacctgggctgtgtgggcctgagctgcttctacctggccgtgaagagcattgaggaggagagaaatgtgcccctggccacagacctgatccgcatcagccagtaccgcttcaccgtgtctgacctgatgaggatggagaagatcgtgctggagaaggtgtgctggaaggtgaaggccaccacagccttccagttcctgcagctgtactacagcctgctgcaggagaacctgcccctggagaggaggaacagcatcaactttgagcggctggaggcccagctgaaggcctgccactgccgcatcatcttcagcaaggccaagcccagcgtgctggccctgagcatcatcgccctggagatccaggcccagaagtgtgtggagctgacagagggcattgaatgtctgcagaagcacagcaagatcaatggccgggacctgaccttctggcaggagctggtgtccaagtgcctgacagagtacagcagcaacaagtgcagcaagcccaacgtgcagaagctgaagtggatcgtgtctggccgcacagcccggcagctgaagcacagctactaccgcatcacccacctgcccaccatccctgagatggtgccctag

SEQ ID NO: 261392 - DNA, 411 bp, Artificial Sequence
  derived and/or modified sequence
atgattgaggtgctgaccaccacagacagccagaagctgctgcaccagctgaatgccctgctggagcaggagagccgctgccagcccaaggtgtgtggcctgcggctgattgaaagtgcccatgacaatggcctgaggatgacagcccggctgcgggactttgaggtgaaggacctgctgagcctgacccagttcttcggctttgacacagagaccttcagcctggccgtgaacctgctggaccgcttcctgagcaagatgaaggtgcagcccaagcacctgggctgtgtgggcctgagctgcttctacctggccgtgaagagcattgaggaggagagaaatgtgcccctggccacagacctgatccgcatcagccagtaccgcttcaccgtgtctgacctgatgaggtag

SEQ ID NO: 261393 - DNA, 348 bp, Artificial Sequence
  derived and/or modified sequence
atgattgaggtgctgaccaccacagacagccagaagctgctgcaccagctgaatgccctgctggagcaggagagccgctgccagcccaaggtgtgtggcctgcggctgattgaaagtgcccatgacaatggcctgaggatgacagcccggctgcgggactttgaggtgaaggacctgctgagcctgacccagttcttcggctttgacacagagaccttcagcctggccgtgaacctgctggaccgcttcctgagcaagatgaaggtgcagcccaagcacctgggctgtgtgggcctgagctgcttctacctggccgtgaagagcattgaggaggagagaaatgtgtag

SEQ ID NO: 261394 - DNA, 105 bp, Artificial Sequence
  derived and/or modified sequence
atgattgaggtgctgaccaccacagacagccagaagctgctgcaccagctgaatgccctgctggagcaggagagccgctgccagcccaagaggcacttcctgtag

SEQ ID NO: 261395 - DNA, 888 bp, Artificial Sequence
  derived and/or modified sequence
atgatcgaggtgctgaccaccaccgacagccagaagctgctgcaccaactgaatgcgttactggaacaggagagcaggtgccagccaaaggtctgtggtttaagactcattgaatctgcacacgacaatgggcttaggatgacagccaggttgcgcgatttcgaagttaaggacctcctgagcctcacgcaattcttcgggtttgatactgagactttcagcctggctgtcaatctgcttgaccggttcctcagcaagatgaaggtccagcccaagcatctagggtgcgtgggactcagctgtttctatttagccgtgaagtctatcgaggaggaacgaaacgtacctttggccaccgatctgattcggatcagccagtaccggtttactgtgagcgaccttatgcggatggagaaaatcgtccttgagaaggtttgctggaaggtgaaagcaacgaccgctttccaatttttgcagctttactactctttgcttcaggagaacctgcctctggagcggcggaatagcatcaactttgagagactcgaagctcagctcaaagcctgccactgcagaatcatcttcagcaaggcaaagccttctgttctcgccctgagtatcattgcacttgagatccaagcgcagaagtgcgtcgagcttacagagggcatcgaatgtttgcagaagcatagtaagattaacggccgggacctgacattctggcaggagttggtgagtaagtgcctgactgaatactcatctaacaaatgctccaaacctaatgtccagaaactaaaatggatagtgtcgggaagaaccgcaagacagctgaagcacagctattaccggataactcatctccccactataccggagatggtaccttag

SEQ ID NO: 261396 - DNA, 888 bp, Artificial Sequence
  derived and/or modified sequence
atgatcgaggtgctgaccaccaccgacagccagaagctgctgcaccagctgaatgccctgctggaacaggaaagcaggtgtcagcctaaggtgtgtgggcttcgactgatcgaatccgcccacgacaacggtctaagaatgaccgcacggctcagagactttgaagtgaaagaccttctttcacttactcaatttttcggatttgataccgagacgttttctttggcggtaaaccttcttgaccggttcctgagcaaaatgaaggtccagccaaagcatttaggctgtgtggggttatcatgtttttatttggccgttaaaagcattgaagaggagcgcaacgtcccactggctactgacttaatacggattagtcagtatcgttttacagtatctgatctgatgaggatggagaaaattgtcctggagaaagtgtgttggaaggtaaaggccacaactgcttttcaattcctgcagctgtactattcgcttctccaggagaacttgcccctggagagaagaaattctatcaacttcgagagattggaagcccagctgaaagcatgccactgcaggattatcttttccaaagctaagccgtccgtgttagcattgtccatcattgcacttgagattcaggcccaaaagtgcgtggagctgaccgaaggtattgaatgcctccagaaacactctaagataaatggccgagacctgacattttggcaggagctggtgtctaagtgtctcactgagtactcctcaaacaagtgctccaagcccaacgtgcagaagttaaaatggatcgtttccggacgcaccgccagacagctcaaacattcatactaccgcattacacaccttcctacaattcctgaaatggtaccttag

SEQ ID NO: 261397 - DNA, 411 bp, Artificial Sequence
  derived and/or modified sequence
atgatcgaggtgctgaccaccaccgacagccagaagctgctgcaccaactcaacgctctccttgaacaagagtcacgatgccagcccaaggtgtgtggcctccgactgatcgaaagtgcccacgataacgggcttcggatgactgccagactccgtgattttgaagtgaaagatctgctgtcgcttacccagttctttggtttcgatacggagacattttcacttgcggtgaaccttctcgacaggttcttgagtaagatgaaagtgcagcccaaacacctggggtgcgtcggcttgagttgcttttatttagcagtgaagagtatcgaggaggaacgtaacgttcccttggccaccgacctgattagaatatcccagtacagatttacggtgagcgatctgatgagatag

SEQ ID NO: 261398 - DNA, 411 bp, Artificial Sequence
  derived and/or modified sequence
atgatcgaggtgctgaccaccaccgacagccagaagctgctgcaccagttgaatgccttactggaacaggaatctaggtgccaacccaaggtgtgcggactgagattaatcgagagcgcacatgataatggcctgcgcatgaccgcccggctccgggattttgaagtcaaggacttgctaagcttaacccagttcttcggctttgatacagagactttttcattggccgtgaacctcctcgaccgttttctcagtaagatgaaagtacagccaaaacatctgggatgtgtggggctgagttgtttctatctggctgtaaaatccattgaggaggaaaggaacgttccgctcgcgaccgatcttatcagaatctcccagtacaggtttacagtgtccgacctaatgcgatag

SEQ ID NO: 261399 - DNA, 348 bp, Artificial Sequence
  derived and/or modified sequence
atgatcgaggtgctgaccaccaccgacagccagaagctgctgcaccagctcaatgcattgctagaacaggaatctaggtgccagcctaaagtgtgtggactccggttgatagaatcagctcacgacaatggtcttcggatgacagccaggctccgtgatttcgaggtgaaagatctcctctcgctgactcagtttttcggctttgacacagaaacgtttagcttggcagtaaacttgctcgatagatttctcagcaagatgaaggttcaaccaaagcaccttggctgtgtaggacttagctgtttttatctggcggtgaagagtatagaagaggagaggaatgtgtag

SEQ ID NO: 261400 - DNA, 105 bp, Artificial Sequence
  derived and/or modified sequence
atgatcgaggtgctgaccaccaccgacagccagaagctgctgcaccagctgaatgctcttttagaacaggaatccaggtgtcagcccaagcggcattttttgtag

SEQ ID NO: 261401 - DNA, 888 bp, Artificial Sequence
  derived and/or modified sequence
atgattgaggtgcttaccacaactgattcccagaagctgctacatcagcttaatgctctcctcgagcaagaaagccggtgccagcctaaagtgtgtgggctccgcctgattgagagtgcccacgacaatggtcttcgcatgaccgccagactccgggatttcgaggtgaaagacctccttagcttgacccagtttttcggtttcgacactgagacattctccctcgctgttaatctgctggaccgattcctcagtaaaatgaaagtccaaccaaaacacctgggttgcgtaggcttgagttgtttttacctcgctgtcaagagtatcgaagaggagagaaatgttccactggcgacagatctaatccgtatttctcagtacaggttcacggtgtctgacttgatgcgcatggagaagatcgttctggagaaagtttgctggaaggtgaaagccacaaccgcttttcagttcctccaactgtattattctctacttcaggaaaaccttcctcttgagcgcaggaactccataaatttcgaacgacttgaggcccagctaaaagcctgtcattgccgaattattttttccaaagccaaaccctctgtcctggccctgagcataatcgctttggagattcaagcccagaagtgcgtagagctcacagaaggcatcgaatgtttgcagaagcactccaagatcaatggcagggacctgacgttctggcaggaattggtaagcaaatgtctgactgagtacagttctaataagtgttcaaaaccaaatgtgcaaaagctgaagtggatcgtgtctggaagaacagcacgccagctgaagcattcctattaccgcatcactcatctcccaacgattcccgagatggtaccctag

SEQ ID NO: 261402 - DNA, 888 bp, Artificial Sequence
  derived and/or modified sequence
atgatcgaggtactgaccaccactgactctcagaagttgctgcaccaattaaatgcactactagagcaggagagcagatgccaacccaaagtgtgtgggctccgattgattgagtccgcacatgataacggcttgcgaatgaccgctcggttgagggattttgaagttaaagacctgttgtcactaactcagttctttgggtttgacacagagaccttctcactggccgtgaaccttcttgacagatttctctctaagatgaaggtacagccaaaacaccttggatgcgtgggccttagttgcttctatctggccgtgaagtctatcgaggaggagcgcaatgtgcccctagcaacagacctcattcggatctctcagtaccgctttacagtcagcgatctgatgcggatggagaagatcgtgttggaaaaggtgtgttggaaggtgaaggctactactgcgtttcaatttttgcagctgtactactccctgcttcaagagaacctccccttggaacgccgtaacagcattaatttcgaaaggctcgaggctcagctgaaagcatgtcactgtaggatcattttttccaaagccaagcctagtgtcctggcactgtctatcatagcactcgaaattcaggcccagaaatgcgtagaacttaccgaaggaatagagtgcctgcagaagcatagtaagattaatggtagagatctgactttttggcaggagcttgttagcaaatgcttaacagagtacagtagtaataagtgctcaaagcctaatgtgcaaaaacttaaatggatcgtgtccgggcgaactgccagacagttgaaacacagctactatcgcattactcacctccctaccatccctgagatggtcccttag

SEQ ID NO: 261403 - DNA, 411 bp, Artificial Sequence
  derived and/or modified sequence
atgatcgaagtgttgactacaacagatagtcagaagttactacatcaactaaacgcacttcttgaacaagaaagtaggtgtcaaccaaaagtttgcggcctgcgattgatcgagagtgcacatgataacggactccgcatgaccgccagactgcgcgatttcgaggttaaggacttgctatcgctcacccagttttttggatttgacaccgagacatttagtctcgccgtgaacttgctcgatcggtttttgtctaaaatgaaggtccagcccaagcacctgggatgtgtcgggctttcttgtttctacctggcggtgaaaagcattgaggaggagcgcaatgtaccgttagccactgatctcattaggatctcccagtatcggtttaccgtatccgatttaatgcgatag

SEQ ID NO: 261404 - DNA, 411 bp, Artificial Sequence
  derived and/or modified sequence
atgattgaagtgctcactacaaccgattcgcagaaactcctccatcagctcaatgccttgctggaacaggagtcaagatgtcagccaaaagtgtgtggcctccggctgatcgagtcggcgcacgataatggtctgcggatgaccgccagattacgagacttcgaggtcaaggacctgctgagcctcactcaatttttcgggttcgataccgaaacattctcattagcagtgaacctcctggatcgcttcttgagtaaaatgaaggtgcagcctaagcacctggggtgcgtgggcctgtcatgcttttatctcgccgtcaaatcgatcgaagaagagaggaacgtacccctagcaacagacctgatccgcatttcccagtacaggttcaccgtgtccgatttaatgaggtag

SEQ ID NO: 261405 - DNA, 348 bp, Artificial Sequence
  derived and/or modified sequence
atgattgaggtgctgacgacaactgattctcagaaactgttacaccaactgaatgcattattggaacaggaatctcgctgccagcccaaggtctgtggtctgagactgatagagtcagctcacgataatggactgcgcatgaccgccaggttgcgggacttcgaggtgaaggaccttttgtcgctgactcagttcttcggctttgacactgaaacgttcagtctggccgttaaccttctggaccgcttcttgtctaagatgaaagtgcagcctaagcatctgggatgtgtcggcctgtcatgtttttacttggccgtgaagtccatcgaagaggaacgaaacgtgtag

SEQ ID NO: 261406 - DNA, 105 bp, Artificial Sequence
  derived and/or modified sequence
atgatcgaggtccttactactactgactcgcaaaagttactgcaccagttgaacgctcttctggagcaggagagccgctgtcaacccaagaggcatttcctctag

SEQ ID NO: 261407 - protein, 523 aa, Artificial Sequence
  derived and/or modified sequence
MVQKTSMSRGPYPPSQEIPMEVFDPSPQGKYSKRKGRFKRSDGSTSSDTTSNSFVRQGSAESYTSRPSDSDVSLEEDREALRKEAERQALAQLEKAKTKPVAFAVRTNVGYNPSPGDEVPVQGVAITFEPKDFLHIKEKYNNDWWIGRLVKEGCEVGFIPSPVKLDSLRLLQEQKLRQNRLGSSKSGDNSSSSLGDVVTGTRRPTPPASGNEMTNLAFELDPLELEEEEAELGEQSGSAKTSVSSVTTPPPHGKRIPFFKKTEHVPPYDVVPSMRPIILVGPSLKGYEVTDMMQKALFDFLKHRFDGRISITRVTADISLAKRSVLNNPSKHIIIERSNTRSSLAEVQSEIERIFELARTLQLVALDADTINHPAQLSKTSLAPIIVYIKITSPKVLQRLIKSRGKSQSKHLNVQIAASEKLAQCPPEMFDIILDENQLEDACEHLAEYLEAYWKATHPPSSTPPNPLLNRTMATAALAASPAPVSNLQVQVLTSLRRNLGFWGGLESSQRGSVVPQEQEHAM

SEQ ID NO: 261408 - DNA, 1572 bp, Artificial Sequence
  derived and/or modified sequence
atggtgcagaaaacatcaatgtccaggggcccatatcctccatcccaggagatacccatggaggtttttgacccatccccccagggtaagtatagcaagaggaaaggtaggtttaaacggagcgatggaagcacgagctcagatacaactagcaactcatttgttagacaggggagcgccgaatcctatacaagccggcccagcgactccgacgtgagtctggaggaagacagggaagctctgcgcaaagaggccgagaggcaggccctagctcagctagagaaggccaagacaaaaccggtggcatttgccgtgcgaacaaatgtagggtataatccatccccgggggatgaggttccagtgcaaggtgtcgccattacatttgagcctaaagattttctgcacatcaaggagaagtacaataacgattggtggattggtcgtcttgttaaggagggttgcgaggtgggctttattccctcccccgtgaaactggacagtctgcgtttgcttcaggagcagaagctgcgtcagaatagactaggtagctccaagagtggcgacaatagctcctcttctctcggagatgtcgtcaccggcacaaggcgtcccacacccccagcttcgggcaacgaaatgacaaacctggcttttgaattggatccgctcgaacttgaggaagaggaggcggaacttggcgaacagagtggtagtgctaaaacttcagtaagcagcgtgaccacgcctccgccccatggcaaaagaatcccattttttaagaagactgagcacgtcccaccttatgacgtggtgccctccatgcgacccattatcctcgtcggtccgagccttaagggatatgaagtgacggatatgatgcagaaagctttattcgatttcctgaagcatagattcgacggtagaattagcatcacaagggtgacagcagacatctcactcgcaaagagaagcgtgcttaacaaccccagcaaacacattatcatcgagcgttcaaacacacggtcatctctcgcggaagtgcagtctgaaattgagagaatctttgaactggccagaacactccagctggtcgctctcgatgccgataccatcaatcacccggctcagctgtctaagacaagtcttgccccaataatagtttacatcaagatcacctcgccgaaggttcttcagcgactgattaagtcaagaggcaagagtcagagcaaacacttaaacgtacagatcgccgctagcgagaagttggctcagtgcccgcctgagatgttcgacattatcctcgacgagaaccaactggaggacgcatgtgagcacctggcggaatatctggaagcctactggaaagccacacatcctccgagctccacacctcccaaccccctgctgaatcggacaatggcaactgctgcgttggccgcatccccagcccccgtcagcaatctccaggttcaagtcctgacatccttgcgccggaatttgggcttctggggcggattggagtcaagtcagcgcggctccgttgtgcctcaagaacaggagcatgctatgtag

SEQ ID NO: 261409 - DNA, 1572 bp, Artificial Sequence
  derived and/or modified sequence
atggtgcagaagacctccatgagccggggcccctacccacccagccaggagatccccatggaggtgtttgaccccagcccccagggcaagtacagcaagaggaagggccgcttcaagagaagtgatggcagcaccagcagtgacaccaccagcaacagctttgtgcggcagggcagcgctgagagctacaccagccggcccagcgacagtgatgtgtccctggaggaggaccgggaggccctgaggaaggaggccgagcggcaggccctggcccagctggagaaggccaagaccaagcctgtggcctttgctgtgaggaccaacgtgggctacaaccccagccctggagatgaggtgcctgtgcagggcgtggccatcacctttgagcccaaggacttcctgcacatcaaggagaagtacaacaatgactggtggattggccgcctggtgaaggagggctgtgaggtgggcttcatccccagccctgtgaagctggacagcctgcggctgctgcaggagcagaagctgcggcagaaccggctgggcagcagcaagagcggggacaacagcagcagcagcctgggagatgtggtgacaggcacccggcggcccaccccaccagccagcggaaatgagatgaccaacctggcctttgagctggaccccctggagctggaggaggaggaggccgagctgggggagcagagcggcagcgccaagacctctgtgtcctctgtgaccaccccaccaccccacggcaagaggatccccttcttcaagaagacagagcacgtgcccccctatgatgtggtgcccagcatgaggcccatcatcctggtgggccccagcctgaagggctatgaggtgacagacatgatgcagaaggccctgtttgacttcctgaagcacagatttgatggccgcatcagcatcaccagggtgacagctgacatcagcctggccaagaggtctgtgctgaacaaccccagcaagcacatcatcatcgagaggagcaacaccaggagcagcctggccgaggtgcagagcgagattgagcgcatctttgagctggcccggaccctgcagctggtggccctggatgctgacaccatcaaccacccagcccagctgagcaagaccagcctggcccccatcatcgtgtacatcaagatcaccagccccaaggtgctgcagaggctcatcaagagccggggcaagagccagagcaagcacctgaatgtgcagattgctgccagcgagaagctggcccagtgccccccagagatgtttgacatcatcctggatgagaaccagctggaggatgcctgtgagcacctggccgagtacctggaggcctactggaaggccacccacccccccagcagcaccccacccaaccccctgctgaacagaaccatggccacagctgccctggccgccagccctgcccctgtgagcaacctgcaggtgcaggtgctgaccagcctgcggaggaacctgggcttctggggcggcctggagagcagccagaggggctctgtggtgccccaggagcaggagcacgccatgtag

SEQ ID NO: 261410 - DNA, 1572 bp, Artificial Sequence
  derived and/or modified sequence
atggtgcagaagaccagcatgagccggggcccctacccccccagccaagagatccccatggaggtgttcgacccttcaccccagggcaaatatagcaagcggaaagggagattcaagcggtctgatggatccacgagttccgataccacaagcaactcgttcgtgcggcagggaagcgccgaaagctatacgagccgccctagcgatagtgatgtgagtctggaggaggacagggaggccctcaggaaggaagccgagcgacaggcccttgcccagctcgagaaagccaagacaaagccagtggccttcgccgtgagaacaaacgtgggttataacccgtcacctggagacgaagtgccagttcaaggcgtggccatcacatttgagcctaaggactttttgcacattaaggaaaagtataataatgactggtggattggtcggctagtcaaagaaggctgtgaagtgggtttcattccttcccctgtcaagttggacagcctaagactcttacaggaacagaagctgcgtcagaatcggctcggctcctccaagtccggagacaactcctcgagttccctgggcgatgttgtcactggcactagaaggcccaccccacccgcctctgggaacgagatgaccaacttggctttcgagctcgaccccctcgagcttgaagaggaggaagcggaactgggggagcaatctggcagtgctaaaacaagcgtgagttctgttaccaccccgcctccccacgggaagaggatcccgttctttaagaaaacagaacacgtacctccatatgatgtggtgccctccatgcgcccaataatcctggtagggccttcactgaaggggtatgaggtgaccgatatgatgcagaaagcgctctttgatttcctgaagcataggtttgatgggcgtatttccatcacccgggtaacagccgatatctccttggcgaaacgctccgtgctcaacaacccttccaaacacatcattattgaacgttcaaatacccgctcctctctggcagaggtccagtccgagatcgagagaatttttgagctggctagaacactgcagctcgtggcactggacgcagatacgatcaatcaccctgcccaacttagcaagactagcctggccccaatcattgtatacatcaaaatcacctcacccaaggtgcttcagcggctgatcaagtcacggggcaaaagtcagagcaaacacctgaacgtgcagattgcagcctcggaaaaactggcccagtgtcccccagaaatgttcgatatcatcctcgatgagaaccagctcgaagacgcatgcgaacatttggcagaatatctggaggcatactggaaggccacacatccgccatcttcaacacccccaaatccactccttaatcgaaccatggcaaccgccgcactggcagcttcccccgcacctgtgagcaatctgcaggtgcaagtgcttacatcccttcgaagaaatttgggattttggggcgggctcgagagctctcaaaggggctctgttgtgccccaggagcaggagcatgctatgtag

SEQ ID NO: 261411 - DNA, 1572 bp, Artificial Sequence
  derived and/or modified sequence
atggtgcagaaaacttccatgtcaaggggaccctatcccccatctcaggagattccgatggaagtattcgacccttccccacaaggcaaatacagtaaacggaagggcaggtttaaaagatccgatggctcaacctcctctgacactacctcaaactccttcgtccggcagggctctgcggaatcttacacctccaggccctccgactctgatgtttcccttgaggaggaccgcgaggcgcttaggaaagaagccgagagacaggcactggcgcaattggagaaggccaaaacaaaacctgttgcattcgccgttcgaactaatgtgggctataacccttctccaggcgatgaggtgcccgtccagggtgttgcgattacgtttgaacctaaggatttcctgcacatcaaagagaaatacaacaacgactggtggataggtcgactggttaaggagggctgtgaagtgggatttattccctcacctgtgaaactagacagcctgagactcctgcaggagcaaaagcttcgccagaatcggctgggatcatcaaagtcaggtgacaacagttcctccagtttaggcgacgtcgtgactggaacaagacgccctacaccaccggcaagcggcaatgagatgaccaacctggccttcgagctagatcctctcgagcttgaggaagaggaagccgaactgggcgagcaatccggttccgcgaaaactagcgtcagctcagttaccacccctcccccacatgggaaacgcattcccttttttaaaaagaccgaacatgtgcctccatacgacgtcgtgccctccatgagacctattattttagtgggaccgagtctaaaaggttacgaggtgaccgatatgatgcagaaggcgctcttcgacttcctcaagcacaggtttgacggccgaatctcaataaccagagtgaccgctgatatttctctcgccaaacggtccgtactcaataacccctccaaacacattattattgagaggtcgaacactcgttcatctctggccgaagtccagtctgagatcgagagaatcttcgagctcgcacgcacactgcagttagtggctctggatgccgacaccattaaccaccccgcacagctcagcaaaacgagccttgcgccaattatcgtttatataaagattactagcccaaaggttctccagcgactgattaagagccggggtaaatcccaatctaaacacctcaacgtgcaaattgctgcgagcgaaaaactggctcagtgtcccccagagatgtttgatattatcctcgacgagaaccagttagaggacgcttgcgaacatctagcagagtacttggaggcttattggaaggcaacacatcccccatcttccacccccccaaatcccctgctgaacagaactatggccaccgctgcacttgccgctagccccgcaccggtgtccaatttacaggtgcaagtattgactagccttaggcgtaacttagggttttggggcggtcttgagtcctcccagcgcggaagcgtggtgccacaagaacaggaacacgcaatgtag

SEQ ID NO: 261412 - DNA, 1835 bp, Artificial Sequence
  derived and/or modified sequence
cgagggaaggcaggaaggaggcagccgaaggccgagctgggtggctggaccgggtgctggctgcgccgcgctgctttcggctcccacggcctctcccatgcgctgagggagcccggctgggccgggccggcggcgggaggggaggctcctctccatggtccagaagaccagcatgtcccggggcccttacccaccctcccaggagatccccatggaggtcttcgaccccagcccgcagggcaaatacagcaagaggaaagggcgattcaaacggtcagatgggagcacgtcctcggataccacatccaacagctttgtccgccagggctcagcggagtcctacaccagccgtccatcagactctgatgtatctctggaggaggaccgggaagccttaaggaaggaagcagagcgccaggcattagcgcagctcgagaaggccaagaccaagccagtggcatttgctgtgcggacaaatgttggctacaatccgtctccaggggatgaggtgcctgtgcagggagtggccatcaccttcgagcccaaagacttcctgcacatcaaggagaaatacaataatgactggtggatcgggcggctggtgaaggagggctgtgaggttggcttcattcccagccccgtcaaactggacagccttcgcctgctgcaggaacagaagctgcgccagaaccgcctcggctccagcaaatcaggcgataactccagttccagtctgggagatgtggtgactggcacccgccgccccacaccccctgccagtggtaatgaaatgactaacttagcctttgaactagaccccctagagttagaggaggaagaggctgagcttggtgagcagagtggctctgccaagactagtgttagcagtgtcaccaccccgccaccccatggcaaacgcatccccttctttaagaagacagagcatgtgcccccctatgacgtggtgccttccatgaggcccatcatcctggtgggaccgtcgctcaagggctacgaggttacagacatgatgcagaaagctttatttgacttcttgaagcatcggtttgatggcaggatctccatcactcgtgtgacggcagatatttccctggctaagcgctcagttctcaacaaccccagcaaacacatcatcattgagcgctccaacacacgctccagcctggctgaggtgcagagtgaaatcgagcgaatcttcgagctggcccggacccttcagttggtcgctctggatgctgacaccatcaatcacccagcccagctgtccaagacctcgctggcccccatcattgtttacatcaagatcacctctcccaaggtacttcaaaggctcatcaagtcccgaggaaagtctcagtccaaacacctcaatgtccaaatagcggcctcggaaaagctggcacagtgcccccctgaaatgtttgacatcatcctggatgagaaccaattggaggatgcctgcgagcatctggcggagtacttggaagcctattggaaggccacacacccgcccagcagcacgccacccaatccgctgctgaaccgcaccatggctaccgcagccctggctgccagccctgcccctgtctccaacctccaggtacaggtgctcacctcgctcaggagaaacctcggcttctggggcgggctggagtcctcacagcggggcagtgtggtgccccaggagcaggaacatgccatgtagtgggcgccctgcccgtcttccctcctgctctggggtcggaactggagtgcagggaacatggaggaggaagggaagagctttattttgtaaaaaaataagatgagcggca

SEQ ID NO: 261413 - DNA, 1572 bp, Artificial Sequence
  derived and/or modified sequence
atggtgcagaagaccagcatgagcagaggcccctacccccccagccaggagatccccatggaggtgttcgaccccagcccccagggcaagtacagcaagagaaagggcagattcaagagaagcgacggcagcaccagcagcgacaccaccagcaacagcttcgtgagacagggcagcgccgagagctacaccagcagacccagcgacagcgacgtgagcctggaggaggacagagaggccctgagaaaggaggccgagagacaggccctggcccagctggagaaggccaagaccaagcccgtggccttcgccgtgagaaccaacgtgggctacaaccccagccccggcgacgaggtgcccgtgcagggcgtggccatcaccttcgagcccaaggacttcctgcacatcaaggagaagtacaacaacgactggtggatcggcagactggtgaaggagggctgcgaggtgggcttcatccccagccccgtgaagctggacagcctgagactgctgcaggagcagaagctgagacagaacagactgggcagcagcaagagcggcgacaacagcagcagcagcctgggcgacgtggtgaccggcaccagaagacccaccccccccgccagcggcaacgagatgaccaacctggccttcgagctggaccccctggagctggaggaggaggaggccgagctgggcgagcagagcggcagcgccaagaccagcgtgagcagcgtgaccaccccccccccccacggcaagagaatccccttcttcaagaagaccgagcacgtgcccccctacgacgtggtgcccagcatgagacccatcatcctggtgggccccagcctgaagggctacgaggtgaccgacatgatgcagaaggccctgttcgacttcctgaagcacagattcgacggcagaatcagcatcaccagagtgaccgccgacatcagcctggccaagagaagcgtgctgaacaaccccagcaagcacatcatcatcgagagaagcaacaccagaagcagcctggccgaggtgcagagcgagatcgagagaatcttcgagctggccagaaccctgcagctggtggccctggacgccgacaccatcaaccaccccgcccagctgagcaagaccagcctggcccccatcatcgtgtacatcaagatcaccagccccaaggtgctgcagagactgatcaagagcagaggcaagagccagagcaagcacctgaacgtgcagatcgccgccagcgagaagctggcccagtgcccccccgagatgttcgacatcatcctggacgagaaccagctggaggacgcctgcgagcacctggccgagtacctggaggcctactggaaggccacccacccccccagcagcaccccccccaaccccctgctgaacagaaccatggccaccgccgccctggccgccagccccgcccccgtgagcaacctgcaggtgcaggtgctgaccagcctgagaagaaacctgggcttctggggcggcctggagagcagccagagaggcagcgtggtgccccaggagcaggagcacgccatgtag

SEQ ID NO: 261414 - protein, 478 aa, Artificial Sequence
  derived and/or modified sequence
MVQKTSMSRGPYPPSQEIPMEVFDPSPQGKYSKRKGRFKRSDGSTSSDTTSNSFVRQGSAESYTSRPSDSDVSLEEDREALRKEAERQALAQLEKAKTKPVAFAVRTNVGYNPSPGDEVPVQGVAITFEPKDFLHIKEKYNNDWWIGRLVKEGCEVGFIPSPVKLDSLRLLQEQKLRQNRLGSSKSGDNSSSSLGDVVTGTRRPTPPASAKQKQKSTEHVPPYDVVPSMRPIILVGPSLKGYEVTDMMQKALFDFLKHRFDGRISITRVTADISLAKRSVLNNPSKHIIIERSNTRSSLAEVQSEIERIFELARTLQLVALDADTINHPAQLSKTSLAPIIVYIKITSPKVLQRLIKSRGKSQSKHLNVQIAASEKLAQCPPEMFDIILDENQLEDACEHLAEYLEAYWKATHPPSSTPPNPLLNRTMATAALAASPAPVSNLQVQVLTSLRRNLGFWGGLESSQRGSVVPQEQEHAM

SEQ ID NO: 261415 - protein, 429 aa, Artificial Sequence
  derived and/or modified sequence
MEAPSRTVVVGSAESYTSRPSDSDVSLEEDREALRKEAERQALAQLEKAKTKPVAFAVRTNVGYNPSPGDEVPVQGVAITFEPKDFLHIKEKYNNDWWIGRLVKEGCEVGFIPSPVKLDSLRLLQEQKLRQNRLGSSKSGDNSSSSLGDVVTGTRRPTPPASDSPVQTEHVPPYDVVPSMRPIILVGPSLKGYEVTDMMQKALFDFLKHRFDGRISITRVTADISLAKRSVLNNPSKHIIIERSNTRSSLAEVQSEIERIFELARTLQLVALDADTINHPAQLSKTSLAPIIVYIKITSPKVLQRLIKSRGKSQSKHLNVQIAASEKLAQCPPEMFDIILDENQLEDACEHLAEYLEAYWKATHPPSSTPPNPLLNRTMATAALAASPAPVSNLQVQVLTSLRRNLGFWGGLESSQRGSVVPQEQEHAM

SEQ ID NO: 261416 - DNA, 1437 bp, Artificial Sequence
  derived and/or modified sequence
atggtgcagaagacctccatgtctagggggccctaccctcccagccaggagatccctatggaggtgtttgacccctcaccccagggaaaatactcgaagcggaagggacgctttaagcggtcagacggatccactagctctgatacaactagtaacagcttcgtccgacagggctcagcagagagctacacgtcgaggccatctgatagtgacgtgtcgctcgaggaagatagggaggcattgcggaaggaggctgaacgtcaggcactggcccagctggagaaggctaaaaccaaacccgtggcttttgctgtccggaccaatgttggatataatccatccccaggcgacgaggttccagtgcaaggcgtcgccataactttcgagcctaaggacttcctacatatcaaagagaagtacaacaatgactggtggatcggaagactggtgaaagagggctgtgaggtcggattcatcccttcccctgtgaagttggacagtttgaggttgctgcaggagcagaagctgcgccagaaccggctcggctcttctaagtccggagataacagtagcagcagtttgggggacgtggtgacagggacaagaagacccacccctccagccagcgccaagcagaagcaaaagtccaccgagcacgtacctccttatgacgtagtgccatcgatgcgtccaattattttggttggccctagtttaaaaggctacgaggttactgatatgatgcagaaggccctgtttgatttccttaagcaccggttcgatggacgcatctctatcactcgtgtgaccgcggatatctcccttgcaaagaggtcagttttaaacaacccttctaagcatataattattgaaagatctaacactaggtcctcgctcgccgaggtccagtcagaaatagaacgaatatttgagctggctcggaccctccagctagtcgcacttgacgcagacaccattaaccaccctgcccagctcagcaaaacctctctggccccgatcattgtgtatatcaagatcacaagtcctaaagtactgcagcggctgattaagtcaagaggaaagagtcagtctaagcacctgaatgttcagatcgctgcatctgagaagctggcgcagtgtccacccgagatgtttgacatcattctggatgagaaccaactcgaagatgcatgtgagcatctggccgagtatctcgaggcctattggaaggccactcaccccccatcatccactccgcccaatcccctgctgaaccggaccatggcaaccgcggctcttgccgccagccccgcacctgtttctaatctccaggtgcaggtgctgacctccctcaggagaaatctggggttctggggtgggctagaatcctcacaacggggaagtgtggtgccgcaggaacaggaacacgctatgtag

SEQ ID NO: 261417 - DNA, 1290 bp, Artificial Sequence
  derived and/or modified sequence
atggaggccccgagtagaaccgtggtggtcggttcagccgagtcatacacgtccaggccatccgattccgatgtgtcgctggaggaggatagggaggccctacggaaggaggcggagcgccaggcgcttgcccaacttgaaaaagccaagaccaaaccagtggccttcgccgttagaactaacgtgggctacaaccctagtcctggcgatgaagtacccgtccagggtgtcgctatcacctttgagccgaaggactttcttcatatcaaagagaaatacaacaacgattggtggattggcaggctggttaaggaagggtgtgaagtgggcttcatcccatccccagtgaagctcgatagtctccgtcttctgcaagaacaaaagctgaggcagaatagactcggatcctctaaaagcggcgacaattcctcgagttcgctgggagacgtggtgaccggaacccgccggcctacacccccggcctctgactctcccgtccagacggaacacgtgccaccctatgatgttgtgccctctatgcgaccaatcatcctggtgggacccagccttaagggctacgaagtgacagacatgatgcaaaaagccctcttcgacttcctgaagcaccggttcgacggccggatctctatcacaagagtgactgcagatatctccctcgccaaaaggtccgtcctgaataatccgtcgaaacacatcattattgaacgctctaacacccggtctagtctggccgaagtccaatccgagatagagagaatttttgagctggcccggacgttgcagctggtggcgttggacgctgacactatcaatcacccagcccaattgtcaaagacatccttagcacccatcatcgtgtacataaaaatcacatctcctaaggtcctgcagaggctgattaaaagccgcggaaaaagccagtccaagcacctgaacgtccaaatcgccgcctcagagaagctggctcagtgcccgcccgagatgttcgacatcatactcgatgagaatcaactggaagatgcttgtgaacacctggccgaatacctggaagcctactggaaggctacccatcctccctcttctacacccccaaatcccttactgaacagaaccatggcaactgccgctttagccgcttcacctgctccagtatctaatcttcaggtccaggtactgacctcacttcgccggaacctcggattctggggtggtctggagagctctcagaggggtagcgtggtgccacaggagcaagagcacgctatgtag

SEQ ID NO: 261418 - DNA, 1437 bp, Artificial Sequence
  derived and/or modified sequence
atggtgcagaagacctccatgagccggggcccctacccacccagccaggagatccccatggaggtgtttgaccccagcccccagggcaagtacagcaagaggaagggccgcttcaagagaagtgatggcagcaccagcagtgacaccaccagcaacagctttgtgcggcagggcagcgctgagagctacaccagccggcccagcgacagtgatgtgtccctggaggaggaccgggaggccctgaggaaggaggccgagcggcaggccctggcccagctggagaaggccaagaccaagcctgtggcctttgctgtgaggaccaacgtgggctacaaccccagccctggagatgaggtgcctgtgcagggcgtggccatcacctttgagcccaaggacttcctgcacatcaaggagaagtacaacaatgactggtggattggccgcctggtgaaggagggctgtgaggtgggcttcatccccagccctgtgaagctggacagcctgcggctgctgcaggagcagaagctgcggcagaaccggctgggcagcagcaagagcggggacaacagcagcagcagcctgggagatgtggtgacaggcacccggcggcccaccccaccagccagcgccaagcagaagcagaagagcacagaacatgtgcccccctatgatgtggtgcccagcatgaggcccatcatcctggtgggccccagcctgaagggctatgaggtgacagacatgatgcagaaggccctgtttgacttcctgaagcacagatttgatggccgcatcagcatcaccagggtgacagctgacatcagcctggccaagaggtctgtgctgaacaaccccagcaagcacatcatcatcgagaggagcaacaccaggagcagcctggccgaggtgcagagcgagattgaaagaatttttgagctggcccggaccctgcagctggtggccctggatgctgacaccatcaaccacccagcccagctgagcaagaccagcctggcccccatcatcgtgtacatcaagatcaccagccccaaggtgctgcagaggctcatcaagagccggggcaagagccagagcaagcacctgaatgtgcagattgctgccagcgagaagctggcccagtgccccccagagatgtttgacatcatcctggatgagaaccagctggaggatgcctgtgagcacctggccgagtacctggaggcctactggaaggccacccacccccccagcagcaccccacccaaccccctgctgaacagaaccatggccacagctgccctggccgccagccctgcccctgtgagcaacctgcaggtgcaggtgctgaccagcctgcggaggaacctgggcttctggggcggcctggagagcagccagaggggctctgtggtgccccaggagcaggagcacgccatgtag

SEQ ID NO: 261419 - DNA, 1290 bp, Artificial Sequence
  derived and/or modified sequence
atggaggcccccagcaggacagtggtggtgggcagcgctgagagctacaccagccggcccagcgacagtgatgtgtccctggaggaggaccgggaggccctgaggaaggaggccgagcggcaggccctggcccagctggagaaggccaagaccaagcctgtggcctttgctgtgaggaccaacgtgggctacaaccccagccctggagatgaggtgcctgtgcagggcgtggccatcacctttgagcccaaggacttcctgcacatcaaggagaagtacaacaatgactggtggattggccgcctggtgaaggagggctgtgaggtgggcttcatccccagccctgtgaagctggacagcctgcggctgctgcaggagcagaagctgcggcagaaccggctgggcagcagcaagagcggggacaacagcagcagcagcctgggagatgtggtgacaggcacccggcggcccaccccaccagccagtgacagccctgtgcagacagagcacgtgcccccctatgatgtggtgcccagcatgaggcccatcatcctggtgggccccagcctgaagggctatgaggtgacagacatgatgcagaaggccctgtttgacttcctgaagcacagatttgatggccgcatcagcatcaccagggtgacagctgacatcagcctggccaagaggtctgtgctgaacaaccccagcaagcacatcatcatcgagaggagcaacaccaggagcagcctggccgaggtgcagagcgagattgagcgcatctttgagctggcccggaccctgcagctggtggccctggatgctgacaccatcaaccacccagcccagctgagcaagaccagcctggcccccatcatcgtgtacatcaagatcaccagccccaaggtgctgcagaggctcatcaagagccggggcaagagccagagcaagcacctgaatgtgcagattgctgccagcgagaagctggcccagtgccccccagagatgtttgacatcatcctggatgagaaccagctggaggatgcctgtgagcacctggccgagtacctggaggcctactggaaggccacccacccccccagcagcaccccacccaaccccctgctgaacagaaccatggccacagctgccctggccgccagccctgcccctgtgagcaacctgcaggtgcaggtgctgaccagcctgcggaggaacctgggcttctggggcggcctggagagcagccagaggggctctgtggtgccccaggagcaggagcacgccatgtag

SEQ ID NO: 261420 - DNA, 1437 bp, Artificial Sequence
  derived and/or modified sequence
atggtgcagaagaccagcatgagccggggcccctacccccccagccaggagatccccatggaggtatttgacccaagcccccaggggaaatatagcaaacgtaaagggcgctttaagcggtccgacggatcaacctcatctgataccacctctaactcttttgtgcggcagggttctgccgagagctatacatccagaccttcggattccgatgtgagcctggaagaagatcgcgaggccctccggaaagaggctgagcgccaagccctcgcacagcttgagaaagcaaagacaaagcccgtggccttcgcagtgaggacaaacgtgggctacaaccccagcccgggcgatgaggtccctgtgcagggagttgccatcacctttgagcccaaagactttttgcacattaaggagaagtataacaatgactggtggataggacgtttagttaaagaaggctgtgaagtgggatttattcccagtccagtgaagcttgattctctgcgactactgcaggaacagaaacttaggcaaaaccgactgggatcctcaaagtcaggtgacaattccagtagctcactcggagatgtcgtcacaggaacgaggcggcccacccccccagcaagtgctaaacaaaagcaaaagagcaccgagcacgtccctccctacgacgtggtaccgtccatgcgccccatcatcttggtgggtcctagcctgaagggttatgaggtaacagatatgatgcagaaggcactgttcgatttcctcaagcacaggttcgacgggcgtatctccatcacaagagtgacagcagacatcagtttggctaagaggtcggtgttgaataacccttcgaagcatatcatcatcgaacgctccaatacccgaagctccctggccgaggtgcaatctgagattgaaaggatttttgaactggcgaggactttgcaactggtggctctggacgccgacaccattaaccacccagcccagctgtccaagacttctctcgccccgatcatcgtgtatattaagattacaagcccaaaggtgttgcagaggctcataaaatcgcgtggtaagtcccaatccaagcacttaaacgtgcagatcgccgcaagtgagaagctggcgcagtgcccgccggaaatgttcgacatcatcctggacgaaaatcagttagaggacgcatgtgagcatctggccgagtaccttgaagcctactggaaggcaacccacccacccagcagtactccccctaacccactgcttaatagaaccatggccacggctgccctcgcagcctcgccagcacctgtgagcaatctgcaggtgcaggtcctgacttccttacggcggaacctcggattctggggggggctggagagctctcagaggggatctgtggttcctcaggaacaggaacatgccatgtag

SEQ ID NO: 261421 - DNA, 1290 bp, Artificial Sequence
  derived and/or modified sequence
atggaggcccccagccggaccgtggtggtgggcagcgccgagagctacaccagccggccgagtgattccgatgttagccttgaagaagacagggaggcgctcaggaaggaagcagagaggcaagcactcgcccaactcgaaaaggcgaaaaccaaacccgtcgccttcgcagtgcgtactaacgtagggtacaacccgtcccctggagatgaagtcccggtccaaggcgtggccatcacctttgagcctaaagattttctgcacattaaggagaagtataacaacgactggtggatcggaaggctcgtgaaggagggatgcgaggtcgggttcattccctcacctgtgaagctcgacagtttgcggctgttgcaggagcagaagctaagacagaatcggctgggcagttccaaaagcggtgataactcctcttcctctctgggagacgtcgtgacaggtacacggcggcccactcccccagcctctgactcccccgtccagaccgaacatgtgcccccttatgatgtagtgcccagcatgcgcccaattatcttggtgggcccctcattgaaggggtatgaggtgactgacatgatgcaaaaggctctcttcgattttctaaagcaccgcttcgacgggaggatctctatcacaagagtcaccgcagacatctctctggctaaaaggagtgttctcaacaatccgtctaagcacataatcattgagcggagcaatacccgtagcagtcttgccgaggtacaatcagagatcgagcgcatattcgagttggcccggacacttcagctggtggccttggacgctgacacaatcaatcaccccgcccagttaagcaagacgtcccttgcccccattatcgtatatataaaaatcacctctcctaaggtgctccaaagactgatcaaaagccgcgggaaaagccagtccaagcatttaaacgtgcaaatcgcagcctctgagaagttagctcagtgccccccagagatgttcgacattatcctggatgagaaccaattggaggacgcttgcgagcacctggcagaatatctggaggcttactggaaggccacgcatccgccaagttctaccccccccaaccctttacttaaccgtactatggccactgccgcccttgccgcctcccctgctccagtgagcaacctgcaggtccaggtgcttaccagtctcagaagaaacctcgggttctgggggggtctcgaatccagccagagaggctcagtggtgcctcaggagcaggagcatgctatgtag

SEQ ID NO: 261422 - DNA, 1437 bp, Artificial Sequence
  derived and/or modified sequence
atggttcagaagacctccatgtccaggggcccatatccacccagtcaggagattccaatggaggtctttgatccgtcacctcagggcaaatattctaaacggaaagggagattcaaaagatctgatggatcaaccagctccgacacgacgtccaacagtttcgttaggcagggcagcgctgaatcctatacaagtcgcccttcagactccgatgtctccttagaggaggatcgagaggctctaaggaaagaggcagagagacaggctctggcccaactggaaaaagcgaagactaagcccgtggccttcgctgtgcgcaccaacgttggctacaatcctagccccggtgatgaagtgccagtgcagggggtcgctatcaccttcgaaccaaaggacttcctgcacatcaaggagaaatacaacaatgattggtggatcggccgactggtcaaagagggatgcgaggttggtttcattccgtccccagtgaagcttgattcactccgattgctccaagagcagaagttaaggcagaaccgcttgggatccagtaagtctggcgataattcaagttctagtctgggggacgtagttaccggaacacggaggccaacaccccctgcttctgcaaaacagaagcaaaagagcaccgaacatgtaccgccttatgatgtggtgccctcaatgaggccaattatcctcgtcggaccctctcttaagggctacgaggttaccgacatgatgcagaaggccttgttcgattttctaaagcaccgttttgacggcaggatctcaattacccgcgtgaccgcagatatcagccttgccaaacggtccgttctcaataacccttctaaacatatcatcattgagagatcaaatactaggtcttcgctggctgaggtgcagagcgaaatcgaaagaatctttgagctggcaaggactttgcagctcgtggccttagatgctgacaccataaatcaccccgctcagctgtcaaagacgtcattggcgccaattatagtgtatatcaagatcaccagccctaaggttctgcagcgattaattaaatccagaggcaagtcccagtccaagcatttgaatgttcaaattgccgcaagcgaaaagctagcacaatgtccccctgaaatgttcgacattatcctggacgaaaaccagctggaagatgcctgcgagcacttggctgagtacctcgaagcctattggaaagctacgcaccccccttccagtacccctcctaaccccttactgaatagaaccatggctacagccgcacttgccgcatctcccgcacccgtttctaacctacaggttcaagtgctgactagcctgcggagaaacctgggattttgggggggtctggagtcctcccaaaggggctctgtggtgccccaggaacaggagcatgcaatgtag

SEQ ID NO: 261423 - DNA, 1290 bp, Artificial Sequence
  derived and/or modified sequence
atggaggctccatctaggactgtcgtcgtgggcagcgcagagagctacacatcccggccatctgattcagacgtcagccttgaggaagaccgagaggcgctgcgcaaggaggcagaaagacaggcactcgcacagttggaaaaagctaaaactaagcccgtggcctttgccgtgaggacaaatgtcggctacaatccctccccaggggatgaggtccctgtgcagggcgtggcgattaccttcgagcctaaggatttcctacatattaaagagaagtacaacaacgattggtggattggtcgccttgtgaaggaaggttgcgaggtgggatttatccccagcccagtgaagctggacagcctcaggctgttgcaggagcagaagctaaggcagaatcggctcggttcctcaaagagcggtgacaacagctcttccagcttaggcgatgttgtgacaggaacccgacgtccaacccctcccgctagtgattctccagtgcagaccgagcatgtgcctccctacgacgttgtcccctcgatgcgcccaattattttggtgggcccaagcctgaaaggctacgaggtaaccgatatgatgcagaaagcactgttcgactttctaaagcaccgcttcgacggcagaatttccatcactcgggttaccgccgacatctcccttgccaagcgcagcgtactgaacaacccttccaaacacattatcattgagagatcaaacaccaggagctcccttgctgaggttcagtctgaaatcgaacgaatctttgaactggctcgcaccctgcagctggtggcactggacgccgatactatcaaccatcccgcacagctgtctaagaccagccttgctcctatcattgtgtacattaagatcacgtctcctaaggtactccagcggctgattaaatctagggggaaaagtcaaagcaagcatctcaacgtccaaattgcagcttcagagaaactggcacagtgtccaccggagatgtttgatatcattctggacgaaaaccagttagaagatgcttgcgagcatctggcagaatacctggaagcttactggaaggctactcatccgccttcttccactcctcccaacccacttcttaatagaacaatggcaactgcagccctggctgcttctccagcccctgtgtcgaatctgcaagtgcaggtgctgacatccctgaggcgcaatttggggttctggggcggactcgagtccagtcagagggggagcgtcgtcccacaggaacaagagcatgccatgtag

SEQ ID NO: 261424 - DNA, 1699 bp, Artificial Sequence
  derived and/or modified sequence
gagggaaggcaggaaggaggcagccgaaggccgagctgggtggctggaccgggtgctggctgcgccgcgctgctttcggctcccacggcctctcccatgcgctgagggagcccggctgggccgggccggcggcgggaggggaggctcctctccatggtccagaagaccagcatgtcccggggcccttacccaccctcccaggagatccccatggaggtcttcgaccccagcccgcagggcaaatacagcaagaggaaagggcgattcaaacggtcagatgggagcacgtcctcggataccacatccaacagctttgtccgccagggctcagcggagtcctacaccagccgtccatcagactctgatgtatctctggaggaggaccgggaagccttaaggaaggaagcagagcgccaggcattagcgcagctcgagaaggccaagaccaagccagtggcatttgctgtgcggacaaatgttggctacaatccgtctccaggggatgaggtgcctgtgcagggagtggccatcaccttcgagcccaaagacttcctgcacatcaaggagaaatacaataatgactggtggatcgggcggctggtgaaggagggctgtgaggttggcttcattcccagccccgtcaaactggacagccttcgcctgctgcaggaacagaagctgcgccagaaccgcctcggctccagcaaatcaggcgataactccagttccagtctgggagatgtggtgactggcacccgccgccccacaccccctgccagtgccaaacagaagcagaagtcgacagagcatgtgcccccctatgacgtggtgccttccatgaggcccatcatcctggtgggaccgtcgctcaagggctacgaggttacagacatgatgcagaaagctttatttgacttcttgaagcatcggtttgatggcaggatctccatcactcgtgtgacggcagatatttccctggctaagcgctcagttctcaacaaccccagcaaacacatcatcattgagcgctccaacacacgctccagcctggctgaggtgcagagtgaaatcgagcgaatcttcgagctggcccggacccttcagttggtcgctctggatgctgacaccatcaatcacccagcccagctgtccaagacctcgctggcccccatcattgtttacatcaagatcacctctcccaaggtacttcaaaggctcatcaagtcccgaggaaagtctcagtccaaacacctcaatgtccaaatagcggcctcggaaaagctggcacagtgcccccctgaaatgtttgacatcatcctggatgagaaccaattggaggatgcctgcgagcatctggcggagtacttggaagcctattggaaggccacacacccgcccagcagcacgccacccaatccgctgctgaaccgcaccatggctaccgcagccctggctgccagccctgcccctgtctccaacctccaggtacaggtgctcacctcgctcaggagaaacctcggcttctggggcgggctggagtcctcacagcggggcagtgtggtgccccaggagcaggaacatgccatgtagtgggcgccctgcccgtcttccctcctgctctggggtcggaactggagtgcagggaacatggaggaggaagggaagagctttattttgtaaaaaaataagatgagcggca

SEQ ID NO: 261425 - DNA, 1417 bp, Artificial Sequence
  derived and/or modified sequence
aggcactgagggtgccgggatggaggcgcccagccggaccgtggtggtgggctcagcggagtcctacaccagccgtccatcagactctgatgtatctctggaggaggaccgggaagccttaaggaaggaagcagagcgccaggcattagcgcagctcgagaaggccaagaccaagccagtggcatttgctgtgcggacaaatgttggctacaatccgtctccaggggatgaggtgcctgtgcagggagtggccatcaccttcgagcccaaagacttcctgcacatcaaggagaaatacaataatgactggtggatcgggcggctggtgaaggagggctgtgaggttggcttcattcccagccccgtcaaactggacagccttcgcctgctgcaggaacagaagctgcgccagaaccgcctcggctccagcaaatcaggcgataactccagttccagtctgggagatgtggtgactggcacccgccgccccacaccccctgccagtgactctccggtccagacagagcatgtgcccccctatgacgtggtgccttccatgaggcccatcatcctggtgggaccgtcgctcaagggctacgaggttacagacatgatgcagaaagctttatttgacttcttgaagcatcggtttgatggcaggatctccatcactcgtgtgacggcagatatttccctggctaagcgctcagttctcaacaaccccagcaaacacatcatcattgagcgctccaacacacgctccagcctggctgaggtgcagagtgaaatcgagcgaatcttcgagctggcccggacccttcagttggtcgctctggatgctgacaccatcaatcacccagcccagctgtccaagacctcgctggcccccatcattgtttacatcaagatcacctctcccaaggtacttcaaaggctcatcaagtcccgaggaaagtctcagtccaaacacctcaatgtccaaatagcggcctcggaaaagctggcacagtgcccccctgaaatgtttgacatcatcctggatgagaaccaattggaggatgcctgcgagcatctggcggagtacttggaagcctattggaaggccacacacccgcccagcagcacgccacccaatccgctgctgaaccgcaccatggctaccgcagccctggctgccagccctgcccctgtctccaacctccaggtacaggtgctcacctcgctcaggagaaacctcggcttctggggcgggctggagtcctcacagcggggcagtgtggtgccccaggagcaggaacatgccatgtagtgggcgccctgcccgtcttccctcctgctctggggtcggaactggagtgcagggaacatggaggaggaagggaagagctttattttgtaaaaaaataagatgagcggc

SEQ ID NO: 261426 - DNA, 1437 bp, Artificial Sequence
  derived and/or modified sequence
atggtgcagaagaccagcatgagcagaggcccctacccccccagccaggagatccccatggaggtgttcgaccccagcccccagggcaagtacagcaagagaaagggcagattcaagagaagcgacggcagcaccagcagcgacaccaccagcaacagcttcgtgagacagggcagcgccgagagctacaccagcagacccagcgacagcgacgtgagcctggaggaggacagagaggccctgagaaaggaggccgagagacaggccctggcccagctggagaaggccaagaccaagcccgtggccttcgccgtgagaaccaacgtgggctacaaccccagccccggcgacgaggtgcccgtgcagggcgtggccatcaccttcgagcccaaggacttcctgcacatcaaggagaagtacaacaacgactggtggatcggcagactggtgaaggagggctgcgaggtgggcttcatccccagccccgtgaagctggacagcctgagactgctgcaggagcagaagctgagacagaacagactgggcagcagcaagagcggcgacaacagcagcagcagcctgggcgacgtggtgaccggcaccagaagacccaccccccccgccagcgccaagcagaagcagaagagcaccgagcacgtgcccccctacgacgtggtgcccagcatgagacccatcatcctggtgggccccagcctgaagggctacgaggtgaccgacatgatgcagaaggccctgttcgacttcctgaagcacagattcgacggcagaatcagcatcaccagagtgaccgccgacatcagcctggccaagagaagcgtgctgaacaaccccagcaagcacatcatcatcgagagaagcaacaccagaagcagcctggccgaggtgcagagcgagatcgagagaatcttcgagctggccagaaccctgcagctggtggccctggacgccgacaccatcaaccaccccgcccagctgagcaagaccagcctggcccccatcatcgtgtacatcaagatcaccagccccaaggtgctgcagagactgatcaagagcagaggcaagagccagagcaagcacctgaacgtgcagatcgccgccagcgagaagctggcccagtgcccccccgagatgttcgacatcatcctggacgagaaccagctggaggacgcctgcgagcacctggccgagtacctggaggcctactggaaggccacccacccccccagcagcaccccccccaaccccctgctgaacagaaccatggccaccgccgccctggccgccagccccgcccccgtgagcaacctgcaggtgcaggtgctgaccagcctgagaagaaacctgggcttctggggcggcctggagagcagccagagaggcagcgtggtgccccaggagcaggagcacgccatgtag

SEQ ID NO: 261427 - DNA, 1290 bp, Artificial Sequence
  derived and/or modified sequence
atggaggcccccagcagaaccgtggtggtgggcagcgccgagagctacaccagcagacccagcgacagcgacgtgagcctggaggaggacagagaggccctgagaaaggaggccgagagacaggccctggcccagctggagaaggccaagaccaagcccgtggccttcgccgtgagaaccaacgtgggctacaaccccagccccggcgacgaggtgcccgtgcagggcgtggccatcaccttcgagcccaaggacttcctgcacatcaaggagaagtacaacaacgactggtggatcggcagactggtgaaggagggctgcgaggtgggcttcatccccagccccgtgaagctggacagcctgagactgctgcaggagcagaagctgagacagaacagactgggcagcagcaagagcggcgacaacagcagcagcagcctgggcgacgtggtgaccggcaccagaagacccaccccccccgccagcgacagccccgtgcagaccgagcacgtgcccccctacgacgtggtgcccagcatgagacccatcatcctggtgggccccagcctgaagggctacgaggtgaccgacatgatgcagaaggccctgttcgacttcctgaagcacagattcgacggcagaatcagcatcaccagagtgaccgccgacatcagcctggccaagagaagcgtgctgaacaaccccagcaagcacatcatcatcgagagaagcaacaccagaagcagcctggccgaggtgcagagcgagatcgagagaatcttcgagctggccagaaccctgcagctggtggccctggacgccgacaccatcaaccaccccgcccagctgagcaagaccagcctggcccccatcatcgtgtacatcaagatcaccagccccaaggtgctgcagagactgatcaagagcagaggcaagagccagagcaagcacctgaacgtgcagatcgccgccagcgagaagctggcccagtgcccccccgagatgttcgacatcatcctggacgagaaccagctggaggacgcctgcgagcacctggccgagtacctggaggcctactggaaggccacccacccccccagcagcaccccccccaaccccctgctgaacagaaccatggccaccgccgccctggccgccagccccgcccccgtgagcaacctgcaggtgcaggtgctgaccagcctgagaagaaacctgggcttctggggcggcctggagagcagccagagaggcagcgtggtgccccaggagcaggagcacgccatgtag

SEQ ID NO: 261428 - protein, 488 aa, Artificial Sequence
  derived and/or modified sequence
MNTSPQTNEFKGTTEEAPAKESPHTSEFKGAALVSPISKSMLERLSKFEVEDAENVASYDSKIKKIVHSIVSSFAFGIFGVFLVLLDVTLLLADLIFTDSKLYIPLEYRSISLAIGLFFLMDVLLRVFVEGRQQYFSDLFNILDTAIIVIPLLVDVIYIFFDIKLLRNIPRWTHLVRLLRLIILIRIFHLLHQKRQLEKLMRRLVSENKRRYTRDGFDLDLTYVTERIIAMSFPSSGRQSFYRNPIEEVVRFLDKKHRNHYRVYNLCSERAYDPKHFHNRVSRIMIDDHNVPTLHEMVVFTKEVNEWMAQDLENIVAIHCKGGKGRTGTMVCALLIASEIFLTAEESLYYFGERRTNKTHSNKFQGVETPSQNRYVGYFAQVKHLYNWNLPPRRILFIKRFIIYSIRGDVCDLKVQVVMEKKVVFSSTSLGNCSILHDIETDKILINVYDGPPLYDDVKVQFFSSRAEKRAAHRANWKGEPSRRPVLD

SEQ ID NO: 261429 - protein, 482 aa, Artificial Sequence
  derived and/or modified sequence
MNESPQTNEFKGTTEEAPAKESPHTSEFKGAALVSPISKSMLERLSKFEVEDAENVASYDSKIKKIVHSIVSSFAFGIFGVFLVLLDVTLLLADLIFTDSKLYIPLEYRSISLAIGLFFLMDVLLRVFVEGWTHLVRLLRLIILIRIFHLLHQKRQLEKLMRRLVSENKRRYTRDGFDLDLTYVTERIIAMSFPSSGRQSFYRNPIEEVVRFLDKKHRNHYRVYNLCSERAYDPKHFHNRVSRIMIDDHNVPTLHEMVVFTKEVNEWMAQDLENIVAIHCKGGKGRTGTMVCALLIASEIFLTAEESLYYFGERRTNKTHSNKFQGVETPSQNRYVGYFAQVKHLYNWNLPPRRILFIKRFIIYSIRGDVCDLKVQVVMEKKVVFSSTSLGNCSILHDIETDKILINVYDGPPLYDDVKVQFFSSNLPKYYDNCPFFFWFNTSFIQNNRLCLPRNELDNPHKQKAWKIYPPEFAVEILFGEK

SEQ ID NO: 261430 - protein, 522 aa, Artificial Sequence [sequence omitted]

SEQ ID NO: 261431 - DNA, 1467 bp, Artificial Sequence
  derived and/or modified sequence
atgaacaccagcccccagaccaacgagttcaagggcaccaccgaggaggcccccgccaaggagagcccccacaccagcgagttcaagggcgccgccctggtgagccccatcagcaagagcatgctggagagactgagcaagttcgaggtggaggacgccgagaacgtggccagctacgacagcaagatcaagaagatcgtgcacagcatcgtgagcagcttcgccttcggcatcttcggcgtgttcctggtgctgctggacgtgaccctgctgctggccgacctgatcttcaccgacagcaagctgtacatccccctggagtacagaagcatcagcctggccatcggcctgttcttcctgatggacgtgctgctgagagtgttcgtggagggcagacagcagtacttcagcgacctgttcaacatcctggacaccgccatcatcgtgatccccctgctggtggacgtgatctacatcttcttcgacatcaagctgctgagaaacatccccagatggacccacctggtgagactgctgagactgatcatcctgatcagaatcttccacctgctgcaccagaagagacagctggagaagctgatgagaagactggtgagcgagaacaagagaagatacaccagagacggcttcgacctggacctgacctacgtgaccgagagaatcatcgccatgagcttccccagcagcggcagacagagcttctacagaaaccccatcgaggaggtggtgagattcctggacaagaagcacagaaaccactacagagtgtacaacctgtgcagcgagagagcctacgaccccaagcacttccacaacagagtgagcagaatcatgatcgacgaccacaacgtgcccaccctgcacgagatggtggtgttcaccaaggaggtgaacgagtggatggcccaggacctggagaacatcgtggccatccactgcaagggcggcaagggcagaaccggcaccatggtgtgcgccctgctgatcgccagcgagatcttcctgaccgccgaggagagcctgtactacttcggcgagagaagaaccaacaagacccacagcaacaagttccagggcgtggagacccccagccagaacagatacgtgggctacttcgcccaggtgaagcacctgtacaactggaacctgccccccagaagaatcctgttcatcaagagattcatcatctacagcatcagaggcgacgtgtgcgacctgaaggtgcaggtggtgatggagaagaaggtggtgttcagcagcaccagcctgggcaactgcagcatcctgcacgacatcgagaccgacaagatcctgatcaacgtgtacgacggcccccccctgtacgacgacgtgaaggtgcagttcttcagcagcagagccgagaagagagccgcccacagagccaactggaagggcgagcccagcagaagacccgtgctggactag

SEQ ID NO: 261432 - DNA, 1449 bp, Artificial Sequence
  derived and/or modified sequence
atgaacgagagcccccagaccaacgagttcaagggcaccaccgaggaggcccccgccaaggagagcccccacaccagcgagttcaagggcgccgccctggtgagccccatcagcaagagcatgctggagagactgagcaagttcgaggtggaggacgccgagaacgtggccagctacgacagcaagatcaagaagatcgtgcacagcatcgtgagcagcttcgccttcggcatcttcggcgtgttcctggtgctgctggacgtgaccctgctgctggccgacctgatcttcaccgacagcaagctgtacatccccctggagtacagaagcatcagcctggccatcggcctgttcttcctgatggacgtgctgctgagagtgttcgtggagggctggacccacctggtgagactgctgagactgatcatcctgatcagaatcttccacctgctgcaccagaagagacagctggagaagctgatgagaagactggtgagcgagaacaagagaagatacaccagagacggcttcgacctggacctgacctacgtgaccgagagaatcatcgccatgagcttccccagcagcggcagacagagcttctacagaaaccccatcgaggaggtggtgagattcctggacaagaagcacagaaaccactacagagtgtacaacctgtgcagcgagagagcctacgaccccaagcacttccacaacagagtgagcagaatcatgatcgacgaccacaacgtgcccaccctgcacgagatggtggtgttcaccaaggaggtgaacgagtggatggcccaggacctggagaacatcgtggccatccactgcaagggcggcaagggcagaaccggcaccatggtgtgcgccctgctgatcgccagcgagatcttcctgaccgccgaggagagcctgtactacttcggcgagagaagaaccaacaagacccacagcaacaagttccagggcgtggagacccccagccagaacagatacgtgggctacttcgcccaggtgaagcacctgtacaactggaacctgccccccagaagaatcctgttcatcaagagattcatcatctacagcatcagaggcgacgtgtgcgacctgaaggtgcaggtggtgatggagaagaaggtggtgttcagcagcaccagcctgggcaactgcagcatcctgcacgacatcgagaccgacaagatcctgatcaacgtgtacgacggcccccccctgtacgacgacgtgaaggtgcagttcttcagcagcaacctgcccaagtactacgacaactgccccttcttcttctggttcaacaccagcttcatccagaacaacagactgtgcctgcccagaaacgagctggacaacccccacaagcagaaggcctggaagatctacccccccgagttcgccgtggagatcctgttcggcgagaagtag

SEQ ID NO: 261433 - DNA, 1569 bp, Artificial Sequence
  derived and/or modified sequence
atgaacgagagcccccagaccaacgagttcaagggcaccaccgaggaggcccccgccaaggagagcccccacaccagcgagttcaagggcgccgccctggtgagccccatcagcaagagcatgctggagagactgagcaagttcgaggtggaggacgccgagaacgtggccagctacgacagcaagatcaagaagatcgtgcacagcatcgtgagcagcttcgccttcggcatcttcggcgtgttcctggtgctgctggacgtgaccctgctgctggccgacctgatcttcaccgacagcaagctgtacatccccctggagtacagaagcatcagcctggccatcggcctgttcttcctgatggacgtgctgctgagagtgttcgtggagggcagacagcagtacttcagcgacctgttcaacatcctggacaccgccatcatcgtgatccccctgctggtggacgtgatctacatcttcttcgacatcaagctgctgagaaacatccccagatggacccacctggtgagactgctgagactgatcatcctgatcagaatcttccacctgctgcaccagaagagacagctggagaagctgatgagaagactggtgagcgagaacaagagaagatacaccagagacggcttcgacctggacctgacctacgtgaccgagagaatcatcgccatgagcttccccagcagcggcagacagagcttctacagaaaccccatcgaggaggtggtgagattcctggacaagaagcacagaaaccactacagagtgtacaacctgtgcagcgagagagcctacgaccccaagcacttccacaacagagtgagcagaatcatgatcgacgaccacaacgtgcccaccctgcacgagatggtggtgttcaccaaggaggtgaacgagtggatggcccaggacctggagaacatcgtggccatccactgcaagggcggcaagggcagaaccggcaccatggtgtgcgccctgctgatcgccagcgagatcttcctgaccgccgaggagagcctgtactacttcggcgagagaagaaccaacaagacccacagcaacaagttccagggcgtggagacccccagccagaacagatacgtgggctacttcgcccaggtgaagcacctgtacaactggaacctgccccccagaagaatcctgttcatcaagagattcatcatctacagcatcagaggcgacgtgtgcgacctgaaggtgcaggtggtgatggagaagaaggtggtgttcagcagcaccagcctgggcaactgcagcatcctgcacgacatcgagaccgacaagatcctgatcaacgtgtacgacggcccccccctgtacgacgacgtgaaggtgcagttcttcagcagcaacctgcccaagtactacgacaactgccccttcttcttctggttcaacaccagcttcatccagaacaacagactgtgcctgcccagaaacgagctggacaacccccacaagcagaaggcctggaagatctacccccccgagttcgccgtggagatcctgttcggcgagaagtag

SEQ ID NO: 261434 - DNA, 1467 bp, Artificial Sequence
  derived and/or modified sequence
atgaacacgagtccccagacgaatgaatttaaaggtacaacagaggaggcacctgctaaggaaagccctcatacctccgaatttaagggagctgcgttagtatctccgattagcaaatcaatgctggagagactatccaagttcgaggttgaggatgcagagaatgttgcatcgtacgattccaaaattaagaaaattgttcacagtattgtctcttcctttgcctttggtatctttggcgtgtttctggtcttgctagatgtgaccttactactggctgacctaattttcacagacagcaagctctacataccattagaataccggagtatctccctcgccataggcctgttctttttgatggacgtcttgctcagagtattcgtcgagggccggcaacaatacttcagtgatctctttaacatactcgacaccgccattattgtaatcccattgcttgtggacgttatttatatcttttttgacattaagttacttagaaacatcccccgctggacccatctagtgaggttattgcgtttaattattctgattagaatctttcacttgcttcaccagaagaggcagctcgagaaactgatgagacgtctagttagtgaaaataaacgaaggtatacaagggatggattcgatctggacctgacctacgtgaccgagagaattattgccatgagtttccccagcagcggtcgacagtctttctaccgaaatccaatagaagaggtcgttcgctttctggacaagaagcacaggaaccattacagggtatacaacctgtgctcagagcgcgcatatgatccaaagcattttcacaatcgcgtgtccaggattatgatcgacgaccataacgttcctacgctgcacgagatggtggtgttcaccaaggaggtgaatgagtggatggctcaggacttggagaatattgttgctattcactgtaagggcggtaagggtcgcaccggcactatggtatgcgcccttttaatagcatccgagatctttctcacagcagaagaatccctgtattatttcggggagaggcgcactaataagactcattcaaataaatttcagggggttgagactcctagtcaaaatagatacgtagggtacttcgcacaggtgaaacacttatacaactggaatctcccacctcgccggatattgttcatcaagcggtttattatttatagtattcgcggggacgtatgtgatctcaaggtccaggtggtgatggaaaaaaaagtggtcttttcgtccacttccctgggaaactgttccattctccacgacatcgagactgataaaatcttgatcaacgtgtatgacgggccaccgctgtatgacgacgtgaaggtgcagtttttctctagtagggcagagaaacgggccgcccacagggccaattggaaaggggagccatctagaagacccgtcttggactag

SEQ ID NO: 261435 - DNA, 1449 bp, Artificial Sequence
  derived and/or modified sequence
atgaacgagtctcctcaaaccaacgagtttaagggtaccacagaggaagcccccgctaaagaatccccccacacctccgagttcaaaggcgcagctctggtgagccccatcagcaagtctatgctggagaggctgtctaagttcgaagtcgaggatgccgaaaacgtggcctcttatgattctaagatcaagaaaatcgtccattccatcgtgtcgtcatttgcctttggaatttttggcgtgtttcttgttctgcttgacgttaccttgctcttggctgacctgatttttaccgatagcaagctttatatacctctggaatatcggtccatctctctagcgatagggctttttttcttgatggatgtgttgctgcgtgtgttcgtggagggttggacccatctagtgcgtcttctcaggcttattatcctaatacggatcttccacctgttacatcaaaagagacagcttgaaaaactcatgaggagactggtgtcggaaaacaaaaggcgctacaccagggacggattcgatctggacctaacgtacgttacagagcggatcattgccatgtctttccccagttccggccgacagtcattctatcgtaatcccatcgaggaggtcgtcaggttcctcgacaagaagcatagaaatcactaccgggtgtataacttgtgttctgaacgggcatatgatcctaagcacttccacaatcgggtttcacgcattatgatcgacgaccacaacgtcccaactttgcatgaaatggtggtcttcacgaaggaagtcaacgaatggatggcacaggatttggaaaacatcgtggccattcactgtaaggggggtaaaggcagaaccgggactatggtgtgtgctttactgatcgcttctgaaatcttccttacagcagaagagtcactctactatttcggagaacgaaggacaaataaaactcactcaaacaagtttcaaggcgtcgagacccccagccagaaccgttacgtcggctactttgctcaggtaaagcacctctataattggaacctgcccccccgaaggatcctgttcatcaaacggtttatcatttactccataaggggcgatgtctgcgacctgaaggtgcaggttgttatggaaaaaaaggttgtttttagcagcacatctttgggtaactgctctatcctgcatgacatcgaaaccgacaaaatactgattaatgtgtacgacggccctccactgtacgacgacgttaaagttcagttctttagttctaatctgccaaaatactatgataattgtccattttttttttggttcaacacctctttcatccagaataatagattgtgcctgccacggaacgaacttgataacccgcacaaacagaaggcatggaaaatttacccccccgagtttgccgttgaaatcctttttggagagaagtag

SEQ ID NO: 261436 - DNA, 1569 bp, Artificial Sequence
  derived and/or modified sequence
atgaacgaaagccctcaaactaacgagtttaaggggactactgaggaagcccccgccaaagagagccctcatacctctgaattcaaaggcgccgccctcgtgtcacccatctcgaagagtatgctggaacgactgtctaagttcgaagtggaagacgccgaaaatgtggcctcatatgacagcaaaatcaagaagattgtacacagcatcgtgagctcattcgcatttggaatcttcggcgtctttctggtgcttctggacgtcaccctcctgctggcagatctgatctttacagacagcaaactgtacattccactcgagtacagaagcattagcttggcgatcggcctattttttctgatggacgtgctgttgcgcgtgtttgtggagggccgccagcagtacttctcagacctgttcaacattcttgacacagcaattatagtcatccctctgcttgtagatgtcatctacatattcttcgatatcaaactgttacgcaacatcccacgttggacccatctggttaggctcttgcggttgattattctgattcggatttttcacctgctgcatcagaagcgccaattggaaaagttgatgagacgacttgtctctgagaataaacgccggtacacacgggacggattcgatctggatctgacgtatgtaaccgagcgcatcatcgccatgtcctttccttcgtcaggacggcagagtttctacagaaaccccattgaggaggtcgtccggttcctagacaagaaacaccggaatcactatagggtatataatctgtgtagcgagagggcctacgatcctaagcatttccataatagggtaagtaggataatgattgacgaccacaatgtcccaaccctccacgagatggttgtgtttactaaggaagtgaatgagtggatggcacaggatctggaaaacatcgtggcgattcattgcaagggggggaagggacggactggcactatggtgtgtgcactgctgatcgcttctgaaatcttcttaaccgcagaagagagcttgtactacttcggagaaaggcgcacaaacaagactcattcgaataaattccaaggagtggagaccccatcacagaaccgctatgtcggatactttgcgcaggtgaagcatctgtacaactggaatcttcctcctcggcgaatcctgtttatcaagcgctttattatctactcaattcgcggggacgtctgcgacctgaaggttcaggtggtgatggaaaaaaaagtggtcttctcctcaacctccctcggtaattgcagcatcctccacgacatagaaacagataaaattctgataaacgtgtacgatggaccaccactgtatgacgacgtgaaggtgcagtttttttctagcaacctgcccaagtactatgataactgtcctttctttttctggttcaatacctccttcatccagaacaataggctttgccttcctcgcaatgaactggataaccctcataaacagaaggcttggaagatctacccgcctgagtttgctgtggagatattgtttggggaaaagtag

SEQ ID NO: 261437 - DNA, 1569 bp, Artificial Sequence
  derived and/or modified sequence
atgaatgaaagtccccagactaacgagtttaagggaactaccgaggaggcaccagccaaggaatccccccatacttccgaattcaagggagccgctctggtgtctcctatttccaaatcaatgctcgaacgtctttccaagttcgaggtggaggatgccgagaatgtggccagttacgattccaagattaagaaaatcgtacattctatcgttagctcctttgcatttgggattttcggagtctttctggtgctactggacgttacacttttactggcagatctcatctttaccgactccaagctgtacatcccactggaataccgctccatctctcttgcgattggcctgttttttctcatggacgtgctgttgagagtctttgtggagggccggcagcagtattttagcgatcttttcaacattctggatacggcaattatcgtgattcccctgctcgtcgacgtgatctacatctttttcgacatcaaattgctgagaaacattccacggtggacacacttggtgaggttgttacgcttgatcattttgataaggattttccacctattgcaccagaagaggcaactggagaaacttatgcgacgcctagtctccgagaacaagcgaagatatacccgcgacgggttcgatctggatctgacatacgttacggagagaataatcgctatgtccttcccatcttcgggaaggcaaagtttttatcggaaccccatcgaggaggttgtgcggttcctggacaaaaaacatagaaaccactatagagtgtataatttatgcagtgaaagggcttatgaccctaagcacttccacaacagagtgtcaagaatcatgatcgacgatcacaacgtgccaaccctacatgaaatggtggtgtttaccaaggaggtgaacgaatggatggctcaggacctggagaacatagtcgcaatccattgtaagggaggaaagggtcggacaggaaccatggtatgcgccttgctgattgcatccgagattttcctaaccgccgaggagtctctttattattttggagagcgtcgtaccaataagacgcactctaacaagttccaaggggtggagactccgtctcagaacagatacgttgggtacttcgcccaggtaaagcacctgtataactggaatctgccgcccaggcggattttgtttatcaaaagatttattatttattcgattaggggggatgtgtgcgacttgaaggtccaggtcgtcatggagaagaaggtggtgttctcttctactagtttggggaattgcagcatcctgcatgatattgagacagacaaaatacttataaacgtgtatgacggacccccactctatgatgatgtcaaagtgcagttcttctcctccaatctgccgaagtattatgacaattgtcctttcttcttctggttcaacacttcgttcatccagaataaccggctgtgcctgccccggaatgagcttgataatcctcacaaacagaaagcatggaagatctacccccctgagtttgctgtggaaatcctattcggcgagaaatag

SEQ ID NO: 261438 - DNA, 1467 bp, Artificial Sequence
  derived and/or modified sequence
atgaacaccagcccccagaccaatgagttcaagggcaccacagaggaggccccagccaaggagagcccccacaccagcgagttcaagggagctgccctggtgagccccatcagcaagtccatgctggagcggctgagcaagtttgaggtggaggatgctgaaaatgtggccagctatgacagcaagatcaagaagatcgtgcacagcatcgtgtcctcctttgccttcggcatctttggagtcttcctggtgctgctggatgtgaccctgctgctggccgacctgatcttcacagacagcaagctgtacatccccctggagtaccgcagcatcagcctggccatcggcctcttcttcctgatggatgtgctgctgcgggtgtttgtggagggccggcagcagtacttcagtgacctcttcaacatcctggacacagccatcatcgtcatccccctgctggtggatgtgatctacatcttctttgacatcaagctgctgaggaacatcccccgctggacccacctggtgcggctgctgcggctcatcatcctgatccgcatcttccacctgctgcaccagaagaggcagctggagaagctgatgaggcggctggtgtctgagaacaagaggcgctacaccagagatggctttgacctggacctgacctacgtgacagagcgcatcatcgccatgtccttccccagcagcggccggcagagcttctacagaaaccccatcgaggaggtggtgcgcttcctggacaagaagcacaggaaccactacagagtgtacaacctgtgcagcgagcgggcctatgaccccaagcacttccacaacagagtgagccgcatcatgattgatgaccacaacgtgcccaccctgcacgagatggtggtgttcaccaaggaggtgaatgagtggatggcccaggacctggagaacatcgtggccatccactgcaagggcggcaagggccgcacaggcaccatggtgtgtgccctgctgattgccagcgagatcttcctgacagctgaggagagcctgtactactttggagagaggaggaccaacaagacccacagcaacaagttccagggcgtggagacccccagccagaacagatatgtgggctactttgcccaggtgaagcacctgtacaactggaacctgcccccccggcgcatcctcttcatcaagcgcttcatcatctacagcatcagaggagatgtgtgtgacctgaaggtgcaggtggtgatggagaagaaggtggtgttcagcagcaccagcctgggcaactgcagcatcctgcatgacattgaaacagacaagatcctgatcaacgtgtatgatggcccccccctgtatgatgatgtgaaggtgcagttcttcagcagcagagctgagaagagagctgcccaccgggccaactggaagggggagcccagcagaagacctgtgctggactag

SEQ ID NO: 261439 - DNA, 1449 bp, Artificial Sequence
  derived and/or modified sequence
atgaatgaaagcccccagaccaatgagttcaagggcaccacagaggaggccccagccaaggagagcccccacaccagcgagttcaagggagctgccctggtgagccccatcagcaagtccatgctggagcggctgagcaagtttgaggtggaggatgctgaaaatgtggccagctatgacagcaagatcaagaagatcgtgcacagcatcgtgtcctcctttgccttcggcatctttggagtcttcctggtgctgctggatgtgaccctgctgctggccgacctgatcttcacagacagcaagctgtacatccccctggagtaccgcagcatcagcctggccatcggcctcttcttcctgatggatgtgctgctgcgggtgtttgtggagggctggacccacctggtgcggctgctgcggctcatcatcctgatccgcatcttccacctgctgcaccagaagaggcagctggagaagctgatgaggcggctggtgtctgagaacaagaggcgctacaccagagatggctttgacctggacctgacctacgtgacagagcgcatcatcgccatgtccttccccagcagcggccggcagagcttctacagaaaccccatcgaggaggtggtgcgcttcctggacaagaagcacaggaaccactacagagtgtacaacctgtgcagcgagcgggcctatgaccccaagcacttccacaacagagtgagccgcatcatgattgatgaccacaacgtgcccaccctgcacgagatggtggtgttcaccaaggaggtgaatgagtggatggcccaggacctggagaacatcgtggccatccactgcaagggcggcaagggccgcacaggcaccatggtgtgtgccctgctgattgccagcgagatcttcctgacagctgaggagagcctgtactactttggagagaggaggaccaacaagacccacagcaacaagttccagggcgtggagacccccagccagaacagatatgtgggctactttgcccaggtgaagcacctgtacaactggaacctgcccccccggcgcatcctcttcatcaagcgcttcatcatctacagcatcagaggagatgtgtgtgacctgaaggtgcaggtggtgatggagaagaaggtggtgttcagcagcaccagcctgggcaactgcagcatcctgcatgacattgaaacagacaagatcctgatcaacgtgtatgatggcccccccctgtatgatgatgtgaaggtgcagttcttcagcagcaacctgcccaagtactatgacaactgccccttcttcttctggttcaacaccagcttcatccagaacaaccggctgtgcctgcccagaaatgagctggacaacccccacaagcagaaggcctggaagatctacccacctgagtttgctgtggagatcctgtttggagagaagtag

SEQ ID NO: 261440 - DNA, 1569 bp, Artificial Sequence
  derived and/or modified sequence
atgaatgaaagcccccagaccaatgagttcaagggcaccacagaggaggccccagccaaggagagcccccacaccagcgagttcaagggagctgccctggtgagccccatcagcaagtccatgctggagcggctgagcaagtttgaggtggaggatgctgaaaatgtggccagctatgacagcaagatcaagaagatcgtgcacagcatcgtgtcctcctttgccttcggcatctttggagtcttcctggtgctgctggatgtgaccctgctgctggccgacctgatcttcacagacagcaagctgtacatccccctggagtaccgcagcatcagcctggccatcggcctcttcttcctgatggatgtgctgctgcgggtgtttgtggagggccggcagcagtacttcagtgacctcttcaacatcctggacacagccatcatcgtcatccccctgctggtggatgtgatctacatcttctttgacatcaagctgctgaggaacatcccccgctggacccacctggtgcggctgctgcggctcatcatcctgatccgcatcttccacctgctgcaccagaagaggcagctggagaagctgatgaggcggctggtgtctgagaacaagaggcgctacaccagagatggctttgacctggacctgacctacgtgacagagcgcatcatcgccatgtccttccccagcagcggccggcagagcttctacagaaaccccatcgaggaggtggtgcgcttcctggacaagaagcacaggaaccactacagagtgtacaacctgtgcagcgagcgggcctatgaccccaagcacttccacaacagagtgagccgcatcatgattgatgaccacaacgtgcccaccctgcacgagatggtggtgttcaccaaggaggtgaatgagtggatggcccaggacctggagaacatcgtggccatccactgcaagggcggcaagggccgcacaggcaccatggtgtgtgccctgctgattgccagcgagatcttcctgacagctgaggagagcctgtactactttggagagaggaggaccaacaagacccacagcaacaagttccagggcgtggagacccccagccagaacagatatgtgggctactttgcccaggtgaagcacctgtacaactggaacctgcccccccggcgcatcctcttcatcaagcgcttcatcatctacagcatcagaggagatgtgtgtgacctgaaggtgcaggtggtgatggagaagaaggtggtgttcagcagcaccagcctgggcaactgcagcatcctgcatgacattgaaacagacaagatcctgatcaacgtgtatgatggcccccccctgtatgatgatgtgaaggtgcagttcttcagcagcaacctgcccaagtactatgacaactgccccttcttcttctggttcaacaccagcttcatccagaacaaccggctgtgcctgcccagaaatgagctggacaacccccacaagcagaaggcctggaagatctacccacctgagtttgctgtggagatcctgtttggagagaagtag

SEQ ID NO: 261441 - DNA, 1467 bp, Artificial Sequence
  derived and/or modified sequence
atgaacaccagcccccagaccaacgagttcaagggcaccaccgaggaagctcccgccaaagaatctccgcacacttctgaattcaagggagccgccctcgtgtccccgattagcaaatctatgctggagcgtctcagtaagtttgaagtagaagacgctgaaaatgtcgcgagctacgactccaagattaaaaaaattgttcattcaatcgtgtcctcttttgcattcggcatctttggcgtatttctggttcttttggatgtaacactgctgctcgctgatcttatctttaccgattctaagctgtacataccattagaatatcgttccatctcactggccatcggccttttctttctgatggacgtgctactaagggttttcgtggagggtcgacagcagtatttctccgatctgttcaacatcctggatactgccatcatcgtgatacccctcctggtagatgttatctatatattcttcgacatcaaactccttcgaaatatccctcgatggacgcacttagtgcggctactgcgcctcatcatactcatacgcatcttccatctgctccatcagaaacggcagcttgagaagctgatgagacgcctggtctcagaaaataagcggcgctacacacgggatgggttcgacctcgatctgacatacgtgaccgagcggatcatcgcaatgtcctttccctcgagcggaaggcaaagcttctaccggaacccaatcgaagaggtggtgcggttcttagacaagaagcatagaaaccactatcgggtgtataacctgtgctccgaaagagcctacgatcccaagcattttcacaatagggtgtcaaggattatgatcgatgatcacaacgtgcctacgctccacgaaatggtcgtatttacaaaagaggtgaatgagtggatggcacaggatttggagaatattgtagctattcattgtaaaggtggcaaagggagaacagggaccatggtttgtgcactgctgattgccagtgagatatttctgacagctgaggagagcctttactatttcggagagaggagaacaaacaaaacacattctaataaattccagggtgtggaaactcctagccaaaaccggtatgtgggctacttcgctcaggtgaaacacttatataattggaatttgccacctaggcgtatcttattcatcaagcgcttcatcatttactcaatccgtggagacgtgtgtgaccttaaagtccaggttgttatggaaaagaaagtggtcttttccagcacctcgctagggaattgttccattctgcacgacatagagacagataaaattctaataaacgtctatgacggccctcctctctatgacgatgtcaaggtgcagtttttcagcagcagagctgaaaaacgcgccgcacaccgggccaattggaaaggagagccaagtcgacgacccgtactagactag

SEQ ID NO: 261442 - DNA, 1449 bp, Artificial Sequence
  derived and/or modified sequence
atgaacgagagcccccagaccaacgagttcaagggcaccaccgaggaagctcctgctaaggagtcgcctcatacctcagagttcaaaggcgccgcgttggtctcgccaattagcaagtcaatgctggagaggttgtccaagtttgaagttgaagacgctgagaatgtggccagctacgattccaagatcaaaaaaattgtgcacagtatagtctcaagcttcgcatttggcatcttcggggttttcttggtcctcctcgatgtgactctcttgttggctgacctgatcttcactgactcgaagctctacatccccctggagtaccgcagtatctctctcgcaatcggtctattctttctgatggatgttctactcagagtgttcgtcgaagggtggacccacttagttcggctgttgcgactgattattctgatccgcattttccatctgctgcatcagaagcgacagcttgaaaaactgatgcgacggttagtgtccgagaacaagcgacgctatacaagagatggatttgatctggatttgacctacgtgacggagcgcatcatcgccatgagctttcctagctcaggtcggcagagtttttatcggaaccccatagaggaggtagtgcgcttcctggataagaagcaccgtaatcattatcgcgtgtataatctctgtagtgaaagggcctacgatccgaaacacttccataacagagttagtaggattatgattgatgatcacaatgtgcccactctgcatgaaatggttgtgtttaccaaggaagtcaatgaatggatggcccaagatctcgagaacatagtggctatccactgtaagggcggtaaaggccgtactggaacaatggtgtgcgctttgctgatcgctagtgaaatcttcctgacagccgaagagtccctgtactacttcggcgaaaggagaaccaataagacgcacagtaacaagttccagggtgtggagacaccttcccagaatcgttatgtaggctatttcgctcaagtgaagcatctctataactggaacttaccgcctcgaagaattctctttataaagaggttcatcatatactccatccgaggggatgtctgcgacttgaaggtccaagtggtcatggagaagaaggtggttttttcttccacatctctgggaaactgctccattctacatgatattgaaacagacaagatcttgattaatgtttacgatgggccacctttgtatgatgatgtgaaagtgcaattttttagctccaacctgcccaagtattacgacaattgtcccttctttttctggtttaatacgtccttcattcagaataacaggctatgcctcccacgaaacgaactggataacccgcataaacagaaggcatggaaaatctatcctcccgaattcgcggttgagatcttatttggggaaaagtag

SEQ ID NO: 261443 - DNA, 1569 bp, Artificial Sequence
  derived and/or modified sequence
atgaacgagagcccccagaccaacgagttcaagggcaccaccgaggaggcaccggcaaaagagtccccgcacacatctgaattcaagggggccgcactggtgagtcctatctccaagtccatgctggaaagactgtcgaagtttgaggttgaggacgccgaaaatgtggcatcttacgactctaaaattaagaagatcgtgcacagtattgtgtcgtcttttgcatttgggatcttcggcgtctttctcgtgctactggatgttaccctgctgcttgcagacttgattttcaccgatagcaaattgtatatacccctggaatatcgcagcatctccctcgcaattggccttttcttcctgatggacgtcctcttaagggtcttcgtcgagggtagacaacagtactttagcgatctgttcaatattcttgacacggccatcatagttatccctctgcttgttgatgtaatttacattttctttgacattaaattgctccgcaacatcccccgctggacccatctggtaagattgctgcgtcttattatcctgatccgcatttttcacctgctgcatcagaaacgacagttggagaagcttatgaggaggctcgtctccgagaacaagcgccgctacactcgggacggcttcgatctggatctgacttacgtaacagagcggatcattgcaatgagctttccctccagcggcaggcaatccttttaccggaatcccatcgaagaggtggtaagattcctggataagaagcacagaaaccattacagagtgtataatttgtgcagcgagagggcctacgaccctaaacattttcataacagagtgagtcgcataatgattgatgaccacaacgttccaacactgcacgaaatggttgtgttcaccaaggaagtgaacgagtggatggcccaggaccttgagaacatagtagcaattcattgcaaagggggcaagggacggacagggaccatggtgtgtgcactgctgatagcgagcgagatcttcctgacagccgaagagagtttgtattatttcggcgagagaagaactaacaagacccattctaataaattccagggggtggaaacccccagccagaataggtacgttggctatttcgcccaggtgaaacatctgtataactggaacctgcctcctagacgcatcttgtttattaaacggttcataatctattcgatcaggggcgatgtttgcgatctgaaagttcaagttgtcatggaaaagaaagtggtgttctcctcaaccagtcttggaaattgtagcatcttgcacgatattgagacagataagatccttataaacgtctacgacggccctcctttatatgatgacgttaaagttcagttttttagctctaatctgcctaaatactacgataattgccccttctttttctggtttaacacttcttttatccagaacaacagactctgcttaccaaggaacgaattggataatccccacaaacaaaaagcttggaaaatatacccgccggagttcgccgttgagatactcttcggtgagaagtag

SEQ ID NO: 261444 - DNA, 1569 bp, Artificial Sequence
  derived and/or modified sequence
atgaacgagagcccccagaccaacgagttcaagggcaccaccgaggaggcccctgccaaagagtctcctcacaccagcgagttcaagggtgctgccctggtgagccccatcagtaaaagcatgctagagcgcctctccaaattcgaagtggaggacgccgaaaacgtggctagctacgacagtaagataaagaagatcgtgcactctattgttagtagcttcgccttcggcatttttggcgtattcctggtgctcttagacgtgacactgttactggctgatctcattttcacagattccaaattatatattccactggagtaccggtccatatctctcgccattggactctttttcctgatggacgtcctgttaagggttttcgtggagggaaggcagcaatacttttccgacctcttcaatatcctggacaccgccatcatcgtgatcccacttctggtcgacgtgatctacattttcttcgatatcaagcttttgagaaatatcccacgatggacccacttggtacgcctgctccgtctgataatccttataagaatctttcatctcttacaccagaagaggcagctagaaaaactgatgcgtagactggtttccgagaataaacgccgatacactagagatggcttcgatctggacctgacttacgttactgaacggattatagcaatgtctttcccttccagcggacggcagagtttttaccgcaaccctattgaagaagtagtccgcttcttggacaagaaacaccggaaccactatagagtctacaatttgtgttcagagcgggcctacgacccgaagcactttcacaatagggtgtctcgcattatgattgacgatcataacgtcccaacgctgcacgagatggtggtgtttactaaagaggtgaatgagtggatggcccaggatttggaaaacatcgttgccatacactgcaaaggcggaaaagggagaaccgggaccatggtttgtgcattgctaatagcaagcgagatctttctgacggccgaggagtcactgtactactttggcgagcgccggaccaataagactcattcaaataagttccaaggggtcgaaaccccttctcagaaccggtacgtgggctactttgcgcaggtgaaacacctctataattggaacctaccccctcggcgcatactgtttattaaacggttcatcatttatagcattcgcggcgacgtatgcgatctcaaagtacaggtcgtgatggagaagaaagttgtgttcagttcgacgtccctaggaaattgttccattcttcatgacatcgaaacagacaaaatactgataaatgtttacgacggccctccactctatgatgatgtcaaggtgcagtttttctcatccaatctgccgaagtattacgataattgcccctttttcttctggttcaacacgtcattcattcagaataaccgcctgtgcctgcctcgcaatgagctagacaatccccataaacagaaggcttggaagatctatcctcccgagttcgccgttgagatactgtttggcgagaaatag

SEQ ID NO: 261445 - DNA, 1467 bp, Artificial Sequence
  derived and/or modified sequence
atgaatacctccccgcagactaacgaattcaagggcactacggaggaggctcctgcaaaagaatccccacatacaagtgagttcaagggagctgctcttgtctcaccaatctcaaagagcatgctcgagcgcttaagcaaatttgaagtggaagacgcagagaacgttgccagctacgattcaaagattaagaaaatcgtccacagtattgtgtcatcgtttgcttttggtatcttcggcgtgtttcttgtcttgctcgatgtgactcttcttctcgcggacctgatcttcaccgacagcaagctgtacatacctctagaatatcggtcaatttcactggccataggtcttttcttccttatggacgtgctgttaagggtgtttgttgagggcagacagcagtacttctcagatctgttcaatatcctggacacggccatcatcgtcatccctctgctcgtggatgtgatctacattttcttcgatattaaattgctgcgaaatatccctcggtggacccaccttgttaggcttctaaggctgatcatcctaatccggatcttccaccttttgcaccagaagaggcaactcgagaaactcatgcgtagacttgttagtgagaacaaacgcaggtatacacgggacgggttcgatctggacctaacctacgtaactgaaagaataatcgctatgtctttccctagcagcggaagacagtctttttatcggaatcccatcgaagaagtggtgaggttcctggacaagaagcatcgaaatcattaccgggtgtacaacctgtgttctgagcgggcttacgaccccaaacactttcacaatagggtgtccagaatcatgatcgatgaccacaacgtgcctacactccatgagatggtggtgtttacgaaggaggtgaacgaatggatggcgcaggaccttgaaaacatagttgcaatccattgcaaaggtggaaaggggagaaccgggactatggtctgtgcgctccttatcgcgtccgagatattcctcacggcggaggaaagcctatactactttggcgagcgtagaacaaacaagacacacagcaataaatttcagggagttgagactccgagtcaaaaccggtacgttggatattttgcccaggtaaagcatctctacaactggaacctgcctccaagacgaatcctctttattaaaaggttcattatatatagtatccgtggtgatgtgtgtgacctgaaagtgcaggtcgtgatggagaaaaaagtagttttctcttccactagccttgggaactgctctatcctgcacgatatagaaacagacaagatcttaattaacgtgtatgatggcccaccactttacgacgacgtaaaagtgcagttttttagcagtcgggcagagaagagggccgctcacagagctaactggaagggagagccttctcggcgacccgttctggactag

SEQ ID NO: 261446 - DNA, 1449 bp, Artificial Sequence
  derived and/or modified sequence
atgaacgaatcaccccagaccaatgaattcaaaggcactaccgaggaagctcccgcaaaggagtccccacacacttccgaattcaagggtgccgcactagtctcccccatctctaagagtatgctcgagagactctccaagttcgaggtggaggacgcggaaaatgtggcgtcatatgatagcaaaatcaaaaagatcgtgcactcgatcgtctcctcgttcgccttcggcatctttggcgtgtttttggtcctgctcgacgtcacactcctgctggctgacctgatatttactgactcgaagctgtacatccctctagaatatcgctctatctccctggcgatagggttattcttcctcatggacgtgctgctgcgcgtgtttgttgagggctggacacaccttgttcgcctcctacgcttaatcattttgatcaggatttttcaccttctgcaccagaagcgtcagctggagaaattaatgaggcgactggtctccgagaataagagacgctatacccgtgacggcttcgacctggaccttacatacgtaaccgagcgaattattgctatgagcttcccgtctagtggacgacagtctttctatagaaaccccattgaggaagtggtgcgatttttggataaaaaacatcgcaaccactacagggtgtataacttgtgttctgagagggcatacgatcccaagcactttcacaatcgcgtctccaggataatgattgatgatcacaatgtgccaacactgcatgagatggtggtgttcaccaaggaggtgaacgagtggatggctcaggatctggagaacattgtcgccattcactgtaaagggggaaaagggagaaccgggacgatggtgtgtgcccttctcatagcttcagaaatcttccttacggccgaggagtcactgtattatttcggcgaacgacgcaccaataaaacgcattctaataaattccagggagtcgaaactccatcacagaatcgatatgtgggatacttcgctcaggtcaaacatctttataactggaacttgccccctcgacgaatcctctttatcaagagattcattatctactccataagaggtgatgtctgtgacctgaaagtgcaggtcgtgatggagaagaaggtggtgttctctagcaccagtctgggaaactgcagcattctgcacgacatagagactgataagatcctgattaacgtgtatgacggacccccactgtatgatgacgtaaaagtgcagttctttagcagtaatctgcccaagtactatgataactgcccatttttcttctggtttaatacttcattcatacagaataatcgcctttgtttgccgagaaacgagctggacaatcctcataaacagaaggcctggaaaatctacccaccagagtttgctgtggagattctgtttggcgaaaagtag

SEQ ID NO: 261447 - DNA, 1569 bp, Artificial Sequence
  derived and/or modified sequence
atgaatgaatccccacagaccaatgagttcaaaggaactacggaggaagctccagccaaggagtcccctcacacatctgaatttaaaggcgctgcccttgtgtccccaatttccaaaagtatgcttgaacgcctgtccaaattcgaggtggaggacgccgaaaatgtggcgagctacgattcaaaaatcaagaaaattgttcatagcattgtgtcttccttcgcctttggcatatttggggttttcctcgtactattggacgtgaccctactgctggcagaccttatctttacagatagcaagctttatatacccctcgagtaccggtctataagcttagccatcggtctgttttttcttatggatgtcctgctgcgggtatttgttgaaggccgtcagcagtatttcagcgatctgttcaatattttggacacggcaatcattgtgataccactgctggtggacgttatttatatcttctttgacattaagctgcttcgaaatattcctcgatggacccacctagtgcggctgctgcggttgatcatactgattagaattttccacctgctccaccaaaagcggcagctggaaaagttgatgaggagacttgtatcggaaaacaagcggcgatatactcgcgatggatttgacctggacctgacttacgtgactgaacgcatcatcgccatgtcattcccatcctccggcaggcagtccttctacagaaaccctatcgaggaggttgtccgctttctcgacaaaaagcatagaaatcattaccgcgtgtacaatctttgctcagaaagggcctatgaccctaagcacttccataatagagtctctcgcattatgatagacgatcataatgtgcctaccctgcacgaaatggtggtgtttacaaaggaggtgaacgaatggatggcccaagatctcgaaaatatagtggccatccattgtaagggcggtaaaggtcgaaccggtaccatggtatgcgccctcttgattgcatccgaaatctttctgactgccgaggagtctctgtattacttcggcgaacgcaggaccaacaaaactcatagcaataagttccagggtgtggaaacccctagccagaatcgctatgttggctatttcgcccaagtgaagcacctgtacaactggaatttgcccccacggagaattctgttcattaagcggtttatcatctattccatacgcggtgatgtctgtgacctgaaggtgcaggtggtaatggaaaagaaggtggtgttctcatccacttctctgggtaactgctctattttgcacgacatcgaaaccgacaagatcctgataaacgtgtacgacggaccacccctttacgacgacgtgaaggtccagtttttctcctcaaacctccccaagtactatgacaattgtcccttctttttctggttcaacacctcattcatccagaacaatagactttgcctgcccagaaacgagctagataaccctcataagcagaaagcctggaaaatctaccccccagagtttgccgtggaaatcctgtttggagaaaaatag

SEQ ID NO: 261448 - DNA, 1569 bp, Artificial Sequence
  derived and/or modified sequence
atgaacgagagcccccagacgaatgagttcaagggaaccaccgaagaggcccctgctaaggagagtccgcacacgtccgagtttaagggtgccgcactggtcagtcccatctcaaaatcaatgctagaacggcttagcaaatttgaagtcgaggacgcggagaatgtggctagctacgattcaaaaatcaagaagatcgttcatagcatcgtgtccagttttgcgtttgggatttttggagtcttcttggtactgctcgatgtgactctactgctggctgatctcatatttacggattctaaactgtatatccctctggagtaccgcagcatctccctcgcaatcggcctttttttcctcatggacgtgttgttacgcgtcttcgtggagggccgtcagcagtactttagtgatctattcaacattctagataccgctataattgtgatccccctgctcgtggatgtaatttatattttcttcgatattaagctccttcgaaacatccctagatggactcacttggtgcgccttctgagactgatcatactgatccgcattttccacctcctgcatcaaaagaggcagcttgaaaagcttatgcggagactcgtcagcgaaaacaaacgcagatacactagggacggtttcgatctggatctcacatatgtcaccgagcggatcatcgccatgagtttcccgtctagcggtcgccagagtttctataggaaccccattgaagaagtggtgcgctttctcgataagaaacaccgcaatcattaccgcgtgtataacttgtgttctgagcgggcttacgatcccaaacactttcataatagagtgtcgcgcatcatgatcgacgatcacaacgttcccactcttcacgagatggtcgttttcactaaagaggtgaacgagtggatggctcaagacttggagaacattgtggcaatacattgtaagggagggaagggaagaactggtaccatggtgtgtgcactgttaatcgcctctgagatctttctcacggccgaagagtctctttactatttcggtgagcgtcggaccaataaaactcactcaaacaagttccagggagtcgagacgccatctcagaatagatacgtgggctattttgcacaggtgaagcatctttacaactggaatctgcctcccaggaggatcttgttcattaagcgatttattatttattccattcggggagacgtctgtgacctcaaagttcaggtcgtgatggagaagaaggtggtgttcagttcgacttctctgggaaactgctcaatcctgcacgatatcgagactgataaaatcctgattaacgtatatgatgggcctcctctgtacgacgacgtcaaggttcagttcttctcttcaaacctgccaaagtattatgataactgccctttctttttctggttcaacaccagttttatccagaataaccgtctctgtttgccgagaaacgaattagacaacccacataaacagaaagcctggaaaatctacccacctgaattcgcggtcgagattctcttcggtgagaaatag

SEQ ID NO: 261449 - DNA, 1633 bp, Artificial Sequence
  derived and/or modified sequence
atgaatactagtccacagacaaacgaatttaaaggaacaaccgaggaggcacctgcgaaagaaagcccacacacaagtgaatttaaaggagcagccctggtgtcacctatcagtaaaagtatgttagaacgactttccaagtttgaagttgaagatgctgaaaatgttgcttcatatgacagcaagattaagaaaattgtgcattcaattgtatcatcctttgcatttggaatatttggagttttcctggtcttactggatgtcactctcctccttgccgacctaattttcactgacagcaaactttatattcctttggagtatcgttctatttctctagctattggcttattttttctcatggatgttcttcttcgagtatttgtagaagggagacagcagtatttttctgacttatttaacattttagatactgccattattgtgattcctctgctggttgatgtcatttacattttttttgacattaagttgcttaggaatattcccagatggacacatttagttcgacttctacgacttattattctgataagaatttttcatctgcttcatcaaaaaagacaacttgaaaagctgatgagaaggctggtttcagaaaacaaaaggcgatacacaagggatggatttgacctagacctcacttacgttacagaacgtattattgctatgtcatttccatcttctggaaggcagtctttctatagaaatccaattgaggaagttgtgcggtttctagataagaaacatcgaaaccactatcgagtctacaatctatgcagtgaaagagcttatgatcctaagcacttccataatagggtcagtagaatcatgattgatgatcataatgtccccactctacatgagatggtggttttcaccaaggaagtaaatgagtggatggctcaagatcttgaaaacatcgtagcgattcactgtaaaggaggcaaaggaagaaccgggactatggtttgtgccctccttattgcctccgaaatatttttaactgccgaggaaagcctatattattttggagaaaggcgaaccaataaaacccacagcaataaatttcagggagtagaaactccttctcagaatagatatgttggatattttgcacaagtgaaacatctctacaactggaatctccctccaagacggatactctttataaaaagattcattatttattcgattcgtggtgatgtatgtgatctaaaagtccaagtagtaatggagaaaaaggttgtcttttccagtacttcattaggaaattgttcgatattgcatgacattgaaacagacaaaatattaattaatgtatatgacggtccacctctgtatgatgatgtgaaagtgcagtttttctcttcgagagcagagaagagggcagcacacagggccaactggaagggggagccatccaggagacctgtgctcgactgatgggtgggagcaatagcgagagagagggagggacctgagagtggaagcctttattgggataatcttcctaaatactatgacaattgtccatttttcttctggttcaacacgtcttttattcaaaataacaggctttgtctaccaagaaatgaattggataatccac

SEQ ID NO: 261450 - DNA, 1670 bp, Artificial Sequence
  derived and/or modified sequence
aatgatcgaagcagtacaaatcaggggagaacgtgcccaagacctggagaactgataataaattgtggtttatccttgcaatggaacactatatggaagtgaaaatgattgaaatagagctatacacatcatcacagacaaatttcagaaacaacgctgagtgaaaaatccacccacaaatgaattatcaggagtgaacccagaggcacgtatgaatgaaagtccacagacaaacgaatttaaaggaacaaccgaggaggcacctgcgaaagaaagcccacacacaagtgaatttaaaggagcagccctggtgtcacctatcagtaaaagtatgttagaacgactttccaagtttgaagttgaagatgctgaaaatgttgcttcatatgacagcaagattaagaaaattgtgcattcaattgtatcatcctttgcatttggaatatttggagttttcctggtcttactggatgtcactctcctccttgccgacctaattttcactgacagcaaactttatattcctttggagtatcgttctatttctctagctattggcttattttttctcatggatgttcttcttcgagtatttgtagaaggatggacacatttagttcgacttctacgacttattattctgataagaatttttcatctgcttcatcaaaaaagacaacttgaaaagctgatgagaaggctggtttcagaaaacaaaaggcgatacacaagggatggatttgacctagacctcacttacgttacagaacgtattattgctatgtcatttccatcttctggaaggcagtctttctatagaaatccaattgaggaagttgtgcggtttctagataagaaacatcgaaaccactatcgagtctacaatctatgcagtgaaagagcttatgatcctaagcacttccataatagggtcagtagaatcatgattgatgatcataatgtccccactctacatgagatggtggttttcaccaaggaagtaaatgagtggatggctcaagatcttgaaaacatcgtagcgattcactgtaaaggaggcaaaggaagaaccgggactatggtttgtgccctccttattgcctccgaaatatttttaactgccgaggaaagcctatattattttggagaaaggcgaaccaataaaacccacagcaataaatttcagggagtagaaactccttctcagaatagatatgttggatattttgcacaagtgaaacatctctacaactggaatctccctccaagacggatactctttataaaaagattcattatttattcgattcgtggtgatgtatgtgatctaaaagtccaagtagtaatggagaaaaaggttgtcttttccagtacttcattaggaaattgttcgatattgcatgacattgaaacagacaaaatattaattaatgtatatgacggtccacctctgtatgatgatgtgaaagtgcagtttttctcttcgaatcttcctaaatactatgacaattgtccatttttcttctggttcaacacgtcttttattcaaaataacaggctttgtctaccaagaaatgaattggataatccacataaacaaaaagcatggaaaatttatccaccagaatttgctgtggagatactttttggcgagaaatgacttccaatga

SEQ ID NO: 261451 - DNA, 1790 bp, Artificial Sequence
  derived and/or modified sequence
aatgatcgaagcagtacaaatcaggggagaacgtgcccaagacctggagaactgataataaattgtggtttatccttgcaatggaacactatatggaagtgaaaatgattgaaatagagctatacacatcatcacagacaaatttcagaaacaacgctgagtgaaaaatccacccacaaatgaattatcaggagtgaacccagaggcacgtatgaatgaaagtccacagacaaacgaatttaaaggaacaaccgaggaggcacctgcgaaagaaagcccacacacaagtgaatttaaaggagcagccctggtgtcacctatcagtaaaagtatgttagaacgactttccaagtttgaagttgaagatgctgaaaatgttgcttcatatgacagcaagattaagaaaattgtgcattcaattgtatcatcctttgcatttggaatatttggagttttcctggtcttactggatgtcactctcctccttgccgacctaattttcactgacagcaaactttatattcctttggagtatcgttctatttctctagctattggcttattttttctcatggatgttcttcttcgagtatttgtagaagggagacagcagtatttttctgacttatttaacattttagatactgccattattgtgattcctctgctggttgatgtcatttacattttttttgacattaagttgcttaggaatattcccagatggacacatttagttcgacttctacgacttattattctgataagaatttttcatctgcttcatcaaaaaagacaacttgaaaagctgatgagaaggctggtttcagaaaacaaaaggcgatacacaagggatggatttgacctagacctcacttacgttacagaacgtattattgctatgtcatttccatcttctggaaggcagtctttctatagaaatccaattgaggaagttgtgcggtttctagataagaaacatcgaaaccactatcgagtctacaatctatgcagtgaaagagcttatgatcctaagcacttccataatagggtcagtagaatcatgattgatgatcataatgtccccactctacatgagatggtggttttcaccaaggaagtaaatgagtggatggctcaagatcttgaaaacatcgtagcgattcactgtaaaggaggcaaaggaagaaccgggactatggtttgtgccctccttattgcctccgaaatatttttaactgccgaggaaagcctatattattttggagaaaggcgaaccaataaaacccacagcaataaatttcagggagtagaaactccttctcagaatagatatgttggatattttgcacaagtgaaacatctctacaactggaatctccctccaagacggatactctttataaaaagattcattatttattcgattcgtggtgatgtatgtgatctaaaagtccaagtagtaatggagaaaaaggttgtcttttccagtacttcattaggaaattgttcgatattgcatgacattgaaacagacaaaatattaattaatgtatatgacggtccacctctgtatgatgatgtgaaagtgcagtttttctcttcgaatcttcctaaatactatgacaattgtccatttttcttctggttcaacacgtcttttattcaaaataacaggctttgtctaccaagaaatgaattggataatccacataaacaaaaagcatggaaaatttatccaccagaatttgctgtggagatactttttggcgagaaatgacttccaatga

SEQ ID NO: 261452 - DNA, 1793 bp, Artificial Sequence
  derived and/or modified sequence
agtccacccacaaatgaattatcaggagtgaacccagaggcacgtatgaatgaaagtccacagacaaacgaatttaaaggaacaaccgaggaggcacctgcgaaagaaagcccacacacaagtgaatttaaaggagcagccctggtgtcacctatcagtaaaagtatgttagaacgactttccaagtttgaagttgaagatgctgaaaatgttgcttcatatgacagcaagattaagaaaattgtgcattcaattgtatcatcctttgcatttggaatatttggagttttcctggtcttactggatgtcactctcctccttgccgacctaattttcactgacagcaaactttatattcctttggagtatcgttctatttctctagctattggcttattttttctcatggatgttcttcttcgagtatttgtagaagggagacagcagtatttttctgacttatttaacattttagatactgccattattgtgattcctctgctggttgatgtcatttacattttttttgacattaagttgcttaggaatattcccagatggacacatttagttcgacttctacgacttattattctgataagaatttttcatctgcttcatcaaaaaagacaacttgaaaagctgatgagaaggctggtttcagaaaacaaaaggcgatacacaagggatggatttgacctagacctcacttacgttacagaacgtattattgctatgtcatttccatcttctggaaggcagtctttctatagaaatccaattgaggaagttgtgcggtttctagataagaaacatcgaaaccactatcgagtctacaatctatgcagtgaaagagcttatgatcctaagcacttccataatagggtcagtagaatcatgattgatgatcataatgtccccactctacatgagatggtggttttcaccaaggaagtaaatgagtggatggctcaagatcttgaaaacatcgtagcgattcactgtaaaggaggcaaaggaagaaccgggactatggtttgtgccctccttattgcctccgaaatatttttaactgccgaggaaagcctatattattttggagaaaggcgaaccaataaaacccacagcaataaatttcagggagtagaaactccttctcagaatagatatgttggatattttgcacaagtgaaacatctctacaactggaatctccctccaagacggatactctttataaaaagattcattatttattcgattcgtggtgatgtatgtgatctaaaagtccaagtagtaatggagaaaaaggttgtcttttccagtacttcattaggaaattgttcgatattgcatgacattgaaacagacaaaatattaattaatgtatatgacggtccacctctgtatgatgatgtgaaagtgcagtttttctcttcgaatcttcctaaatactatgacaattgtccatttttcttctggttcaacacgtcttttattcaaaataacaggctttgtctaccaagaaatgaattggataatccacataaacaaaaagcatggaaaatttatccaccagaatttgctgtggagatactttttggcgagaaatgacttccaatgatgttgtagctggatccgactaagtatagctcccccttccccttctgggaaagaattatgttctttccaacccctgccacatgttcatgtgtcctaagtcttccttgatgatgcatctatatttatatatgtttatatatgttcttcataaatctattaaatatatatag

SEQ ID NO: 261453 - protein, 533 aa, Artificial Sequence
  derived and/or modified sequence
MNESPDPTDLAGVIIELGPNDSPQTSEFKGATEEAPAKESVLARLSKFEVEDAENVASYDSKIKKIVHSIVSSFAFGLFGVFLVLLDVTLILADLIFTDSKLYIPLEYRSISLAIALFFLMDVLLRVFVERRQQYFSDLFNILDTAIIVILLLVDVVYIFFDIKLLRNIPRWTHLLRLLRLIILLRIFHLFHQKRQLEKLIRRRVSENKRRYTRDGFDLDLTYVTERIIAMSFPSSGRQSFYRNPIKEVVRFLDKKHRNHYRVYNLCSERAYDPKHFHNRVVRIMIDDHNVPTLHQMVVFTKEVNEWMAQDLENIVAIHCKGGTDRTGTMVCAFLIASEICSTAKESLYYFGERRTDKTHSEKFQGVKTPSQKRYVAYFAQVKHLYNWNLPPRRILFIKHFIIYSIPRYVRDLKIQIEMEKKVVFSTISLGKCSVLDNITTDKILIDVFDGLPLYDDVKVQFFYSNLPTYYDNCSFYFWLHTSFIENNRLYLPKNELDNLHKQKARRIYPSDFAVEILFGEKMTSSDVVAGSD

SEQ ID NO: 261454 - DNA, 1602 bp, Artificial Sequence
  derived and/or modified sequence
atgaacgagagccccgaccccaccgacctggccggcgtgatcatcgagctgggccccaacgacagcccccagaccagcgagttcaagggcgccaccgaggaggcccccgccaaggagagcgtgctggccagactgagcaagttcgaggtggaggacgccgagaacgtggccagctacgacagcaagatcaagaagatcgtgcacagcatcgtgagcagcttcgccttcggcctgttcggcgtgttcctggtgctgctggacgtgaccctgatcctggccgacctgatcttcaccgacagcaagctgtacatccccctggagtacagaagcatcagcctggccatcgccctgttcttcctgatggacgtgctgctgagagtgttcgtggagagaagacagcagtacttcagcgacctgttcaacatcctggacaccgccatcatcgtgatcctgctgctggtggacgtggtgtacatcttcttcgacatcaagctgctgagaaacatccccagatggacccacctgctgagactgctgagactgatcatcctgctgagaatcttccacctgttccaccagaagagacagctggagaagctgatcagaagaagagtgagcgagaacaagagaagatacaccagagacggcttcgacctggacctgacctacgtgaccgagagaatcatcgccatgagcttccccagcagcggcagacagagcttctacagaaaccccatcaaggaggtggtgagattcctggacaagaagcacagaaaccactacagagtgtacaacctgtgcagcgagagagcctacgaccccaagcacttccacaacagagtggtgagaatcatgatcgacgaccacaacgtgcccaccctgcaccagatggtggtgttcaccaaggaggtgaacgagtggatggcccaggacctggagaacatcgtggccatccactgcaagggcggcaccgacagaaccggcaccatggtgtgcgccttcctgatcgccagcgagatctgcagcaccgccaaggagagcctgtactacttcggcgagagaagaaccgacaagacccacagcgagaagttccagggcgtgaagacccccagccagaagagatacgtggcctacttcgcccaggtgaagcacctgtacaactggaacctgccccccagaagaatcctgttcatcaagcacttcatcatctacagcatccccagatacgtgagagacctgaagatccagatcgagatggagaagaaggtggtgttcagcaccatcagcctgggcaagtgcagcgtgctggacaacatcaccaccgacaagatcctgatcgacgtgttcgacggcctgcccctgtacgacgacgtgaaggtgcagttcttctacagcaacctgcccacctactacgacaactgcagcttctacttctggctgcacaccagcttcatcgagaacaacagactgtacctgcccaagaacgagctggacaacctgcacaagcagaaggccagaagaatctaccccagcgacttcgccgtggagatcctgttcggcgagaagatgaccagcagcgacgtggtggccggcagcgactag

SEQ ID NO: 261455 - DNA, 1602 bp, Artificial Sequence
  derived and/or modified sequence
atgaatgaatcccctgaccccactgacctggctggggtgattattgagctcggtcccaatgattcccctcaaacttcagagttcaaaggagctaccgaggaagctcctgccaaagaatcagtacttgcacgcctgtctaaattcgaggtggaggatgcggagaatgtggccagctatgattctaagatcaagaaaattgtgcatagcattgtctcttccttcgccttcggtctgtttggcgttttcttggtgctgttggatgttaccctcatcctggcggatctgatcttcaccgactccaagctctacattcccctcgaatatcgctcaatttctctggccattgctctgtttttcctgatggacgttttgttgcgtgtgtttgtggagcgacggcagcagtatttcagcgatctcttcaatatacttgataccgccatcatcgtaatccttctgctcgttgacgttgtttacatattcttcgacatcaagctgctgaggaacattccgcggtggactcatctgctgagacttctccgacttatcatactcctgcggatcttccacctgtttcatcaaaaacgacaactggaaaaactcattcggcgccgtgtctcagaaaataagcgcagatatacccgggacggctttgatctggaccttacttacgttacagagcggattatcgcaatgagcttcccgagcagcggccgtcagtctttttacaggaatcctatcaaagaagttgttcggtttctggataaaaagcatcggaaccactaccgcgtatacaatctctgctccgagcgcgcatatgaccctaagcactttcataaccgcgtggtacgcatcatgatagatgaccacaacgttcctaccctacatcagatggtggtgtttacgaaggaagtgaacgaatggatggcccaggacttagagaacatcgttgcaatacactgcaagggtggcactgaccggacagggacgatggtgtgtgctttcctgatcgccagcgagatttgctctacagcgaaagagtccctctattatttcggagaaaggagaaccgataaaacgcatagcgaaaagtttcagggagttaagaccccctctcagaagcggtatgtggcctactttgctcaggtgaaacacctgtataattggaacctcccgccccgcagaattctgtttataaagcacttcatcatctacagtattccacgctatgtgagggatctgaaaatacagatcgagatggaaaagaaagtcgtcttctccactatcagcctggggaagtgctctgtcctggacaatataactaccgataaaatcttgatcgacgtctttgacgggcttcccctctacgatgatgtaaaggtacagtttttctatagcaacctgccgacctactacgataactgctccttctacttttggcttcatacgagcttcattgaaaacaaccggctttacctgccaaagaacgaactggataacttgcataaacaaaaggcgagaagaatctacccgagcgacttcgctgtcgagattttatttggcgagaagatgacttcaagcgatgtcgtggccgggagtgattag

SEQ ID NO: 261456 - DNA, 1602 bp, Artificial Sequence
  derived and/or modified sequence
atgaatgaatctccagaccccacagacctggccggggtcatcatcgagctgggccccaatgacagcccccagaccagcgagttcaagggggccacagaggaggccccagccaaggagagcgtgctggcccggctgagcaagtttgaggtggaggatgctgaaaatgtggccagctatgacagcaagatcaagaagatcgtgcacagcatcgtgtcctcctttgccttcggcctgtttggagtcttcctggtgctgctggatgtgaccctcatcctggccgacctgatcttcacagacagcaagctgtacatccccctggagtaccgcagcatcagcctggccatcgccctcttcttcctgatggatgtgctgctgcgggtgtttgtggagcggcggcagcagtacttcagtgacctcttcaacatcctggacacagccatcatcgtcatcctgctgctggtggatgtggtgtacatcttctttgacatcaagctgctgaggaacatcccccgctggacccacctgctgcggctgctgcggctcatcatcctgctgcgcatcttccacctgttccaccagaagaggcagctggagaagctgatcagaagaagagtgtctgagaacaagaggcgctacaccagagatggctttgacctggacctgacctacgtgacagagcgcatcatcgccatgtccttccccagcagcggccggcagagcttctacagaaaccccatcaaggaggtggtgcgcttcctggacaagaagcacaggaaccactacagagtgtacaacctgtgcagcgagcgggcctatgaccccaagcacttccacaacagagtggtgcgcatcatgattgatgaccacaacgtgcccaccctgcaccagatggtggtgttcaccaaggaggtgaatgagtggatggcccaggacctggagaacatcgtggccatccactgcaagggcggcacagacagaacaggcaccatggtgtgtgccttcctgattgccagcgagatctgcagcacagccaaggagagcctgtactactttggagagaggagaacagacaagacccacagcgagaagttccagggcgtgaagacccccagccagaagagatatgtggcctactttgcccaggtgaagcacctgtacaactggaacctgcccccccggcgcatcctcttcatcaagcacttcatcatctacagcatccccaggtatgtgcgggacctgaagatccagatcgagatggagaagaaggtggtgttcagcaccatcagcctgggcaagtgcagcgtgctggacaacatcaccacagacaagatcctgattgatgtgtttgatggcctgcccctgtatgatgatgtgaaggtgcagttcttctacagcaacctgcccacctactatgacaactgcagcttctacttctggctgcacaccagcttcatcgagaacaaccggctgtacctgcccaagaatgagctggacaacctgcacaagcagaaggcccggcgcatctaccccagcgactttgctgtggagatcctgtttggagagaagatgaccagcagtgatgtggtggccggcagtgactag

SEQ ID NO: 261457 - DNA, 1602 bp, Artificial Sequence
  derived and/or modified sequence
atgaacgagagccccgaccccaccgacctggccggcgtgatcatcgagttgggccctaacgacagcccacaaacttctgaattcaagggagctacagaggaagcccctgcaaaggagtcagtccttgcccgcttatccaaatttgaggttgaggatgccgagaatgtggcgagttatgattcaaagattaagaagatcgtgcattctatcgtctcatctttcgcctttgggctattcggcgtttttctagttttactggatgtaacactgatactcgctgatcttattttcacagacagtaaactctacattccactggaataccgctccatctcactggctattgccctgttctttctgatggacgtgttgcttagggtgtttgtagaacgtcgccagcaatacttttctgacctgtttaacatactcgacacggccatcatcgtgattcttctgcttgttgacgtcgtgtatattttcttcgatattaaactactccggaacatcccccgctggacccacctcttgcggctccttcgccttattatcttgcttcggatattccatctcttccaccagaagagacagttagaaaaactgatccgcagacgtgtaagtgagaataagcgaaggtacacaagggacggctttgatttggatctgacctacgtgacggagaggatcatcgctatgtctttcccctcatccggacggcagtctttctatcggaaccctatcaaagaggtcgtccgtttcctagataaaaagcatcgtaatcactaccgggtgtacaatttgtgctctgaacgcgcctatgatcccaagcattttcacaaccgagtcgtgagaatcatgatcgacgatcacaacgtgccaaccctgcatcagatggttgtctttaccaaagaagttaacgagtggatggcccaggacttggagaatatcgtcgcaatacactgtaagggggggacagatcgaactggcactatggtctgtgctttcctcatcgcatcagagatttgctcaacagcaaaggaaagcctgtattatttcggggaacgtaggacagacaagacacattccgaaaagtttcaaggggtgaagacaccatcccagaaacgctatgtagcctattttgcccaggtgaaacatctgtacaactggaacctgccccctaggaggattttgttcattaaacactttatcatctattctatcccacggtatgtccgcgatttaaaaattcaaatagaaatggaaaaaaaggttgtattttccacaatttccctgggcaagtgtagcgtacttgataatatcaccaccgataaaatccttatcgatgttttcgacggcctccctctttacgacgatgttaaggtgcagtttttctactccaatcttcccacgtactatgataactgtagcttttacttttggctacatacttcctttatagagaacaacagactgtacctgccaaaaaacgagctggataacctgcataaacaaaaggctcgccgcatttaccctagtgatttcgctgtggaaatcctgtttggagagaagatgacttcaagcgatgtcgtagcaggatctgattag

SEQ ID NO: 261458 - DNA, 1602 bp, Artificial Sequence
  derived and/or modified sequence
atgaacgagtcccccgatcccactgacttggccggagtcatcatcgagcttggccctaatgattccccgcagacgtctgaatttaaaggggcaactgaagaggcccctgcgaaagaatctgtgcttgctcggttgtccaaattcgaagtcgaggacgccgagaatgtggccagctatgatagcaagatcaaaaaaatcgtacattctatcgttagctcttttgcttttggactgttcggagtctttctggtgctgctggatgtcactctcattctggcagacctcatattcaccgattcaaaactgtatatccccctagagtaccggagcatcagtcttgctattgcgctgttttttctcatggatgttctcttgagggtgttcgttgagcgcagacaacaatatttctccgatctgtttaatattctcgatactgccatcatcgtcattttactcctggtggacgtggtgtacattttcttcgacatcaaattattgcgcaatatcccacgatggacccatctcttgaggctgctgagattgatcatcctgttacgcatatttcatctcttccaccagaaaaggcaacttgaaaagctgataaggcgccgtgtctctgaaaataagaggcgatatacacgagacggctttgatttagacttaacatacgtgactgaacgtataattgccatgtcattcccctcctccggcaggcaaagtttctaccggaacccaatcaaagaggtggtcaggttcctggataaaaaacatcgcaaccactacagagtttacaacctctgtagcgagagggcctatgacccgaagcacttccataatagagttgtgcgaatcatgatagacgaccacaatgtaccgaccctacaccagatggtggtgttcactaaggaagtcaacgagtggatggcacaggatctcgaaaatatagtagcgattcactgtaaagggggaacggataggacagggactatggtttgtgcatttcttattgcatccgagatctgtagcaccgccaaggaatccctctattatttcggagagagaagaacggataagacccactccgagaaattccagggtgttaaaacccctagtcagaagcggtacgtggcatattttgcgcaggttaagcacctttacaattggaatctgcctccaaggcggatccttttcataaaacatttcatcatatattcaatccctcgatatgttcgcgatctgaaaatccagatcgagatggagaagaaggtcgtgttcagcacaatttccctcggcaagtgctctgtgctggataacatcaccaccgacaagattcttatcgacgtgtttgacggtctgccactgtatgacgacgtaaaggtgcagtttttttatagtaacctaccaacatattatgataactgctccttctatttctggctccatacttctttcatagaaaataatcgcttgtaccttccaaagaacgagctcgacaatttgcacaagcagaaggctcgcagaatctacccttccgatttcgctgttgagattctttttggcgagaagatgactagcagcgacgtggtggcaggcagcgactag

SEQ ID NO: 261459 - DNA, 2674 bp, Artificial Sequence
  derived and/or modified sequence
aaggcagggggcggggcgtctccgagcggcggggccaagggagggcacaacagctgctacctgaacagtttctgacccaacagttacccagcgccggactcgctgcgccccggcggctctagggacccccggcgcctacacttagctccgcgcccgagagaatgttggaccgacgacacaagacctcagacttgtgttattctagcagctgaacacaccccaggctcttctgcccggcagtggctctggaagcagtctggtgtatagagttatggattcactaccagattctactgtatgctcttgacaactatgaccacaatggtccacccacaaatgaattatcaggagtgaacccagaggcacgtatgaatgaaagtcctgatccgactgacctggcgggagtcatcattgagctcggccccaatgacagtccacagacaagtgaatttaaaggagcaaccgaggaggcacctgcgaaagaaagtgtgttagcacgactttccaagtttgaagttgaagatgctgaaaatgttgcttcatatgacagcaagattaagaaaattgtgcattcaattgtatcatcctttgcatttggactatttggagttttcctggtcttactggatgtcactctcatccttgccgacctaattttcactgacagcaaactttatattcctttggagtatcgttctatttctctagctattgccttattttttctcatggatgttcttcttcgagtatttgtagaaaggagacagcagtatttttctgacttatttaacattttagatactgccattattgtgattcttctgctggttgatgtcgtttacattttttttgacattaagttgcttaggaatattcccagatggacacatttacttcgacttctacgacttattattctgttaagaatttttcatctgtttcatcaaaaaagacaacttgaaaagctgataagaaggcgggtttcagaaaacaaaaggcgatacacaagggatggatttgacctagacctcacttacgttacagaacgtattattgctatgtcatttccatcttctggaaggcagtctttctatagaaatccaatcaaggaagttgtgcggtttctagataagaaacaccgaaaccactatcgagtctacaatctatgcagtgaaagagcttacgatcctaagcacttccataatagggtcgttagaatcatgattgatgatcataatgtccccactctacatcagatggtggttttcaccaaggaagtaaatgagtggatggctcaagatcttgaaaacatcgtagcgattcactgtaaaggaggcacagatagaacaggaactatggtttgtgccttccttattgcctctgaaatatgttcaactgcaaaggaaagcctgtattattttggagaaaggcgaacagataaaacccacagcgaaaaatttcagggagtaaaaactccttctcagaagagatatgttgcatattttgcacaagtgaaacatctctacaactggaatctccctccaagacggatactctttataaaacacttcattatttattcgattcctcgttatgtacgtgatctaaaaatccaaatagaaatggagaaaaaggttgtcttttccactatttcattaggaaaatgttcggtacttgataacattacaacagacaaaatattaattgatgtattcgacggtctacctctgtatgatgatgtgaaagtgcagtttttctattcgaatcttcctacatactatgacaattgctcattttacttctggttgcacacatcttttattgaaaataacaggctttatctaccaaaaaatgaattggataatctacataaacaaaaagcacggagaatttatccatcagattttgccgtggagatactttttggcgagaaaatgacttccagtgatgttgtagctggatccgattaagtatagctcccccttccccttctgggaaagaattatgttctttccaaccctgccacatgttcatatatcctaaatctatcctaaatgttccttgaagtatttatttatgtttatatatgtttatatatgttcttcataaatctattacatatatatagataaaatgtcagtgtctttcttcttttttgaaggtacatacttcacagtttccatcttgtatttacctaaatttggaacacagtatgcaggaacatcaggcatcattttgaagaactttgaaatagaactttcaaagcaaaaacttgagatattcaaaaattgtgattccccaacacccacttacttacatatttttggtcaagtatttattccctgctttggttcacatttgtaatttcagatttattagaaagctaatttatatatttttcttccccttcatttacaaactgtctgttaacagattggcaaccaagactaagttttaaatccagaagagagaaatgtttcacgcaagcagtcccccaactcccaacacacactccctttcattccgagcactaaataggtagcttacttgacaagcttcctttaattacacacagacatggaggttggggtaagaagatggtggtaaatatgaagataagtaatctttaataacttctgcttttgtataaaattgtaagtgaagtgaaaagaaa

SEQ ID NO: 261460 - protein, 513 aa, Artificial Sequence
  derived and/or modified sequence
MNESPDPTDLAGVIIELGPNDSPQTSEFKGATEEAPAKESSKIKKIVHSIVSSFAFGLFGVFLVLLDVTLILADLIFTDSKLYIPLEYRSISLAIALFFLMDVLLRVFVERRQQYFSDLFNILDTAIIVILLLVDVVYIFFDIKLLRNIPRWTHLLRLLRLIILLRIFHLFHQKRQLEKLIRRRVSENKRRYTRDGFDLDLTYVTERIIAMSFPSSGRQSFYRNPIKEVVRFLDKKHRNHYRVYNLCSERAYDPKHFHNRVVRIMIDDHNVPTLHQMVVFTKEVNEWMAQDLENIVAIHCKGGTDRTGTMVCAFLIASEICSTAKESLYYFGERRTDKTHSEKFQGVKTPSQKRYVAYFAQVKHLYNWNLPPRRILFIKHFIIYSIPRYVRDLKIQIEMEKKVVFSTISLGKCSVLDNITTDKILIDVFDGLPLYDDVKVQFFYSNLPTYYDNCSFYFWLHTSFIENNRLYLPKNELDNLHKQKARRIYPSDFAVEILFGEKMTSSDVVAGSD

SEQ ID NO: 261461 - DNA, 1542 bp, Artificial Sequence
  derived and/or modified sequence
atgaacgagagccccgaccccaccgacctggccggcgtgatcatcgagctgggccccaacgacagcccccagaccagcgagttcaagggcgccaccgaggaggcccccgccaaggagagcagcaagatcaagaagatcgtgcacagcatcgtgagcagcttcgccttcggcctgttcggcgtgttcctggtgctgctggacgtgaccctgatcctggccgacctgatcttcaccgacagcaagctgtacatccccctggagtacagaagcatcagcctggccatcgccctgttcttcctgatggacgtgctgctgagagtgttcgtggagagaagacagcagtacttcagcgacctgttcaacatcctggacaccgccatcatcgtgatcctgctgctggtggacgtggtgtacatcttcttcgacatcaagctgctgagaaacatccccagatggacccacctgctgagactgctgagactgatcatcctgctgagaatcttccacctgttccaccagaagagacagctggagaagctgatcagaagaagagtgagcgagaacaagagaagatacaccagagacggcttcgacctggacctgacctacgtgaccgagagaatcatcgccatgagcttccccagcagcggcagacagagcttctacagaaaccccatcaaggaggtggtgagattcctggacaagaagcacagaaaccactacagagtgtacaacctgtgcagcgagagagcctacgaccccaagcacttccacaacagagtggtgagaatcatgatcgacgaccacaacgtgcccaccctgcaccagatggtggtgttcaccaaggaggtgaacgagtggatggcccaggacctggagaacatcgtggccatccactgcaagggcggcaccgacagaaccggcaccatggtgtgcgccttcctgatcgccagcgagatctgcagcaccgccaaggagagcctgtactacttcggcgagagaagaaccgacaagacccacagcgagaagttccagggcgtgaagacccccagccagaagagatacgtggcctacttcgcccaggtgaagcacctgtacaactggaacctgccccccagaagaatcctgttcatcaagcacttcatcatctacagcatccccagatacgtgagagacctgaagatccagatcgagatggagaagaaggtggtgttcagcaccatcagcctgggcaagtgcagcgtgctggacaacatcaccaccgacaagatcctgatcgacgtgttcgacggcctgcccctgtacgacgacgtgaaggtgcagttcttctacagcaacctgcccacctactacgacaactgcagcttctacttctggctgcacaccagcttcatcgagaacaacagactgtacctgcccaagaacgagctggacaacctgcacaagcagaaggccagaagaatctaccccagcgacttcgccgtggagatcctgttcggcgagaagatgaccagcagcgacgtggtggccggcagcgactag

SEQ ID NO: 261462 - DNA, 1542 bp, Artificial Sequence
  derived and/or modified sequence
atgaacgaaagccccgaccccaccgatcttgccggcgtcattattgaactgggaccaaacgactcaccccagacgtctgagttcaaaggggctacggaggaagccccagcaaaagaaagctcaaaaataaaaaagatcgtgcattctatcgtttccagtttcgccttcggcttattcggtgtctttctcgtgctcttggatgttacactcattctggcggacttgatttttacggactcaaagctgtacattcccctggagtaccgctctattagtctcgctattgccctgttctttttgatggatgtgctcctccgggtctttgtagagaggcggcaacagtatttttctgaccttttcaacatcctcgacactgctattatagtgatcctactgctggtcgatgttgtttatatcttctttgacatcaagttactgcgaaacattccccgctggactcacctgcttcgtcttcttagactgatcatcctgttacggattttccacctcttccatcaaaagaggcaactggagaagctgatccgccgcagggtgtcagagaacaaaaggcgctatactcgggatggatttgacctggatctgacttatgtcaccgaacggataatcgcaatgtccttcccatcatccggtaggcaaagcttctatcgcaaccctattaaagaggtcgttcgcttccttgataaaaagcataggaaccattaccgggtttacaatctgtgttcagaaagagcctacgacccgaaacactttcacaatcgtgtggtgagaatcatgattgatgaccataatgttcccacgctgcaccagatggttgtcttcactaaggaggtgaatgaatggatggcgcaggacttggaaaatatcgtcgccatacactgcaaaggaggtacagaccggacaggaaccatggtttgcgcttttcttatcgcttctgaaatttgttcaactgccaaggagagcctgtactattttggcgagcgccgcactgacaaaactcacagtgagaagttccaaggggtcaagactccttcgcagaagcgctatgttgcctattttgcacaggtgaagcatctgtataactggaacctgccaccaagaaggatcctttttattaaacacttcattatttacagcattcctcgctacgtgcgcgacttaaaaatccagattgagatggaaaagaaggtggtgttctcaaccatctcactggggaaatgcagtgtcctggacaacattactacggacaaaattcttatagatgtgtttgacggtctccccctgtacgacgacgtcaaggtgcagtttttctattcaaacttgcctacctattacgataattgctcattctatttttggttacacacaagcttcatcgaaaataaccgcctttacctgcctaagaacgagctagataacctgcacaaacagaaagcacggcgaatctatccaagcgacttcgccgttgagatcctctttggggaaaagatgaccagttcagacgtggtagcaggttccgactag

SEQ ID NO: 261463 - DNA, 1542 bp, Artificial Sequence
  derived and/or modified sequence
atgaatgaatctccagaccccacagacctggccggggtcatcatcgagctgggccccaatgacagcccccagaccagcgagttcaagggggccacagaggaggccccagccaaggagagcagcaagatcaagaagatcgtgcacagcatcgtgtcctcctttgccttcggcctgtttggagtcttcctggtgctgctggatgtgaccctcatcctggccgacctgatcttcacagacagcaagctgtacatccccctggagtaccgcagcatcagcctggccatcgccctcttcttcctgatggatgtgctgctgcgggtgtttgtggagcggcggcagcagtacttcagtgacctcttcaacatcctggacacagccatcatcgtcatcctgctgctggtggatgtggtgtacatcttctttgacatcaagctgctgaggaacatcccccgctggacccacctgctgcggctgctgcggctcatcatcctgctgcgcatcttccacctgttccaccagaagaggcagctggagaagctgatcagaagaagagtgtctgagaacaagaggcgctacaccagagatggctttgacctggacctgacctacgtgacagagcgcatcatcgccatgtccttccccagcagcggccggcagagcttctacagaaaccccatcaaggaggtggtgcgcttcctggacaagaagcacaggaaccactacagagtgtacaacctgtgcagcgagcgggcctatgaccccaagcacttccacaacagagtggtgcgcatcatgattgatgaccacaacgtgcccaccctgcaccagatggtggtgttcaccaaggaggtgaatgagtggatggcccaggacctggagaacatcgtggccatccactgcaagggcggcacagacagaacaggcaccatggtgtgtgccttcctgattgccagcgagatctgcagcacagccaaggagagcctgtactactttggagagaggagaacagacaagacccacagcgagaagttccagggcgtgaagacccccagccagaagagatatgtggcctactttgcccaggtgaagcacctgtacaactggaacctgcccccccggcgcatcctcttcatcaagcacttcatcatctacagcatccccaggtatgtgcgggacctgaagatccagatcgagatggagaagaaggtggtgttcagcaccatcagcctgggcaagtgcagcgtgctggacaacatcaccacagacaagatcctgattgatgtgtttgatggcctgcccctgtatgatgatgtgaaggtgcagttcttctacagcaacctgcccacctactatgacaactgcagcttctacttctggctgcacaccagcttcatcgagaacaaccggctgtacctgcccaagaatgagctggacaacctgcacaagcagaaggcccggcgcatctaccccagcgactttgctgtggagatcctgtttggagagaagatgaccagcagtgatgtggtggccggcagtgactag

SEQ ID NO: 261464 - DNA, 1542 bp, Artificial Sequence
  derived and/or modified sequence
atgaacgagagccccgaccccaccgacctggccggcgtgatcatcgaactgggaccgaatgacagtccccaaacaagcgagtttaagggtgcaaccgaagaggctcctgccaaggagtcctcaaaaatcaaaaagatagtccacagtatagtctctagttttgccttcggcttgtttggtgtttttctggtgctgctcgacgtgaccctcatccttgccgatttaatttttacggattcaaagctttacattccactggaatatcgttccattagtctggccatcgcccttttctttctgatggacgtgttactccgggtgtttgtcgaacggcgtcagcagtattttagcgacctttttaatatcttagataccgcgataatagtgattctgctgctcgtggacgtagtttatatctttttcgatatcaaactgctcagaaatatccctagatggactcatcttctgcgccttctccgcctgattattctgctgcgtatcttccatctgtttcatcagaaaagacagctggaaaaattgattagaaggcgtgtctccgaaaacaaacgtaggtataccagggacgggttcgatttggatttgacttacgtgactgagcgaatcatcgccatgagtttccctagttcaggacggcaaagtttctaccggaatccgattaaggaagttgtccgctttttagacaagaagcaccgcaaccactatcgggtctacaatctgtgttccgagcgcgcctatgacccaaaacacttccacaatagggtagttaggatcatgatcgacgaccacaatgtgccaactcttcatcagatggtcgtattcactaaagaggtgaatgaatggatggcccaggatcttgagaatatcgtggcgatccattgcaaagggggcactgatagaaccggaactatggtatgtgccttcttgatagccagtgagatttgtagcaccgccaaggaaagcctgtactacttcggcgaaaggagaactgacaaaacccacagtgagaaatttcagggcgtgaaaacgccctctcagaaacggtacgtcgcatactttgctcaagtgaagcacctgtacaactggaatctgccgccccgccggatcctcttcattaagcacttcatcatttactcaattcctcggtacgtaagggaccttaagattcaaattgaaatggagaagaaagtggttttttcaaccatttctctgggtaagtgcagcgtgcttgacaacattactacagataaaatcctgatcgatgtctttgatgggctgccattatatgatgacgttaaagtccaatttttttactccaacttacctacctactatgacaactgcagcttctacttctggctacacacatcctttatagaaaacaaccgcctctacttgcccaaaaacgagctagacaaccttcacaaacaaaaagcgcgtcgcatctaccctagtgatttcgctgtggagatcctgtttggtgagaagatgaccagctcggacgttgtggcgggcagcgactag

SEQ ID NO: 261465 - DNA, 1542 bp, Artificial Sequence
  derived and/or modified sequence
atgaacgagagcccagacccgactgacctggccggtgtcataattgagctcggtcccaacgatagccctcagactagtgaatttaagggggctaccgaggaagcccctgctaaggagtcctccaagattaaaaaaatcgttcacagtatcgtgtcctcatttgcttttgggctctttggagtgtttctcgttctattggatgtaacgttaatcctagcagacctcatcttcactgattccaaactttatatacctctcgagtatcggagcatcagccttgcgatcgcactgtttttcctcatggacgtcttactccgagtgttcgttgaaagacggcagcagtactttagcgatctcttcaatatcttggatacagctataattgttattcttctcttagtggacgtggtgtatatcttctttgatatcaagctgcttagaaacatcccacgctggacacatctgctgagacttctacgactcatcattttgctccgcatttttcacctgttccaccaaaagaggcagctggaaaagttaatccgcaggcgcgtctcagaaaataaacgccgttacacacgcgacggcttcgacctggacctgacgtatgtcaccgagaggataatcgccatgtccttcccatcttccggaagacagtcattctatcgtaatccgatcaaggaggtcgttcggttcttggataaaaaacaccgtaatcactatagggtctataacctgtgttccgaacgagcctacgaccctaagcacttccataacagagttgttagaataatgatagacgaccacaatgtgcccacattgcaccagatggtagtgttcacgaaagaggtcaacgagtggatggcccaagacctcgaaaatatagtggccatccattgcaagggaggaacagaccgcactggaaccatggtatgtgccttcctgatcgcctccgaaatttgctctacagcaaaggagtcactgtactattttggcgagcgacggaccgataagactcatagtgaaaagtttcaaggagttaagacccccagccaaaagcggtacgtcgcatacttcgcacaggtgaaacacctgtataattggaatttgccccctaggaggattctgtttatcaaacattttatcatttacagtattcctagatatgtccgggacctgaagatccagattgagatggaaaaaaaggtggtgttttctacaataagcctaggcaagtgcagtgtgctggacaacatcacgactgacaagatcctaattgatgtttttgacggcctgccgttgtatgatgacgtgaaagtccagttcttctactccaatctgccaacatattatgacaattgttctttttacttctggttgcatacctcttttatagaaaacaaccgactctacctcccaaagaatgaactggacaacctccacaaacagaaagcgaggaggatttacccctccgatttcgcggtggagattctttttggagaaaagatgacttctagcgacgtggttgctgggtcagactag

SEQ ID NO: 261466 - DNA, 2036 bp, Artificial Sequence
  derived and/or modified sequence
gggagggcacaacagctgctacctgaacagtttctgacccaacagttacccagcgccggactcgctgcgccccggcggctctagggacccccggcgcctacacttagctccgcgcccgagagaatgttggaccgacgacacaagacctcagacttgtgttattctagcagctgaacacaccccaggctcttctgcccggcagtggctctggaagcagtctggtgtatagagttatggattcactaccagattctactgtatgctcttgacaactatgaccacaatggtccacccacaaatgaattatcaggagtgaacccagaggcacgtatgaatgaaagtcctgatccgactgacctggcgggagtcatcattgagctcggccccaatgacagtccacagacaagtgaatttaaaggagcaaccgaggaggcacctgcgaaagaaagcagcaagattaagaaaattgtgcattcaattgtatcatcctttgcatttggactatttggagttttcctggtcttactggatgtcactctcatccttgccgacctaattttcactgacagcaaactttatattcctttggagtatcgttctatttctctagctattgccttattttttctcatggatgttcttcttcgagtatttgtagaaaggagacagcagtatttttctgacttatttaacattttagatactgccattattgtgattcttctgctggttgatgtcgtttacattttttttgacattaagttgcttaggaatattcccagatggacacatttacttcgacttctacgacttattattctgttaagaatttttcatctgtttcatcaaaaaagacaacttgaaaagctgataagaaggcgggtttcagaaaacaaaaggcgatacacaagggatggatttgacctagacctcacttacgttacagaacgtattattgctatgtcatttccatcttctggaaggcagtctttctatagaaatccaatcaaggaagttgtgcggtttctagataagaaacaccgaaaccactatcgagtctacaatctatgcagtgaaagagcttacgatcctaagcacttccataatagggtcgttagaatcatgattgatgatcataatgtccccactctacatcagatggtggttttcaccaaggaagtaaatgagtggatggctcaagatcttgaaaacatcgtagcgattcactgtaaaggaggcacagatagaacaggaactatggtttgtgccttccttattgcctctgaaatatgttcaactgcaaaggaaagcctgtattattttggagaaaggcgaacagataaaacccacagcgaaaaatttcagggagtaaaaactccttctcagaagagatatgttgcatattttgcacaagtgaaacatctctacaactggaatctccctccaagacggatactctttataaaacacttcattatttattcgattcctcgttatgtacgtgatctaaaaatccaaatagaaatggagaaaaaggttgtcttttccactatttcattaggaaaatgttcggtacttgataacattacaacagacaaaatattaattgatgtattcgacggtctacctctgtatgatgatgtgaaagtgcagtttttctattcgaatcttcctacatactatgacaattgctcattttacttctggttgcacacatcttttattgaaaataacaggctttatctaccaaaaaatgaattggataatctacataaacaaaaagcacggagaatttatccatcagattttgccgtggagatactttttggcgagaaaatgacttccagtgatgttgtagctggatccgattaagtatagctcccccttccccttctgggaaagaattatgttctttccaaccctgccacatgttcatatatcctaaatctatcctaaatgttccttgaagtatttatttatgtttatatatgtttatatatgttcttcataaatctattacatatatatagataaaa

SEQ ID NO: 261467 - protein, 551 aa, Artificial Sequence
  derived and/or modified sequence
MNESPDPTDLAGVIIELGPNDSPQTSEFKGATEEAPAKESPHTSEFKGAARVSPISESVLARLSKFEVEDAENVASYDSKIKKIVHSIVSSFAFGLFGVFLVLLDVTLILADLIFTDSKLYIPLEYRSISLAIALFFLMDVLLRVFVERRQQYFSDLFNILDTAIIVILLLVDVVYIFFDIKLLRNIPRWTHLLRLLRLIILLRIFHLFHQKRQLEKLIRRRVSENKRRYTRDGFDLDLTYVTERIIAMSFPSSGRQSFYRNPIKEVVRFLDKKHRNHYRVYNLCSERAYDPKHFHNRVVRIMIDDHNVPTLHQMVVFTKEVNEWMAQDLENIVAIHCKGGTDRTGTMVCAFLIASEICSTAKESLYYFGERRTDKTHSEKFQGVKTPSQKRYVAYFAQVKHLYNWNLPPRRILFIKHFIIYSIPRYVRDLKIQIEMEKKVVFSTISLGKCSVLDNITTDKILIDVFDGLPLYDDVKVQFFYSNLPTYYDNCSFYFWLHTSFIENNRLYLPKNELDNLHKQKARRIYPSDFAVEILFGEKMTSSDVVAGSD

SEQ ID NO: 261468 - DNA, 1656 bp, Artificial Sequence
  derived and/or modified sequence
atgaacgagagccccgaccccaccgacctggccggcgtgatcatcgagctgggccccaacgacagcccccagaccagcgagttcaagggcgccaccgaggaggcccccgccaaggagagcccccacaccagcgagttcaagggcgccgccagagtgagccccatcagcgagagcgtgctggccagactgagcaagttcgaggtggaggacgccgagaacgtggccagctacgacagcaagatcaagaagatcgtgcacagcatcgtgagcagcttcgccttcggcctgttcggcgtgttcctggtgctgctggacgtgaccctgatcctggccgacctgatcttcaccgacagcaagctgtacatccccctggagtacagaagcatcagcctggccatcgccctgttcttcctgatggacgtgctgctgagagtgttcgtggagagaagacagcagtacttcagcgacctgttcaacatcctggacaccgccatcatcgtgatcctgctgctggtggacgtggtgtacatcttcttcgacatcaagctgctgagaaacatccccagatggacccacctgctgagactgctgagactgatcatcctgctgagaatcttccacctgttccaccagaagagacagctggagaagctgatcagaagaagagtgagcgagaacaagagaagatacaccagagacggcttcgacctggacctgacctacgtgaccgagagaatcatcgccatgagcttccccagcagcggcagacagagcttctacagaaaccccatcaaggaggtggtgagattcctggacaagaagcacagaaaccactacagagtgtacaacctgtgcagcgagagagcctacgaccccaagcacttccacaacagagtggtgagaatcatgatcgacgaccacaacgtgcccaccctgcaccagatggtggtgttcaccaaggaggtgaacgagtggatggcccaggacctggagaacatcgtggccatccactgcaagggcggcaccgacagaaccggcaccatggtgtgcgccttcctgatcgccagcgagatctgcagcaccgccaaggagagcctgtactacttcggcgagagaagaaccgacaagacccacagcgagaagttccagggcgtgaagacccccagccagaagagatacgtggcctacttcgcccaggtgaagcacctgtacaactggaacctgccccccagaagaatcctgttcatcaagcacttcatcatctacagcatccccagatacgtgagagacctgaagatccagatcgagatggagaagaaggtggtgttcagcaccatcagcctgggcaagtgcagcgtgctggacaacatcaccaccgacaagatcctgatcgacgtgttcgacggcctgcccctgtacgacgacgtgaaggtgcagttcttctacagcaacctgcccacctactacgacaactgcagcttctacttctggctgcacaccagcttcatcgagaacaacagactgtacctgcccaagaacgagctggacaacctgcacaagcagaaggccagaagaatctaccccagcgacttcgccgtggagatcctgttcggcgagaagatgaccagcagcgacgtggtggccggcagcgactag

SEQ ID NO: 261469 - DNA, 1656 bp, Artificial Sequence
  derived and/or modified sequence
atgaatgagtcccccgacccaactgatctggctggcgtgattatcgagctgggaccaaatgatagccctcagacaagcgaatttaagggtgcaactgaagaagctccagccaaggagagtccacacacatccgagtttaaaggtgcagcaagagtgtcccctatttcagagtccgttctcgccagactgtccaagtttgaggtggaagatgccgaaaatgtggcttcgtacgactccaagataaaaaagattgtgcacagtatagtgtccagctttgcttttggcctgtttggcgtgtttctagttctcctggacgtgacactgatcttggctgacctcattttcaccgactctaaactgtacatacctctggaatacagatctatcagtttagccatcgcgctgttctttcttatggatgttctgctcagggtctttgtggagcgcaggcaacagtatttctcggacttatttaacatactggatactgctatcatagtgatactgctgcttgtggacgtggtgtatatatttttcgatattaagttactgagaaatattccaaggtggacacatctgctgaggctgctgcgcttaatcatcctccttcggatttttcatctattccatcagaaaagacagctcgaaaaattgatacgtcgacgcgtgtcagagaacaagaggagatacacaagagatggatttgatttggatctgacctacgtaacagagagaattatagctatgagctttccttcgtcggggcgacagtccttttatcgaaacccaataaaagaggtggttcgctttcttgacaagaaacatcgcaaccactacagggtgtacaatctgtgttccgaaagggcttacgatcctaagcattttcacaaccgggtggtgcgcattatgatagacgaccataatgtgccgactctccaccagatggtggtcttcactaaggaagtgaatgaatggatggctcaggacctggaaaacatcgtggccattcactgtaagggtggaactgacagaaccggaactatggtgtgcgccttcctgatcgcttccgaaatctgcagcacagccaaagaatctctgtattatttcggggagcgaaggacggacaaaacacacagcgagaaattccaaggtgttaagaccccttctcagaaacgatatgtggcctacttcgcccaagtcaaacacctgtacaattggaacttacctccccgtcggattcttttcatcaagcatttcatcatctacagcataccacggtatgtgcgggatcttaaaattcagatcgagatggagaagaaagtggtgttcagtacaattagtctcgggaagtgtagtgtgcttgataacattacaacagataaaatcctgatcgatgtctttgatggactaccgttgtatgacgacgtgaaagtacaattcttttattccaatttgccaacctattacgacaactgctccttctacttctggttacacactagctttattgaaaataatcggttgtatctccccaagaatgagttagataatctgcacaaacaaaaagctcgccgtatctacccatcagactttgccgtggagatcctattcggcgaaaagatgacctcttctgacgtggtggctgggtccgactag

SEQ ID NO: 261470 - DNA, 1656 bp, Artificial Sequence
  derived and/or modified sequence
atgaatgaatctccagaccccacagacctggccggggtcatcatcgagctgggccccaatgacagcccccagaccagcgagttcaagggggccacagaggaggccccagccaaggagagcccccacaccagcgagttcaagggagctgcccgggtgagccccatcagcgagagcgtgctggcccggctgagcaagtttgaggtggaggatgctgaaaatgtggccagctatgacagcaagatcaagaagatcgtgcacagcatcgtgtcctcctttgccttcggcctgtttggagtcttcctggtgctgctggatgtgaccctcatcctggccgacctgatcttcacagacagcaagctgtacatccccctggagtaccgcagcatcagcctggccatcgccctcttcttcctgatggatgtgctgctgcgggtgtttgtggagcggcggcagcagtacttcagtgacctcttcaacatcctggacacagccatcatcgtcatcctgctgctggtggatgtggtgtacatcttctttgacatcaagctgctgaggaacatcccccgctggacccacctgctgcggctgctgcggctcatcatcctgctgcgcatcttccacctgttccaccagaagaggcagctggagaagctgatcagaagaagagtgtctgagaacaagaggcgctacaccagagatggctttgacctggacctgacctacgtgacagagcgcatcatcgccatgtccttccccagcagcggccggcagagcttctacagaaaccccatcaaggaggtggtgcgcttcctggacaagaagcacaggaaccactacagagtgtacaacctgtgcagcgagcgggcctatgaccccaagcacttccacaacagagtggtgcgcatcatgattgatgaccacaacgtgcccaccctgcaccagatggtggtgttcaccaaggaggtgaatgagtggatggcccaggacctggagaacatcgtggccatccactgcaagggcggcacagacagaacaggcaccatggtgtgtgccttcctgattgccagcgagatctgcagcacagccaaggagagcctgtactactttggagagaggagaacagacaagacccacagcgagaagttccagggcgtgaagacccccagccagaagagatatgtggcctactttgcccaggtgaagcacctgtacaactggaacctgcccccccggcgcatcctcttcatcaagcacttcatcatctacagcatccccaggtatgtgcgggacctgaagatccagatcgagatggagaagaaggtggtgttcagcaccatcagcctgggcaagtgcagcgtgctggacaacatcaccacagacaagatcctgattgatgtgtttgatggcctgcccctgtatgatgatgtgaaggtgcagttcttctacagcaacctgcccacctactatgacaactgcagcttctacttctggctgcacaccagcttcatcgagaacaaccggctgtacctgcccaagaatgagctggacaacctgcacaagcagaaggcccggcgcatctaccccagcgactttgctgtggagatcctgtttggagagaagatgaccagcagtgatgtggtggccggcagtgactag

SEQ ID NO: 261471 - DNA, 1656 bp, Artificial Sequence
  derived and/or modified sequence
atgaacgagagccccgaccccaccgacctggccggcgtgatcatcgagcttgggccgaacgactccccccaaaccagtgaatttaaaggcgctactgaagaagcgcctgccaaggaatcaccgcacacttccgaatttaagggggcagcacgcgtatcccctataagtgaaagtgttttggcaagattaagcaaatttgaagttgaggatgcggaaaacgtggcgagctacgactccaagatcaagaaaatcgtgcactcaatcgtgtctagctttgccttcggcctatttggggtctttctagtgcttctcgatgtgactctgatcttggcggacctgatatttactgactcaaagctctacattccactggaatatcggagcatttcactggccatcgcccttttcttcctgatggacgtgctccttcgcgtctttgtggagaggaggcagcagtactttagcgacctgtttaacatacttgataccgctatcatcgtgattttactcttagtagacgtggtttatattttctttgacatcaaactgttaaggaatattcccagatggactcatcttctccgcttgctgcggctcatcatcctgctgcgcatttttcacctctttcatcaaaagagacagttggagaaactgatacgcaggagggtcagcgagaataagcggcggtacacacgggacggcttcgacttagacctgacttatgtcacagaaaggatcatcgccatgtcattccccagttcgggaaggcagagcttctatcgcaatcctatcaaagaagtcgttaggtttcttgacaaaaagcatcgaaatcattatcgcgtctataacctttgtagtgagcgcgcgtatgatcccaagcacttccataatcgcgtggttcggatcatgatagacgatcacaacgtgccaacattacaccagatggtggtctttaccaaagaagtgaacgaatggatggctcaggatctcgagaatatcgtagcgatccactgcaagggaggtactgatcggaccggtacaatggtctgtgcctttctaatagcttctgagatttgcagtacggcaaaggaatccctctactacttcggcgagcggcgtacagacaaaactcactccgagaaattccagggagtcaagacccccagccagaagaggtacgtggcatattttgctcaggttaaacatttatacaactggaaccttccacctaggcggattcttttcataaagcattttatcatttactcaatacctaggtacgtccgggatctgaaaatccagatcgagatggaaaagaaggtcgttttcagcaccattagtctcggcaaatgttctgtgttggacaatatcacgactgataagattttgatcgatgtgttcgacggcttaccactttacgatgacgtgaaagtgcagttcttttacagtaatcttcctacatactatgataattgtagcttttacttttggttacatacgagcttcatcgagaataatagactataccttccaaagaatgagctggacaatctgcacaagcagaaggcaaggcgcatctacccatcagattttgccgttgagatcctgtttggagagaaaatgacatccagcgatgtcgtggcaggctccgactag

SEQ ID NO: 261472 - DNA, 1656 bp, Artificial Sequence
  derived and/or modified sequence
atgaacgagagtccagaccccactgatctcgctggagtcatcattgaactgggacctaatgatagtccgcagacatctgagtttaaaggcgctacggaggaggcccctgcaaaagaatcccctcatactagcgaatttaaaggtgccgctagggtgtcacccatttcagagagcgtgcttgcacgcctgtctaagtttgaggtagaagacgctgagaatgtggcgtcttatgactccaaaatcaagaagatcgtgcactctatcgtgtcatccttcgcctttggccttttcggggtcttcctcgtgctccttgatgtcactcttatactggcggatctgattttcacagacagcaagctgtatattccacttgagtacaggagcatctctttagcaattgctctgttctttctaatggatgtacttttaagggttttcgtagagcgtagacagcagtatttctcagacttattcaatattctggacacagccattattgtgatcctcctccttgtagacgtagtctacatcttttttgatatcaaactactgcgaaatattccacggtggacacacctgctgcgtctcctacgcctgataatactccttcggattttccacctgttccatcagaaacgccaattagaaaaactcattcgcagaagggtgagtgagaacaagcgcagatatacaagggacggattcgacctggatctgacctatgtgactgaaaggattattgccatgagtttcccaagcagtggacgccagagcttttacaggaacccgataaaagaagtcgtgcgctttctggataagaagcaccgcaatcactaccgggtgtacaacttatgttctgaaagagcgtatgaccctaagcacttccacaaccgagttgtacgaattatgattgatgatcacaacgttcccacattacaccagatggtggtctttacaaaggaggtaaacgagtggatggctcaggacctggagaatatcgtggccatccattgtaaggggggtaccgatagaactggcactatggtgtgcgcttttctgatcgccagcgaaatctgcagcaccgctaaggagtcactatactacttcggtgagaggcgcactgataagactcatagcgagaagtttcagggtgttaaaacgccgtcccagaagcggtatgtggcgtacttcgcccaggtcaagcatctttacaattggaatctcccacctagaagaatactgtttattaagcatttcatcatatactcgattccacggtatgtacgggacttgaaaatccaaatagagatggaaaaaaaggtcgtgttctccaccatttctctggggaaatgctcagtgctcgataatattacaaccgataaaatcctgattgacgtgtttgacggccttccactgtacgacgacgtaaaagtccagtttttttattccaacctgcccacttactatgataactgttctttctatttttggctccatacgtcattcattgaaaacaacagactgtacctgcccaagaacgaactggataatctgcataagcagaaagccagacggatttacccttctgactttgccgttgaaattctctttggagagaaaatgaccagttcggatgtcgtggcaggctcagattag

SEQ ID NO: 261473 - DNA, 2150 bp, Artificial Sequence
  derived and/or modified sequence
gggagggcacaacagctgctacctgaacagtttctgacccaacagttacccagcgccggactcgctgcgccccggcggctctagggacccccggcgcctacacttagctccgcgcccgagagaatgttggaccgacgacacaagacctcagacttgtgttattctagcagctgaacacaccccaggctcttctgcccggcagtggctctggaagcagtctggtgtatagagttatggattcactaccagattctactgtatgctcttgacaactatgaccacaatggtccacccacaaatgaattatcaggagtgaacccagaggcacgtatgaatgaaagtcctgatccgactgacctggcgggagtcatcattgagctcggccccaatgacagtccacagacaagtgaatttaaaggagcaaccgaggaggcacctgcgaaagaaagcccacacacaagtgaatttaaaggagcagcccgggtgtcacctatcagtgaaagtgtgttagcacgactttccaagtttgaagttgaagatgctgaaaatgttgcttcatatgacagcaagattaagaaaattgtgcattcaattgtatcatcctttgcatttggactatttggagttttcctggtcttactggatgtcactctcatccttgccgacctaattttcactgacagcaaactttatattcctttggagtatcgttctatttctctagctattgccttattttttctcatggatgttcttcttcgagtatttgtagaaaggagacagcagtatttttctgacttatttaacattttagatactgccattattgtgattcttctgctggttgatgtcgtttacattttttttgacattaagttgcttaggaatattcccagatggacacatttacttcgacttctacgacttattattctgttaagaatttttcatctgtttcatcaaaaaagacaacttgaaaagctgataagaaggcgggtttcagaaaacaaaaggcgatacacaagggatggatttgacctagacctcacttacgttacagaacgtattattgctatgtcatttccatcttctggaaggcagtctttctatagaaatccaatcaaggaagttgtgcggtttctagataagaaacaccgaaaccactatcgagtctacaatctatgcagtgaaagagcttacgatcctaagcacttccataatagggtcgttagaatcatgattgatgatcataatgtccccactctacatcagatggtggttttcaccaaggaagtaaatgagtggatggctcaagatcttgaaaacatcgtagcgattcactgtaaaggaggcacagatagaacaggaactatggtttgtgccttccttattgcctctgaaatatgttcaactgcaaaggaaagcctgtattattttggagaaaggcgaacagataaaacccacagcgaaaaatttcagggagtaaaaactccttctcagaagagatatgttgcatattttgcacaagtgaaacatctctacaactggaatctccctccaagacggatactctttataaaacacttcattatttattcgattcctcgttatgtacgtgatctaaaaatccaaatagaaatggagaaaaaggttgtcttttccactatttcattaggaaaatgttcggtacttgataacattacaacagacaaaatattaattgatgtattcgacggtctacctctgtatgatgatgtgaaagtgcagtttttctattcgaatcttcctacatactatgacaattgctcattttacttctggttgcacacatcttttattgaaaataacaggctttatctaccaaaaaatgaattggataatctacataaacaaaaagcacggagaatttatccatcagattttgccgtggagatactttttggcgagaaaatgacttccagtgatgttgtagctggatccgattaagtatagctcccccttccccttctgggaaagaattatgttctttccaaccctgccacatgttcatatatcctaaatctatcctaaatgttccttgaagtatttatttatgtttatatatgtttatatatgttcttcataaatctattacatatatatagataaaa

SEQ ID NO: 261474 - protein, 376 aa, Artificial Sequence
  derived and/or modified sequence
MLTAVCGSLGSQHTEAPHASPPRLDLQPLQTYQGHTSPEAGDYPSPLQPGELQSLPLGPEVDFSQGYELPGASSRVTCEDLESDSPLAPGPFSKLLQPDMSHHYESWFRPTHPGAEDGSWWDLHPGTSWMDLPHTQGALTSPGHPGALQAGLGGYVGDHQLCAPPPHPHAHHLLPAAGGQHLLGPPDGAKALEVAAPESQGLDSSLDGAARPKGSRRSVPRSSGQTVCRCPNCLEAERLGAPCGPDGGKKKHLHNCHIPGCGKAYAKTSHLKAHLRWHSGDRPFVCNWLFCGKRFTRSDELQRHLQTHTGTKKFPCAVCSRVFMRSDHLAKHMKTHEGAKEEAAGAASGEGKAGGAVEPPGGKGKREAEGSVAPSN

SEQ ID NO: 261475 - DNA, 1131 bp, Artificial Sequence
  derived and/or modified sequence
atgctcaccgctgtctgtggctccctcggaagtcaacatacagaggccccacatgccagcccccccagacttgatttacaacccctgcaaacttatcaaggacatacttcacccgaggccggggattacccttctcctctgcaaccaggagagcttcagtctctcccgctggggccagaggtagacttttcccagggctatgaactgccaggggcttctagccgtgtaacctgcgaggacctcgagagtgattccccactcgctcctggacctttcagtaagctgctccagcccgacatgtcacaccactatgaaagctggttccggcccacacacccaggcgcagaagacgggagctggtgggatctgcatccaggtacaagttggatggatttaccccacacacaaggagcactgacgagtccaggacatcccggggctttgcaggcgggactgggtggatatgttggcgaccaccagttgtgtgcccctccccctcacccacacgcccatcatcttttgcctgccgccgggggacaacacctcctgggccctccagacggagctaaggctctggaagtggctgcccctgagagccaggggttggatagcagtctcgacggagcagcccggcccaaaggctcccgaaggtcggtgcctagatcctctgggcagaccgtgtgcaggtgcccaaattgcctggaagcagaaagacttggagccccatgcggtccggacggggggaaaaagaagcacctgcacaattgtcatatcccagggtgtggcaaggcatatgccaagactagccacctcaaagcccacctcagatggcacagcggcgatcgcccctttgtctgcaattggcttttttgcggcaagaggttcactcggagtgatgagctgcagagacatctccaaacccacaccggaaccaagaaattcccatgcgctgtgtgtagccgggtgtttatgaggagtgatcacctagccaagcacatgaagacccatgagggggccaaagaagaggcggcgggagctgcctcgggagagggaaaagctggcggggctgtcgagccaccaggcggaaaggggaaacgcgaagccgaagggtccgtggctcccagcaattag

SEQ ID NO: 261476 - DNA, 1131 bp, Artificial Sequence
  derived and/or modified sequence
atgctgacagcagtctgtggctccctcggatcccaacatactgaggcaccccacgcgagcccccctaggctggaccttcagccactacagacctatcaggggcacacaagccctgaggccggggactacccatcacctttacagcctggggagctgcagtcgcttccattagggccagaggtggatttttcccagggatatgaactccccggcgccagttcgagagtgacttgcgaggacctcgagtccgattcgccccttgcaccagggccgttctccaaactactgcagccagatatgagtcaccactatgagagctggttccgtccgactcacccaggtgcagaagatggatcctggtgggaccttcacccaggaaccagctggatggatttaccgcatacccagggggccttaacctcccctggccatcctggggcgttgcaggccggactaggcgggtacgtcggagaccaccagctgtgcgctccccccccccacccgcatgcacaccatctgttgccagccgcaggcgggcagcacttactggggcctcccgatggtgctaaagccctggaagttgcagctcccgagagtcaggggttggactccagtctcgacggcgctgccaggccgaagggttctcgccggagcgtccccaggagcagtggacagacagtgtgccgatgccccaactgtttggaagccgagaggctaggagccccttgcggacccgatggtgggaagaaaaaacaccttcataactgccacattccagggtgcggtaaggcgtatgcaaagactagccatctgaaagcccacttgcgatggcattcaggagatcggcccttcgtatgcaattggctcttttgcggcaagagatttactaggtctgatgaattgcagcgacatcttcagacacataccggtactaaaaagtttccatgcgcagtgtgctccagagtgtttatgaggagtgaccacctcgctaagcatatgaagacacacgagggggccaaagaggaggctgccggagctgcctcaggggaaggcaaagctggtggggctgttgagcccccgggaggcaaggggaagcgggaagctgagggctccgtagccccctcaaattag

SEQ ID NO: 261477 - DNA, 1131 bp, Artificial Sequence
  derived and/or modified sequence
atgctgacagctgtgtgtggcagcctgggcagccagcacacagaggccccccacgccagccccccccggctggacctgcagcccctgcagacctaccagggccacaccagccctgaggccggggactaccccagccccctgcagcctggagagctgcagagcctgcccctgggccctgaggtggacttcagccagggctatgagctgcccggggccagcagccgggtgacctgtgaggacctggagagtgacagccccctggcccctggccccttcagcaagctgctgcagcctgacatgagccaccactatgagagctggttccggcccacccaccctggagcagaagatggctcctggtgggacctgcaccctggcacctcctggatggacctgccccacacccagggcgccctgaccagccctggccaccctggggccctgcaggccggcctgggcggctacgtgggggaccaccagctgtgtgcccccccaccccacccccacgcccaccacctgctgcctgctgctgggggccagcacctgctgggccccccagatggagccaaggccctggaggtggccgcccctgagagccagggcctggacagcagcctggatggagctgcccggcccaagggcagccgccgctctgtgcccaggagcagcggccagacagtgtgccgctgccccaactgcctggaggccgagcggctgggcgccccctgtggcccagatggcggcaagaagaagcacctgcacaactgccacatccctggctgcggcaaggcctatgccaagaccagccacctgaaggcccacctgcgctggcacagcggggaccggccctttgtgtgcaactggctgttctgtgggaagcgcttcaccaggagtgatgagctgcagaggcacctgcagacccacacaggcaccaagaagttcccctgtgctgtgtgcagcagggtcttcatgagaagtgaccacctggccaagcacatgaagacccatgagggcgccaaggaggaggccgccggggccgccagcggggagggcaaggccggcggcgctgtggagcccccaggcggcaagggcaagcgggaggccgagggctctgtggcccccagcaactag

SEQ ID NO: 261478 - DNA, 1131 bp, Artificial Sequence
  derived and/or modified sequence
atgctgaccgccgtgtgcggcagcctgggcagccagcacaccgaggccccacacgccagcccaccaaggcttgatctgcagcccctgcagacctatcagggacatacttccccagaagctggcgattacccttctcccttgcaacctggcgagttgcagtctttgcctctgggccctgaagtcgacttttcccaggggtacgaactgcctggagcttcatcgcgtgtgacctgcgaggacctggagagtgacagtccattagcgcctggccctttctctaaactgctgcagccggacatgagccaccattatgagtcatggtttcgtcctactcaccctggcgccgaggatgggtcttggtgggatcttcacccagggacttcttggatggatctgccgcacacccagggagctctgactagtcccggtcatcctggcgcgcttcaagctggcctcggcggctacgtcggagatcatcagctttgtgctccccctccgcacccacacgcacatcacttgctcccagccgccggaggacagcacctcttgggccctccggatggtgctaaggcccttgaggtggcggcacctgagagccaagggttggactcttcgctcgacggtgcggcccgtcctaagggcagtaggcgaagtgttccgaggtcctcgggccagactgtgtgccgctgtccaaattgcctggaagccgagcggctgggggcgccgtgtggccccgacgggggaaagaagaaacatcttcataactgccacatacctgggtgcggcaaagcatacgcaaaaacgagtcatttgaaagcccacttgcgatggcattctggagacaggccatttgtctgcaattggctgttctgcggtaagcgcttcactcgttcagatgaattacaaagacatctgcaaacgcacaccggaacgaaaaagttcccttgtgccgtgtgttcccgagtgtttatgcgatcagaccacttagccaaacatatgaagactcatgagggcgctaaagaggaggccgctggtgctgccagcggcgagggtaaagcgggcggggctgtggagcctccaggaggcaaagggaagagggaagcggagggcagcgttgctccttccaattag

SEQ ID NO: 261479 - DNA, 1131 bp, Artificial Sequence
  derived and/or modified sequence
atgctgaccgccgtgtgcggcagcctgggcagccagcacaccgaggcccctcatgcttctcctccgagactggatctgcagccgctgcagacgtaccagggccacacctcacctgaggctggcgattatccatctccactgcaaccaggggagctccagtctttacctctggggcccgaggtggacttctctcagggctatgagctgccaggagcgtcaagccgagtgacatgcgaagatttggagagtgattcacctttggcccccgggccttttagtaaactactgcagccagacatgagccatcactatgagagttggtttcgccccactcatcctggagccgaagacggcagttggtgggatctccatccgggaacaagctggatggacctgccacacacccaaggagccctgacatccccggggcacccaggtgccttacaggccggcctgggagggtacgtcggtgaccatcaactctgtgctccccctccacacccacacgcacaccacttgctcccagctgccggaggacagcatcttctgggcccccctgatggagctaaggctctcgaggtcgctgcaccagaaagccaagggctcgacagcagccttgatggagccgctcggcccaaaggaagtagaaggtcagttcctaggtcttctggacagaccgtgtgccgctgccccaattgtctggaagcagagaggctgggggccccttgcggacctgacggcggcaagaagaagcacttgcataactgccacatcccaggctgtggcaaggcctatgccaagacttcccatctgaaggcccatctgcggtggcattccggagatcgcccattcgtctgtaactggctgttttgtggcaagcgcttcacccgctcagacgagctgcagagacatcttcagacacatactgggactaaaaagttcccctgcgcggtttgctctcgggtgtttatgcggagcgaccacctagcaaaacacatgaagacacatgagggggccaaagaggaggcggccggtgccgcctctggcgaaggaaaagccggaggggcggtcgaaccacccggggggaagggaaagagagaagccgagggaagtgtcgcaccttcaaattag

SEQ ID NO: 261480 - DNA, 3794 bp, Artificial Sequence
  derived and/or modified sequence
gactcagatctcacctcctaccactcccctaggagagctgggggccactgtttcctggattatcctaaaagcttctgaggccgtgaggacttggcagcatccctgctccctccttcacctccccctttggcactgcctgtcacctcctttataaagcctggctcttttatcaccgccacttggccctcactgccgccgccagctctgggctccatggactggtcccgtctgaggtgcccctgaccgtccctgccctcaccccaccccggatcccggcaatgctaaccgctgtctgcggctctctgggcagccagcacacggaagcgccgcacgcctccccgccgcgcctcgacctgcagcctctccaaacttaccagggccacacgagccctgaggccggggactacccctccccgctgcagcctggagagctgcagagcctcccgctgggcccggaggtggacttctcgcagggctatgagctgccaggggcctcctcgcgggtaacctgcgaggacctggaaagcgacagtcccttggccccgggccccttttccaagctcctgcagccggacatgtcacaccattatgaatcgtggttcaggccgactcacccaggcgcggaggatggctcgtggtgggaccttcatccgggcaccagctggatggacctcccccacactcagggcgcgctgacctcacctggccacccgggggcgcttcaggcgggcttggggggctacgtcggagaccaccagctttgtgccccgccaccccacccgcatgcgcaccacctccttccagctgccggagggcagcatctcctagggccgcccgacggggctaaggccttggaagtagccgccccggagtctcaagggctggattccagcctggacggggcggcgcgtcccaaaggctcccggcggtcggtgccccgcagctcaggccagaccgtctgtcgctgccccaactgtctggaggcggagcgactgggggctccatgtgggcccgatgggggcaagaagaagcatttgcacaactgccacatcccgggctgcgggaaagcctacgccaagacgtcgcacctgaaggcgcacctgcgctggcacagcggcgaccgtcccttcgtgtgcaactggctcttctgcggcaagcgcttcacgcgctcggacgagctgcagcgccacctccagacccacaccggcaccaagaagttcccctgtgcagtctgcagccgcgtcttcatgcgcagcgaccacctggccaagcacatgaaaacccacgagggcgccaaggaggaggcggctggggcggcctcgggagagggcaaggccggcggcgcagtggagccccccgggggcaaaggcaaacgcgaggccgagggcagcgtggctccctccaactgagctcctcagtgccgcctccctgcgggtatcccggggggcactggatgcgagcccccaggtctgacgtccttgggggtggcttgaggaagaggggaaggtgcgtatttattcagggaggaggaaaagtggtgcagggacagggagatggggcgctaggggttcttagtctctggggctactaggcaggatgaatttgactgggtcggtaggagctgcgcaatgcccctctgttctcccctgcctcacagtttccctcgcccctgggctggggggttggggtgggacacccgtaccgcggctggctggcggggacaggctagaggagacagcaagtcccagtccccggagcagagagaagtggggccggcccggggcgctggtggtggctgtctggacacgtccttagcgcctgggaaccaggacataaaagcgcctccggagccgccctgcggcggggtccctttcatcccacttaaagtgcttctgcccctagggtttccggagggagagccgagatgggatgggggagcctgggggtcccccttggcaggggtgtctctttctggtttggagggttgttgctgtaaaaataactcctttgatgagcttccttattaaccctttcagacccagtctgttggagccatgaaggaagagggaaagagggctgccattcctgacagcctcccagccagggctggcgataaaggaccgagatagatggagggggcgagtagggaagtcctcttctaaaatgagagatagggatttggtggggtatggaaggaactaaccccttccctctccacctctgattcagcccttaattcttggtctatgataaataaagttcagtagtctcacattccccatctattaccctaggtgtgttttcaaggcagccagcggtagaatccatgtagttcccaccagttgccttcccctcagggatggaaggaagagggtttcttgggctggttgagggcagattgggggtgtctcatcagagggacctccactggttcccactcagagtggaggcctgcagcctacctgaccatctctttagctgtcaccaagaaaataaaccccactgtctctctagcttggcccttgtctttcccttgcccctgccatagcatgttcattaggggattccttcctccccctcatctcacaggggaagggagaggaaagagttgttctcccactggaaggggttctgccttctgaggtgacatccaggaagctgtccccattcccttctcctttagatgctagaaacacattttgattctgatcatggggtgggggagagaggaaaggagggaggggagaagcccagcagaagctgagccaggcagaggggaaagaagctgatatgaggaagggtctgacaggccacagcccttgcagccggagggctttcccacactcaagagaggggccttacagtccctctgacacccctcccccttcccctcgctccctttcttcacccggagccctctgcagagattagctgtgtattgatttttaagttataagcaaagggtattttatttaatattaggttatgtgtgtgcatgttgtgtgtacctgtgtgcatgtatgtgtgtttctctactgagcctggggtctctagccagggagaccccatcttattcaccatgtccaagatcctgggatctgggcccagcatctcttcctcctttgtagatgctggagcccagccaaggtctgggagctatatgggaagtgggggctgggatctgggtgggaatatgtgtttgtatacaaaggggccctccttaaaagggacaggatgaccttcccgaggaactcattggcctggggtagtttaagaagtaatgttctttctttctttctcttttccctacctcctgctaacccaaccagagatccccttccttgctgagagggttgggggcaggaggagatttggcagtgcctgcaggttgcctggccaggtggagagggggaaagaggaagggcaccgtgggtgtaagatgcctttctcctccacccatcgaaaccagccaccccttccctgtgccaccaagacagccttttccagtggccatcctaaggggaactcccaaatgggtgttgctggtggacacagatgctccccccaatggaagccccaagctctgaggtatgcgggtagaggctttggataggttttcttctgctcccctcttttatagatctaggctgcttggctgcctgtctttctaggcagtccccctagaggaaaaatgtaggaatttattttttctttaactgctgtgaactcactttgagggggtaggaggagggagaaacagcctgtgttttttatgcaataaagtcatcaactac

SEQ ID NO: 261481 - DNA, 3848 bp, Artificial Sequence
  derived and/or modified sequence
aaaaagcagcgctggggagaggatgaaggcagagagcgcgggtgagtcacgggcggagctggccttgttcgctcgctggctcctgcccgccctccgtcctccgccctctcgccagcgctcacctccgccgcctgccgcctgccgccagccgccgggtctggctcgccctgggctcctgccccttaccgctggagagctcgccggcgcacagggcctatgagcgaccgtcagtagcgcaccagccagccgtgcccggagcccgccgcagcctcgaggtcccgtctgaggtgcccctgaccgtccctgccctcaccccaccccggatcccggcaatgctaaccgctgtctgcggctctctgggcagccagcacacggaagcgccgcacgcctccccgccgcgcctcgacctgcagcctctccaaacttaccagggccacacgagccctgaggccggggactacccctccccgctgcagcctggagagctgcagagcctcccgctgggcccggaggtggacttctcgcagggctatgagctgccaggggcctcctcgcgggtaacctgcgaggacctggaaagcgacagtcccttggccccgggccccttttccaagctcctgcagccggacatgtcacaccattatgaatcgtggttcaggccgactcacccaggcgcggaggatggctcgtggtgggaccttcatccgggcaccagctggatggacctcccccacactcagggcgcgctgacctcacctggccacccgggggcgcttcaggcgggcttggggggctacgtcggagaccaccagctttgtgccccgccaccccacccgcatgcgcaccacctccttccagctgccggagggcagcatctcctagggccgcccgacggggctaaggccttggaagtagccgccccggagtctcaagggctggattccagcctggacggggcggcgcgtcccaaaggctcccggcggtcggtgccccgcagctcaggccagaccgtctgtcgctgccccaactgtctggaggcggagcgactgggggctccatgtgggcccgatgggggcaagaagaagcatttgcacaactgccacatcccgggctgcgggaaagcctacgccaagacgtcgcacctgaaggcgcacctgcgctggcacagcggcgaccgtcccttcgtgtgcaactggctcttctgcggcaagcgcttcacgcgctcggacgagctgcagcgccacctccagacccacaccggcaccaagaagttcccctgtgcagtctgcagccgcgtcttcatgcgcagcgaccacctggccaagcacatgaaaacccacgagggcgccaaggaggaggcggctggggcggcctcgggagagggcaaggccggcggcgcagtggagccccccgggggcaaaggcaaacgcgaggccgagggcagcgtggctccctccaactgagctcctcagtgccgcctccctgcgggtatcccggggggcactggatgcgagcccccaggtctgacgtccttgggggtggcttgaggaagaggggaaggtgcgtatttattcagggaggaggaaaagtggtgcagggacagggagatggggcgctaggggttcttagtctctggggctactaggcaggatgaatttgactgggtcggtaggagctgcgcaatgcccctctgttctcccctgcctcacagtttccctcgcccctgggctggggggttggggtgggacacccgtaccgcggctggctggcggggacaggctagaggagacagcaagtcccagtccccggagcagagagaagtggggccggcccggggcgctggtggtggctgtctggacacgtccttagcgcctgggaaccaggacataaaagcgcctccggagccgccctgcggcggggtccctttcatcccacttaaagtgcttctgcccctagggtttccggagggagagccgagatgggatgggggagcctgggggtcccccttggcaggggtgtctctttctggtttggagggttgttgctgtaaaaataactcctttgatgagcttccttattaaccctttcagacccagtctgttggagccatgaaggaagagggaaagagggctgccattcctgacagcctcccagccagggctggcgataaaggaccgagatagatggagggggcgagtagggaagtcctcttctaaaatgagagatagggatttggtggggtatggaaggaactaaccccttccctctccacctctgattcagcccttaattcttggtctatgataaataaagttcagtagtctcacattccccatctattaccctaggtgtgttttcaaggcagccagcggtagaatccatgtagttcccaccagttgccttcccctcagggatggaaggaagagggtttcttgggctggttgagggcagattgggggtgtctcatcagagggacctccactggttcccactcagagtggaggcctgcagcctacctgaccatctctttagctgtcaccaagaaaataaaccccactgtctctctagcttggcccttgtctttcccttgcccctgccatagcatgttcattaggggattccttcctccccctcatctcacaggggaagggagaggaaagagttgttctcccactggaaggggttctgccttctgaggtgacatccaggaagctgtccccattcccttctcctttagatgctagaaacacattttgattctgatcatggggtgggggagagaggaaaggagggaggggagaagcccagcagaagctgagccaggcagaggggaaagaagctgatatgaggaagggtctgacaggccacagcccttgcagccggagggctttcccacactcaagagaggggccttacagtccctctgacacccctcccccttcccctcgctccctttcttcacccggagccctctgcagagattagctgtgtattgatttttaagttataagcaaagggtattttatttaatattaggttatgtgtgtgcatgttgtgtgtacctgtgtgcatgtatgtgtgtttctctactgagcctggggtctctagccagggagaccccatcttattcaccatgtccaagatcctgggatctgggcccagcatctcttcctcctttgtagatgctggagcccagccaaggtctgggagctatatgggaagtgggggctgggatctgggtgggaatatgtgtttgtatacaaaggggccctccttaaaagggacaggatgaccttcccgaggaactcattggcctggggtagtttaagaagtaatgttctttctttctttctcttttccctacctcctgctaacccaaccagagatccccttccttgctgagagggttgggggcaggaggagatttggcagtgcctgcaggttgcctggccaggtggagagggggaaagaggaagggcaccgtgggtgtaagatgcctttctcctccacccatcgaaaccagccaccccttccctgtgccaccaagacagccttttccagtggccatcctaaggggaactcccaaatgggtgttgctggtggacacagatgctccccccaatggaagccccaagctctgaggtatgcgggtagaggctttggataggttttcttctgctcccctcttttatagatctaggctgcttggctgcctgtctttctaggcagtccccctagaggaaaaatgtaggaatttattttttctttaactgctgtgaactcactttgagggggtaggaggagggagaaacagcctgtgttttttatgcaataaagtcatcaactac

SEQ ID NO: 261482 - DNA, 1131 bp, Artificial Sequence
  derived and/or modified sequence
atgctaaccgctgtatgtggctccctcggcagtcagcacaccgaggctccgcacgcgtctcctccacgcctggatctgcagcctttgcaaacttaccaggggcacacttctcccgaggccggagattacccgtctcccctgcagccaggcgaattgcagagcttgcccctcggccctgaagtggatttcagccaaggctacgagctgccgggtgcctcctctcgggttacttgtgaggacctggaatcagatagccccctggcaccaggaccctttagcaaactgttacagccagatatgtcgcaccactacgaatcttggttccggcctactcaccctggggctgaagatggctcttggtgggatcttcacccgggtacaagctggatggacctacctcacacccaaggcgcacttacttctccagggcacccgggagctctgcaagcaggattgggtggctatgtgggagatcaccagctgtgtgcgccaccgccacacccgcacgcccaccacctcttgcccgcagctgggggacagcaccttctcggtccaccggacggagcaaaagccctggaagtcgcggctcctgagtctcaggggctggatagctcattggacggggcagccaggcctaaaggttctagaagaagtgtacccaggtcctcagggcagacagtgtgcaggtgcccaaactgtctggaagcggagcggttgggcgcaccttgcggcccagacggaggcaagaagaaacacttgcacaattgccacatccccggatgtggcaaggcctacgccaaaacgtctcaccttaaagcccatttaagatggcacagtggcgatcggcctttcgtatgcaattggctgttctgcggcaaacggtttactaggagtgacgaacttcaacgacacctccagacacatactggcacaaaaaagtttccgtgcgcggtctgttcacgcgttttcatgcgatccgatcatttggcaaagcacatgaagactcacgaaggcgcaaaggaggaagctgctggcgctgctagcggtgaaggaaaggctggtggagcagtggaacccccagggggaaaggggaagcgagaggccgagggctccgttgcaccgtccaattag

SEQ ID NO: 261483 - DNA, 1131 bp, Artificial Sequence
  derived and/or modified sequence
atgctgaccgcagtgtgtgggagtctgggctcccagcacacagaggcaccacatgctagccccccaagattggaccttcagccacttcagacctaccagggccatacaagtcccgaggccggtgattacccctctccccttcagcctggcgagctccaatccctcccgctcggacctgaggtggacttctcccaaggatacgagcttcccggagcctccagccgggtcacatgcgaggatctggaatcagattctcctctggcccctggtcccttttcaaagctgctgcagcctgacatgtcacatcactatgaaagttggtttcgacctacgcaccccggagctgaagacgggtcttggtgggacttgcatcctgggacatcttggatggacttaccacatactcagggcgctctcacatcacccggacaccctggcgctctccaagccggactcgggggatacgtgggtgaccaccagctgtgcgcaccccctccccacccccatgcccaccacctgctgcccgctgccggtggccagcatcttttgggcccaccggacggagctaaggccctagaggtggctgcaccagagagtcagggccttgatagtagcttggacggtgcagctcgtccaaagggatctcgtaggagtgtccccagatcctcaggccaaacagtgtgccggtgtcccaactgcctagaagccgaaagattaggcgctccttgtgggccagacgggggaaaaaagaaacacctgcacaattgccacatcccaggatgcggcaaagcctatgctaagaccagccacctaaaagctcatctgcgttggcactcaggcgatagacctttcgtctgcaattggctgttctgcggaaagagatttacgaggtctgacgagttgcaaagacacctgcagacccacacgggcaccaagaaatttccctgtgccgtgtgctcacgggttttcatgaggtctgatcacttagcaaaacatatgaaaactcacgaaggagcaaaggaggaggccgcaggtgcagcttccggggagggaaaggccggaggggctgtggaaccccctggcggtaaaggcaagcgagaggctgagggaagtgttgcaccctcaaattag

SEQ ID NO: 261484 - DNA, 1131 bp, Artificial Sequence
  derived and/or modified sequence
atgctgaccgccgtgtgcggcagcctgggcagccagcacaccgaggccccccacgccagcccccccagactggacctgcagcccctgcagacctaccagggccacaccagccccgaggccggcgactaccccagccccctgcagcccggcgagctgcagagcctgcccctgggccccgaggtggacttcagccagggctacgagctgcccggcgccagcagcagagtgacctgcgaggacctggagagcgacagccccctggcccccggccccttcagcaagctgctgcagcccgacatgagccaccactacgagagctggttcagacccacccaccccggcgccgaggacggcagctggtgggacctgcaccccggcaccagctggatggacctgccccacacccagggcgccctgaccagccccggccaccccggcgccctgcaggccggcctgggcggctacgtgggcgaccaccagctgtgcgccccccccccccacccccacgcccaccacctgctgcccgccgccggcggccagcacctgctgggcccccccgacggcgccaaggccctggaggtggccgcccccgagagccagggcctggacagcagcctggacggcgccgccagacccaagggcagcagaagaagcgtgcccagaagcagcggccagaccgtgtgcagatgccccaactgcctggaggccgagagactgggcgccccctgcggccccgacggcggcaagaagaagcacctgcacaactgccacatccccggctgcggcaaggcctacgccaagaccagccacctgaaggcccacctgagatggcacagcggcgacagacccttcgtgtgcaactggctgttctgcggcaagagattcaccagaagcgacgagctgcagagacacctgcagacccacaccggcaccaagaagttcccctgcgccgtgtgcagcagagtgttcatgagaagcgaccacctggccaagcacatgaagacccacgagggcgccaaggaggaggccgccggcgccgccagcggcgagggcaaggccggcggcgccgtggagccccccggcggcaagggcaagagagaggccgagggcagcgtggcccccagcaactag

SEQ ID NO: 261485 - protein, 799 aa, Artificial Sequence
  derived and/or modified sequence
MKPMLKDFSNLLLVVLCDYVLGEAEYLLLREPGHVALSNDTVYVDFQYFDGANGTLRNVSVLLLEANTNQTVTTKYLLTNQSQGTLKFECFYFKEAGDYWFTMTPEATDNSTPFPWWEKSAFLKVEWPVFHVDLNRSAKAAEGTFQVGLFTSQPLCPFPVDKPNIVVDVIFTNSLPEARRNSRQPLEIRTSKRTELAQGQWVEFGCAPLGPEAYVTVVLKLLGRDSVITSTGPIDLAQKFGYKLVMVPELTCESGVEVTVLPPPCTFVQGVVTVFKEAPRYPGKRTIHLAENSLPLGERRTIFNCTLFDMGKNKYCFDFGISSRSHFSAKEECMLIQRNTAFQPSSPSPLQPQGPVKSNNIVTVTGISLCLFIIIATVLITLWRRFGRPAKCSTPARHNSIHSPSFRKNSDEENICELSEQRGSFSDGGDGPTGSPGDTGIPLTYRRSGPVPPEDDASGSESFQSNAQKIIPPLFSYRLAQQQLKEMKKKGLTETTKVYHVSQSPLTDTAIDAAPSAPLDLESPEEAAANKFRIKSPFPEQPAVSAGERPPSRLDLNVTQASCAISPSQTLIRKSQARHVGSRGGPSERSHARNAHFRRTASFHEARQARPFRERSMSTLTPRQAPAYSSRTRTCEQAEDRFRPQSRGAHLFPEKLEHFQEASGTRGPLNPLPKSYTLGQPLRKPDLGDHQAGLVAGIERTEPHRARRGPSPSHKSVSRKQSSPISPKDNYQRVSSLSPSQCRKDKCQSFPTHPEFAFYDNTSFGLTEAEQRMLDLPGYFGSNEEDETTSTLSVEKLVI

SEQ ID NO: 261486 - DNA, 2400 bp, Artificial Sequence
  derived and/or modified sequence
atgaaacctatgcttaaggattttagcaacctgcttctggttgtcctttgcgattacgttctcggggaggcagagtatcttctgctgcgggagcccggacatgtggcactcagtaacgatacagtgtacgtggattttcagtacttcgacggtgctaacggcacgttgcgcaatgtctcggtgcttctgctagaggccaacaccaatcagaccgtgaccactaagtacttgctgactaaccagtcccagggtactctgaaatttgaatgtttctattttaaagaggccggtgactactggttcacaatgaccccagaagcaacggacaactcgactccttttccttggtgggagaagagtgccttcttgaaagtcgaatggcccgtattccacgtcgacttgaatcgatccgcaaaggctgccgaaggaactttccaggtgggactgttcactagccagcctctgtgccctttccccgttgataaacctaacatagtggtcgacgttattttcaccaactccctgcccgaagcgagaagaaatagtaggcagccactcgagattagaacctctaagcgcaccgagctggcacagggccagtgggtcgagtttggttgcgcccctctgggccctgaagcatacgtaactgtggtcctgaagctgcttgggagagattcagtgattacaagcacgggccctatcgatctggcgcaaaaattcggatataaactggtcatggtgcccgaattaacctgcgagtccggagtagaggtaaccgtcttgccacccccatgtacttttgttcagggggtggtcacagtatttaaagaagcgcctaggtaccccggtaagagaacgatccatttggctgagaattccctgcctctcggggagcggcgaacgatcttcaactgcacattgtttgatatgggaaaaaataagtattgcttcgattttggaatctcttccagatcccacttctcagcaaaagaagagtgtatgttaatccagcgaaacactgccttccagcccagttctcctagcccccttcagccccaaggacctgtaaagagtaataacatcgtcactgtgacaggtatctcactatgcttatttatcattattgcaactgtgttgatcaccctttggcggcgtttcggacgccctgcgaaatgctccaccccagcacggcacaactctatccactccccctcatttagaaaaaacagcgacgaagaaaatatttgcgagcttagtgaacagcgcggaagcttttcggacggtggggacgggccaaccgggtcccccggagacactgggataccccttacctataggaggtccggtccagttcctcctgaggacgatgcctcaggctcagagtcctttcagtcgaacgctcagaagatcattcctccgcttttctcttatcggctagcacaacaacagctgaaagaaatgaagaaaaagggcctcacagaaactaccaaggtctatcatgtgagtcaatcccctctgactgatacagccatcgatgcagcacccagcgccccacttgacctggaaagtccagaggaagccgcagcaaacaagttcaggattaagagtccttttcccgagcagcccgctgtgtccgctggtgaaagacctcctagtagattagatttaaacgtgacccaagcctcatgcgctatctctccttcccagacgctgattagaaaatctcaggcaaggcacgtagggagcagaggtggcccttctgagagatcccacgcacgaaacgctcacttcaggagaacagcttccttccatgaggctcgccaggccaggccttttcgagagaggagtatgagtaccctcacccctagacaggcacctgcctatagttctcggaccagaacgtgcgagcaagccgaggaccgcttccgtccacagagcaggggcgctcacctgtttccagagaaacttgaacatttccaggaagcaagcggaactcgcggtccgctgaatcccctgccgaagtcgtatacgctcgggcagcccctgaggaagcctgacctcggcgaccatcaggctggtctggtggccggaatagagcgcacggagccgcatcgagctcgacgcggtccaagtccgagccacaagtctgtctcccggaagcagagcagtccaatctcacctaaggataattaccagagggttagcagcctaagcccttcccagtgtcggaaagataagtgtcagagcttccccacccaccctgaatttgctttctacgacaatacttccttcggtctcacggaagctgagcagaggatgctagacctgccaggttatttcgggagcaacgaggaggacgagaccacaagcaccctctccgtagaaaagttggtcatttag

SEQ ID NO: 261487 - DNA, 2400 bp, Artificial Sequence
  derived and/or modified sequence
atgaagcctatgctgaaagatttctccaacctgttgctggttgtgctgtgcgactatgttctgggagaagcagaatatctgctcttgagagaacctggacatgtggctctgtctaacgatactgtatacgtggatttccagtactttgatggtgccaacggcacactgaggaacgtgagtgttttgctgctagaagccaatacaaaccagaccgtcaccacaaaatacctactaaccaatcaaagccagggcacactgaagtttgagtgcttctactttaaagaagccggagattactggtttacgatgaccccagaggccaccgacaatagtacaccatttccctggtgggagaaatcagcctttttgaaggtcgaatggcctgtctttcacgtagaccttaacagatccgctaaggcagcagagggtacgttccaggttgggttgttcaccagccaaccgctctgccctttcccagtggacaaaccaaatatagtggtggatgtgatctttacaaactctttaccagaggcacgcaggaactcacggcagcccctggagataaggacatctaagcgcactgaattagcccaagggcaatgggtggagtttggatgcgcccctttggggccagaggcgtatgttactgtggtattaaagttgctgggacgggacagcgtgattacaagtaccggacctattgacctcgcccagaaattcggctataagctcgtcatggtgccagagctcacatgtgaatcaggtgtggaagtgaccgtcctcccacccccatgcactttcgttcagggggtcgtgacagtgttcaaagaggctcccaggtaccccggcaaacgaactattcatttagccgagaattcattgcccctgggagagcgccgcacaattttcaactgcactctgtttgatatgggaaagaataagtactgcttcgatttcggtatcagttctcggtctcacttctctgctaaggaggaatgcatgctcatccagcgtaacaccgccttccagccgtcatccccaagccctcttcagccacaaggaccagtgaaatctaacaacatcgtgaccgtcactgggatctctctttgtctgtttatcattatcgcaacagtgctaatcacgttgtggcgcagattcggaaggccagctaagtgctccaccccagctagacacaattcaatacattccccaagttttcgcaaaaacagcgacgaggagaacatatgtgagctttccgaacagagggggtctttctctgatggcggagatgggccaaccggctcccccggagacaccggaatccctctcacctatcgcaggtctggtcctgtaccgcctgaggacgatgcatccggcagtgaaagctttcaaagcaacgcacagaagatcattccccctctgtttagctatcggcttgcacagcaacaactgaaagagatgaagaagaagggcttaaccgaaactaccaaagtctatcatgtgtcacagtcccctctgacagatacggccatcgatgcggctcccagcgcaccattagacctggagtcccccgaagaagcagctgccaataagtttcgcatcaaaagcccatttcctgaacaacctgctgttagcgccggcgagcgccctccctcccgacttgatctcaatgtgacccaggccagctgcgccatctccccctctcagaccctgatacggaagagccaggccagacacgtcggaagcaggggtggccctagcgagcgcagccacgcccgtaacgcccatttcaggcgaaccgcctcctttcacgaggccaggcaggcccggcctttcagagaacggtccatgtctacactaacaccccgccaggctcccgcctactcatccaggacccggacttgcgagcaggctgaggaccgattcaggcctcagagtcgaggagcacacctttttcccgaaaagctcgaacacttccaggaagccagcggtacgcgcggccctctgaatcccttacctaagagttataccctgggacaacctttacggaagcccgatctgggcgatcaccaggccggactggtcgccggtattgagaggacagaaccccaccgtgcacggagaggcccatcgccttctcataagagcgtctctcgcaagcagagctcaccaatttcccctaaagacaattaccaacgcgtctcgtccttgagcccctcccagtgccggaaagacaagtgtcaatcatttccaactcacccggaatttgcattttacgataatacttctttcggtctgaccgaggccgagcaaagaatgctggatctacccgggtacttcggaagcaacgaggaggatgaaactacaagtaccttgtctgtcgagaagctggttatctag

SEQ ID NO: 261488 - DNA, 2400 bp, Artificial Sequence
  derived and/or modified sequence
atgaaaccaatgcttaaagacttcagcaacctattgctagtagtgctgtgcgattacgtcctgggagaggctgagtacctgttgctccgcgaacctggccacgtggccctctcaaatgataccgtgtacgtagacttccagtattttgatggcgccaacggcacgctgcgcaacgtgtctgtgctactattggaggccaatactaaccaaacagttaccaccaaatacctactgacaaatcagagtcaaggaacattgaaatttgaatgtttttattttaaagaggcaggcgattactggttcaccatgaccccagaggcaaccgacaattcgactccctttccgtggtgggagaagtcagcgtttcttaaggtcgaatggcctgtgttccatgttgatttgaaccgtagcgctaaagcagcagaggggacctttcaggtaggcctgtttacctctcagcctctgtgccccttccctgtagataaacccaacattgtagtcgacgttatttttacgaattccctgcccgaagcccggaggaactctcgtcaacccctcgagataagaacatccaaaagaacagaactcgcacagggccagtgggtggaattcggatgcgcaccgctaggcccagaagcttacgtgaccgtcgtattgaaactcctgggtcgggattcagttataacaagtaccggtccgatagatctagctcagaagttcggatataagctcgtaatggtccccgaactgacgtgcgagtctggtgtcgaagtcaccgtgctgccgccaccgtgcacatttgtccagggtgtggtgaccgttttcaaagaggcccctcgatatcccggaaaaaggactatccacttagcggagaacagcctgccactgggcgagaggaggaccattttcaattgtaccctgtttgatatgggaaaaaataagtattgcttcgactttggcatcagttcccggagccacttcagcgccaaggaagagtgtatgctgattcagaggaacaccgccttccagccctcgtcgccctcccctctccaaccccagggccctgtcaagtctaataatatagttactgtcaccggtatctccctgtgtcttttcatcattatcgccaccgttctaatcactctttggaggagattcggtcggccagctaaatgctctacccccgccagacacaattccattcatagtcccagcttcaggaagaatagcgatgaagaaaacatttgtgagctatccgagcaacgtggaagcttttctgacggcggcgatggccctacaggctcccccggcgacacagggataccccttacctacagacgttcgggcccagtcccccccgaagatgatgcctctggttccgaatcctttcagtcgaacgctcaaaagataattccacccctgttttcctatcgtcttgcccagcagcaacttaaggagatgaaaaaaaaaggactgactgaaacaactaaggtgtaccacgtcagtcagagcccgcttacagatacggccatcgacgccgccccctctgcaccccttgacctcgaaagtcccgaagaagccgccgccaacaaattccggataaaaagccccttccctgaacagccagcggtgagtgcaggagaaaggcccccctcaagattagacctcaatgttactcaggcttcatgtgcgataagccccagccaaacgctgattcggaagtcccaagcccgccacgtgggaagccggggcggtccctcggagcgcagtcacgctaggaatgcccacttccgcaggaccgcaagcttccacgaggcccgccaagcgcgaccattccgtgagcgaagcatgtctactctgaccccccgccaggctccagcatactcttctcggaccagaacctgtgaacaggccgaggatcgatttcgcccacagtctagaggggcccacttattcccggagaagctggagcacttccaagaagcaagcggtacacgaggtcctttgaaccccctcccaaaatcttatactttgggccagcccttacgcaaacctgatttaggtgaccaccaagccggcctggtcgctggaatcgaacggactgagccgcaccgagccagaagaggaccgtccccgtcccataagtctgtgagtcggaaacagtctagccctatatcccccaaagacaattatcagagagtttcaagtttgtcacctagtcagtgcagaaaggacaagtgccagtcattccccacccaccccgagtttgcattttacgataacacaagcttcggcctgactgaggcagaacagcggatgcttgatctacccggatattttggtagcaatgaggaggacgaaaccacatccacccttagcgtggaaaagttggtcatatag

SEQ ID NO: 261489 - DNA, 2400 bp, Artificial Sequence
  derived and/or modified sequence
atgaagcccatgctgaaggacttcagcaacctgctgctggtggtgctgtgcgactacgtgctgggcgaggccgagtacctgctgctgagagagcccggccacgtggccctgagcaacgacaccgtgtacgtggacttccagtacttcgacggcgccaacggcaccctgagaaacgtgagcgtgctgctgctggaggccaacaccaaccagaccgtgaccaccaagtacctgctgaccaaccagagccagggcaccctgaagttcgagtgcttctacttcaaggaggccggcgactactggttcaccatgacccccgaggccaccgacaacagcacccccttcccctggtgggagaagagcgccttcctgaaggtggagtggcccgtgttccacgtggacctgaacagaagcgccaaggccgccgagggcaccttccaggtgggcctgttcaccagccagcccctgtgccccttccccgtggacaagcccaacatcgtggtggacgtgatcttcaccaacagcctgcccgaggccagaagaaacagcagacagcccctggagatcagaaccagcaagagaaccgagctggcccagggccagtgggtggagttcggctgcgcccccctgggccccgaggcctacgtgaccgtggtgctgaagctgctgggcagagacagcgtgatcaccagcaccggccccatcgacctggcccagaagttcggctacaagctggtgatggtgcccgagctgacctgcgagagcggcgtggaggtgaccgtgctgccccccccctgcaccttcgtgcagggcgtggtgaccgtgttcaaggaggcccccagataccccggcaagagaaccatccacctggccgagaacagcctgcccctgggcgagagaagaaccatcttcaactgcaccctgttcgacatgggcaagaacaagtactgcttcgacttcggcatcagcagcagaagccacttcagcgccaaggaggagtgcatgctgatccagagaaacaccgccttccagcccagcagccccagccccctgcagccccagggccccgtgaagagcaacaacatcgtgaccgtgaccggcatcagcctgtgcctgttcatcatcatcgccaccgtgctgatcaccctgtggagaagattcggcagacccgccaagtgcagcacccccgccagacacaacagcatccacagccccagcttcagaaagaacagcgacgaggagaacatctgcgagctgagcgagcagagaggcagcttcagcgacggcggcgacggccccaccggcagccccggcgacaccggcatccccctgacctacagaagaagcggccccgtgccccccgaggacgacgccagcggcagcgagagcttccagagcaacgcccagaagatcatcccccccctgttcagctacagactggcccagcagcagctgaaggagatgaagaagaagggcctgaccgagaccaccaaggtgtaccacgtgagccagagccccctgaccgacaccgccatcgacgccgcccccagcgcccccctggacctggagagccccgaggaggccgccgccaacaagttcagaatcaagagccccttccccgagcagcccgccgtgagcgccggcgagagaccccccagcagactggacctgaacgtgacccaggccagctgcgccatcagccccagccagaccctgatcagaaagagccaggccagacacgtgggcagcagaggcggccccagcgagagaagccacgccagaaacgcccacttcagaagaaccgccagcttccacgaggccagacaggccagacccttcagagagagaagcatgagcaccctgacccccagacaggcccccgcctacagcagcagaaccagaacctgcgagcaggccgaggacagattcagaccccagagcagaggcgcccacctgttccccgagaagctggagcacttccaggaggccagcggcaccagaggccccctgaaccccctgcccaagagctacaccctgggccagcccctgagaaagcccgacctgggcgaccaccaggccggcctggtggccggcatcgagagaaccgagccccacagagccagaagaggccccagccccagccacaagagcgtgagcagaaagcagagcagccccatcagccccaaggacaactaccagagagtgagcagcctgagccccagccagtgcagaaaggacaagtgccagagcttccccacccaccccgagttcgccttctacgacaacaccagcttcggcctgaccgaggccgagcagagaatgctggacctgcccggctacttcggcagcaacgaggaggacgagaccaccagcaccctgagcgtggagaagctggtgatctag

SEQ ID NO: 261490 - DNA, 2400 bp, Artificial Sequence
  derived and/or modified sequence
atgaagccaatgctgaaggacttttctaatcttctgcttgtcgtgctctgtgactacgtgctaggcgaggccgaatatctgctgctgcgggagccgggccacgttgccctctccaatgataccgtctatgttgactttcagtacttcgatggcgccaatggaacactccgtaacgtctcagttctgctgcttgaggctaacaccaaccaaactgtcaccactaagtatctgctcactaatcaatctcagggaacattgaagtttgagtgcttttatttcaaggaagccggagattattggtttactatgacacctgaggcaaccgataattcgaccccatttccctggtgggagaagagcgcctttctgaaggtcgagtggccagtcttccacgtcgacctgaatcgcagcgctaaggctgcagaggggactttccaggttggattgttcacatcacagccactgtgccccttccccgtcgataaacctaatattgtggtggatgtgattttcacgaactcccttccggaggcccgcaggaacagccgacaacctcttgagatcagaacctctaagcgcacggagctggcccagggccagtgggtcgagttcgggtgcgccccgttggggccggaagcatacgtgactgtggtcctgaaacttttagggcgcgattcagttattacttccaccggaccaatcgacctcgcgcaaaagttcggatacaaacttgtcatggttccagagctgacctgtgaatctggggtggaggtgacagttctccccccaccttgcactttcgtgcagggagtagtcactgtctttaaggaggcaccgcggtacccaggaaaacggaccatacacttggcagagaactccctgccacttggcgaaaggcggaccatttttaactgtacactgttcgacatggggaaaaataagtactgctttgactttgggataagctcccgtagccacttctctgcaaaggaagagtgcatgctgattcaacgcaatacagcttttcaaccatcctctccctccccgcttcagccacagggaccagtaaaaagcaacaacattgtaactgtgactggaatctcactatgtctgtttattatcattgccaccgtcctcataaccctctggcggcgttttggacgccccgccaagtgctcgactcccgcccgacacaattcaatccattcccctagtttccggaaaaactcggatgaagaaaacatctgcgaactctctgagcagcggggatccttctcagacggcggcgacggacctacgggatctcctggcgacacggggataccgctgacctataggcgaagtggccctgtccctcctgaggatgatgctagcggtagcgagtcgttccagtcaaacgcccagaagataatcccacctttgtttagttaccggttagctcagcaacagctcaaggaaatgaaaaaaaaaggcctgactgaaacaacgaaggtgtatcacgtcagtcagtcccctttgacagacactgctatagacgctgctccttcggctcctcttgatctggagagccctgaggaggctgccgccaacaagttccgcatcaaaagtccatttcccgaacagcctgctgtcagtgccggagagaggcctccctctcgcttggatctcaatgtgactcaagcatcttgcgctatcagtccctcgcaaacccttatacgaaaatcacaagcacgccacgtcggatcccgtggtggcccctcagagagatcacatgccaggaatgcccatttccgtaggaccgcatcattccatgaggcacgacaggctagaccatttcgcgaaagatccatgagcaccctgacgcctcggcaggcccccgcctatagctccagaacgagaacctgtgagcaggcagaagatcgatttcgccctcagagtcgaggtgcacacctgttccctgagaagctggagcacttccaggaagcttcgggcacgagagggcctttaaatcccctcccaaagtcttacactctaggccagcctttgagaaaaccggatctgggtgatcaccaggcaggactggttgccgggattgaaagaacagaaccacaccgtgctcgcagaggcccctccccaagccacaagtccgtgtcaaggaaacagagctcacctatcagccccaaggataactaccagagagtgagctcactttctcccagtcagtgtcgtaaggacaagtgccagtcctttccaacgcatccagaatttgccttttacgacaatacatccttcggactgaccgaagccgagcaacgtatgctagatctgccaggctacttcgggtcaaacgaagaggacgaaacgacaagtactctttccgtcgagaaactggttatctag

SEQ ID NO: 261491 - DNA, 3186 bp, Artificial Sequence
  derived and/or modified sequence
actagagtagaagtgattgaatgtgaagtgtcaggagattgctcgctcgtccttcgttaaacccctggtccggctgtgtgctgtggatgcgggtgtgtgttgaggggacctgcgtctgccggggccgcaccccctcccgcaggaccttggctggccgcgcgtttcctgcctgtttcctgtccagcagctggcgagctggggaccggcaggaaaggatgcgctgcccagaaggggcgggaaccgaccacgcccggtcccgtgtgccccccgccctcccggcgcccgccctccccacgccgtcgggggcgggccccgcggggctgtgggagccgaacgccgcggggtcagggcgtgcagtctgggacgcgggatgcttggcgctctacctcgccgcccctgagccttcccgtccgcctcgccacgcgcccggacggcctggggttgctgcccgtcagtctcgaaaggtgtttttggggaaaaaaatcacaatctggacgtgagaaaggacatgaggagactaaagacctgggattttgtcaatcagaatgaaaccaatgttgaaagacttttcaaatctattgttggtggtactctgtgactatgttcttggagaagctgaatatcttctcttgagagagccaggccatgtagcactaagcaacgacacagtgtatgtggatttccagtattttgatggtgctaatgggacactgaggaatgtatctgtcctgctgttggaggccaacaccaatcagactgtaactaccaagtacctcctgaccaaccagtcccagggaacactaaagtttgagtgcttctatttcaaggaggctggtgactactggttcacaatgactccagaagcaacagacaacagcactccattcccctggtgggagaaaagtgcctttctgaaggtggaatggcctgtctttcacgttgacttgaataggagtgccaaggcagcagaaggcaccttccaagtgggcctatttaccagtcaaccactgtgcccgtttcctgtggacaagcccaacatcgtagtggatgtcatcttcaccaacagtcttcctgaggcaagaagaaattcaagacagccgctggaaataagaaccagcaaaaggacagaacttgctcaaggtcagtgggttgagtttggctgtgcacccttggggccagaagcctatgtcaccgtggtgctgaagctgcttgggcgagactcagtcattacctccacaggacccattgacctggcccagaaatttggatacaaactggtgatggtgccagaactcacatgtgagtccggggtagaggtgacagtgctgcctccaccatgcaccttcgtccaaggagtggtcactgtcttcaaggaggcccccagataccctgggaagaggaccattcacttggctgaaaacagcctgcccctgggagagaggaggacaatttttaactgtactttgtttgacatggggaagaataagtactgctttgactttggcatttcaagcagaagccatttttctgcaaaggaggagtgcatgctaattcagagaaatacagctttccagccatccagcccatctcctcttcagccccagggtccagtgaagtccaacaacatcgtgactgtcactggtatatccttgtgcttgttcatcatcattgccactgtgctcatcacgctgtggaggaggttcggccggccagccaagtgcagcacacctgctcgacacaactccatccactcccccagcttccggaagaactcggacgaggagaatatctgcgagctgagcgagcagcgcgggagcttctcggatgggggagacgggcccacggggagtccaggggacacaggcatccctctgacctacaggcggagcgggccggtacctcccgaggatgatgcctctggcagcgagagcttccagtccaacgcccagaagataatcccacctctgttcagctaccgccttgcccagcagcagttaaaggagatgaaaaagaaaggtctgacggaaactaccaaagtgtatcacgtgtctcagagtcccctgacagacactgccattgatgcggcccccagcgctcccttagatttggaaagcccggaagaagctgcagcaaacaagttccggatcaaatccccatttccggagcagcccgcggtcagtgccggggaaaggcctccctccaggctggatctaaatgtgactcaggccagttgtgccataagccccagccagactctgatccgcaagtcacaggcaaggcacgtgggcagcagagggggcccgtccgaaaggagccatgccaggaacgcccatttcaggaggacagcgagtttccatgaagccaggcaggcccggccgttccgagagaggagcatgtccactctgactccacggcaggcccctgcctacagctctaggacgcggacctgcgagcaggcagaggacagatttaggcctcagagtcgaggtgcccacctgtttcctgaaaaactggagcatttccaagaggcaagtggaacccgtggtccattaaaccctctccctaaatcctacactttggggcagcccttgaggaaaccagaccttggggatcaccaggcaggattagtggccggaattgagagaacagagccccacagagctcgtcggggaccgtcccccagtcacaagagtgtctcaaggaagcagtcttctcccatatcccccaaagataactaccagagggtcagttctctgagcccttctcagtgtagaaaagacaagtgtcaaagcttccccactcaccctgagtttgccttctatgacaatacgtcgtttggcctcactgaggctgagcagaggatgctggacctcccaggatattttgggtcaaatgaagaggatgaaaccacaagtacacttagcgtggagaagctggtgatctagactgagaatcagcctgagctttacacagctggggtctgctactcgcgttttgtagacttttgtgtaactatttgtaccgtaggacagaatgtgaggaggaagtaacacacagaggaggatgtgtgtgtatgcatgtgtttgaattcacaaggaagaaattatttatcttgagctttttcctttgttattcaatttctattgatttattagtaataacaatgataataaaatgtaaatgagc

SEQ ID NO: 261492 - DNA, 2400 bp, Artificial Sequence
  derived and/or modified sequence
atgaagcccatgctgaaggacttcagcaacctgctgctggtggtgctgtgtgactatgtgctgggggaggccgagtacctgctgctgcgggagcccggccacgtggccctgagcaatgacacagtgtatgtggacttccagtactttgatggagccaacggcaccctgagaaatgtgtctgtgctgctgctggaggccaacaccaaccagacagtgaccaccaagtacctgctgaccaaccagagccagggcaccctgaagtttgagtgcttctacttcaaggaggccggggactactggttcaccatgaccccagaggccacagacaacagcacccccttcccctggtgggagaagagcgccttcctgaaggtggagtggcctgtgttccacgtggacctgaacagaagtgccaaggctgctgagggcaccttccaggtgggcctcttcaccagccagcccctgtgccccttccctgtggacaagcccaacatcgtggtggatgtgatcttcaccaacagcctgcctgaggcccggaggaacagccggcagcccctggagatccgcaccagcaagaggacagagctggcccagggccagtgggtggagtttggctgtgcccccctgggccctgaggcctacgtgacagtggtgctgaagctgctgggccgggacagcgtcatcaccagcacaggccccatcgacctggcccagaagtttggctacaagctggtgatggtgcctgagctgacctgtgagagcggcgtggaggtgacagtgctgcccccaccctgcacctttgtgcagggcgtggtgacagtgttcaaggaggccccccgctacccaggcaagaggaccatccacctggccgagaacagcctgcccctgggggagaggaggaccatcttcaactgcaccctgtttgacatgggcaagaacaagtactgctttgattttggcatcagcagccgcagccacttcagcgccaaggaggagtgcatgctgatccagaggaacacagccttccagcccagcagccccagccccctgcagccccagggccctgtgaagagcaacaacatcgtgacagtgacaggcatcagcctgtgcctcttcatcatcatcgccaccgtgctgatcaccctgtggaggcgcttcggccgcccagccaagtgcagcaccccagcccggcacaacagcatccacagccccagcttcaggaagaacagtgatgaggagaacatctgtgagctgtctgagcagaggggcagcttcagtgatggaggagatggccccaccggcagccctggggacaccggcatccccctgacctaccgccgcagcggccctgtgcccccagaagatgatgccagcggcagcgagagcttccagagcaatgcccagaagatcatccccccactcttctcctaccgcctggcccagcagcagctgaaggagatgaagaagaagggcctgacagagaccaccaaggtgtaccacgtgtcccagagccccctgacagacacagccattgatgctgcccccagcgcccccctggacctggagagccctgaggaggccgccgccaacaagttccgcatcaagagccccttccctgagcagcctgctgtgtctgctggggagcggccccccagccggctggacctgaatgtgacccaggccagctgtgccatcagccccagccagaccctcatcaggaagagccaggcccggcacgtgggcagccggggcggccccagcgagaggagccacgccagaaatgcccacttccggaggacagccagcttccacgaggcccggcaggcccggcccttccgggagaggtccatgagcaccctgaccccccggcaggccccagcctacagcagcaggaccaggacctgtgagcaggctgaagatcgcttccggccccagagcagaggagcccacctgtttcctgagaagctggagcacttccaggaggccagcggcacccggggccccctgaaccccctgcccaagagctacaccctgggccagcccctgaggaagccagacctgggggaccaccaggccggcctggtggccggcatcgagaggacagagccccaccgggcccggcggggccccagccccagccacaagtctgtgtccaggaagcagagcagccccatcagccccaaggacaactaccagagggtgagcagcctgagccccagccagtgcaggaaggacaagtgccagagcttccccacccaccctgagtttgccttctatgacaacaccagctttggcctgacagaagctgagcagaggatgctggacctgcccggctacttcggcagcaatgaagaagatgagaccaccagcaccctgtctgtggagaagctggtgatctag

SEQ ID NO: 261493 - DNA, 2400 bp, Artificial Sequence
  derived and/or modified sequence
atgaagcccatgctgaaggacttcagcaacctgctgctggtggtgttgtgtgattacgtcctcggggaggcggagtacctgctcctaagagagcccggccacgtcgccctgtcgaacgacacagtatacgtcgacttccagtacttcgatggggccaatggaacccttcgcaacgtctcggtgctgttactcgaagcgaacacaaaccagaccgtcactactaagtacctgctgacgaatcagtctcagggcaccctcaaatttgaatgcttttactttaaagaggccggcgactattggttcacaatgactcccgaagccaccgacaattcaactccattcccatggtgggaaaagtccgcctttctgaaagttgagtggcccgtctttcacgtcgatttaaacaggtctgccaaggcagccgaagggaccttccaggtcggcctttttacttcacaacctctttgtcccttcccggtggacaaacctaatatagttgtggatgtcatctttaccaatagtttgcccgaggctagacgcaattccaggcagcccctggaaattcgtacgagcaaacgaacagaactggctcaaggccagtgggtagaattcggttgcgccccactgggtccagaggcttatgtcacagtcgtgctcaagctcttggggagggactctgtaatcactagcacagggccaatcgatctagcccagaagttcggttacaagctggtaatggtgcccgagttaacttgcgagtctggggtagaggtgaccgtgctaccacctccctgtacattcgtgcagggagtagtaacagtctttaaagaagccccccggtacccaggaaagaggaccattcatcttgcagagaattcattacccctgggtgagcggcgaacgatttttaactgtaccctgtttgacatgggcaaaaacaaatattgcttcgactttggcattagttcccgaagtcacttttcagccaaagaggagtgtatgcttattcagagaaatacggcttttcaacccagctcgccttctccactccaacctcagggcccggtcaaatctaacaacatagtcacggtgactggcattagtctctgcttattcatcataatagcaaccgtgctcattacactgtggcgacgcttcggacgacccgccaagtgtagtacccccgcccgccacaacagcattcactcccctagctttagaaagaactctgacgaagagaatatttgtgagttatcagaacagcgaggctcttttagcgacgggggggatggaccaaccggcagccctggggacaccgggatacctcttacctatcggcgttcagggcctgtgccacctgaagacgatgcaagcgggagcgaaagttttcaatcaaacgcccaaaaaatcatcccaccgctattcagttaccggctcgctcaacagcagctgaaggagatgaagaagaagggcttgaccgagacaacgaaagtgtatcacgtctcccagtctcccctcaccgacaccgccattgacgccgccccctctgcccctctggatctggagagtcccgaggaagcagcagcaaataagttccggataaagtcacctttccccgagcagcccgcggtcagcgcaggggagcggccaccttccaggctggacctaaacgtaacacaggcctcgtgcgctatatcccccagccagactttaattaggaaaagtcaggcccgtcatgtgggatctcgcgggggcccaagcgagagatcacacgccagaaatgcgcattttaggcgcactgccagcttccacgaggcccgccaggccaggccatttagagagcggtccatgtccacattgactccccggcaggcgcccgcttactcatcacgtactagaacctgcgaacaagccgaggatagatttcgtccccagtcacgcggcgctcatctgttcccagaaaaattagagcattttcaggaggcatccggaacccgggggccgctgaaccccctgccaaagtcctatacgctcgggcaacctttgcgcaagccagacctgggcgatcaccaggctgggctggttgcaggtatcgaaaggacggaaccgcatcgagcccggagagggccgtccccctctcataagagcgtgagtcggaagcagtcttctccaatctcccctaaagacaactaccagagggtgagttctctgtccccctcacaatgcagaaaggacaaatgccaatcctttccaacacatcccgaatttgccttctatgacaatacgagtttcggtctaaccgaagccgaacagcgaatgctggacttgccgggttacttcggctctaatgaagaggatgagacaacgtctacgctctccgtcgaaaagctggtgatctag

SEQ ID NO: 261494 - RNA, 2400 nt, Artificial Sequence
  derived and/or modified sequence
augaagccuaugcugaaagauuucuccaaccuguugcugguugugcugugcgacuauguucugggagaagcagaauaucugcucuugagagaaccuggacauguggcucugucuaacgauacuguauacguggauuuccaguacuuugauggugccaacggcacacugaggaacgugaguguuuugcugcuagaagccaauacaaaccagaccgucaccacaaaauaccuacuaaccaaucaaagccagggcacacugaaguuugagugcuucuacuuuaaagaagccggagauuacugguuuacgaugaccccagaggccaccgacaauaguacaccauuucccuggugggagaaaucagccuuuuugaaggucgaauggccugucuuucacguagaccuuaacagauccgcuaaggcagcagaggguacguuccagguuggguuguucaccagccaaccgcucugcccuuucccaguggacaaaccaaauauagugguggaugugaucuuuacaaacucuuuaccagaggcacgcaggaacucacggcagccccuggagauaaggacaucuaagcgcacugaauuagcccaagggcaauggguggaguuuggaugcgccccuuuggggccagaggcguauguuacugugguauuaaaguugcugggacgggacagcgugauuacaaguaccggaccuauugaccucgcccagaaauucggcuauaagcucgucauggugccagagcucacaugugaaucagguguggaagugaccguccucccacccccaugcacuuucguucagggggucgugacaguguucaaagaggcucccagguaccccggcaaacgaacuauucauuuagccgagaauucauugccccugggagagcgccgcacaauuuucaacugcacucuguuugauaugggaaagaauaaguacugcuucgauuucgguaucaguucucggucucacuucucugcuaaggaggaaugcaugcucauccagcguaacaccgccuuccagccgucauccccaagcccucuucagccacaaggaccagugaaaucuaacaacaucgugaccgucacugggaucucucuuugucuguuuaucauuaucgcaacagugcuaaucacguuguggcgcagauucggaaggccagcuaagugcuccaccccagcuagacacaauucaauacauuccccaaguuuucgcaaaaacagcgacgaggagaacauaugugagcuuuccgaacagagggggucuuucucugauggcggagaugggccaaccggcucccccggagacaccggaaucccucucaccuaucgcaggucugguccuguaccgccugaggacgaugcauccggcagugaaagcuuucaaagcaacgcacagaagaucauucccccucuguuuagcuaucggcuugcacagcaacaacugaaagagaugaagaagaagggcuuaaccgaaacuaccaaagucuaucaugugucacaguccccucugacagauacggccaucgaugcggcucccagcgcaccauuagaccuggagucccccgaagaagcagcugccaauaaguuucgcaucaaaagcccauuuccugaacaaccugcuguuagcgccggcgagcgcccucccucccgacuugaucucaaugugacccaggccagcugcgccaucucccccucucagacccugauacggaagagccaggccagacacgucggaagcagggguggcccuagcgagcgcagccacgcccguaacgcccauuucaggcgaaccgccuccuuucacgaggccaggcaggcccggccuuucagagaacgguccaugucuacacuaacaccccgccaggcucccgccuacucauccaggacccggacuugcgagcaggcugaggaccgauucaggccucagagucgaggagcacaccuuuuucccgaaaagcucgaacacuuccaggaagccagcgguacgcgcggcccucugaaucccuuaccuaagaguuauacccugggacaaccuuuacggaagcccgaucugggcgaucaccaggccggacuggucgccgguauugagaggacagaaccccaccgugcacggagaggcccaucgccuucucauaagagcgucucucgcaagcagagcucaccaauuuccccuaaagacaauuaccaacgcgucucguccuugagccccucccagugccggaaagacaagugucaaucauuuccaacucacccggaauuugcauuuuacgauaauacuucuuucggucugaccgaggccgagcaaagaaugcuggaucuacccggguacuucggaagcaacgaggaggaugaaacuacaaguaccuugucugucgagaagcugguuaucuag

SEQ ID NO: 261495 - RNA, 2400 nt, Artificial Sequence
  derived and/or modified sequence
augaaaccaaugcuuaaagacuucagcaaccuauugcuaguagugcugugcgauuacguccugggagaggcugaguaccuguugcuccgcgaaccuggccacguggcccucucaaaugauaccguguacguagacuuccaguauuuugauggcgccaacggcacgcugcgcaacgugucugugcuacuauuggaggccaauacuaaccaaacaguuaccaccaaauaccuacugacaaaucagagucaaggaacauugaaauuugaauguuuuuauuuuaaagaggcaggcgauuacugguucaccaugaccccagaggcaaccgacaauucgacucccuuuccguggugggagaagucagcguuucuuaaggucgaauggccuguguuccauguugauuugaaccguagcgcuaaagcagcagaggggaccuuucagguaggccuguuuaccucucagccucugugccccuucccuguagauaaacccaacauuguagucgacguuauuuuuacgaauucccugcccgaagcccggaggaacucucgucaaccccucgagauaagaacauccaaaagaacagaacucgcacagggccaguggguggaauucggaugcgcaccgcuaggcccagaagcuuacgugaccgucguauugaaacuccugggucgggauucaguuauaacaaguaccgguccgauagaucuagcucagaaguucggauauaagcucguaaugguccccgaacugacgugcgagucuggugucgaagucaccgugcugccgccaccgugcacauuuguccaggguguggugaccguuuucaaagaggccccucgauaucccggaaaaaggacuauccacuuagcggagaacagccugccacugggcgagaggaggaccauuuucaauuguacccuguuugauaugggaaaaaauaaguauugcuucgacuuuggcaucaguucccggagccacuucagcgccaaggaagaguguaugcugauucagaggaacaccgccuuccagcccucgucgcccuccccucuccaaccccagggcccugucaagucuaauaauauaguuacugucaccgguaucucccugugucuuuucaucauuaucgccaccguucuaaucacucuuuggaggagauucggucggccagcuaaaugcucuacccccgccagacacaauuccauucauagucccagcuucaggaagaauagcgaugaagaaaacauuugugagcuauccgagcaacguggaagcuuuucugacggcggcgauggcccuacaggcucccccggcgacacagggauaccccuuaccuacagacguucgggcccagucccccccgaagaugaugccucugguuccgaauccuuucagucgaacgcucaaaagauaauuccaccccuguuuuccuaucgucuugcccagcagcaacuuaaggagaugaaaaaaaaaggacugacugaaacaacuaagguguaccacgucagucagagcccgcuuacagauacggccaucgacgccgcccccucugcaccccuugaccucgaaagucccgaagaagccgccgccaacaaauuccggauaaaaagccccuucccugaacagccagcggugagugcaggagaaaggccccccucaagauuagaccucaauguuacucaggcuucaugugcgauaagccccagccaaacgcugauucggaagucccaagcccgccacgugggaagccggggcggucccucggagcgcagucacgcuaggaaugcccacuuccgcaggaccgcaagcuuccacgaggcccgccaagcgcgaccauuccgugagcgaagcaugucuacucugaccccccgccaggcuccagcauacucuucucggaccagaaccugugaacaggccgaggaucgauuucgcccacagucuagaggggcccacuuauucccggagaagcuggagcacuuccaagaagcaagcgguacacgagguccuuugaacccccucccaaaaucuuauacuuugggccagcccuuacgcaaaccugauuuaggugaccaccaagccggccuggucgcuggaaucgaacggacugagccgcaccgagccagaagaggaccguccccgucccauaagucugugagucggaaacagucuagcccuauaucccccaaagacaauuaucagagaguuucaaguuugucaccuagucagugcagaaaggacaagugccagucauuccccacccaccccgaguuugcauuuuacgauaacacaagcuucggccugacugaggcagaacagcggaugcuugaucuacccggauauuuugguagcaaugaggaggacgaaaccacauccacccuuagcguggaaaaguuggucauauag

SEQ ID NO: 261496 - protein, 548 aa, Artificial Sequence
  derived and/or modified sequence
MQPGLSPGSPGDPRPPTPETDYPESLTSYPEEDYSPVGSFGEPGPTSPLTTPPGWSCHVSQDKQMLYTNHFTQEQWVRLEDPHGKPYFYNPEDSSVRWELPQVPVPAPRSIHKSSQDGDTPAQASPPEEKVPAELDEVGSWEEVSPATAAVRTKTLDKAGVLHRTKTADKGKRLRKKHWSASWTVLEGGVLTFFKDSKTSAAGGLRQPSKFSTPEYTVELRGATLSWAPKDKSSRKNVLELRSRDGSEYLIQHDSEAIISTWHKAIAQGIQELSAELPPEESESSRVDFGSSERLGSWQEKEEDARPNAAAPALGPVGLESDLSKVRHKLRKFLQRRPTLQSLREKGYIKDQVFGCALAALCERERSRVPRFVQQCIRAVEARGLDIDGLYRISGNLATIQKLRYKVDHDERLDLDDGRWEDVHVITGALKLFFRELPEPLFPFSHFRQFIAAIKLQDQARRSRCVRDLVRSLPAPNHDTLRMLFQHLCRVIEHGEQNRMSVQSVAIVFGPTLLRPEVEETSMPMTMVFQNQVVELILQQCADIFPPH

SEQ ID NO: 261497 - protein, 521 aa, Artificial Sequence
  derived and/or modified sequence
MQPGLSPGSPGDPRPPTPETDYPESLTSYPEEDYSPVGSFGEPGPTSPLTTPPGWSCHVSQDKQMLYTNHFTQEQVPVPAPRSIHKSSQDGDTPAQASPPEEKVPAELDEVGSWEEVSPATAAVRTKTLDKAGVLHRTKTADKGKRLRKKHWSASWTVLEGGVLTFFKDSKTSAAGGLRQPSKFSTPEYTVELRGATLSWAPKDKSSRKNVLELRSRDGSEYLIQHDSEAIISTWHKAIAQGIQELSAELPPEESESSRVDFGSSERLGSWQEKEEDARPNAAAPALGPVGLESDLSKVRHKLRKFLQRRPTLQSLREKGYIKDQVFGCALAALCERERSRVPRFVQQCIRAVEARGLDIDGLYRISGNLATIQKLRYKVDHDERLDLDDGRWEDVHVITGALKLFFRELPEPLFPFSHFRQFIAAIKLQDQARRSRCVRDLVRSLPAPNHDTLRMLFQHLCRVIEHGEQNRMSVQSVAIVFGPTLLRPEVEETSMPMTMVFQNQVVELILQQCADIFPPH

SEQ ID NO: 261498 - protein, 159 aa, Artificial Sequence
  derived and/or modified sequence
MDPSQFNPTYIPGSPQMLTEENSRDDSGASQISSETLIKNLSNLTINASSESVSPLSEALLRRESVGAAVLREIEDEWLYSRRGVRTLLSVQREKMARLRYMLLGGVRTHERRPTNKEPKGVKKESRPFKCPCSFCVSNGWDPSENARIGNQDTKPLQP

SEQ ID NO: 261499 - DNA, 1660 bp, Artificial Sequence
  derived and/or modified sequence
catagctctgcaggggaacaggatcgctggcgcctcctgggccgctaagcgaccccggggctgcccggcttagcgagtgcttcgcagagaggtagccgagtcgaggcagcgcggttcccaaggaagtcacggctgcggccaccctccagttcggacctccgggcagccgcggttgctttcagtctctgcccattgagacaaaagagcgtgacaagccgcgcgacgcggccaatcagcggggcgaggaggcggcctccccaagcagcctctggccctgaagctactgctagcaagactcgggagctggctggcgggggctgaggccgacaggcacgggagccggcgcggcgtcaagtggagctcggacgcacggaccaggcccatttccctttcatctacagcaatgttcttactcctctcctgctgtaaagccactcatcttcgatttccctgaggacttctgctcctacagactctcgacggagtaaagcttccgatagaggggaaacagattcgctactagtgttgatagtcaagttactaaggttctttatcaacgtctcggagcagatttgagaggcccctgaatcgtcccgggaattttcttcggtgagcatttgtggagactctgggatgtaggttggattaaacttctgtgatgggtccatcggcgtcttgacacaacactaagcttctcctggatctttgaaacgtagcagaaactgatgacggagcctcaaattgctacaaggtagcccggaaagagcaagagtgagtgtacttcggatgaagggaatgtggaccctcaggactaaagcagtgggagaggcctgggaggtggggcctggggagggcgaggtctgctctgaagtcaccaagctcctgatcttagaagagatggtgggcgcaggctctggaggctcaagcggaggaggggaaggaggcgagtccggaaaccctcggccaatcagagagggctggggcggcgcctgctagaaggcttagcactgcagggctctgggcgggaaggctaacctggtgcggagccagcctgggtctcagccccgcgtacggcctttcacgagtcttcaagccttcaggctttcttctagtcaagatgagtgataaaccagacttgtcggaagtggagaagtttgacaggtcaaaactgaagaaaactaatactgaagaaaaaaatactcttccctcaaaggaaactatccagcaggagaaagagtgtgttcaaacatcataaaatggggatctcctccaaagagcagatttcagcattgcctgacagtcttggttttaggcttgtttttttgtaaacctgtgtgtttgtagagatttcagacatcttctgatttcttctcacctatattccctggttaagaggtcaggggtagtgaatgtttccttaagttcctttttaaacttcccattggtatgtaaattccaaatggcagatgctgtcaataaccttgccatggatgacctttgtgtaggtagtccttgcacctcatgcaggataagccaattttaactttctacaatgggtgcctcaatagtttcataatcttcatgaagttgcatcctttggcagcttcttacagtttattttcacttccaatgtagcaataaaataataaatataatcgtt

SEQ ID NO: 261500 - DNA, 480 bp, Artificial Sequence
  derived and/or modified sequence
atggacccttcccagtttaatcctacatacattcccgggtctcctcaaatgctgactgaggaaaactcccgcgacgatagcggagcctcccaaatcagttccgaaacgctcatcaagaacctgagcaacttgacaatcaatgcttcttccgagtccgttagcccactgtccgaggctctcctgagacgcgaaagcgttggagccgccgttctgagggagatcgaagacgaatggttatactcacgcagaggggttcgcacattactgtccgtgcagagagagaaaatggctaggctgcgttatatgttgctcgggggggtgagaacccacgagagaaggcctacaaacaaggagcccaagggtgtgaaaaaagagtcaagacctttcaagtgcccatgtagtttttgcgtgagcaatggctgggatcccagcgaaaacgcaaggattgggaaccaggacaccaagcctctccagccatag

SEQ ID NO: 261501 - DNA, 480 bp, Artificial Sequence
  derived and/or modified sequence
atggaccccagccagttcaaccccacctacatccctggcagcccccagatgctgacagaggagaacagcagagatgattctggggccagccagatcagcagcgagaccctcatcaagaacctgagcaacctgaccatcaatgccagcagcgagagcgtgagccccctgtctgaggccctgctgcggcgggagagcgtgggcgctgctgtgctgcgggagattgaagatgagtggctgtacagccggcggggcgtgaggaccctgctgtctgtgcagcgggagaagatggcccggctgcgctacatgctgctgggcggcgtgaggacccatgagcggcggcccaccaacaaggagcccaagggcgtgaagaaggagagccggcccttcaagtgcccctgcagcttctgtgtgtccaatggctgggaccccagtgaaaatgccagaattggcaaccaggacaccaagcccctgcagccctag

SEQ ID NO: 261502 - DNA, 480 bp, Artificial Sequence
  derived and/or modified sequence
atggaccccagccagttcaaccccacctacatccccggcagcccccaaatgctaacagaagaaaactctcgcgatgactctggggctagccagatcagcagcgagactctcataaagaatctgagtaacctgaccatcaacgcctcatcagagtccgttagccctctgagtgaggccctgctgcgcagagaaagtgtgggggcagctgtgctgagggagatcgaagacgaatggctctattcgcgcagaggagtccgcaccctgctgtcggtgcaacgagaaaaaatggccaggctgcgatacatgctgctgggcggagtccgtacacatgagaggcgccctactaataaggaacccaagggtgttaaaaaagaatccagacccttcaaatgcccttgctccttttgtgtcagtaatggctgggatccctccgagaacgctaggatcggcaaccaggacaccaaacccctgcagccttag

SEQ ID NO: 261503 - DNA, 480 bp, Artificial Sequence
  derived and/or modified sequence
atggacccgtcgcagtttaatcccacttatatccccggatcccctcaaatgctcactgaagaaaacagcagagatgactcaggagcgtctcaaatttccagtgagactctgatcaagaatctcagtaacttgaccataaacgcttcttccgagagcgttagcccactgagcgaggccctgctgagaagggagtcggtgggcgcagctgtgctccgcgaaattgaggatgaatggctatactcgagacggggtgtgaggacgctcctcagtgttcagcgcgaaaaaatggctagactgcggtacatgctcctaggcggtgtgagaacgcacgagcggagacctaccaacaaagagcctaagggtgttaagaaggagagtcgtccttttaaatgcccatgtagcttctgtgtcagcaacggttgggatccttccgaaaatgccagaatcggcaatcaagatactaagcccctgcagccatag

SEQ ID NO: 261504 - DNA, 480 bp, Artificial Sequence
  derived and/or modified sequence
atggaccccagccagttcaaccccacctacatccccggcagcccccagatgctgaccgaggagaacagcagagacgacagcggcgccagccagatcagcagcgagaccctgatcaagaacctgagcaacctgaccatcaacgccagcagcgagagcgtgagccccctgagcgaggccctgctgagaagagagagcgtgggcgccgccgtgctgagagagatcgaggacgagtggctgtacagcagaagaggcgtgagaaccctgctgagcgtgcagagagagaagatggccagactgagatacatgctgctgggcggcgtgagaacccacgagagaagacccaccaacaaggagcccaagggcgtgaagaaggagagcagacccttcaagtgcccctgcagcttctgcgtgagcaacggctgggaccccagcgagaacgccagaatcggcaaccaggacaccaagcccctgcagccctag

SEQ ID NO: 261505 - DNA, 1079 bp, Artificial Sequence
  derived and/or modified sequence
tggagctccggttttcagcctctttccgggctacctggtagcaatttgaggctctgtcatcagtttctgctacgtttcaaagatcctggagaagcctagtgttgtgtcaagacgccgatggacccatcacagtttaatccaacctacatcccagggtctccacaaatgctcaccgaagaaaattcccgggacgattcaggggcctctcaaatctcctccgagacgttgataaagaaccttagtaacttgactatcaacgctagtagcgaatctgtttcccctctatcggaagctttactccgtcgagagtctgtaggagcagcagtcctcagggaaatcgaagatgagtggctttacagcaggagaggagtaagaacattgctgtctgtgcagagagaaaagatggcaagattgagatacatgttactcggcggagttcgtacgcatgaaagaagaccaacaaacaaggagcctaagggagttaagaaggaatcaagaccattcaaatgtccctgcagtttctgcgtgtctaatggatgggatccttctgagaatgctagaatagggaatcaagacaccaagccacttcagccataaatcttattcttgcacctttttttcttggtagtaattttatatagcaggttgagaaagctactctatgctagtatagactatacaccaataattttgataatgagttctaggatgtatttttcttgtatctttttcttcctactatgatactagtaattcataagggatctgtgtaatctgaatgtatttgaataactttagctctactgtttgatttgacccaaagaagccaagatgatataagtattcccatgtgtcttagaagcccaaagtcagtgagatgaaacccaacatcaagaaattgaagcaaagttacttatggataaagaaagcattaggtagttgggctatagcataattagattttctggctttcaaaaatttggattgcaatcacagcaaactttgttatttttacagttttcagtacaaaagtgtttatatagaaacaataaagttgacatttgagtaccttttaaaaa

SEQ ID NO: 261506 - protein, 528 aa, Artificial Sequence
  derived and/or modified sequence
MPTPDATTPQAKGFRRAVSELDAKQAEAIMVRGQGAPGPSLTGSPWPGTAAPAASYTPTPRSPRFIGRRQSLIEDARKEREAAVAAAAAAVPSEPGDPLEAVAFEEKEGKAVLNLLFSPRATKPSALSRAVKVFETFEAKIHHLETRPAQRPRAGGPHLEYFVRLEVRRGDLAALLSGVRQVSEDVRSPAGPKVPWFPRKVSELDKCHHLVTKFDPDLDLDHPGFSDQVYRQRRKLIAEIAFQYRHGDPIPRVEYTAEEIATWKEVYTTLKGLYATHACGEHLEAFALLERFSGYREDNIPQLEDVSRFLKERTGFQLRPVAGLLSARDFLASLAFRVFQCTQYIRHASSPMHSPEPDCCHELLGHVPMLADRTFAQFSQDIGLASLGASDEEIEKLSTLYWFTVEFGLCKQNGEVKAYGAGLLSSYGELLHCLSEEPEIRAFDPEAAAVQPYQDQTYQSVYFVSESFSDAKDKLRSYASRIQRPFSVKFDPYTLAIDVLDSPQAVRRSLEGVQDELDTLAHALSAIG

SEQ ID NO: 261507 - DNA, 1587 bp, Artificial Sequence
  derived and/or modified sequence
atgcccacccccgacgccaccaccccccaggccaagggcttcagaagagccgtgagcgagctggacgccaagcaggccgaggccatcatggtgagaggccagggcgcccccggccccagcctgaccggcagcccctggcccggcaccgccgcccccgccgccagctacacccccacccccagaagccccagattcatcggcagaagacagagcctgatcgaggacgccagaaaggagagagaggccgccgtggccgccgccgccgccgccgtgcccagcgagcccggcgaccccctggaggccgtggccttcgaggagaaggagggcaaggccgtgctgaacctgctgttcagccccagagccaccaagcccagcgccctgagcagagccgtgaaggtgttcgagaccttcgaggccaagatccaccacctggagaccagacccgcccagagacccagagccggcggcccccacctggagtacttcgtgagactggaggtgagaagaggcgacctggccgccctgctgagcggcgtgagacaggtgagcgaggacgtgagaagccccgccggccccaaggtgccctggttccccagaaaggtgagcgagctggacaagtgccaccacctggtgaccaagttcgaccccgacctggacctggaccaccccggcttcagcgaccaggtgtacagacagagaagaaagctgatcgccgagatcgccttccagtacagacacggcgaccccatccccagagtggagtacaccgccgaggagatcgccacctggaaggaggtgtacaccaccctgaagggcctgtacgccacccacgcctgcggcgagcacctggaggccttcgccctgctggagagattcagcggctacagagaggacaacatcccccagctggaggacgtgagcagattcctgaaggagagaaccggcttccagctgagacccgtggccggcctgctgagcgccagagacttcctggccagcctggccttcagagtgttccagtgcacccagtacatcagacacgccagcagccccatgcacagccccgagcccgactgctgccacgagctgctgggccacgtgcccatgctggccgacagaaccttcgcccagttcagccaggacatcggcctggccagcctgggcgccagcgacgaggagatcgagaagctgagcaccctgtactggttcaccgtggagttcggcctgtgcaagcagaacggcgaggtgaaggcctacggcgccggcctgctgagcagctacggcgagctgctgcactgcctgagcgaggagcccgagatcagagccttcgaccccgaggccgccgccgtgcagccctaccaggaccagacctaccagagcgtgtacttcgtgagcgagagcttcagcgacgccaaggacaagctgagaagctacgccagcagaatccagagacccttcagcgtgaagttcgacccctacaccctggccatcgacgtgctggacagcccccaggccgtgagaagaagcctggagggcgtgcaggacgagctggacaccctggcccacgccctgagcgccatcggctag

SEQ ID NO: 261508 - DNA, 1587 bp, Artificial Sequence
  derived and/or modified sequence
atgcccacccccgatgctactacccctcaggctaaggggttccgtagggcggtctctgaactcgatgcgaaacaagctgaggcaataatggtgcgtggacagggggcgcccggcccctctctgaccggatcgccctggcctggaaccgcagcccccgcagcaagttatacaccaacacctcgttcgcccaggttcataggacgaagacagtctttaatagaggacgccaggaaggagcgagaagctgcagtcgcagccgctgctgccgcggttccctcagaacccggggatcctctcgaagctgtggcatttgaggaaaaggagggcaaggccgtgctgaacctgctgttctcacctagggctacaaaaccttccgccctttcacgagcagttaaagtcttcgagaccttcgaggctaagattcaccacctggaaactcgcccagcccagagaccccgggccggcggaccgcacctggaatactttgtcaggctggaagtaaggaggggtgatctggccgctttgttgtctggggtgcgccaagtctctgaggatgtccgcagtcccgccggtccaaaggtgccttggttccctaggaaagtgagtgagctggacaaatgccaccatttagtgactaaatttgatcccgatctcgacttagatcaccctggcttctctgaccaggtctatcggcaaagaagaaaactgattgccgaaatcgcattccagtataggcatggagatccaatcccccgcgtcgaatacactgccgaggaaattgccacgtggaaggaagtctatacgaccctgaaaggcctgtatgccacgcacgcttgtggcgagcatttggaggctttcgcacttctggagcggttcagcggctaccgggaagacaacattcctcagcttgaggacgtgtcacggtttttgaaggaaagaacaggctttcagctacgccccgtcgctgggttgttgagcgctcgggactttttggcctccttggcatttagggttttccaatgtacacagtacattagacacgcctcaagccccatgcatagccccgagccggactgctgccacgaactgcttggccacgtgcccatgttggccgacagaacattcgcccagttttcccaggacattgggcttgcttcacttggtgccagcgacgaggaaatcgaaaagctctccacattgtactggtttacagtagagttcggactttgcaagcaaaacggcgaggtcaaagcttacggggccgggctgttatcaagctacggcgagttacttcactgcctatctgaggagcctgagatacgcgcatttgatccagaggctgctgctgtccaaccatatcaggaccagacctaccagtctgtgtactttgtgagcgaaagcttctccgatgccaaagataaattacggagttacgcctcaaggatacagcggccatttagtgtaaaatttgacccctacaccctagccatcgatgtgctggactcaccccaggccgtgagaaggtccttagagggtgtacaggatgagctcgatacattggcccatgcattgtccgctattggatag

SEQ ID NO: 261509 - DNA, 483 bp, Artificial Sequence
  derived and/or modified sequence
ggcccagatgtgacagctgggggccctgtggaggcccggcagcacccctatgccctgcagtgccccggctggagccacccccaccctgtgcagggcggcggcctgcctgctgctgggggccagcctgctggccctgcctggggcgccccctgccccccaggcggcggggagcccggggtggcccctggagctgctgacagaagaggaggccggggccaggtgcaggagcggcagcgggagcgggagggcgcagatgagggccaccaccgggacctgcctgatgctgctgccctgagccagggccacacagctgctgtgtgtggccagctgctgcctgagagagctggcctgggcacccgctgccacctgcagagcagcaccagcagcacctcctggaccagccggcagaggagcaccaccagcaggatgaagacccccagcaccagcggcagaagaacagcctacagaagtggcagcggctag

SEQ ID NO: 261510 - DNA, 1587 bp, Artificial Sequence
  derived and/or modified sequence
atgcccaccccagatgccaccaccccccaggccaagggcttcagaagagctgtgtctgagctggatgccaagcaggccgaggccatcatggtgcggggccagggcgcccctggccccagcctgaccggcagcccctggccaggcacagctgccccagctgccagctacacccccacccccaggagcccccgcttcatcggccggcggcagagcctgattgaagatgccaggaaggagcgggaggccgctgtggccgctgctgctgctgctgtgcccagcgagcccggggaccccctggaggccgtggcctttgaggagaaggagggcaaggctgtgctgaacctgctcttcagcccccgggccaccaagcccagcgccctgagcagagctgtgaaggtgtttgagacctttgaggccaagatccaccacctggagaccaggcctgcccagaggccccgggccggcggcccccacctggagtactttgtgcggctggaggtgcggcggggggacctggccgccctgctgtctggagtgcggcaggtgtctgaagatgtgcgcagccctgctggccccaaggtgccctggttccccaggaaggtgtctgagctggacaagtgccaccacctggtgaccaagtttgatcctgacctggacctggaccaccctggcttcagtgaccaggtgtaccggcagaggaggaagctgattgctgagatcgccttccagtaccgccacggggaccccatcccccgggtggagtacacagctgaggagatcgccacctggaaggaggtgtacaccaccctgaagggcctgtatgccacccacgcctgtggggagcacctggaggcctttgccctgctggagcgcttcagcggctaccgggaggacaacatcccccagctggaggatgtgagccgcttcctgaaggagaggacaggcttccagctgcggcctgtggccggcctgctgagcgcccgggacttcctggccagcctggccttccgggtcttccagtgcacccagtacatcagacatgccagcagccccatgcacagccctgagccagactgctgccacgagctgctgggccacgtgcccatgctggccgacaggacctttgcccagttcagccaggacatcggcctggccagcctgggcgccagtgatgaggagattgagaagctgagcaccctgtactggttcaccgtggagtttggcctgtgcaagcagaatggagaggtgaaggcctatggagctggcctgctgagcagctatggagagctgctgcactgcctgtctgaggagcctgagatccgggcctttgatcctgaggccgctgctgtgcagccctaccaggaccagacctaccagagcgtgtactttgtgtctgagagcttcagtgatgccaaggacaagctgcggagctatgccagccgcatccagaggcccttctctgtgaagtttgacccctacaccctggccattgatgtgctggacagcccccaggccgtgagaagaagcctggagggcgtgcaggatgagctggacaccctggcccacgccctgagcgccatcggctag

SEQ ID NO: 261511 - DNA, 1587 bp, Artificial Sequence
  derived and/or modified sequence
atgcccacccccgacgccaccaccccccaggccaagggcttccggagagccgtcagtgaactggatgccaaacaggccgaggccatcatggtacgaggtcaaggtgcccccggaccttccttgaccggaagtccatggcctggaactgcagccccagccgcatcctatacacccactcctagatctcccagattcatagggcgcagacagagcctgattgaggatgccagaaaagaaagagaagcagccgtggctgctgccgcagccgctgtgccttcagagccaggtgatcctctggaggctgttgcgtttgaggaaaaggaaggtaaagccgtgctaaatctactattcagccctagggctaccaaaccatctgccctgtctagggctgtgaaggtgttcgagactttcgaagcaaagatccaccatctcgaaacaaggcctgcccagaggccacgggccggagggccacacctagaatacttcgtacgactcgaggttcgacgtggtgacttggccgctctgttgagcggtgtacgtcaggtatctgaggatgtgcgttctccagcaggacctaaggtcccttggttccctcgcaaggtgagtgaactggacaaatgccatcacctggtgacaaaatttgaccctgatttggatctggaccaccccggtttctccgaccaggtctacaggcagagacggaagctgattgcagaaatcgcctttcagtatagacatggcgacccgatccctcgcgtcgagtacactgcagaggagatagccacctggaaggaggtgtacacgaccctgaagggcctatacgcaactcacgcctgcggggagcaccttgaggcattcgccctgctggaacgcttctcgggttatagagaagacaatattccacagttagaggatgtgtcacgctttcttaaggaaagaactggattccagttacggccagtggctgggctgctgtccgcacgggacttcctggcaagtcttgctttcagggtgttccaatgcacccagtatatccgccacgcatccagccctatgcactcaccggaacccgattgttgccacgaactcctcggccatgtgccaatgttggccgatagaaccttcgcccagtttagccaggatatcgggttggcctctctgggtgcgagtgacgaggagatcgagaagctgtccacgctgtattggtttaccgtggaatttggcctgtgtaagcagaacggggaagtcaaagcctacggcgctgggctgctgtcatcttacggggaactgttgcattgcctcagtgaggagccagagattcgggctttcgatcctgaggctgctgcggtgcagccataccaagaccagacttaccagagcgtctacttcgtgtctgagagcttcagcgacgccaaagataagctgagaagctacgcctccaggatccaacggccattttctgtgaagtttgacccttacacactggctattgacgttttggattctcctcaggccgtgaggcggtccctcgaaggtgtgcaagacgagctggacactctcgcgcacgccttgagcgccattgggtag

SEQ ID NO: 261512 - DNA, 1587 bp, Artificial Sequence
  derived and/or modified sequence
atgccaacaccggacgcaacgaccccacaggcgaaaggcttcaggcgtgctgtttcagagctagatgcgaagcaggcagaagcaatcatggtgcgagggcagggagcaccaggtcccagcctcactgggagtccctggccagggaccgccgctcctgcagcgagctacacacccacccctcggagcccaaggtttatcggtcgaaggcaatcacttatagaggacgccagaaaggagagagaagcagcagtcgcagctgctgcagccgctgtgcctagcgagcctggcgaccctctggaggccgtcgcctttgaagagaaggagggaaaagctgtgctgaacttgctcttttcacctcgggcaactaagccttcagctctcagtcgggctgtgaaggtgttcgaaaccttcgaagccaagatacaccatctcgagactcggcctgcacagcgcccacgggcaggagggcctcatctagaatatttcgtccggctagaagttaggcggggagatctggctgccctgctaagtggtgtgagacaggtgtcggaggatgtgagaagccctgcagggcctaaggtgccatggtttccacgcaaggtatcagaactcgataagtgccaccacctcgtgacgaagttcgatccagatttggatttggaccacccgggatttagtgatcaggtctatagacagcggaggaagctgatcgcggagatcgcctttcagtaccggcatggagatccaatccctagagttgagtacacagcagaagaaatcgccacttggaaggaggtgtacacaaccctgaaagggctgtatgcgacccacgcctgtggggagcatctggaagccttcgcactgttggagcgtttctccggataccgagaagataacatcccgcagctggaagatgtgagtaggtttcttaaggaacggacggggttccaacttcgtcccgtagcgggactcctaagcgcccgtgactttttggcgagcttagcttttagagtgttccagtgtacacagtacattaggcacgcctcctcaccaatgcatagccctgaaccggactgttgtcatgagcttctaggtcatgtgcctatgctggccgatcgcacctttgcccagttctcacaagatatcggcctagcgtcgttgggcgctagcgacgaagagattgagaaactctccactctgtactggtttaccgtagaatttgggctgtgtaagcaaaacggagaagtcaaagcatacggggctgggttgttgtctagctacggagagttactgcattgcctgtctgaggagcctgagatcagggctttcgaccccgaggcggcagcagttcaaccataccaggaccagacttatcagagtgtatattttgtctccgagtcttttagcgacgctaaggataagctccgatcttacgcaagcagaatacagaggcccttttctgtgaagttcgacccctatacactcgcaatcgatgtgctggactctccacaggctgtgcgccgtagccttgagggcgtgcaggacgaattggataccctagcacatgccctttcagctattggttag

SEQ ID NO: 261513 - DNA, 1910 bp, Artificial Sequence
  derived and/or modified sequence
cggacctccacactgagccatgcccacccccgacgccaccacgccacaggccaagggcttccgcagggccgtgtctgagctggacgccaagcaggcagaggccatcatggtaagagggcagggcgccccggggcccagcctcacaggctctccgtggcctggaactgcagccccagctgcatcctacacccccaccccaaggtccccgcggttcattgggcgcaggcagagcctcatcgaggacgcccgcaaggagcgggaggcggcggtggcagcagcggccgctgcagtcccctcggagcccggggaccccctggaggctgtggcctttgaggagaaggaggggaaggccgtgctaaacctgctcttctccccgagggccaccaagccctcggcgctgtcccgagctgtgaaggtgtttgagacgtttgaagccaaaatccaccatctagagacccggcccgcccagaggccgcgagctgggggcccccacctggagtacttcgtgcgcctcgaggtgcgccgaggggacctggccgccctgctcagtggtgtgcgccaggtgtcagaggacgtgcgcagccccgcggggcccaaggtcccctggttcccaagaaaagtgtcagagctggacaagtgtcatcacctggtcaccaagttcgaccctgacctggacttggaccacccgggcttctcggaccaggtgtaccgccagcgcaggaagctgattgctgagatcgccttccagtacaggcacggcgacccgattccccgtgtggagtacaccgccgaggagattgccacctggaaggaggtctacaccacgctgaagggcctctacgccacgcacgcctgcggggagcacctggaggcctttgctttgctggagcgcttcagcggctaccgggaagacaatatcccccagctggaggacgtctcccgcttcctgaaggagcgcacgggcttccagctgcggcctgtggccggcctgctgtccgcccgggacttcctggccagcctggccttccgcgtgttccagtgcacccagtatatccgccacgcgtcctcgcccatgcactcccctgagccggactgctgccacgagctgctggggcacgtgcccatgctggccgaccgcaccttcgcgcagttctcgcaggacattggcctggcgtccctgggggcctcggatgaggaaattgagaagctgtccacgctgtactggttcacggtggagttcgggctgtgtaagcagaacggggaggtgaaggcctatggtgccgggctgctgtcctcctacggggagctcctgcactgcctgtctgaggagcctgagattcgggccttcgaccctgaggctgcggccgtgcagccctaccaagaccagacgtaccagtcagtctacttcgtgtctgagagcttcagtgacgccaaggacaagctcaggagctatgcctcacgcatccagcgccccttctccgtgaagttcgacccgtacacgctggccatcgacgtgctggacagcccccaggccgtgcggcgctccctggagggtgtccaggatgagctggacacccttgcccatgcgctgagtgccattggctaggtgcacggcgtccctgagggcccttcccaacctcccctggtcctgcactgtcccggagctcaggccctggtgaggggctgggtcccgggtgccccccatgccctccctgctgccaggctcccactgcccctgcacctgcttctcagcgcaacagctgtgtgtgcccgtggtgaggttgtgctgcctgtggtgaggtcctgtcctggctcccagggtcctgggggctgctgcactgccctccgcccttccctgacactgtctgctgccccaatcaccgtcacaataaaagaaactgtggtctcta

SEQ ID NO: 261514 - protein, 524 aa, Artificial Sequence
  derived and/or modified sequence
MPTPDATTPQAKGFRRAVSELDAKQAEAIMGAPGPSLTGSPWPGTAAPAASYTPTPRSPRFIGRRQSLIEDARKEREAAVAAAAAAVPSEPGDPLEAVAFEEKEGKAVLNLLFSPRATKPSALSRAVKVFETFEAKIHHLETRPAQRPRAGGPHLEYFVRLEVRRGDLAALLSGVRQVSEDVRSPAGPKVPWFPRKVSELDKCHHLVTKFDPDLDLDHPGFSDQVYRQRRKLIAEIAFQYRHGDPIPRVEYTAEEIATWKEVYTTLKGLYATHACGEHLEAFALLERFSGYREDNIPQLEDVSRFLKERTGFQLRPVAGLLSARDFLASLAFRVFQCTQYIRHASSPMHSPEPDCCHELLGHVPMLADRTFAQFSQDIGLASLGASDEEIEKLSTLYWFTVEFGLCKQNGEVKAYGAGLLSSYGELLHCLSEEPEIRAFDPEAAAVQPYQDQTYQSVYFVSESFSDAKDKLRSYASRIQRPFSVKFDPYTLAIDVLDSPQAVRRSLEGVQDELDTLAHALSAIG

SEQ ID NO: 261515 - DNA, 1575 bp, Artificial Sequence
  derived and/or modified sequence
atgcccacccccgacgccaccaccccccaggccaagggcttcagaagagccgtgagcgagctggacgccaagcaggccgaggccatcatgggcgcccccggccccagcctgaccggcagcccctggcccggcaccgccgcccccgccgccagctacacccccacccccagaagccccagattcatcggcagaagacagagcctgatcgaggacgccagaaaggagagagaggccgccgtggccgccgccgccgccgccgtgcccagcgagcccggcgaccccctggaggccgtggccttcgaggagaaggagggcaaggccgtgctgaacctgctgttcagccccagagccaccaagcccagcgccctgagcagagccgtgaaggtgttcgagaccttcgaggccaagatccaccacctggagaccagacccgcccagagacccagagccggcggcccccacctggagtacttcgtgagactggaggtgagaagaggcgacctggccgccctgctgagcggcgtgagacaggtgagcgaggacgtgagaagccccgccggccccaaggtgccctggttccccagaaaggtgagcgagctggacaagtgccaccacctggtgaccaagttcgaccccgacctggacctggaccaccccggcttcagcgaccaggtgtacagacagagaagaaagctgatcgccgagatcgccttccagtacagacacggcgaccccatccccagagtggagtacaccgccgaggagatcgccacctggaaggaggtgtacaccaccctgaagggcctgtacgccacccacgcctgcggcgagcacctggaggccttcgccctgctggagagattcagcggctacagagaggacaacatcccccagctggaggacgtgagcagattcctgaaggagagaaccggcttccagctgagacccgtggccggcctgctgagcgccagagacttcctggccagcctggccttcagagtgttccagtgcacccagtacatcagacacgccagcagccccatgcacagccccgagcccgactgctgccacgagctgctgggccacgtgcccatgctggccgacagaaccttcgcccagttcagccaggacatcggcctggccagcctgggcgccagcgacgaggagatcgagaagctgagcaccctgtactggttcaccgtggagttcggcctgtgcaagcagaacggcgaggtgaaggcctacggcgccggcctgctgagcagctacggcgagctgctgcactgcctgagcgaggagcccgagatcagagccttcgaccccgaggccgccgccgtgcagccctaccaggaccagacctaccagagcgtgtacttcgtgagcgagagcttcagcgacgccaaggacaagctgagaagctacgccagcagaatccagagacccttcagcgtgaagttcgacccctacaccctggccatcgacgtgctggacagcccccaggccgtgagaagaagcctggagggcgtgcaggacgagctggacaccctggcccacgccctgagcgccatcggctag

SEQ ID NO: 261516 - DNA, 1575 bp, Artificial Sequence
  derived and/or modified sequence
atgcccactcccgatgcaacgacacctcaggccaagggctttaggagagcagtgagcgagctggacgcaaagcaggctgaggctattatgggtgccccgggtccttctctgaccggcagcccctggcctgggaccgctgccccagctgcttcatacacaccaacaccacgcagtccccgctttatcggcaggcgtcagtccctcatagaagacgcaagaaaagagcgtgaggcagccgtcgccgcggccgccgccgccgttccgagcgagcccggcgaccctttggaagcagtcgcattcgaggagaaggaagggaaggcagtgttgaacctgctattctcccctagggctacaaaaccgtcagcgctgtcacgcgcggtgaaggtgtttgaaacattcgaagctaaaattcatcacctggaaacccggccggcccaaagaccacgggctggagggccacacctggaatacttcgttcgacttgaagtccgccggggcgacctcgctgctcttcttagcggggtccgccaggtgagtgaagatgtccggtccccagcaggacctaaagtgccctggttccccaggaaggtgtcagaactggacaagtgtcaccatctggtgactaaattcgaccccgatttagacctggatcatcccggatttagtgaccaagtgtataggcagaggcggaagcttatagctgagatcgcattccagtaccgacacggggaccctatcccacgcgttgaatacaccgccgaagagattgctacatggaaagaggtttatacaactctgaagggcctttacgctacacatgcctgcggtgaacacctggaagcttttgccctcctagaaaggttttccggatacagagaggataacatacctcagcttgaggatgttagtcgtttcctcaaggagagaacggggttccaactgcggcccgtggccgggctcctgagcgcgcgtgactttctggccagcctcgcttttcgagtgttccagtgcactcagtacattaggcacgcctccagtcctatgcattccccagagcccgattgctgccatgagctgcttggacatgtgcctatgctggccgacagaacctttgctcagtttagccaggacatcggactcgccagtctcggcgcctccgatgaagagatcgaaaagttatctacattgtactggtttaccgtagagtttggactctgcaagcaaaatggcgaagtcaaggcatatggagcaggactacttagttcctacggagagctacttcattgccttagcgaggagccggagatcagagcattcgaccccgaagctgcagccgtgcagccctaccaggatcagacctatcaatccgtctactttgtgagtgaaagcttttccgacgccaaagacaagctccgaagctatgctagtagaattcaacggcccttcagcgttaagtttgacccatatactttggctattgacgttttagactcccctcaggccgttaggcgctcactagagggtgtgcaggacgaactcgacactttagctcacgcactgagcgccatcggatag

SEQ ID NO: 261517 - DNA, 1575 bp, Artificial Sequence
  derived and/or modified sequence
atgcccaccccagatgccaccaccccccaggccaagggcttcagaagagctgtgtctgagctggatgccaagcaggccgaggccatcatgggcgcccctggccccagcctgaccggcagcccctggccaggcacagctgccccagctgccagctacacccccacccccaggagcccccgcttcatcggccggcggcagagcctgattgaagatgccaggaaggagcgggaggccgctgtggccgctgctgctgctgctgtgcccagcgagcccggggaccccctggaggccgtggcctttgaggagaaggagggcaaggctgtgctgaacctgctcttcagcccccgggccaccaagcccagcgccctgagcagagctgtgaaggtgtttgagacctttgaggccaagatccaccacctggagaccaggcctgcccagaggccccgggccggcggcccccacctggagtactttgtgcggctggaggtgcggcggggggacctggccgccctgctgtctggagtgcggcaggtgtctgaagatgtgcgcagccctgctggccccaaggtgccctggttccccaggaaggtgtctgagctggacaagtgccaccacctggtgaccaagtttgatcctgacctggacctggaccaccctggcttcagtgaccaggtgtaccggcagaggaggaagctgattgctgagatcgccttccagtaccgccacggggaccccatcccccgggtggagtacacagctgaggagatcgccacctggaaggaggtgtacaccaccctgaagggcctgtatgccacccacgcctgtggggagcacctggaggcctttgccctgctggagcgcttcagcggctaccgggaggacaacatcccccagctggaggatgtgagccgcttcctgaaggagaggacaggcttccagctgcggcctgtggccggcctgctgagcgcccgggacttcctggccagcctggccttccgggtcttccagtgcacccagtacatcagacatgccagcagccccatgcacagccctgagccagactgctgccacgagctgctgggccacgtgcccatgctggccgacaggacctttgcccagttcagccaggacatcggcctggccagcctgggcgccagtgatgaggagattgagaagctgagcaccctgtactggttcaccgtggagtttggcctgtgcaagcagaatggagaggtgaaggcctatggagctggcctgctgagcagctatggagagctgctgcactgcctgtctgaggagcctgagatccgggcctttgatcctgaggccgctgctgtgcagccctaccaggaccagacctaccagagcgtgtactttgtgtctgagagcttcagtgatgccaaggacaagctgcggagctatgccagccgcatccagaggcccttctctgtgaagtttgacccctacaccctggccattgatgtgctggacagcccccaggccgtgagaagaagcctggagggcgtgcaggatgagctggacaccctggcccacgccctgagcgccatcggctag

SEQ ID NO: 261518 - DNA, 1575 bp, Artificial Sequence
  derived and/or modified sequence
atgcccacccccgacgccaccaccccccaggccaagggcttccggagagccgtcagtgaactggacgcaaaacaggccgaagctattatgggtgctccaggtccctctttaacaggcagtccttggcctgggactgccgctcccgcagcctcatatacgccaacccctagatccccccgatttatcggcagacgacagtcgcttatcgaagacgccaggaaggagcgcgaggctgcggtggctgcggcagctgccgcggtgccttctgagcccggagatccccttgaagccgtcgcttttgaggagaaagaagggaaggcggttctaaatctactgtttagcccacgcgctacgaagccaagtgccctctcaagagccgtaaaggtattcgagacctttgaggccaagattcatcatctggaaaccagacctgcacagaggcctcgggcaggggggccccacctcgagtattttgttcgtttggaagtgaggagaggtgacctggccgccttattgagcggtgtgcgtcaagtgagtgaggacgttcgtagcccagccggaccgaaagtgccctggtttcctcggaaggtgagcgagctggacaagtgtcaccaccttgtcacgaagtttgacccagatctggacttggaccaccctggcttcagcgaccaggtgtatcggcagaggcgcaagctcatcgctgaaatcgcctttcaataccggcatggagatccaatcccccgcgttgaatatacggccgaagagattgccacatggaaggaggtctatactaccctgaaagggctttatgctacacacgcttgtggcgaacatttggaagcttttgcattattagaacggttcagtggatacagagaggacaacattccgcaacttgaagatgtttctcgctttttgaaagaacgaacaggtttccagctcaggccagtcgccgggctgctcagtgcccgggactttctggctagtctggcttttcgagtgttccaatgcacacagtacatccgccacgcctcgagtcccatgcattcccccgagcctgactgctgccatgaattgctgggccacgtgccaatgctggctgacaggacgtttgctcagttctcccaggacatcggtctcgcttccttaggcgcctccgacgaggaaatcgagaagctctcaactctatactggttcacggtagagtttggactgtgcaagcagaatggagaggtgaaggcctacggtgccggtctgctgtcaagttacggcgaactcctacactgtttaagcgaggagcccgagattcgggccttcgacccagaggcagccgctgttcaaccttaccaggaccagacctaccagtcggtatactttgtcagcgagtccttttctgacgccaaagataaactgcgcagttatgcatcacgcattcagcgaccctttagcgtaaaattcgatccctacacactcgctattgatgttctggacagtccccaggctgtccgacgctccctggaaggggtccaggacgaactggacaccttggcgcacgcgttatccgccatcggctag

SEQ ID NO: 261519 - DNA, 1575 bp, Artificial Sequence
  derived and/or modified sequence
atgcctacccctgacgccaccactccacaagctaaagggtttcgccgagctgtttcggagctcgatgctaagcaggcagaggccatcatgggcgcacctggcccatcacttaccggtagcccatggccaggcactgctgcccctgctgcatcttacacccctacccctaggtcccccagattcattggcagacggcagagcctaattgaggacgcccgaaaggaacgagaagcagctgtggctgccgcagctgcagccgtgccctctgagcctggtgatccactggaagctgtagccttcgaagagaaagaaggcaaagctgtgctaaatcttttgtttagccctagagctacaaagccctctgcactgagccgagctgtcaaagtgtttgagactttcgaggcaaagattcaccatctagagactagacctgcccaaagacctagggctggcggtccccatctggagtacttcgtccgacttgaagtgcgtaggggcgatttagctgcgctattatcgggcgtgcgccaggtttctgaagatgtcagaagccccgcaggacctaaggtgccgtggttccccagaaaagtgtccgagctagataagtgtcatcacctggtgaccaagtttgatcctgacctggatcttgatcaccctggattctcggaccaggtgtacagacagaggcggaagctgattgccgagatcgccttccaataccgccatggggaccctattccacgcgttgaatacactgctgaggaaatagctacatggaaggaagtatatactacccttaaagggctttacgccacccacgcttgtggcgagcatctggaagcctttgccctgcttgagcgcttcagtggataccgagaggataacattccacagctggaagatgtgtcgcggttccttaaagagaggaccggattccagctccgaccagtcgcaggacttctaagtgctagggactttttggccagtttagcattccgcgttttccagtgcacacagtatatacgccatgccagctctccaatgcactctcctgagcctgactgttgtcacgagctgttgggtcacgtgccaatgcttgctgataggacatttgcccagttctcccaagacatcggtctggcctctctaggggcttccgatgaggaaattgaaaagctctcaacactgtactggtttaccgtggagtttggactttgcaagcaaaacggggaagtaaaggcatatggcgctgggctgttatcctcttacggggaactgttacattgtctttcagaagaacccgagatccgggcatttgaccctgaagccgcagctgtgcaaccttaccaagatcaaacttaccagtctgtgtactttgtgagcgagagcttctctgatgctaaagacaagttgcggtcatatgccagtagaattcagaggcccttttccgtgaaattcgacccgtatacactggctatagacgtgctggactctccgcaagcagtccgcagaagtctcgaaggggtgcaggatgagttagacaccctcgcccatgctctctctgccatcgggtag

SEQ ID NO: 261520 - DNA, 1898 bp, Artificial Sequence
  derived and/or modified sequence
cggacctccacactgagccatgcccacccccgacgccaccacgccacaggccaagggcttccgcagggccgtgtctgagctggacgccaagcaggcagaggccatcatgggcgccccggggcccagcctcacaggctctccgtggcctggaactgcagccccagctgcatcctacacccccaccccaaggtccccgcggttcattgggcgcaggcagagcctcatcgaggacgcccgcaaggagcgggaggcggcggtggcagcagcggccgctgcagtcccctcggagcccggggaccccctggaggctgtggcctttgaggagaaggaggggaaggccgtgctaaacctgctcttctccccgagggccaccaagccctcggcgctgtcccgagctgtgaaggtgtttgagacgtttgaagccaaaatccaccatctagagacccggcccgcccagaggccgcgagctgggggcccccacctggagtacttcgtgcgcctcgaggtgcgccgaggggacctggccgccctgctcagtggtgtgcgccaggtgtcagaggacgtgcgcagccccgcggggcccaaggtcccctggttcccaagaaaagtgtcagagctggacaagtgtcatcacctggtcaccaagttcgaccctgacctggacttggaccacccgggcttctcggaccaggtgtaccgccagcgcaggaagctgattgctgagatcgccttccagtacaggcacggcgacccgattccccgtgtggagtacaccgccgaggagattgccacctggaaggaggtctacaccacgctgaagggcctctacgccacgcacgcctgcggggagcacctggaggcctttgctttgctggagcgcttcagcggctaccgggaagacaatatcccccagctggaggacgtctcccgcttcctgaaggagcgcacgggcttccagctgcggcctgtggccggcctgctgtccgcccgggacttcctggccagcctggccttccgcgtgttccagtgcacccagtatatccgccacgcgtcctcgcccatgcactcccctgagccggactgctgccacgagctgctggggcacgtgcccatgctggccgaccgcaccttcgcgcagttctcgcaggacattggcctggcgtccctgggggcctcggatgaggaaattgagaagctgtccacgctgtactggttcacggtggagttcgggctgtgtaagcagaacggggaggtgaaggcctatggtgccgggctgctgtcctcctacggggagctcctgcactgcctgtctgaggagcctgagattcgggccttcgaccctgaggctgcggccgtgcagccctaccaagaccagacgtaccagtcagtctacttcgtgtctgagagcttcagtgacgccaaggacaagctcaggagctatgcctcacgcatccagcgccccttctccgtgaagttcgacccgtacacgctggccatcgacgtgctggacagcccccaggccgtgcggcgctccctggagggtgtccaggatgagctggacacccttgcccatgcgctgagtgccattggctaggtgcacggcgtccctgagggcccttcccaacctcccctggtcctgcactgtcccggagctcaggccctggtgaggggctgggtcccgggtgccccccatgccctccctgctgccaggctcccactgcccctgcacctgcttctcagcgcaacagctgtgtgtgcccgtggtgaggttgtgctgcctgtggtgaggtcctgtcctggctcccagggtcctgggggctgctgcactgccctccgcccttccctgacactgtctgctgccccaatcaccgtcacaataaaagaaactgtggtctcta

SEQ ID NO: 261521 - protein, 571 aa, Artificial Sequence
  derived and/or modified sequence
MRALRDRAGLLLCVLLLAALLEAALGLPVKKPRLRGPRPGSLTRLAEVSASPDPRPLKEEEEAPLLPRTHLQAEPHQHGCWTVTEPAAMTPGNATPPRTPEVTPLRLELQKLPGLANTTLSTPNPDTQASASPDPRPLREEEEARLLPRTHLQAELHQHGCWTVTEPAALTPGNATPPRTQEVTPLLLELQKLPELVHATLSTPNPDNQVTIKVVEDPQAEVSIDLLAEPSNPPPQDTLSWLPALWSFLWGDYKGEEKDRAPGEKGEEKEEDEDYPSEDIEGEDQEDKEEDEEEQALWFNGTTDNWDQGWLAPGDWVFKDSVSYDYEPQKEWSPWSPCSGNCSTGKQQRTRPCGYGCTATETRTCDLPSCPGTEDKDTLGLPSEEWKLLARNATDMHDQDVDSCEKWLNCKSDFLIKYLSQMLRDLPSCPCAYPLEAMDSPVSLQDEHQGRSFRWRDASGPRERLDIYQPTARFCLRSMLSGESSTLAAQHCCYDEDSRLLTRGKGAGMPNLISTDFSPKLHFKFDTTPWILCKGDWSRLHAVLPPNNGRACTDNPLEEEYLAQLQEAKEY

SEQ ID NO: 261522 - protein, 490 aa, Artificial Sequence
  derived and/or modified sequence
MRALRDRAGLLLCVLLLAALLEAALGLPVKKPRLRGPRPGSLTRLAEVSASPDPRPLKEEEEAPLLPRTHLQAEPHQHGCWTVTEPAAMTPGNATPPRTPEVTPLRLELQKLPGLANTTLSTPNPDTQVTIKVVEDPQAEVSIDLLAEPSNPPPQDTLSWLPALWSFLWGDYKGEEKDRAPGEKGEEKEEDEDYPSEDIEGEDQEDKEEDEEEQALWFNGTTDNWDQGWLAPGDWVFKDSVSYDYEPQKEWSPWSPCSGNCSTGKQQRTRPCGYGCTATETRTCDLPSCPGTEDKDTLGLPSEEWKLLARNATDMHDQDVDSCEKWLNCKSDFLIKYLSQMLRDLPSCPCAYPLEAMDSPVSLQDEHQGRSFRWRDASGPRERLDIYQPTARFCLRSMLSGESSTLAAQHCCYDEDSRLLTRGKGAGMPNLISTDFSPKLHFKFDTTPWILCKGDWSRLHAVLPPNNGRACTDNPLEEEYLAQLQEAKEY

SEQ ID NO: 261523 - protein, 490 aa, Artificial Sequence
  derived and/or modified sequence
MRALRDRAGLLLCVLLLAALLEAALGLPVKKPRLRGPRPGSLTRLAEASASPDPRPLREEEEARLLPRTHLQAELHQHGCWTVTEPAALTPGNATPPRTQEVTPLLLELQKLPELVHATLSTPNPDNQVTIKVVEDPQAEVSIDLLAEPSNPPPQDTLSWLPALWSFLWGDYKGEEKDRAPGEKGEEKEEDEDYPSEDIEGEDQEDKEEDEEEQALWFNGTTDNWDQGWLAPGDWVFKDSVSYDYEPQKEWSPWSPCSGNCSTGKQQRTRPCGYGCTATETRTCDLPSCPGTEDKDTLGLPSEEWKLLARNATDMHDQDVDSCEKWLNCKSDFLIKYLSQMLRDLPSCPCAYPLEAMDSPVSLQDEHQGRSFRWRDASGPRERLDIYQPTARFCLRSMLSGESSTLAAQHCCYDEDSRLLTRGKGAGMPNLISTDFSPKLHFKFDTTPWILCKGDWSRLHAVLPPNNGRACTDNPLEEEYLAQLQEAKEY

SEQ ID NO: 261524 - DNA, 1716 bp, Artificial Sequence
  derived and/or modified sequence
atgcgcgctcttcgggaccgcgcaggactgttgctgtgcgtcctgctgttagccgctctgctggaagcggcgctgggccttcccgttaaaaagccacggctgcgcggtccacgcccaggctccctcacccgtctcgctgaagtgagcgccagtccagacccaagacctctaaaggaggaggaggaggccccactccttccaagaacccatttgcaggcagaaccacatcagcatgggtgttggacggttacagaacccgcagctatgacgcccggcaacgctacccctccccggacaccagaagtgaccccactcaggctggagctccagaagttgcctgggctggctaacacaaccctttcaaccccgaatccagacacccaggctagcgcttcgcccgatcctagaccactgcgggaggaagaggaggccaggttgctcccgcgcactcacctccaggccgagttacatcagcacggatgctggacagtcaccgagcctgccgcactcacacccggcaatgcaacccccccccgcacgcaggaggtcacccctctcctattagagctacaaaagttaccagaacttgtccatgctacattatcaactcccaacccggacaatcaagttactatcaaagttgtggaggatccccaggcagaggtgtccattgacctcttggcagaacccagtaaccctcccccacaggataccctgagttggctgccagcactgtggtccttcttgtggggcgactataagggtgaagagaaagatagagctccaggagagaagggcgaagaaaaagaggaggatgaggactacccttctgaagacatcgagggagaggatcaggaagacaaagaagaagacgaagaggaacaggctctctggttcaatggtactacagacaactgggaccaagggtggctggcccctggagattgggtatttaaagactcagttagctatgattacgaaccacagaaggaatggagcccttggtcaccttgttctggtaattgctccacaggtaagcagcagcggactcgcccatgcgggtacggctgtactgcgacagaaactcggacatgtgatttgccctcctgtcccggtaccgaagataaggatactctgggactaccaagtgaggaatggaaactgttggctagaaacgctaccgacatgcacgatcaagatgtggacagctgtgaaaaatggcttaactgtaagagcgatttcttaatcaagtacctctcacagatgctacgcgacttgccctcttgtccgtgcgcctatcctctggaagccatggactcacccgtgagcctgcaggatgaacaccaagggcggtcattccgctggagagatgcctcaggacctagagaacgcttagacatctaccagccaacggctcgcttctgcttgcggagcatgttatcaggggagtcttcaaccctcgcagcccagcattgttgttatgatgaggatagtcgtctattgacgagaggaaaaggcgccggtatgcccaatctaatcagtaccgattttagccctaagctgcattttaagttcgacacgacaccttggatcttatgcaagggcgattggtcaaggctgcatgccgttcttcctccgaacaatggtcgtgcttgtactgataatccactggaagaggaatatttggctcagctgcaggaggccaaagagtactag

SEQ ID NO: 261525 - DNA, 2971 bp, Artificial Sequence
  derived and/or modified sequence
gactgggttcgcggccgcgtgcagaggtgcaggcagagcagcctcggaaccgagacgatgcgtgcgctccgcgaccgagccgggctcctcctctgcgtgctgctgctggcggcgctgctggaggcggcgctagggctccccgtgaagaagccgcggctccgcggaccacggcctgggagcctcacgaggctcgcagaggtctcagcctccccagatcctaggcctctgaaggaagaggaggaggcaccactgctccccagaacccacctgcaggcagagccacaccaacatggatgctggactgtcactgagccagcagccatgaccccaggcaacgccacccctcccaggaccccagaggttactccgttgcggctggagctgcagaagctgccgggattggccaacacaaccttgagtacccctaaccctgatacccaggcttcagcctccccagatcctaggcctctgagggaagaggaggaggcacgactgctccccagaacccacctgcaggcagagctacaccaacatggatgttggactgtcactgagccagcagccctgaccccagggaatgccacgcctcccaggacccaggaggttactcccttgctgctggagctgcagaagctgccagaattggtccacgcaaccttgagtacccctaaccctgataaccaggtgaccatcaaggtggtggaggacccccaggccgaggtgtcgatagacctgttggctgagcccagcaatcccccgccccaggatacccttagctggctgcccgccctctggtccttcctctggggagactacaaaggagaggaaaaagacagggccccaggggagaagggggaggaaaaggaggaagacgaggactatccttcagaggatatcgagggtgaggatcaagaggacaaagaggaagatgaggaagagcaggcgctctggttcaatggaactacagacaactgggaccagggctggctggcccccggggattgggtcttcaaggattctgtcagctacgactatgagcctcagaaggagtggagtccctggtctccctgcagtgggaactgcagcactggcaagcagcagaggactcggccctgtggctatggctgcactgccaccgagacccgtacctgtgacctgccctcctgtcctggcactgaggacaaggacaccttgggcctccccagtgaggagtggaagctcctggcccgcaatgctacggacatgcatgatcaagatgtggacagctgtgagaagtggctgaactgcaagagcgacttcctaatcaagtatctgagccagatgctgcgggacctgcccagctgcccgtgtgcctacccactggaggccatggacagccctgtgagcctacaggacgagcaccagggccgcagcttccggtggagggatgccagtggccctcgcgagcgcctggacatctaccagcccacggcgcgcttctgcctgcgttccatgctgtctggggagagcagcacactggccgcccagcactgctgctatgacgaggacagccggctgctgacccgtggcaagggcgccggcatgcccaacctcatcagcaccgacttctcacctaagctgcacttcaagttcgacacgacgccctggatcctgtgcaagggggactggagccgcctccacgctgtgctccctcccaacaacggccgagcctgcaccgacaaccccctggaggaggagtacctagcacagttgcaggaggccaaggagtactagtgacggggttgctgaacagacactgcagggagagggcaggcggctgctgctgttgcacgggagaactttcctcacccgcccctgcccagacagggtgaggaaagggctcccccagtgaggttggtccgaggctgtgtgccctctgccagcgaccccgaagcagatatctcagtggggttagtgagaaggttgaagggtatgtagggcccagggtgggtgtccctgggagccctggaaatgtgcatatgtgcatgtgtctgccggggcctccctctgctgcctgctgggaccctggccactcatttttctcctccttgggagctgggctcttctgccctggctctgcacataagtgttagccagcagctccagaaaaatcccgattcccgggatctgccacgagtcactcctactccaccctgatggccagcagaggaagggccactcttctcatgggcacagccatcctttgccggggggggcatccagcctgggtggccacccctccttatctctgggtggtgcacatgcccttctttccccactccctgccacgagccactgcacaggaggctatctgtagccccaagctgcctttctgttggacaccaactttagtcttgggctgcaagccagcccagctgaggcgaagtggactccaggcagggaatgggttgcccaattctggtccctttcctttgctcagccccctctgttctgctgattgtagggatgtgcagggctgggagttggcactccccccgagtggggaggtgacagcttgtcacagtagccaggcttgggtgggttcagcactagctcgggacggtgtgtcacacgtctatagtaaaccagttctctgggaggggaaaaaagccctgatttattgcatttgggcagcttctgtggtgtaaattctcccagcagtgtcccatgtcatgctgccagcatcactgaatgcactgaactcagagttgggaagagatgcacataatcgctctcccggcacacctcatgcctcttccctgcctccccattcccctggctgcacttccttgccttctatggggttgaaatattgaagtctcaactgtctctgttcacaagagccaccaaaagttaggggacttcagtcctagcccccagatggccgccctgaagctctctgggctcctcagcaataaagcactttattttc

SEQ ID NO: 261526 - DNA, 3042 bp, Artificial Sequence
  derived and/or modified sequence
agagcagcctcggaaccgagacgatgcgtgcgctccgcgaccgagccgggctcctcctctgcgtgctgctgctggcggcgctgctggaggcggcgctagggctccccgtgaagaagccgcggctccgcggaccacggcctgggagcctcacgaggctcgcagagccccctttccaggtgcgcgctagctcggagaggagtcccgccggtgcgaggaatctggcgctttgcggagtggcgggccagggccgctgaggttcaaacggtcaggtctcagcctccccagatcctaggcctctgaaggaagaggaggaggcaccactgctccccagaacccacctgcaggcagagccacaccaacatggatgctggactgtcactgagccagcagccatgaccccaggcaacgccacccctcccaggaccccagaggttactccgttgcggctggagctgcagaagctgccgggattggccaacacaaccttgagtacccctaaccctgatacccaggcttcagcctccccagatcctaggcctctgagggaagaggaggaggcacgactgctccccagaacccacctgcaggcagagctacaccaacatggatgttggactgtcactgagccagcagccctgaccccagggaatgccacgcctcccaggacccaggaggttactcccttgctgctggagctgcagaagctgccagaattggtccacgcaaccttgagtacccctaaccctgataaccaggtgaccatcaaggtggtggaggacccccaggccgaggtgtcgatagacctgttggctgagcccagcaatcccccgccccaggatacccttagctggctgcccgccctctggtccttcctctggggagactacaaaggagaggaaaaagacagggccccaggggagaagggggaggaaaaggaggaagacgaggactatccttcagaggatatcgagggtgaggatcaagaggacaaagaggaagatgaggaagagcaggcgctctggttcaatggaactacagacaactgggaccagggctggctggcccccggggattgggtcttcaaggattctgtcagctacgactatgagcctcagaaggagtggagtccctggtctccctgcagtgggaactgcagcactggcaagcagcagaggactcggccctgtggctatggctgcactgccaccgagacccgtacctgtgacctgccctcctgtcctggcactgaggacaaggacaccttgggcctccccagtgaggagtggaagctcctggcccgcaatgctacggacatgcatgatcaagatgtggacagctgtgagaagtggctgaactgcaagagcgacttcctaatcaagtatctgagccagatgctgcgggacctgcccagctgcccgtgtgcctacccactggaggccatggacagccctgtgagcctacaggacgagcaccagggccgcagcttccggtggagggatgccagtggccctcgcgagcgcctggacatctaccagcccacggcgcgcttctgcctgcgttccatgctgtctggggagagcagcacactggccgcccagcactgctgctatgacgaggacagccggctgctgacccgtggcaagggcgccggcatgcccaacctcatcagcaccgacttctcacctaagctgcacttcaagttcgacacgacgccctggatcctgtgcaagggggactggagccgcctccacgctgtgctccctcccaacaacggccgagcctgcaccgacaaccccctggaggaggagtacctagcacagttgcaggaggccaaggagtactagtgacggggttgctgaacagacactgcagggagagggcaggcggctgctgctgttgcacgggagaactttcctcacccgcccctgcccagacagggtgaggaaagggctcccccagtgaggttggtccgaggctgtgtgccctctgccagcgaccccgaagcagatatctcagtggggttagtgagaaggttgaagggtatgtagggcccagggtgggtgtccctgggagccctggaaatgtgcatatgtgcatgtgtctgccggggcctccctctgctgcctgctgggaccctggccactcatttttctcctccttgggagctgggctcttctgccctggctctgcacataagtgttagccagcagctccagaaaaatcccgattcccgggatctgccacgagtcactcctactccaccctgatggccagcagaggaagggccactcttctcatgggcacagccatcctttgccggggggggcatccagcctgggtggccacccctccttatctctgggtggtgcacatgcccttctttccccactccctgccacgagccactgcacaggaggctatctgtagccccaagctgcctttctgttggacaccaactttagtcttgggctgcaagccagcccagctgaggcgaagtggactccaggcagggaatgggttgcccaattctggtccctttcctttgctcagccccctctgttctgctgattgtagggatgtgcagggctgggagttggcactccccccgagtggggaggtgacagcttgtcacagtagccaggcttgggtgggttcagcactagctcgggacggtgtgtcacacgtctatagtaaaccagttctctgggaggggaaaaaagccctgatttattgcatttgggcagcttctgtggtgtaaattctcccagcagtgtcccatgtcatgctgccagcatcactgaatgcactgaactcagagttgggaagagatgcacataatcgctctcccggcacacctcatgcctcttccctgcctccccattcccctggctgcacttccttgccttctatggggttgaaatattgaagtctcaactgtctctgttcacaagagccaccaaaagttaggggacttcagtcctagcccccagatggccgccctgaagctctctgggctcctcagcaataaagcactttattttc

SEQ ID NO: 261527 - DNA, 1716 bp, Artificial Sequence
  derived and/or modified sequence
atgagggccctgcgggaccgggccggcctgctgctgtgtgtgctgctgctggccgccctgctggaggccgccctgggcctgcctgtgaagaagccccggctgcggggccccaggcctggcagcctgacccggctggccgaggtgtctgccagcccagacccccggcccctgaaggaggaggaggaggcccccctgctgcccaggacccacctgcaggccgagccccaccagcacggctgctggacagtgacagagcctgctgccatgaccccaggaaatgccaccccacccaggaccccagaggtgacccccctgcggctggagctgcagaagctgcccggcctggccaacaccaccctgagcacccccaacccagacacccaggccagcgccagcccagacccccggcccctgcgggaggaggaggaggcccggctgctgcccaggacccacctgcaggccgagctgcaccagcacggctgctggacagtgacagagcctgctgccctgaccccaggaaatgccaccccacccaggacccaggaggtgacccccctgctgctggagctgcagaagctgcctgagctggtgcacgccaccctgagcacccccaacccagacaaccaggtgaccatcaaggtggtggaggacccccaggccgaggtgtccattgacctgctggccgagcccagcaaccccccaccccaggacaccctgtcctggctgcctgccctgtggagcttcctgtggggagactacaagggggaggagaaggaccgggcccctggagagaagggggaggagaaggaggaggatgaggactaccccagcgaggacatcgagggggaggaccaggaggacaaggaggaggatgaggaggagcaggccctgtggttcaacggcaccacagacaactgggaccagggctggctggcccctggggactgggtgttcaaggacagcgtgtcctatgactatgagccccagaaggagtggagcccctggagcccctgcagcggcaactgcagcacaggcaagcagcagaggacccggccctgtggctacggctgcacagccacagagaccaggacctgtgacctgcccagctgccctggaacagaggacaaggacaccctgggcctgcccagcgaggagtggaagctgctggccagaaatgccacagacatgcatgaccaggatgtggacagctgtgagaagtggctgaactgcaagagtgacttcctgatcaagtacctgagccagatgctgcgggacctgcccagctgcccctgtgcctaccccctggaggccatggacagccctgtgtccctgcaggatgagcaccagggccgctccttccgctggagagatgccagcggcccccgggagcggctggacatctaccagcccacagcccgcttctgcctgcgctccatgctgtctggagagagcagcaccctggccgcccagcactgctgctatgatgaggacagccggctgctgacccggggcaaaggagctggcatgcccaacctgatcagcacagacttcagccccaagctgcacttcaagtttgacaccaccccctggatcctgtgcaagggggactggagccggctgcatgctgtgctgccccccaacaacggccgggcctgcacagacaaccccctggaggaggagtacctggcccagctgcaggaggccaaggagtactag

SEQ ID NO: 261528 - DNA, 1716 bp, Artificial Sequence
  derived and/or modified sequence
atgcgggccctgcgggaccgggccggcctgctgctgtgcgtgctgttgctggcagcccttctagaagcagccctgggcctgcccgtgaaaaaacctcgtctgcgcggcccaaggccaggatctctgactcggctcgccgaggtcagtgcgtcccctgaccccagacctctgaaagaggaggaagaggcacctcttttgccacgcactcacctgcaagcagagcctcaccagcatgggtgttggactgtgacagaacccgccgcaatgacccctggcaatgctactcccccccggactccggaggttacccccctgagattggaactgcagaaactacctggcctcgcgaatacaactttgtccacaccgaaccccgacacccaggcctctgccagccccgaccctcggccacttcgcgaggaggaggaggcaaggttgctgcctcgcactcaccttcaggccgaactgcaccaacacggttgctggactgtgacagagccggccgccctgacccctggcaacgcaacccccccaaggacccaagaagtaacgcccctgctgttggagcttcagaaactgcctgagctggttcatgccacactgtccacacctaatccagataaccaggtgactatcaaggtagttgaagacccccaagctgaggtttcaattgacttgttggctgagccttccaatccaccgccacaggacacactgagctggctccctgcgctctggtcttttttatggggtgattacaaaggagaggagaaagatcgtgcccccggagaaaaaggcgaggagaaagaagaagatgaagattacccctccgaggacatcgagggggaggaccaggaggataaggaagaggatgaggaagaacaggccctgtggtttaatggcacgacggataattgggatcaggggtggcttgcccctggggattgggtgtttaaggacagtgtatcgtacgattacgagccgcagaaagagtggtctccctggtccccatgttcaggcaattgttctaccggtaagcaacagcgcaccaggccttgcggatacgggtgcaccgcgactgagacaaggacctgcgatcttccctcctgcccaggtaccgaggataaggacaccctaggactgcctagtgaagaatggaaactcctggccaggaacgcgacagatatgcacgaccaggacgttgattcttgtgaaaaatggttaaactgcaagagcgactttctgatcaaatatctttcacagatgctgcgagacctcccctcatgcccatgtgcttatccactcgaagcaatggattctcccgtgagtctgcaggatgagcatcaaggcagatcctttagatggcgcgatgcctcgggtcctcgcgaacgcctggatatataccagccaactgcacggttttgtctgcggtccatgttaagcggagaatcatctaccctcgcagcccagcattgctgctacgatgaggactcacgtctgctcactcgaggaaagggcgccggtatgccgaatctgattagcaccgactttagtcctaagctccattttaaatttgatactacgccctggatcctatgcaagggagattggtctcgccttcacgcagtcttgccacccaataacgggcgtgcctgcacagataacccgcttgaggaagagtatctggcccagttgcaggaggccaaggagtactag

SEQ ID NO: 261529 - DNA, 1716 bp, Artificial Sequence
  derived and/or modified sequence
atgagagccctgagggaccgagccggactgctcctgtgtgttctactgctggcggctctgctggaagccgctctcgggttgcccgtgaaaaagcctagactgagaggcccaagaccagggtccctcacaagactcgctgaagtttccgcaagtcctgatcctagacctttaaaggaggaggaagaggcaccacttctcccaaggacccatcttcaagctgaacctcaccaacacggctgttggaccgtaacagagccagccgctatgactcccggtaacgccaccccgcctaggactcctgaggtgactccactacgactagaactgcagaagctacccggactggctaacacaacactgagcacccctaatcctgatactcaggcatctgcatccccagatccgcgacctctcagggaagaagaagaagctcggctcctccccagaactcacttgcaagctgagcttcatcagcacggttgttggactgtcactgagcccgctgcgcttaccccaggcaacgcgactccaccgagaactcaggaagtgacaccattgctgctagagcttcaaaaactgcctgagctggtgcatgcgactctctcaaccccaaacccagacaaccaagtcacaattaaggtcgtcgaggacccccaagctgaggtatctatagacctcctggccgagccctctaatccaccccctcaggatactctgagttggcttccggcactgtggtcatttctgtggggcgactacaagggcgaggagaaagatcgggctccgggtgagaagggggaagaaaaagaggaggatgaggactacccttcagaagacatcgagggcgaggatcaggaggacaaggaggaggacgaagaagaacaagctctgtggtttaatggcactacagataactgggatcagggatggctggcacccggtgactgggtgttcaaagactctgtcagctacgactacgagccccagaaagaatggtctccctggagcccgtgttcgggcaattgctctactgggaagcagcagcggacaagaccctgtggttatggctgtacagccactgagacaagaacttgtgacttgccatcttgcccagggactgaggacaaggacaccctcggattgccctcagaagagtggaaactgttggccaggaacgctacagatatgcatgaccaagatgtggactcctgtgaaaagtggcttaactgcaaatccgattttctgatcaaatatttatctcagatgcttagagatctgcccagctgtccttgtgcgtacccactggaagctatggattctccagttagcctgcaggacgagcaccaagggcgaagcttccggtggcgagatgccagtggccctagagaaaggcttgatatctatcagcccacagctcgtttttgcctccgctccatgctctcgggagagtcaagcactcttgccgcacaacattgttgttacgacgaggactctcgccttctgactcggggaaaaggagccggtatgccaaacctaatttctacggatttttctcctaagttacattttaaattcgatactaccccgtggattctgtgtaagggcgactggtcgcgtctgcatgctgtcctcccaccgaacaatggcagggcgtgcacagataatcccctcgaggaggagtatttggctcagctacaagaggcaaaggaatactag

SEQ ID NO: 261530 - DNA, 1716 bp, Artificial Sequence
  derived and/or modified sequence
atgagagccctgagagacagagccggcctgctgctgtgcgtgctgctgctggccgccctgctggaggccgccctgggcctgcccgtgaagaagcccagactgagaggccccagacccggcagcctgaccagactggccgaggtgagcgccagccccgaccccagacccctgaaggaggaggaggaggcccccctgctgcccagaacccacctgcaggccgagccccaccagcacggctgctggaccgtgaccgagcccgccgccatgacccccggcaacgccaccccccccagaacccccgaggtgacccccctgagactggagctgcagaagctgcccggcctggccaacaccaccctgagcacccccaaccccgacacccaggccagcgccagccccgaccccagacccctgagagaggaggaggaggccagactgctgcccagaacccacctgcaggccgagctgcaccagcacggctgctggaccgtgaccgagcccgccgccctgacccccggcaacgccaccccccccagaacccaggaggtgacccccctgctgctggagctgcagaagctgcccgagctggtgcacgccaccctgagcacccccaaccccgacaaccaggtgaccatcaaggtggtggaggacccccaggccgaggtgagcatcgacctgctggccgagcccagcaacccccccccccaggacaccctgagctggctgcccgccctgtggagcttcctgtggggcgactacaagggcgaggagaaggacagagcccccggcgagaagggcgaggagaaggaggaggacgaggactaccccagcgaggacatcgagggcgaggaccaggaggacaaggaggaggacgaggaggagcaggccctgtggttcaacggcaccaccgacaactgggaccagggctggctggcccccggcgactgggtgttcaaggacagcgtgagctacgactacgagccccagaaggagtggagcccctggagcccctgcagcggcaactgcagcaccggcaagcagcagagaaccagaccctgcggctacggctgcaccgccaccgagaccagaacctgcgacctgcccagctgccccggcaccgaggacaaggacaccctgggcctgcccagcgaggagtggaagctgctggccagaaacgccaccgacatgcacgaccaggacgtggacagctgcgagaagtggctgaactgcaagagcgacttcctgatcaagtacctgagccagatgctgagagacctgcccagctgcccctgcgcctaccccctggaggccatggacagccccgtgagcctgcaggacgagcaccagggcagaagcttcagatggagagacgccagcggccccagagagagactggacatctaccagcccaccgccagattctgcctgagaagcatgctgagcggcgagagcagcaccctggccgcccagcactgctgctacgacgaggacagcagactgctgaccagaggcaagggcgccggcatgcccaacctgatcagcaccgacttcagccccaagctgcacttcaagttcgacaccaccccctggatcctgtgcaagggcgactggagcagactgcacgccgtgctgccccccaacaacggcagagcctgcaccgacaaccccctggaggaggagtacctggcccagctgcaggaggccaaggagtactag

SEQ ID NO: 261531 - protein, 338 aa, Artificial Sequence
  derived and/or modified sequence
MMRTCVLLSAVLWCLTGVQCPRFTLFNKKGFIYGKTGQPDKIYVELHQNSPVLICMDFKLSKKEIVDPTYLWIGPNEKTLTGNNRINITETGQLMVKDFLEPLSGLYTCTLSYKTVKAETQEEKTVKKRYDFMVFAYREPDYSYQMAVRFTTRSCIGRYNDVFFRVLKKILDSLISDLSCHVIEPSYKCHSVEIPEHGLIHELFIAFQVNPFAPGWKGACNGSVDCEDTTNHNILQARDRIEDFFRSQAYIFYHNFNKTLPAMHFVDHSLQVVRLDSCRPGFGKNERLHSNCASCCVVCSPATFSPDVNVTCQTCVSVLTYGAKSCPQTSNKNQQYED

SEQ ID NO: 261532 - DNA, 1017 bp, Artificial Sequence
  derived and/or modified sequence
atgatgagaacctgcgtgctgctgagcgccgtgctgtggtgcctgaccggcgtgcagtgccccagattcaccctgttcaacaagaagggcttcatctacggcaagaccggccagcccgacaagatctacgtggagctgcaccagaacagccccgtgctgatctgcatggacttcaagctgagcaagaaggagatcgtggaccccacctacctgtggatcggccccaacgagaagaccctgaccggcaacaacagaatcaacatcaccgagaccggccagctgatggtgaaggacttcctggagcccctgagcggcctgtacacctgcaccctgagctacaagaccgtgaaggccgagacccaggaggagaagaccgtgaagaagagatacgacttcatggtgttcgcctacagagagcccgactacagctaccagatggccgtgagattcaccaccagaagctgcatcggcagatacaacgacgtgttcttcagagtgctgaagaagatcctggacagcctgatcagcgacctgagctgccacgtgatcgagcccagctacaagtgccacagcgtggagatccccgagcacggcctgatccacgagctgttcatcgccttccaggtgaaccccttcgcccccggctggaagggcgcctgcaacggcagcgtggactgcgaggacaccaccaaccacaacatcctgcaggccagagacagaatcgaggacttcttcagaagccaggcctacatcttctaccacaacttcaacaagaccctgcccgccatgcacttcgtggaccacagcctgcaggtggtgagactggacagctgcagacccggcttcggcaagaacgagagactgcacagcaactgcgccagctgctgcgtggtgtgcagccccgccaccttcagccccgacgtgaacgtgacctgccagacctgcgtgagcgtgctgacctacggcgccaagagctgcccccagaccagcaacaagaaccagcagtacgaggactag

SEQ ID NO: 261533 - DNA, 1017 bp, Artificial Sequence
  derived and/or modified sequence
atgatgcggacctgcgttttgctgtccgcggtgttgtggtgcctcacaggcgttcagtgccctaggtttactctgttcaataaaaagggattcatttacggcaaaacaggccagccagacaagatctatgtagaacttcaccagaacagtccagtgctaatctgcatggactttaagttgtcgaagaaggagattgtcgacccgacatacttatggattggcccaaatgagaaaactctgactggcaacaacaggatcaacattacagagactggccagctaatggtcaaggattttctggagccactcagtggtctttacacctgcaccctgagctataagactgttaaagccgaaacccaggaggaaaagacggtgaaaaagaggtacgatttcatggtctttgcctacagagagccagactacagttatcagatggcagttcggttcaccaccagatcatgtattggccggtataacgatgtgttctttcgtgtcctgaagaagattctggattcattaatcagcgacttaagctgccatgttatagagccctcttacaagtgccattccgttgaaatccctgagcatggcctcatccatgagttgtttattgcattccaggttaatccctttgctcccggctggaaaggcgcttgtaatggttccgttgactgtgaggataccacaaaccataacatcctgcaggcgcgggatagaattgaagacttttttcgcagccaggcctatatattttatcacaactttaacaagaccttgccagccatgcacttcgtggatcattcactccaagtggtgcgtctggattcctgcagacctgggtttggcaagaatgaacgactgcattcgaactgcgccagctgttgcgtagtgtgctctccggccacattcagcccagacgtgaacgtaacctgccagacttgtgttagcgtcttaacatatggcgctaaaagctgtccgcagactagcaataaaaatcagcagtacgaggattag

SEQ ID NO: 261534 - DNA, 1017 bp, Artificial Sequence
  derived and/or modified sequence
atgatgaggacctgtgtgctgctgtctgctgtgctgtggtgcctgactggagtgcagtgcccccgcttcaccctcttcaacaagaagggcttcatctacggcaagacaggccagcctgacaagatctacgtggagctgcaccagaacagccctgtgctgatctgcatggacttcaagctgagcaagaaggagatcgtggaccccacctacctgtggattggccccaatgagaagaccctgactggaaacaaccgcatcaacatcacagaaacaggccagctgatggtgaaggacttcctggagcccctgagcggcctgtacacctgcaccctgagctacaagacagtgaaggccgagacccaggaggagaagacagtgaagaagagatatgacttcatggtgtttgcctaccgggagccagactacagctaccagatggctgtgcgcttcaccaccaggagctgcatcggccgctacaatgatgtgttcttccgggtgctgaagaagatcctggacagcctcatcagtgacctgagctgccacgtgattgagcccagctacaagtgccacagcgtggagatccctgagcacggcctcatccacgagctgttcatcgccttccaggtgaacccctttgcccctggctggaagggggcctgcaatggatctgtggactgtgaggacaccaccaaccacaacatcctgcaggcccgggacagaattgaggacttcttccgcagccaggcctacatcttctaccacaacttcaacaagaccctgcctgccatgcactttgtggaccacagcctgcaggtggtgcggctggacagctgccggcccggctttgggaagaatgaaaggctgcacagcaactgtgccagctgctgcgtggtgtgcagccctgccaccttctccccagatgtgaatgtgacctgccagacctgtgtgtctgtgctgacctatggagccaagagctgcccccagaccagcaacaagaaccagcagtatgaagattag

SEQ ID NO: 261535 - DNA, 1017 bp, Artificial Sequence
  derived and/or modified sequence
atgatgcggacctgcgtgctgctgagcgccgtgctgtggtgcctgactggcgtgcagtgcccgcgctttaccttattcaataagaaaggtttcatctatggcaagaccgggcagccagacaaaatctatgtggagctacatcaaaacagcccagtgttgatctgtatggactttaaattatcgaagaaagaaatcgtggatccgacttatctgtggatcggccctaacgagaagaccctcactggcaacaaccgcattaacattactgagacaggccagttgatggtcaaagattttctcgagcctctgtcagggctgtacacctgtaccctgtcctataagacggtaaaggcagagacccaagaggagaagacagtcaaaaaacgctatgacttcatggtcttcgcttatcgggaacccgattattcttatcagatggctgtgcgattcactacacgatcttgcattggtaggtataacgacgtatttttccgtgtgctcaagaagattctggacagtcttatatcggacctgagctgccatgtgattgagccgagttacaagtgccattccgttgaaattcccgaacacggcctgatacatgagctgtttattgcctttcaggtaaaccctttcgcacccggctggaagggagcgtgcaatggtagcgtggactgcgaggatacaaccaatcataacatcctacaggcgcgggaccgaattgaggacttttttagaagccaggcctacatcttctatcataactttaacaaaaccctcccagcaatgcactttgtcgaccatagcctgcaggtcgtcagactggacagctgtagacctggatttggcaaaaatgagagactccattccaactgtgcaagttgctgtgtagtttgttctcccgctacttttagccccgacgtgaatgttacatgtcaaacatgtgtcagcgtattgacgtacggcgccaagtcatgtccccagacttccaacaaaaaccaacagtatgaggattag

SEQ ID NO: 261536 - DNA, 1017 bp, Artificial Sequence
  derived and/or modified sequence
atgatgcgtacctgcgttctcctgagcgcggttctgtggtgtctaaccggtgtgcaatgcccacgctttactctgtttaataagaagggcttcatttacggcaagaccggccagcccgacaagatttatgtggagctgcatcagaactcacctgttcttatttgtatggattttaaactttcgaagaaggagattgttgatccaacttacctgtggatcggtcccaatgaaaaaactctgacaggcaacaaccggattaacattacagagaccgggcagttaatggtgaaggactttttagagcctttgagcgggttgtacacttgcactctgtcttacaagacggtcaaagcagagacgcaggaagaaaaaaccgtgaagaagaggtatgatttcatggtgttcgcataccgggagccggattactcataccagatggcagttcggtttacaacacggagctgcattggtcgttacaatgacgtattcttcagggtgctaaaaaagatactcgacagcctcataagcgacctcagctgccacgtgatcgagccgtcatacaagtgccatagtgtggagatccccgagcatggcttaatacatgaattatttatcgcatttcaggtaaacccttttgcgcctggttggaaaggcgcatgtaacggcagcgtcgactgcgaagacacgaccaatcataacatccttcaggcccgtgaccgaatagaagatttttttaggtctcaagcctacatcttttatcacaatttcaacaagacattacccgcaatgcatttcgtggaccacagtctgcaggttgttcgtttagacagctgccggcctgggttcgggaagaacgaacggctacattctaattgcgcctcatgttgtgtggtgtgcagtccagctacattttcgccagacgtaaacgtgacctgccagacttgtgtgtccgtcctgacttacggagcgaaaagctgcccacagacatctaacaagaaccaacaatacgaggattag

SEQ ID NO: 261537 - DNA, 1429 bp, Artificial Sequence
  derived and/or modified sequence
gccgttgcgacggacgggtaggggaggcgaccccggcgttctgctccgcactgtggaggaggtggggaggtgttgggccagggctgaggtaggagggagtctgtccctcgacgcctcctgcgacgccagcccctgagcgatgatgcgaacgtgcgtcctactctccgcggtgctctggtgcctcacaggagtccaatgcccgcgttttaccttattcaataagaagggcttcatttatggcaagacaggacagccagacaaaatatatgtagagttacatcaaaatagtccagtccttatctgtatggattttaagctttctaaaaaagaaatagtggaccccacctacttatggattgggcctaatgaaaagacgttaacaggaaataatagaataaatataactgaaactggacagctgatggtgaaagattttttggagcctttgtctggactttacacatgtactctttcttataagactgttaaagcagaaactcaagaagaaaaaacagtcaaaaagagatatgactttatggtctttgcctatcgggaacctgattattcatatcagatggctgtacgttttaccacaaggtcttgtatagggagatacaatgatgtattctttagagtgctgaagaaaatcttggatagtctaatttctgatttgtcatgccatgtcatagagccatcatataaatgccattctgttgaaattccagaacatggcctcatacatgagctatttatagcatttcaagttaatccttttgcgccggggtggaaaggtgcttgcaatggatctgttgactgtgaagataccactaatcataatatcctccaggcaagagatcgaatagaagacttttttcggagccaagcatatattttctaccataactttaataaaactctaccagcaatgcattttgtggaccacagtttgcaagtagtacgtctggatagctgtcgaccaggctttggaaaaaatgaacgtctacacagtaattgcgctagctgttgtgtggtttgtagtcctgcgacttttagtcctgatgttaatgtaacttgtcagacctgcgtttccgtccttacctatggagctaaatcttgcccacaaacttcaaacaaaaatcagcaatatgaagattagaggtgaaagcattgttacttacttgtggaagtcggggacataagatgattttcacatcccagagcatcatagatagttccattaagtaaaatcagtaagaccaaaccactggaaaacatgcattttggaaactttaaaataaatggttaacatggcatttctaagaaggcatttaatccagtatctctagtgtacaaaggaaacttgaagttttaatggattatttttaatgaaatgttttattgtttacaaacggtatgttgctgtgtacct

SEQ ID NO: 261538 - protein, 225 aa, Artificial Sequence
  derived and/or modified sequence
MATHALEIAGLFLGGVGMVGTVAVTVMPQWRVSAFIENNIVVFENFWEGLWMNCVRQANIRMQCKIYDSLLALSPDLQAARGLMCAASVMSFLAFMMAILGMKCTRCTGDNEKVKAHILLTAGIIFIITGMVVLIPVSWVANAIIRDFYNSIVNVAQKRELGEALYLGWTTALVLIVGGALFCCVFCCNEKSSSYRYSIPSHRTTQKSYHTGKKSPSVYSRSQYV

SEQ ID NO: 261539 - protein, 233 aa, Artificial Sequence
  derived and/or modified sequence
MATHALEIAGLFLGGVGMVGTVAVTVMPQWRVSAFIENNIVVFENFWEGLWMNCVRQANIRMQCKIYDSLLALSPDLQAARGLMCAASVMSFLAFMMAILGMKCTRCTGDNEKVKAHILLTAGIIFIITGMVVLIPVSWVANAIIRDFYNSIVNVAQKRELGEALYLGWTTALVLIVGGALFCCVFCCNEKSSSYRYSIPSHRTTQKSYHTGKKSRLLQKSVCVVVYVFLTLL

SEQ ID NO: 261540 - DNA, 1804 bp, Artificial Sequence
  derived and/or modified sequence
gttcattactacaggaaaaactgttctcttctgtggcacagagaaccctgcttcaaagcagaagtagcagttccggagtccagctggctaaaactcatcccagaggataatggcaacccatgccttagaaatcgctgggctgtttcttggtggtgttggaatggtgggcacagtggctgtcactgtcatgcctcagtggagagtgtcggccttcattgaaaacaacatcgtggtttttgaaaacttctgggaaggactgtggatgaattgcgtgaggcaggctaacatcaggatgcagtgcaaaatctatgattccctgctggctctttctccggacctacaggcagccagaggactgatgtgtgctgcttccgtgatgtccttcttggctttcatgatggccatccttggcatgaaatgcaccaggtgcacgggggacaatgagaaggtgaaggctcacattctgctgacggctggaatcatcttcatcatcacgggcatggtggtgctcatccctgtgagctgggttgccaatgccatcatcagagatttctataactcaatagtgaatgttgcccaaaaacgtgagcttggagaagctctctacttaggatggaccacggcactggtgctgattgttggaggagctctgttctgctgcgttttttgttgcaacgaaaagagcagtagctacagatactcgataccttcccatcgcacaacccaaaaaagttatcacaccggaaagaagtcaccgagcgtctactccagaagtcagtatgtgtagttgtgtatgtttttttaactttactataaagccatttacttcaaaatgacattgctaaagactgcattattttactactgtaatttctccacgacatagcattatgtacatagatgagtgtaacatttatatctcacatagagacatgcttatatggttttatttaaaatgaaatgccagtccattacactgaataaatagaactcaactattgcttttcagggaaatcatggatagggttgaagaaggttactattaattgtttaaaaacagcttagggattaatgtcctccatttataatgaagattaaaatgaaggctttaatcagcattgtaaaggaaattgaatggctttctgatatgctgttttttagcctaggagttagaaatcctaacttctttatcctcttctcccagaggctttttttttcttgtgtattaaattaacatttttaaaaagcagatattttgtcaaggggctttgcattcaaactgcttttccagggctatactcagaagaaagataaaagtgtgatctaagaaaaagtgatggttttaggaaagtgaaaatatttttgtttttgtatttgaagaagaatgatgcattttgacaagaaatcatatatgtatggatatattttaataagtatttgagtacagactttgaggtttcatcaatataaataaaagagcagaaaaatatgtcttggttttcatttgcttaccaaaaaaacaacaacaaaaaaagttgtcctttgagaacttcacctgctcctatgtgggtacctgagtcaaaattgtcatttttgttctgtgaaaaataaatttccttcttgtaccatttctgtttagttttactaaaatctgtaaatactgtatttttctgtttattccaaatttgatgaaactgacaatccaatttgaaagtttgtgtcgacgtctgtctagcttaaatgaatgtgttctatttgctttatacatttatattaataaattgtacatttttctaattatttg

SEQ ID NO: 261541 - DNA, 2068 bp, Artificial Sequence
  derived and/or modified sequence
agcaaagcagctcttatttgaaaaaccactgggttccgagttcattactacaggaaaaactgttctcttctgtggcacagagaaccctgcttcaaagcagaagtagcagttccggagtccagctggctaaaactcatcccagaggataatggcaacccatgccttagaaatcgctgggctgtttcttggtggtgttggaatggtgggcacagtggctgtcactgtcatgcctcagtggagagtgtcggccttcattgaaaacaacatcgtggtttttgaaaacttctgggaaggactgtggatgaattgcgtgaggcaggctaacatcaggatgcagtgcaaaatctatgattccctgctggctctttctccggacctacaggcagccagaggactgatgtgtgctgcttccgtgatgtccttcttggctttcatgatggccatccttggcatgaaatgcaccaggtgcacgggggacaatgagaaggtgaaggctcacattctgctgacggctggaatcatcttcatcatcacgggcatggtggtgctcatccctgtgagctgggttgccaatgccatcatcagagatttctataactcaatagtgaatgttgcccaaaaacgtgagcttggagaagctctctacttaggatggaccacggcactggtgctgattgttggaggagctctgttctgctgcgttttttgttgcaacgaaaagagcagtagctacagatactcgataccttcccatcgcacaacccaaaaaagttatcacaccggaaagaagtcaccgagcgtctactccagaagtcagtatgtgtagttgtgtatgtttttttaactttactataaagccatgcaaatgacaaaaatctatattactttctcaaaatggaccccaaagaaactttgatttactgttcttaactgcctaatcttaattacaggaactgtgcatcagctatttatgattctataagctatttcagcagaatgagatattaaacccaatgctttgattgttctagaaagtatagtaatttgttttctaaggtggttcaagcatctactctttttatcatttacttcaaaatgacattgctaaagactgcattattttactactgtaatttctccacgacatagcattatgtacatagatgagtgtaacatttatatctcacatagagacatgcttatatggttttatttaaaatgaaatgccagtccattacactgaataaatagaactcaactattgcttttcagggaaatcatggatagggttgaagaaggttactattaattgtttaaaaacagcttagggattaatgtcctccatttataatgaagattaaaatgaaggctttaatcagcattgtaaaggaaattgaatggctttctgatatgctgttttttagcctaggagttagaaatcctaacttctttatcctcttctcccagaggctttttttttcttgtgtattaaattaacatttttaaaaagcagatattttgtcaaggggctttgcattcaaactgcttttccagggctatactcagaagaaagataaaagtgtgatctaagaaaaagtgatggttttaggaaagtgaaaatatttttgtttttgtatttgaagaagaatgatgcattttgacaagaaatcatatatgtatggatatattttaataagtatttgagtacagactttgaggtttcatcaatataaataaaagagcagaaaaatatgtcttggttttcatttgcttaccaaaaaaacaacaacaaaaaaagttgtcctttgagaacttcacctgctcctatgtgggtacctgagtcaaaattgtcatttttgttctgtgaaaaataaatttccttcttgtaccatttctgtttagttttactaaaatctgtaaatactgtatttttctgtttattccaaatttgatgaaactgacaatccaatttgaaagtttgtgtcgacgtctgtctagcttaaatgaatgtgttctatttgctttatacatttatattaataaattgtacatttttctaattatttga

SEQ ID NO: 261542 - DNA, 1888 bp, Artificial Sequence
  derived and/or modified sequence
agcaaagcagctcttatttgaaaaaccactgggttccgagttcattactacaggaaaaactgttctcttctgtggcacagagaaccctgcttcaaagcagaagtagcagttccggagtccagctggctaaaactcatcccagaggataatggcaacccatgccttagaaatcgctgggctgtttcttggtggtgttggaatggtgggcacagtggctgtcactgtcatgcctcagtggagagtgtcggccttcattgaaaacaacatcgtggtttttgaaaacttctgggaaggactgtggatgaattgcgtgaggcaggctaacatcaggatgcagtgcaaaatctatgattccctgctggctctttctccggacctacaggcagccagaggactgatgtgtgctgcttccgtgatgtccttcttggctttcatgatggccatccttggcatgaaatgcaccaggtgcacgggggacaatgagaaggtgaaggctcacattctgctgacggctggaatcatcttcatcatcacgggcatggtggtgctcatccctgtgagctgggttgccaatgccatcatcagagatttctataactcaatagtgaatgttgcccaaaaacgtgagcttggagaagctctctacttaggatggaccacggcactggtgctgattgttggaggagctctgttctgctgcgttttttgttgcaacgaaaagagcagtagctacagatactcgataccttcccatcgcacaacccaaaaaagttatcacaccggaaagaagtcacgtctactccagaagtcagtatgtgtagttgtgtatgtttttttaactttactataaagccatgcaaatgacaaaaatctatattactttctcaaaatggaccccaaagaaactttgatttactgttcttaactgcctaatcttaattacaggaactgtgcatcagctatttatgattctataagctatttcagcagaatgagatattaaacccaatgctttgattgttctagaaagtatagtaatttgttttctaaggtggttcaagcatctactctttttatcatttacttcaaaatgacattgctaaagactgcattattttactactgtaatttctccacgacatagcattatgtacatagatgagtgtaacatttatatctcacatagagacatgcttatatggttttatttaaaatgaaatgccagtccattacactgaataaatagaactcaactattgcttttcagggaaatcatggatagggttgaagaaggttactattaattgtttaaaaacagcttagggattaatgtcctccatttataatgaagattaaaatgaaggctttaatcagcattgtaaaggaaattgaatggctttctgatatgctgttttttagcctaggagttagaaatcctaacttctttatcctcttctcccagaggctttttttttcttgtgtattaaattaacatttttaaaaagcagatattttgtcaaggggctttgcattcaaactgcttttccagggctatactcagaagaaagataaaagtgtgatctaagaaaaagtgatggttttaggaaagtgaaaatatttttgtttttgtatttgaagaagaatgatgcattttgacaagaaatcatatatgtatggatatattttaataagtatttgagtacagactttgaggtttcatcaatataaataaaagagcagaaaaatatgtcttggttttcatttgcttaccaaaaaaacaacaacaaaaaaagttgtcctttgagaacttcacctgctcctatgtgggtacctgagtcaaaattgtcatttttgttctgtgaaaaataaatttccttcttgtaccatt

SEQ ID NO: 261543 - DNA, 678 bp, Artificial Sequence
  derived and/or modified sequence
atggccacccacgccctggagatcgccggcctgttcctgggcggcgtgggcatggtgggcaccgtggccgtgaccgtgatgccccagtggagagtgagcgccttcatcgagaacaacatcgtggtgttcgagaacttctgggagggcctgtggatgaactgcgtgagacaggccaacatcagaatgcagtgcaagatctacgacagcctgctggccctgagccccgacctgcaggccgccagaggcctgatgtgcgccgccagcgtgatgagcttcctggccttcatgatggccatcctgggcatgaagtgcaccagatgcaccggcgacaacgagaaggtgaaggcccacatcctgctgaccgccggcatcatcttcatcatcaccggcatggtggtgctgatccccgtgagctgggtggccaacgccatcatcagagacttctacaacagcatcgtgaacgtggcccagaagagagagctgggcgaggccctgtacctgggctggaccaccgccctggtgctgatcgtgggcggcgccctgttctgctgcgtgttctgctgcaacgagaagagcagcagctacagatacagcatccccagccacagaaccacccagaagagctaccacaccggcaagaagagccccagcgtgtacagcagaagccagtacgtgtag

SEQ ID NO: 261544 - DNA, 702 bp, Artificial Sequence
  derived and/or modified sequence
atggccacccacgccctggagatcgccggcctgttcctgggcggcgtgggcatggtgggcaccgtggccgtgaccgtgatgccccagtggagagtgagcgccttcatcgagaacaacatcgtggtgttcgagaacttctgggagggcctgtggatgaactgcgtgagacaggccaacatcagaatgcagtgcaagatctacgacagcctgctggccctgagccccgacctgcaggccgccagaggcctgatgtgcgccgccagcgtgatgagcttcctggccttcatgatggccatcctgggcatgaagtgcaccagatgcaccggcgacaacgagaaggtgaaggcccacatcctgctgaccgccggcatcatcttcatcatcaccggcatggtggtgctgatccccgtgagctgggtggccaacgccatcatcagagacttctacaacagcatcgtgaacgtggcccagaagagagagctgggcgaggccctgtacctgggctggaccaccgccctggtgctgatcgtgggcggcgccctgttctgctgcgtgttctgctgcaacgagaagagcagcagctacagatacagcatccccagccacagaaccacccagaagagctaccacaccggcaagaagagcagactgctgcagaagagcgtgtgcgtggtggtgtacgtgttcctgaccctgctgtag

SEQ ID NO: 261545 - DNA, 678 bp, Artificial Sequence
  derived and/or modified sequence
atggccacacacgcactggaaatcgctgggctctttttggggggtgtgggaatggtgggcaccgtggctgtgaccgtcatgccccagtggagggtgagtgctttcatagagaacaacatagtagtgttcgagaatttctgggagggtctgtggatgaattgtgtgcgccaagcaaatatccggatgcagtgtaaaatctacgatagcctgctcgccctgagtcctgacctacaggcggccagaggcctgatgtgcgccgccagcgtcatgagcttcctggcattcatgatggcgattttgggcatgaagtgtactagatgcacaggcgataacgagaaagtcaaggcgcatattttattaacagctggaatcatctttattattactggtatggtcgtcctcataccagtttcttgggtcgccaacgccattattcgggatttttacaattcaatcgtgaatgttgcccaaaagcgggagctcggggaagcactttatctgggctggactaccgctttagtcctcatcgtggggggagccctgttctgctgcgtgttctgctgtaatgaaaagtcatcttcatatcgatacagtatacccagtcaccgaaccacccaaaagagctaccacacgggaaaaaagtccccctctgtctactcacggagccagtacgtatag

SEQ ID NO: 261546 - DNA, 678 bp, Artificial Sequence
  derived and/or modified sequence
atggcaactcacgctctcgagatcgcagggcttttcttaggtggggtcggcatggtcgggactgtggccgtgaccgtcatgcctcagtggcgcgtttcagctttcattgaaaacaatattgtggtatttgaaaacttctgggagggtttatggatgaactgtgtaagacaggccaacatccgcatgcagtgcaaaatctatgactcactactcgccttgtcaccagatctgcaggcagcccgcgggctgatgtgtgcagcttccgtcatgtcgtttctggcttttatgatggcaatccttggaatgaaatgcacacggtgtactggggacaatgagaaggtcaaagcccacatccttctcactgcagggatcatctttatcatcaccgggatggtcgtactgatccctgtatcgtgggtcgccaacgctattattagggatttctataacagcatagtaaacgtggcgcagaaacgagagctgggcgaggctctttatctaggctggaccaccgcgttggtattaatcgtgggcggcgccttgttctgctgcgtcttttgctgcaatgagaaatcctcctcataccgctactccatcccgtctcaccgcacaacccagaagagctatcatactgggaagaagtctccctcggtgtactctcgatctcaatatgtctag

SEQ ID NO: 261547 - DNA, 702 bp, Artificial Sequence
  derived and/or modified sequence
atggctacccatgcactggagattgccggactgtttctggggggtgtgggaatggtgggaacagtggctgtaaccgtgatgcctcagtggcgagtgtctgcctttattgagaacaacattgtcgtcttcgaaaatttctgggaaggactctggatgaactgtgtccgccaggccaacatcagaatgcagtgtaaaatctacgattccctgctagcgttgtctcccgaccttcaagccgcccgtggactcatgtgtgccgcaagcgtaatgtctttcctggcgttcatgatggccattctgggaatgaaatgcacacgatgcacaggagataatgagaaagtcaaggcccacatcctgttgacggcaggaatcattttcattatcacagggatggtagttcttattcctgtgagctgggttgctaacgctataatccgggatttttataactcaattgttaacgtagctcagaagcgcgagctcggagaggctctgtatctgggttggactacagccttagtccttatcgtgggtggggctcttttttgttgtgtgttctgttgtaacgagaaatcttcttcttataggtacagtataccaagccaccggacaactcaaaagtcttaccacactggaaagaaaagtagacttcttcagaagagcgtttgtgtggtggtttatgtgtttcttacacttctgtag

SEQ ID NO: 261548 - DNA, 678 bp, Artificial Sequence
  derived and/or modified sequence
atggccacccacgccctggagattgctggcctcttcctgggcggcgtgggcatggtgggcaccgtggccgtgacagtgatgccccagtggagggtgtctgccttcatcgagaacaacatcgtggtgtttgagaacttctgggagggcctgtggatgaactgtgtgcggcaggccaacatccgcatgcagtgcaagatctatgacagcctgctggccctgagcccagacctgcaggccgcccggggcctgatgtgtgccgcctctgtgatgtccttcctggccttcatgatggccatcctgggcatgaagtgcacccgctgcaccggggacaatgagaaggtgaaggcccacatcctgctgacagctggcatcatcttcatcatcaccggcatggtggtgctgatccctgtgtcctgggtggccaatgccatcatccgggacttctacaacagcatcgtgaatgtggcccagaagcgggagctgggggaggccctgtacctgggctggaccacagccctggtgctgattgtgggcggggccctcttctgctgcgtgttctgctgcaatgagaagagcagcagctaccgctacagcatccccagccacaggaccacccagaagagctaccacacaggcaagaagagccccagcgtgtacagccgcagccagtatgtgtag

SEQ ID NO: 261549 - DNA, 702 bp, Artificial Sequence
  derived and/or modified sequence
atggccacccacgccctggagattgctggcctcttcctgggcggcgtgggcatggtgggcaccgtggccgtgacagtgatgccccagtggagggtgtctgccttcatcgagaacaacatcgtggtgtttgagaacttctgggagggcctgtggatgaactgtgtgcggcaggccaacatccgcatgcagtgcaagatctatgacagcctgctggccctgagcccagacctgcaggccgcccggggcctgatgtgtgccgcctctgtgatgtccttcctggccttcatgatggccatcctgggcatgaagtgcacccgctgcaccggggacaatgagaaggtgaaggcccacatcctgctgacagctggcatcatcttcatcatcaccggcatggtggtgctgatccctgtgtcctgggtggccaatgccatcatccgggacttctacaacagcatcgtgaatgtggcccagaagcgggagctgggggaggccctgtacctgggctggaccacagccctggtgctgattgtgggcggggccctcttctgctgcgtgttctgctgcaatgagaagagcagcagctaccgctacagcatccccagccacaggaccacccagaagagctaccacacaggcaagaagagccggctgctgcagaagtctgtgtgtgtggtggtgtatgtgttcctgaccctgctgtag

SEQ ID NO: 261550 - DNA, 678 bp, Artificial Sequence
  derived and/or modified sequence
atggccacccacgccctggagatcgccggcctgttcctgggcggcgtgggaatggttggtaccgtggcggtgaccgtcatgccccagtggagggtctcagcatttatcgagaacaacatcgtggtgtttgaaaatttttgggaaggtctttggatgaactgtgtgcgccaggccaacattagaatgcagtgcaagatttacgattctctattggcattgagtccagatctccaagctgcccgtggtcttatgtgcgctgcctcagtgatgtcttttctggctttcatgatggccattctgggaatgaagtgtactcggtgcacaggtgataacgaaaaagtcaaggcgcacatcttgctgactgcaggaatcatctttatcattactgggatggtggtgctgatccccgtctcttgggtggctaacgccattatccgggatttctacaacagcattgttaacgttgcccagaagagggagctcggcgaggccctctatctgggatggaccactgccctcgtgctgattgtgggcggcgcactgttctgctgcgtgttttgttgtaatgagaaatcctccagctacagatattctatccccagccataggactacccagaagtcatatcatacgggcaagaaatcaccctcagtgtatagccggtctcagtacgtctag

SEQ ID NO: 261551 - DNA, 678 bp, Artificial Sequence
  derived and/or modified sequence
atggccacccacgccctggagatcgccggcctgttcctgggcggcgtcgggatggttggtacagtcgccgtgactgtcatgccccagtggcgagtctctgccttcattgaaaataacatcgtggtgttcgagaacttttgggaaggcctctggatgaactgtgttcgacaggccaatattaggatgcagtgcaagatctacgacagcttgctagcactcagcccagatctccaggctgcgagaggcctgatgtgtgctgcaagtgttatgtcattcctggcgtttatgatggcaatcttaggcatgaaatgcacacgctgtaccggtgacaacgaaaaggtcaaggcacacatcctgctgaccgccgggatcatcttcattatcacgggaatggtggtcttgatacccgtgagctgggtggctaacgccatcatccgagatttctacaactctatcgttaatgtggctcagaaaagggaattgggagaggctctatacttggggtggactactgctctggtgctgatcgtgggcggagccctcttctgctgtgttttctgctgcaatgagaaaagctcttcttacagatacagtatcccatcgcatcggacgacccagaaatcttatcacacaggaaaaaaatcaccatccgtatattcacgaagccaatatgtctag

SEQ ID NO: 261552 - DNA, 702 bp, Artificial Sequence
  derived and/or modified sequence
atggccacccacgccctggagatcgccggcctgttcctgggcggcgtgggcatggtagggacagtggcagtgactgtgatgccgcaatggcgggtgagtgcttttattgaaaacaatattgtggtgttcgaaaatttctgggagggcctgtggatgaactgcgtgaggcaagctaatatacgcatgcagtgcaaaatctacgattccctgttagccctttcccctgatcttcaggctgcgagaggtctcatgtgcgcagcctcggtgatgagctttcttgccttcatgatggctattttgggaatgaagtgtactcggtgcaccggagataacgagaaggtgaaggctcacatcctgcttaccgccggaatcatctttattattactggcatggtcgtcctcattcctgtgtcctgggtggcaaatgcaatcatcagagatttctataatagcatcgtcaacgtggctcagaagcgcgaattgggtgaagctctgtacctcggatggaccaccgctttagtgctgattgttgggggcgccctgttttgttgtgtgttctgctgtaacgagaaaagttcaagctacaggtattccatcccttcccaccgaaccactcagaagtcttaccacactggcaagaaatcacggcttcttcagaagtcagtatgtgttgtggtctatgttttcctgaccctcctgtag

SEQ ID NO: 261553 - DNA, 678 bp, Artificial Sequence
  derived and/or modified sequence
atggcaactcacgccctggagattgccggactcttcttgggaggtgtgggtatggtcggtaccgtagccgtgacagttatgccccaatggcgtgtgtctgcatttatagagaacaacatcgtggtttttgaaaacttttgggagggtctgtggatgaattgcgttaggcaggctaatattagaatgcagtgtaaaatctacgacagcctgctagctctgtcccccgacttgcaggcagccagagggcttatgtgcgctgcatctgttatgtctttcttggcttttatgatggctattctgggcatgaagtgcactagatgcactggtgataatgaaaaagtaaaagcacacatcttattaactgccggtatcatctttataattacaggcatggtggtccttatccccgtgtcctgggttgccaacgccattatccgagatttctacaacagcatcgtcaacgtcgctcagaagcgcgaacttggcgaggccctatacctgggttggaccaccgcactggttctcatcgtaggtggagctctcttctgctgcgtgttctgctgcaatgagaaatcctctagttatagatattccattccaagccacagaaccactcagaaaagctaccacacagggaagaaatccccgtctgtatacagcaggtctcagtatgtctag

SEQ ID NO: 261554 - DNA, 678 bp, Artificial Sequence
  derived and/or modified sequence
atggccacacacgctctcgagattgctggattatttcttggtggtgtgggcatggtaggcaccgtggccgtgacggtgatgccacagtggcgtgtgtcagccttcatcgagaataatatagtagtattcgagaatttctgggaagggctgtggatgaactgcgtgcgccaggcgaacatacggatgcaatgtaaaatttacgatagtctactagcccttagtcccgacctgcaggcggctaggggtttaatgtgtgcggcatctgtgatgtcttttctggcattcatgatggccatcctggggatgaaatgcacacggtgcacaggagataacgagaaagttaaggcacatatcctcctaactgcagggataatcttcatcatcaccgggatggttgtcctgattccggtctcatgggttgctaacgctatcatccgtgatttctacaactccattgtaaacgtggcccagaaaagagagctgggcgaggcattatacctgggttggactaccgctcttgttttaatagtcggtggggctctcttttgctgtgtattttgctgtaacgagaaatcctcctcatatagatacagtataccttctcatcggaccactcaaaaatcctaccacactgggaaaaaatctcctagtgtatacagccgcagccaatacgtgtag

SEQ ID NO: 261555 - DNA, 702 bp, Artificial Sequence
  derived and/or modified sequence
atggccactcatgctttagagatagcaggtctgttcctgggcggagtgggaatggtgggaaccgtggccgtgaccgtgatgcctcaatggagagtgtctgctttcattgaaaacaacatcgttgtctttgaaaatttttgggagggattgtggatgaattgcgtccgccaggcgaacattcgcatgcaatgcaaaatttatgatagcttgttagcactctcacccgacttgcaggccgcacgtggcctgatgtgtgccgcttctgtcatgtccttcctcgcattcatgatggcaattctgggtatgaagtgtactagatgcacaggcgataacgagaaagtcaaagcacatatcctattgacagcgggaatcattttcataatcacgggaatggtggtgctaatccccgtctcctgggtcgctaacgccatcatcagggatttctacaatagtatagtaaacgtagctcaaaaacgggaattgggggaggccctctatctgggctggaccacagccctggtgttgatagtcggcggtgccctgttttgctgtgtgttctgttgtaacgagaagagttcttcctaccggtattcgataccgagccacagaaccactcagaagagttaccacacagggaagaaaagtaggctgctacagaagtctgtgtgcgtagtggtttacgtgttcctcacattgctgtag

SEQ ID NO: 261556 - protein, 354 aa, Artificial Sequence
  derived and/or modified sequence
MGEQPIFTTRAHVFQIDPNTKKNWMPASKQAVTVSYFYDVTRNSYRIISVDGAKVIINSTITPNMTFTKTSQKFGQWADSRANTVFGLGFSSEQQLTKFAEKFQEVKEAAKIAKDKTQEKIETSSNHSQESGRETPSSTQASSVNGTDDEKASHAGPANTHLKSENDKLKIALTQSAANVKKWEIELQTLRESNARLTTALQESAASVEQWKRQFSICRDENDRLRNKIDELEEQCSEINREKEKNTQLKRRIEELEAELREKETELKDLRKQSEIIPQLMSECEYVSEKLEAAERDNQNLEDKVRSLKTDIEESKYRQRHLKVELKSFLEVLDGKIDDLHDFRRGLSKLGTDN

SEQ ID NO: 261557 - protein, 299 aa, Artificial Sequence
  derived and/or modified sequence
MGEQPIFTTRAHVFQIDPNTKKNWMPASKQAVTVSYFYDVTRNSYRIISVDGAKVIINSTITPNMTFTKTSQKFGQWADSRANTVFGLGFSSEQQLTKFAEKFQEVKEAAKIAKDKTQEKIETSSNHSQESGRETPSSTQASSVNGTDDEKASHAGPANTHLKSENDKLKIALTQSAANVKNEINREKEKNTQLKRRIEELEAELREKETELKDLRKQSEIIPQLMSECEYVSEKLEAAERDNQNLEDKVRSLKTDIEESKYRQRHLKVELKSFLEVLDGKIDDLHDFRRGLSKLGTDN

SEQ ID NO: 261558 - DNA, 1065 bp, Artificial Sequence
  derived and/or modified sequence
atgggggaacagcccatatttaccacacgcgctcatgtcttccagatcgaccccaataccaagaagaattggatgcccgcatctaagcaggcagttactgtgagttatttttatgatgtcactcgaaattcttatagaatcatttccgtcgatggggccaaggtcatcattaactccactattaccccaaatatgacatttacaaaaacaagtcagaagttcggccagtgggcagactcccgcgcgaatactgtatttggactgggcttctcttcggagcagcagctgacaaagtttgcagaaaagtttcaagaagttaaggaggcggcgaaaatcgcaaaagataagacacaagaaaagattgaaaccagcagcaatcactcacaggaaagcggacgagagactccttctagcactcaagcctcttcggtcaatggaactgacgatgaaaaagctagccacgcgggccccgccaatacacatctgaagtctgagaatgacaagctcaagatcgcactgacacagtcagccgccaacgtgaaaaagtgggaaattgagttgcagaccttgcgtgagagcaatgccaggctcacaactgctctacaggaatctgcggccagtgtggagcaatggaagcgacagttttcaatctgccgggacgaaaacgaccggctccgtaataaaatcgatgaactggaggaacaatgttctgaaataaatcgtgagaaagaaaaaaatacacaattgaagcggcgaatcgaggagctggaagcggagctgagggaaaaggaaaccgagttaaaagacttgaggaaacagagcgagattattccacagctgatgtctgaatgcgagtacgtgagcgaaaaactggaagcggctgaaagggataatcagaacctcgaagacaaggtgaggtctttgaagaccgacatagaagagtcaaaatatcgccagcgacacctgaaagttgagctaaaatccttcttggaagtcctcgatggcaagatagacgatctgcacgattttaggagagggctgtctaagctggggactgacaattag

SEQ ID NO: 261559 - DNA, 900 bp, Artificial Sequence
  derived and/or modified sequence
atgggagaacagccgattttcacgactcgggcgcatgtgtttcagattgaccccaacaccaaaaagaactggatgcccgccagtaagcaggctgtaaccgtgagctatttctatgatgtgactcgcaatagttatcggatcatctccgtagacggagccaaggttattattaacagcacaattacccccaacatgacttttacaaagaccagccagaagtttggacagtgggccgattcgcgcgccaacaccgtctttggcctggggttttcctcagaacaacagctcaccaaattcgccgaaaagtttcaagaagtaaaggaggccgccaaaatcgccaaagacaaaacacaggagaagattgaaacctcttcaaaccacagccaagagtccgggcgggagacacccagcagtacccaggcgagcagcgtcaatggaaccgacgatgagaaggccagtcatgcaggaccagccaatacgcacctgaagtcagagaatgacaagctgaagattgctcttacgcagtcagcagccaatgtgaagaacgagattaatcgagagaaagagaaaaacacacagctcaagcgacgcatcgaggaactcgaggctgaactccgggagaaggaaacagagttaaaggatctccgcaagcaatccgagattattccccagttgatgagcgagtgtgagtatgtgagcgaaaaactggaggccgccgagcgtgataaccaaaatctcgaggataaagtccggtctcttaaaacagacatcgaagagtccaagtaccgccagcggcacctgaaggtggagctgaagagtttcctcgaggtgctggacggcaagattgatgatttgcatgattttcgcagggggttgtcaaaattgggaaccgataactag

SEQ ID NO: 261560 - DNA, 1990 bp, Artificial Sequence
  derived and/or modified sequence
gcccgcccgcgcctggcggcggtggcggcagtggcagcagtggcagccgcgcagccccgcggaatggagcggcgccggggctgagccgggcgcgcacgggccgccgcatgtgccgcgcggggagcggctgccgagcgggcggagagcgagcgcgagaggccccgtcggagcggccgccggagcagcgccggagatgggagaacagcccatcttcaccacccgagcgcatgtcttccagattgaccccaacaccaagaagaactggatgcctgcgagcaagcaggcggtcaccgtttcctacttctatgatgtcacaaggaacagctatcggatcatcagtgtggacggagccaaggtgatcataaacagcacaatcacaccgaatatgaccttcaccaaaacgtcacagaagtttgggcagtgggccgacagcagagccaacacagtgtttggtttggggttttcctctgagcagcagctgacaaagtttgcagagaaattccaggaggtgaaagaagctgccaagatagccaaagacaagacgcaggagaaaatcgagacctcaagtaatcattcccaagaatctgggcgtgaaaccccatcttctactcaggcatccagtgtcaacgggacggacgatgaaaaggcctctcacgccggtccagccaacacacacctgaagtctgagaatgacaagctgaagattgccttgacgcagagcgcagccaacgtgaagaagtgggagatcgagctgcagacccttcgggagagcaatgcacggctgaccacagcactgcaggagtcggcagccagtgtggagcagtggaagaggcagttctccatctgccgtgatgagaatgaccggctccgcaacaagattgatgagctggaagaacaatgcagtgagatcaacagagagaaggagaagaacacgcagctgaagaggaggatcgaggagctggaggcagagctccgagaaaaggagacagagctgaaagatctccgaaaacaaagtgaaatcatacctcagctcatgtcagagtgcgaatatgtctctgagaagctagaggcggcagagagagacaatcaaaacctggaagacaaagtgcgttccttaaagacagacattgaggagagcaaataccgacagcgccacctgaaggtggagttgaagagcttcctggaggtgctggacgggaagattgacgacctgcatgacttccgccgagggctctccaagctgggcaccgataactagggctggccgaggcccaggccccgcccgtgagtcccaagcgtgtgtgcgagaccagatagctctaggacgttcttctgtgtgcattgcttctgtaaatgcaggcgcagtttgtcgtgtttccaaaccagttgtgccgtccactcactccttttcagaatagaaatctcctctcgcttctctggccttgtgaggttgtggacaactggaagattctgactcaggaatccagaactaggtctaccttcaacatttatgcagtcagggcagggatgtttatatctttcataagggctgttgcaaccatatgaactgaaaaaacacgcattttgtaatccaaatattgatattctttacaccaagccatcaggctccttttatcaaatagcattcagagtatttgaatgtccaccagacaccagccccggggggcacagagagaacaacattcctctctgtcaacatcgagaggctttaaaacaactgtttagtggaaactttctgagagatggaaaacaagcttctggtgggtgcattttctggcccggagttgcctgcatccacgctactgccccctgccccccgcccccccagtttgtacggttgcaacagtgttccttttcttggttttaatttctgagcagatgattgtgctgtgggaacagcacacagtgagggtgcctagcacaatgtctggcacaaagtaggtgcttaataaatatttgttcaattaaa

SEQ ID NO: 261561 - DNA, 1815 bp, Artificial Sequence
  derived and/or modified sequence
cgcgcctggcggcggtggcggcagtggcagcagtggcagccgcgcagccccgcggaatggagcggcgccggggctgagccgggcgcgcacgggccgccgcatgtgccgcgcggggagcggctgccgagcgggcggagagcgagcgcgagaggccccgtcggagcggccgccggagcagcgccggagatgggagaacagcccatcttcaccacccgagcgcatgtcttccagattgaccccaacaccaagaagaactggatgcctgcgagcaagcaggcggtcaccgtttcctacttctatgatgtcacaaggaacagctatcggatcatcagtgtggacggagccaaggtgatcataaacagcacaatcacaccgaatatgaccttcaccaaaacgtcacagaagtttgggcagtgggccgacagcagagccaacacagtgtttggtttggggttttcctctgagcagcagctgacaaagtttgcagagaaattccaggaggtgaaagaagctgccaagatagccaaagacaagacgcaggagaaaatcgagacctcaagtaatcattcccaagaatctgggcgtgaaaccccatcttctactcaggcatccagtgtcaacgggacggacgatgaaaaggcctctcacgccggtccagccaacacacacctgaagtctgagaatgacaagctgaagattgccttgacgcagagcgcagccaacgtgaagaatgagatcaacagagagaaggagaagaacacgcagctgaagaggaggatcgaggagctggaggcagagctccgagaaaaggagacagagctgaaagatctccgaaaacaaagtgaaatcatacctcagctcatgtcagagtgcgaatatgtctctgagaagctagaggcggcagagagagacaatcaaaacctggaagacaaagtgcgttccttaaagacagacattgaggagagcaaataccgacagcgccacctgaaggtggagttgaagagcttcctggaggtgctggacgggaagattgacgacctgcatgacttccgccgagggctctccaagctgggcaccgataactagggctggccgaggcccaggccccgcccgtgagtcccaagcgtgtgtgcgagaccagatagctctaggacgttcttctgtgtgcattgcttctgtaaatgcaggcgcagtttgtcgtgtttccaaaccagttgtgccgtccactcactccttttcagaatagaaatctcctctcgcttctctggccttgtgaggttgtggacaactggaagattctgactcaggaatccagaactaggtctaccttcaacatttatgcagtcagggcagggatgtttatatctttcataagggctgttgcaaccatatgaactgaaaaaacacgcattttgtaatccaaatattgatattctttacaccaagccatcaggctccttttatcaaatagcattcagagtatttgaatgtccaccagacaccagccccggggggcacagagagaacaacattcctctctgtcaacatcgagaggctttaaaacaactgtttagtggaaactttctgagagatggaaaacaagcttctggtgggtgcattttctggcccggagttgcctgcatccacgctactgccccctgccccccgcccccccagtttgtacggttgcaacagtgttccttttcttggttttaatttctgagcagatgattgtgctgtgggaacagcacacagtgagggtgcctagcacaatgtctggcacaaagtaggtgcttaataaatatttgttcaatt

SEQ ID NO: 261562 - DNA, 1065 bp, Artificial Sequence
  derived and/or modified sequence
atgggagagcagcccatcttcaccacccgggcccacgtgttccagattgaccccaacaccaagaagaactggatgcctgccagcaagcaggccgtgacagtgtcctacttctatgatgtgaccaggaacagctaccgcatcatctctgtggatggagccaaggtgatcatcaacagcaccatcacccccaacatgaccttcaccaagaccagccagaagtttggccagtgggccgacagccgggccaacacagtgtttggcctgggcttcagcagcgagcagcagctgaccaagtttgctgagaagttccaggaggtgaaggaggccgccaagatcgccaaggacaagacccaggagaagattgagaccagcagcaaccacagccaggagagcggccgggagacccccagcagcacccaggccagctctgtgaatggaacagatgatgagaaggccagccatgctggccctgccaacacccacctgaagtcagaaaatgacaagctgaagatcgccctgacccagagcgctgccaacgtgaagaagtgggagattgagctgcagaccctgcgggagagcaatgcccggctgaccacagccctgcaggagagcgctgcctctgtggagcagtggaagaggcagttcagcatctgcagagatgaaaatgaccggctgaggaacaagattgatgagctggaggagcagtgcagcgagatcaaccgggagaaggagaagaacacccagctgaagagaagaattgaggagctggaggccgagctgcgggagaaggagacagagctgaaggacctgaggaagcagagcgagatcatcccccagctgatgtctgaatgtgaatatgtgtctgagaagctggaggccgctgagcgggacaaccagaacctggaggacaaggtgcgcagcctgaagacagacatcgaggagagcaagtaccggcagaggcacctgaaggtggagctgaagagcttcctggaggtgctggatggcaagattgatgacctgcatgacttccggcggggcctgagcaagctgggcacagacaactag

SEQ ID NO: 261563 - DNA, 900 bp, Artificial Sequence
  derived and/or modified sequence
atgggagagcagcccatcttcaccacccgggcccacgtgttccagattgaccccaacaccaagaagaactggatgcctgccagcaagcaggccgtgacagtgtcctacttctatgatgtgaccaggaacagctaccgcatcatctctgtggatggagccaaggtgatcatcaacagcaccatcacccccaacatgaccttcaccaagaccagccagaagtttggccagtgggccgacagccgggccaacacagtgtttggcctgggcttcagcagcgagcagcagctgaccaagtttgctgagaagttccaggaggtgaaggaggccgccaagatcgccaaggacaagacccaggagaagattgagaccagcagcaaccacagccaggagagcggccgggagacccccagcagcacccaggccagctctgtgaatggaacagatgatgagaaggccagccatgctggccctgccaacacccacctgaagtcagaaaatgacaagctgaagatcgccctgacccagagcgctgccaacgtgaagaatgagatcaaccgggagaaggagaagaacacccagctgaagaggcgcatcgaggagctggaggccgagctgcgggagaaggagacagagctgaaggacctgaggaagcagagcgagatcatcccccagctgatgtctgaatgtgaatatgtgtctgagaagctggaggccgctgagcgggacaaccagaacctggaggacaaggtgcgcagcctgaagacagacatcgaggagagcaagtaccggcagaggcacctgaaggtggagctgaagagcttcctggaggtgctggatggcaagattgatgacctgcatgacttcagaagaggcctgagcaagctgggcacagacaactag

SEQ ID NO: 261564 - DNA, 1065 bp, Artificial Sequence
  derived and/or modified sequence
atgggcgagcagcccatcttcaccacccgggcccacgtgttccagattgatccaaataccaagaagaattggatgccggcaagcaagcaggcagtcactgttagctatttttacgacgtcacaaggaatagttacaggatcatatccgtggacggcgccaaagttatcattaacagtactataacccccaatatgacatttaccaagacctcccaaaagttcggacagtgggcggattcccgggccaatacagtgttcggactggggtttagcagcgaacaacagctgacaaagttcgccgaaaaattccaggaggttaaggaagcagccaaaatcgccaaggataaaacacaagagaagatcgagacgtcatctaatcactcccaggagtccgggcgagaaaccccttcttccacccaggcttcatcagtgaatggaacggacgacgagaaggcctctcacgcaggcccagccaatacacacctaaaaagcgagaacgacaagctgaaaatcgcactgacacagagcgccgccaacgtgaagaagtgggaaattgagttgcagacattaagggagtcgaacgcccgtctgaccactgctcttcaggagagtgcggcctccgttgaacaatggaagagacagttcagtatatgtcgagacgagaacgatcgcctaaggaacaagattgatgagttagaggaacagtgttctgagataaatagagagaaggagaaaaacacccaattgaaacgccgtattgaagaactcgaggccgagcttagagagaaggaaactgagctgaaagatctgcgaaagcagtccgaaataattccacagttgatgagcgagtgcgagtatgtgtccgaaaaactcgaagctgccgagagagataaccaaaatctggaagacaaagtgaggtcgctgaaaacagatatagaagagagcaagtaccggcaacggcatctaaaagtggagctgaaatccttcctcgaagtcctcgatggaaaaatagacgatctgcatgatttccggcgtggattgtctaaactgggaacggacaattag

SEQ ID NO: 261565 - DNA, 900 bp, Artificial Sequence
  derived and/or modified sequence
atgggcgagcagcccatcttcaccacccgggcccacgtgttccagatcgatcctaatacaaagaaaaactggatgcctgctagtaagcaggccgtgacggtcagctacttctacgacgttacccgcaatagctacagaatcattagcgtggacggggctaaagtgatcataaactccaccatcacccctaatatgacctttactaaaacctctcaaaagttcggacaatgggccgactccagagcaaacaccgtgtttggcctcgggttttcgtccgaacagcagttaacaaagttcgccgagaaatttcaggaggtaaaggaggctgcgaagatcgccaaagacaaaactcaggagaaaatcgagacgagcagtaaccacagccaggagtcaggccgggagaccccatcctctacccaggccagttccgtaaacggaaccgacgacgagaaagcatctcatgcgggcccagctaacactcatctgaagagtgaaaatgataaacttaaaatcgctcttactcaatcagccgctaatgtgaagaacgagataaatagagagaaagaaaaaaatacccagctcaagaggcgaatagaggagctggaggccgaactcagagagaaagaaacggagcttaaagacctcaggaaacagtcagagataattcctcaattgatgagcgagtgcgaatatgtgtcagagaaactggaggccgcagaaagagataaccaaaatttagaggataaagtgcgcagtctgaagactgatatcgaggagagcaagtacaggcagaggcacttaaaggtagagctgaagtctttcctcgaggtgctggacggtaagatcgacgacctgcacgacttccgacggggtttatcaaagctggggactgacaattag

SEQ ID NO: 261566 - DNA, 1065 bp, Artificial Sequence
  derived and/or modified sequence
atgggcgaacagccaatttttacgactcgagcacatgtatttcagatcgaccctaacactaaaaaaaactggatgcctgctagtaagcaggcagtaaccgtgtcctatttttatgacgtgactagaaactcttatcggatcatatcagtagatggcgctaaggtcataatcaactcaacaattaccccaaatatgactttcactaaaacctcacaaaaattcggccagtgggctgacagccgcgcaaatacagtgtttggtttgggattctcctctgagcagcagcttacgaaatttgctgagaaattccaagaagtgaaagaggccgcaaagattgctaaggacaaaacacaggaaaagatagagaccagctccaatcactctcaggagtccggccgagagactccaagcagcacgcaggctagctcagtaaatggcacagacgacgagaaggcgtctcacgcaggccctgctaacacccacctgaagtctgagaacgacaagttgaaaatcgccttaacacagagtgcagcaaatgtgaagaagtgggaaatcgagttgcagaccctcagagagagtaatgctcgtttgaccaccgctttacaggaatccgctgctagcgttgagcaatggaagcgtcagttcagcatctgtagggacgagaatgataggctgaggaataaaattgatgaactagaggagcaatgcagcgaaataaatagagagaaagagaaaaatacccagctcaaaagacggatagaggaactggaagcggaactgagggagaaggagaccgaactcaaagatttacgcaaacagtccgagattatcccccaactgatgtccgaatgcgagtacgtgtccgaaaaattagaagccgcagagagggacaaccagaatctggaggataaggtgagatctctgaaaacagacatcgaggagtcaaaataccggcaacggcatcttaaagtggagctgaaatctttcctagaggtgctggacggcaagattgatgatctccacgattttcggagaggtctctcaaaattgggtaccgacaactag

SEQ ID NO: 261567 - DNA, 900 bp, Artificial Sequence
  derived and/or modified sequence
atgggcgagcaacccatctttaccactagagcgcacgtttttcaaatcgatccgaataccaagaaaaattggatgcccgctagcaagcaggccgttaccgtctcctacttctacgatgtgactaggaacagttataggatcatatccgttgatggcgcaaaggttattatcaatagcacaatcaccccaaatatgaccttcaccaagacaagccaaaagttcggccagtgggccgactcacgtgccaatactgtttttggactcggtttttcctcagagcagcaactgaccaaattcgcggaaaaattccaggaggttaaggaagctgccaagatcgccaaagataaaacccaggagaaaattgaaacctcaagtaaccattcccaagagtccggacgcgaaacacctagctctacacaggccagctcagttaacgggacggacgatgaaaaagccagccatgcgggaccagccaatacccacttgaagtccgagaatgacaagctgaaaatcgcactcactcagagcgcggctaacgtaaagaatgagatcaatagggagaaggaaaagaacacccaactgaagcggaggatcgaagagctggaagctgaattaagagaaaaagaaaccgagctcaaggacctgaggaagcaaagtgaaatcatccctcagctgatgagcgagtgtgagtatgtgtctgagaaactggaggcagcggagagagataatcaaaacctggaggataaagtacgttccttaaaaacagatatcgaggagtccaaatacagacaacgccatttgaaggtggaactgaagtcctttctggaagtattggacgggaagatcgatgacctgcatgatttcaggagaggtctgtccaaactgggcacagacaattag

SEQ ID NO: 261568 - DNA, 1065 bp, Artificial Sequence
  derived and/or modified sequence
atgggcgagcagcccatcttcaccaccagagcccacgtgttccagatcgaccccaacaccaagaagaactggatgcccgccagcaagcaggccgtgaccgtgagctacttctacgacgtgaccagaaacagctacagaatcatcagcgtggacggcgccaaggtgatcatcaacagcaccatcacccccaacatgaccttcaccaagaccagccagaagttcggccagtgggccgacagcagagccaacaccgtgttcggcctgggcttcagcagcgagcagcagctgaccaagttcgccgagaagttccaggaggtgaaggaggccgccaagatcgccaaggacaagacccaggagaagatcgagaccagcagcaaccacagccaggagagcggcagagagacccccagcagcacccaggccagcagcgtgaacggcaccgacgacgagaaggccagccacgccggccccgccaacacccacctgaagagcgagaacgacaagctgaagatcgccctgacccagagcgccgccaacgtgaagaagtgggagatcgagctgcagaccctgagagagagcaacgccagactgaccaccgccctgcaggagagcgccgccagcgtggagcagtggaagagacagttcagcatctgcagagacgagaacgacagactgagaaacaagatcgacgagctggaggagcagtgcagcgagatcaacagagagaaggagaagaacacccagctgaagagaagaatcgaggagctggaggccgagctgagagagaaggagaccgagctgaaggacctgagaaagcagagcgagatcatcccccagctgatgagcgagtgcgagtacgtgagcgagaagctggaggccgccgagagagacaaccagaacctggaggacaaggtgagaagcctgaagaccgacatcgaggagagcaagtacagacagagacacctgaaggtggagctgaagagcttcctggaggtgctggacggcaagatcgacgacctgcacgacttcagaagaggcctgagcaagctgggcaccgacaactag

SEQ ID NO: 261569 - DNA, 900 bp, Artificial Sequence
  derived and/or modified sequence
atgggcgagcagcccatcttcaccaccagagcccacgtgttccagatcgaccccaacaccaagaagaactggatgcccgccagcaagcaggccgtgaccgtgagctacttctacgacgtgaccagaaacagctacagaatcatcagcgtggacggcgccaaggtgatcatcaacagcaccatcacccccaacatgaccttcaccaagaccagccagaagttcggccagtgggccgacagcagagccaacaccgtgttcggcctgggcttcagcagcgagcagcagctgaccaagttcgccgagaagttccaggaggtgaaggaggccgccaagatcgccaaggacaagacccaggagaagatcgagaccagcagcaaccacagccaggagagcggcagagagacccccagcagcacccaggccagcagcgtgaacggcaccgacgacgagaaggccagccacgccggccccgccaacacccacctgaagagcgagaacgacaagctgaagatcgccctgacccagagcgccgccaacgtgaagaacgagatcaacagagagaaggagaagaacacccagctgaagagaagaatcgaggagctggaggccgagctgagagagaaggagaccgagctgaaggacctgagaaagcagagcgagatcatcccccagctgatgagcgagtgcgagtacgtgagcgagaagctggaggccgccgagagagacaaccagaacctggaggacaaggtgagaagcctgaagaccgacatcgaggagagcaagtacagacagagacacctgaaggtggagctgaagagcttcctggaggtgctggacggcaagatcgacgacctgcacgacttcagaagaggcctgagcaagctgggcaccgacaactag

SEQ ID NO: 261570 - protein, 410 aa, Artificial Sequence
  derived and/or modified sequence
MEQKPSKVECGSDPEENSARSPDGKRKRKNGQCSLKTSMSGYIPSYLDKDEQCVVCGDKATGYHYRCITCEGCKGFFRRTIQKNLHPTYSCKYDSCCVIDKITRNQCQLCRFKKCIAVGMAMDLVLDDSKRVAKRKLIEQNRERRRKEEMIRSLQQRPEPTPEEWDLIHIATEAHRSTNAQGSHWKQRRKFLPDDIGQSPIVSMPDGDKVDLEAFSEFTKIITPAITRVVDFAKKLPMFSELPCEDQIILLKGCCMEIMSLRAAVRYDPESDTLTLSGEMAVKREQLKNGGLGVVSDAIFELGKSLSAFNLDDTEVALLQAVLLMSTDRSGLLCVDKIEKSQEAYLLAFEHYVNHRKHNIPHFWPKLLMKVTDLRMIGACHASRFLHMKVECPTELFPPLFLEVFEDQEV

SEQ ID NO: 261571 - DNA, 129 bp, Artificial Sequence
  derived and/or modified sequence
atggccagaggacagcagaagattcaatcccaacaaaaaaatgctaagaaacaggcaggccagaaaaagaaacaaggtcatgatcagaaagctgccgctaaggccgctttaatttacacttgcacatag

SEQ ID NO: 261572 - DNA, 1233 bp, Artificial Sequence
  derived and/or modified sequence
atggagcagaagcccagcaaggtggagtgcggcagcgaccccgaggagaacagcgccagaagccccgacggcaagagaaagagaaagaacggccagtgcagcctgaagaccagcatgagcggctacatccccagctacctggacaaggacgagcagtgcgtggtgtgcggcgacaaggccaccggctaccactacagatgcatcacctgcgagggctgcaagggcttcttcagaagaaccatccagaagaacctgcaccccacctacagctgcaagtacgacagctgctgcgtgatcgacaagatcaccagaaaccagtgccagctgtgcagattcaagaagtgcatcgccgtgggcatggccatggacctggtgctggacgacagcaagagagtggccaagagaaagctgatcgagcagaacagagagagaagaagaaaggaggagatgatcagaagcctgcagcagagacccgagcccacccccgaggagtgggacctgatccacatcgccaccgaggcccacagaagcaccaacgcccagggcagccactggaagcagagaagaaagttcctgcccgacgacatcggccagagccccatcgtgagcatgcccgacggcgacaaggtggacctggaggccttcagcgagttcaccaagatcatcacccccgccatcaccagagtggtggacttcgccaagaagctgcccatgttcagcgagctgccctgcgaggaccagatcatcctgctgaagggctgctgcatggagatcatgagcctgagagccgccgtgagatacgaccccgagagcgacaccctgaccctgagcggcgagatggccgtgaagagagagcagctgaagaacggcggcctgggcgtggtgagcgacgccatcttcgagctgggcaagagcctgagcgccttcaacctggacgacaccgaggtggccctgctgcaggccgtgctgctgatgagcaccgacagaagcggcctgctgtgcgtggacaagatcgagaagagccaggaggcctacctgctggccttcgagcactacgtgaaccacagaaagcacaacatcccccacttctggcccaagctgctgatgaaggtgaccgacctgagaatgatcggcgcctgccacgccagcagattcctgcacatgaaggtggagtgccccaccgagctgttcccccccctgttcctggaggtgttcgaggaccaggaggtgtag

SEQ ID NO: 261573 - DNA, 1233 bp, Artificial Sequence
  derived and/or modified sequence
atggagcagaagccatctaaggtcgagtgtgggtcagatcccgaagaaaactctgcaagaagtcctgacggaaagagaaagagaaaaaacggtcaatgctctctgaagacttccatgtcaggatacatcccttcttacctagataaagacgagcagtgtgtggtttgtggggacaaggctactgggtaccactacaggtgtatcacttgtgaaggctgcaagggattcttccgacgaaccatccagaagaatctccatcctacttactcatgcaagtatgactcatgctgtgtgatagataaaatcactagaaaccagtgtcagctctgtcgcttcaagaagtgtatcgctgtaggtatggctatggatcttgtcttggacgactctaaacgcgtagcaaaacgcaaattgattgaacagaaccgcgagaggcgtaggaaggaagaaatgatcagatccttacaacagagaccagagccaacccccgaggagtgggacctcatccatattgccactgaggcacataggtcaactaacgcccaggggtcccattggaaacaacggagaaagtttctgcccgatgacataggccagagtcctattgtctcaatgcctgacggcgataaggttgacctggaagctttcagcgaattcaccaagattataacccccgccatcacaagagtggtagattttgccaagaagctgcctatgtttagcgagctcccgtgtgaagatcagataatcctcctaaaaggttgctgtatggaaattatgtccctcagagcagcggtcagatacgatcccgagtcagatactctgactttgtctggggaaatggcagtgaagcgggaacagctgaaaaacggcgggcttggagtcgtgagcgacgccatatttgagctgggcaaatccctgagcgcatttaatctagacgacactgaggtggccttgctccaggcagtgctgctcatgtctacagaccgaagcggtctgctatgcgtagacaagatagagaagagccaggaagcctatctgcttgcttttgagcactacgtaaaccatagaaagcacaatatcccacatttttggcctaagctgttgatgaaggtgactgatctgagaatgattggggcatgtcacgctagccggtttttacacatgaaggtagagtgccccaccgagctttttccacccctgtttctggaggtgtttgaggatcaggaggtgtag

SEQ ID NO: 261574 - DNA, 1233 bp, Artificial Sequence
  derived and/or modified sequence
atggagcagaaacctagcaaggttgaatgtggtagtgaccccgaggagaactctgcgcgctctcctgatggaaaacgaaagcgtaaaaatgggcagtgctcacttaagacttcaatgtccggctacatcccaagctatctggataaggatgaacaatgcgtggtgtgcggggacaaggccaccgggtaccactaccgctgtatcacctgtgaggggtgtaagggtttttttcgtaggactatacaaaagaaccttcaccccacttattcctgtaagtatgacagctgttgtgtaatagataagattacacgaaaccagtgtcagctgtgcaggttcaaaaagtgtatagctgttggcatggcgatggacttggtcctcgatgatagtaagcgggtcgccaagagaaaactcatcgaacagaacagagagagacggaggaaagaggaaatgatccgttccttgcagcagcggccagaaccaacgcccgaagaatgggatctgattcatattgcaacagaggcacatcgaagcacaaacgctcagggaagtcattggaaacaaaggcggaagtttctccctgacgacattgggcagtccccaattgtatcgatgcccgatggagacaaggttgacctggaagccttttccgagtttaccaaaattatcacaccagctatcactcgggtcgtcgactttgctaaaaagctgccgatgttcagtgagttgccctgcgaagatcagatcatccttcttaaaggctgctgtatggagatcatgtctttgagggctgcagtgaggtacgaccccgagagcgacaccctgacgctctctggcgagatggcagtgaagcgtgaacaactaaaaaatggcgggctgggagttgtctcggacgctattttcgagcttgggaagagtttgagtgctttcaacctcgatgacacagaagtggctctgctccaggcagtgcttttaatgtctactgatagaagcggacttctgtgcgtagacaagattgagaagagtcaagaggcttacctgctcgctttcgagcactacgttaaccacagaaagcacaatatcccacacttttggccaaaactgctcatgaaagtaaccgacctgcgcatgataggtgcatgtcatgcaagtcggttcctgcatatgaaagtggagtgtcccaccgaacttttccctccgctcttcctcgaggtgtttgaagaccaggaagtctag

SEQ ID NO: 261575 - DNA, 1233 bp, Artificial Sequence
  derived and/or modified sequence
atggagcagaagcccagcaaggtggagtgtggcagtgaccctgaggagaacagcgcccggagcccagatggcaagaggaagaggaagaatggccagtgcagcctgaagacctccatgagcggctacatccccagctacctggacaaggatgagcagtgtgtggtgtgtggggacaaggccaccggctaccactaccgctgcatcacctgtgagggctgcaagggcttcttccggaggaccatccagaagaacctgcaccccacctacagctgcaagtatgacagctgctgcgtgattgacaagatcaccaggaaccagtgccagctgtgccgcttcaagaagtgcatcgctgtgggcatggccatggacctggtgctggatgacagcaagagggtggccaagaggaagctgattgagcagaaccgggagaggaggaggaaggaggagatgatccgcagcctgcagcagaggcctgagcccaccccagaggagtgggacctgatccacatcgccacagaggcccacaggagcaccaatgcccagggcagccactggaagcagaggaggaagttcctgcctgatgacatcggccagagccccatcgtgtccatgccagatggagacaaggtggacctggaggccttcagcgagttcaccaagatcatcaccccagccatcaccagggtggtggactttgccaagaagctgcccatgttcagcgagctgccctgtgaggaccagatcatcctgctgaagggctgctgcatggagatcatgagcctgcgggctgctgtgcgctatgaccctgagagtgacaccctgaccctgtctggagagatggctgtgaagcgggagcagctgaagaatggaggcctgggcgtggtgtctgatgccatctttgagctgggcaagagcctgagcgccttcaacctggatgacacagaggtggccctgctgcaggccgtgctgctgatgagcacagacaggagcggcctgctgtgtgtggacaagattgagaagagccaggaggcctacctgctggcctttgagcactacgtgaaccacaggaagcacaacatcccccacttctggcccaagctgctgatgaaggtgacagacctgaggatgattggagcctgccacgccagccgcttcctgcacatgaaggtggagtgccccacagagctgttccccccactcttcctggaggtgtttgaggaccaggaggtgtag

SEQ ID NO: 261576 - DNA, 1233 bp, Artificial Sequence
  derived and/or modified sequence
atggagcagaagcccagcaaggtggagtgcggcagcgaccccgaggagaatagcgcccgcagccctgatggaaaacgaaaacggaaaaacgggcagtgttccttgaaaacttcaatgtctgggtacattcccagctatctggacaaagacgagcagtgcgtcgtatgtggagacaaggccaccgggtatcactataggtgcataacatgtgagggctgtaaggggtttttcagaaggaccattcagaagaaccttcaccctacttacagctgcaagtatgactcgtgctgcgttatagacaagattaccagaaaccaatgccaattgtgccgatttaaaaaatgcatagcagtcggaatggccatggacctagtgctcgatgacagcaaaagggtggcgaaaagaaaacttatcgagcagaaccgcgagaggcggagaaaggaagaaatgatcaggtcccttcagcagcgtcccgagcccacacccgaggaatgggacttgatccacattgcgaccgaggcacacaggtctactaacgctcagggaagtcattggaagcagcgaagaaaatttctgcccgatgacatcggccaatcccctatcgtgagcatgcccgacggcgacaaggtggacctggaggcctttagcgagtttacgaagatcatcaccccagcaataaccagggtggtcgattttgctaagaagcttccaatgttttctgagctgccctgcgaagaccagatcatcttactgaagggctgttgcatggagataatgagcctgcgggccgccgtccggtacgaccctgagtccgacacgctcaccctgtctggcgagatggctgttaagagagaacagttgaagaacggaggattgggggtggtaagcgatgcaatctttgagttggggaagtccctcagtgcttttaacttggacgacacagaagtagcactacttcaggccgtcttgctgatgtcgacggacagaagcggcctgctttgcgtggataagatcgaaaagagccaggaggcctacctgctcgcatttgaacactatgtcaatcacagaaagcataacatcccgcatttttggcccaaactgctgatgaaggttaccgatctccggatgatcggagcttgtcacgcctcccgattcctgcacatgaaggtcgaatgtcctaccgagctgtttcctcccttgtttttggaagtctttgaggaccaggaggtttag

SEQ ID NO: 261577 - DNA, 1233 bp, Artificial Sequence
  derived and/or modified sequence
atggagcagaagcccagcaaggtggagtgcggcagcgaccccgaggagaattcggcccgcagtcccgacggaaagaggaagaggaaaaacggacagtgcagcctcaaaacatccatgtcaggttatataccatcgtatctggacaaagacgagcagtgcgtggtgtgtggtgataaagccactggttatcactatcggtgtattacttgcgaaggctgcaaggggttcttcaggcgcactattcagaaaaatctgcaccccacatatagctgtaagtacgatagctgctgtgtcatcgacaagataactcgaaatcagtgtcagttgtgtagattcaagaagtgcattgcggtgggaatggccatggacttggtactggacgacagcaagcgcgtggcaaagaggaagctgattgaacagaaccgtgagcgccggagaaaggaggagatgattagatcgctgcagcaaaggcctgagccaacacccgaggagtgggacctgatccacattgcaaccgaggcccaccgctcaaccaatgcacaaggatcccattggaagcaaaggagaaagttccttccggatgacattggacagtcacctatagtctccatgccagacggagataaagtggatctcgaggcattctcggagttcactaaaattatcacccccgctatcacgcgcgtcgtggactttgccaagaagctgccgatgttttcggagctcccatgcgaagaccaaataattctgttgaagggttgctgcatggagatcatgagcttacgggccgcggtgagatatgacccagaatccgacactctaactctttcaggcgaaatggccgttaagagagaacagctcaaaaacggtggtctcggggtggtaagtgatgccatatttgagctggggaagtcactttcagcctttaacctggacgacacggaagtagccctgctgcaggctgtgttactgatgtctacagaccggtctggcctgctgtgtgtggataaaattgagaaatcacaagaggcctacctcctggcgttcgaacattatgtgaaccatcgtaagcacaacatacctcacttctggccaaagctcctaatgaaggtcactgatttgcggatgattggcgcctgtcatgcatcacgatttctgcacatgaaggtcgaatgcccaaccgagctgttcccccccttgtttttagaagtcttcgaggaccaggaagtctag

SEQ ID NO: 261578 - DNA, 1233 bp, Artificial Sequence
  derived and/or modified sequence
atggagcaaaagccttctaaagtcgaatgcggcagcgaccctgaggagaacagtgcaagaagcccggatggtaagaggaagagaaagaatgggcagtgcagtttaaaaacatctatgagtgggtacattccatcttatctggacaaggacgagcagtgcgtggtttgtggggataaggcgaccggataccactaccgatgcatcacatgtgaggggtgtaaaggcttcttccgtcgcactattcaaaagaacctccatcctacttattcttgcaagtacgactcttgctgtgtgatcgacaagatcactcggaatcagtgccagttgtgtcgcttcaagaagtgcatagccgttggaatggctatggatttggtccttgacgatagtaagcgggtcgccaaacgcaagctgatcgaacaaaaccgcgagcgcagacgcaaggaggagatgatacggagtctgcagcagcggccagaacctactccggaagagtgggacttgatccacatcgctaccgaggcccatcgttccactaacgcacagggttctcactggaagcagagacggaaattccttccagatgatataggtcagagcccgatcgtttcgatgccagacggggataaagtcgacctcgaggctttctctgaatttaccaaaatcatcactcccgcaattaccagagtggtggatttcgcgaaaaagctgccaatgtttagcgagctcccctgtgaagaccagatcatcctgctcaaaggctgctgcatggagattatgagccttcgcgcagccgtgcgatatgatcccgaatccgatactttgacgctgtccggtgagatggccgttaagcgagagcagttgaagaatggtgggttgggtgtagtgagcgacgcgatattcgaactcgggaagtccctcagtgcttttaatctggacgatacagaagttgcactgcttcaggccgtgctgcttatgagtacagatcggtctgggctgctctgcgtggacaagatagagaaaagccaggaggcatacctgctagcgttcgaacattacgtgaaccacaggaagcataatatcccacatttctggcccaagctgctcatgaaagtgactgatcttagaatgatcggcgcatgtcacgcctcacgcttcttgcatatgaaagtcgagtgcccaacggaattattccctcccctcttccttgaagtgtttgaagaccaggaggtctag

SEQ ID NO: 261579 - DNA, 1233 bp, Artificial Sequence
  derived and/or modified sequence
atggagcagaagccttccaaagtcgagtgcgggtccgatcctgaggaaaatagtgctcgttcccctgacggaaaaagaaagaggaagaatggtcagtgttctctcaaaacctcaatgagcggctatatcccatcgtacttagacaaggatgaacagtgtgtggtatgcggcgacaaggccacaggctatcactatcgctgcattacatgcgaagggtgcaagggtttttttcggagaaccatacagaaaaatcttcatccaacatattcttgcaaatacgattcgtgctgtgtcatcgataagatcacgcgaaatcagtgccaactctgtaggtttaagaagtgcatcgccgtcggtatggcgatggacttagtgttggatgattcgaagcgcgtggccaagcgaaaactcattgaacagaatagagagaggcgtaggaaagaagaaatgattcggagcttacaacaaaggcccgaacccacgcccgaagaatgggatctgattcacatagcaactgaagcgcaccggtccactaatgctcagggcagtcactggaaacagcgcagaaaattcctgcccgatgatatcgggcagtctcctattgtgagcatgccggacggtgataaggtggacttggaagccttctctgagttcaccaagattataacaccagccattacgagggtcgtagacttcgccaagaagttgcccatgttttcagagttaccctgcgaggaccagatcattctcctaaaaggatgctgtatggagatcatgagcctgcgggcagcggtaaggtatgatcctgaatcagacacccttaccctgagcggcgaaatggctgttaaacgcgagcagctcaaaaacggtggacttggggtcgtctccgacgctatttttgagctggggaagtccttaagcgcttttaatttggacgacaccgaggttgcgctgctacaggctgttcttttgatgagtactgacagaagcggactcctgtgcgtagataagattgagaagtcccaggaggcctatttgctggccttcgagcactacgttaaccatcggaaacacaatatccctcacttctggcccaagctcctgatgaaggtcactgatctgagaatgatcggggcatgtcacgcatccaggttcctgcatatgaaagtggagtgtcccactgaattgttccccccactctttctggaagtgtttgaagaccaggaggtgtag

SEQ ID NO: 261580 - DNA, 4895 bp, Artificial Sequence
  derived and/or modified sequence
gcggccgccgcctctgccggaggagccgcggggccgccacactcgccccccgccccccccgcgctcactcgcactcacacccgggcgcaggaggcgggcggcccgggccccaccggccccccatggacgcccccagcacggggcgctgagacccccgcgtcgctgcccagcccggtccggcgcgccacgccgagggatctctggacaggacaagactccgaagctactcccccagcacacagcccgggacccacaaacccagcttgcccccagccctcccacctgccactccctggcccctcccaccgcccgccccccttggggcgcagggcatggtgtgaaaggccaagtgctgaggcgggtatcatgggtgctgtgccctagggcctgggtggcagggggtgggtggcctgtgggtgtgccgggggggccagtgtgcccaccccagtctcttggcgtgctggagggcatcctggatggaattgaagtgaatggaacagaagccaagcaaggtggagtgtgggtcagacccagaggagaacagtgccaggtcaccagatggaaagcgaaaaagaaagaacggccaatgttccctgaaaaccagcatgtcagggtatatccctagttacctggacaaagacgagcagtgtgtcgtgtgtggggacaaggcaactggttatcactaccgctgtatcacttgtgagggctgcaagggcttctttcgccgcacaatccagaagaacctccatcccacctattcctgcaaatatgacagctgctgtgtcattgacaagatcacccgcaatcagtgccagctgtgccgcttcaagaagtgcatcgccgtgggcatggccatggacttggttctagatgactcgaagcgggtggccaagcgtaagctgattgagcagaaccgggagcggcggcggaaggaggagatgatccgatcactgcagcagcgaccagagcccactcctgaagagtgggatctgatccacattgccacagaggcccatcgcagcaccaatgcccagggcagccattggaaacagaggcggaaattcctgcccgatgacattggccagtcacccattgtctccatgccggacggagacaaggtggacctggaagccttcagcgagtttaccaagatcatcaccccggccatcacccgtgtggtggactttgccaaaaaactgcccatgttctccgagctgccttgcgaagaccagatcatcctcctgaaggggtgctgcatggagatcatgtccctgcgggcggctgtccgctacgaccctgagagcgacaccctgacgctgagtggggagatggctgtcaagcgggagcagctcaagaatggcggcctgggcgtagtctccgacgccatctttgaactgggcaagtcactctctgcctttaacctggatgacacggaagtggctctgctgcaggctgtgctgctaatgtcaacagaccgctcgggcctgctgtgtgtggacaagatcgagaagagtcaggaggcgtacctgctggcgttcgagcactacgtcaaccaccgcaaacacaacattccgcacttctggcccaagctgctgatgaaggtgactgacctccgcatgatcggggcctgccacgccagccgcttcctccacatgaaagtcgagtgccccaccgaactcttccccccactcttcctcgaggtctttgaggatcaggaagtctaaagcctcaggcggccagagggtgtgcggagctggtggggaggagcctggagagaaggggcagagctgggggctgagggagacccccccacaccccttctctccttcctctcgtccttggatagattcagctcccacacacacacccgcactgcccaggtccctcctcagacctccagccctgggacagggcaaacaactgaacttgctatggaaaggacagtgtgggaggctgggggagctgtgtcctgcagttcccaggaccccatcctctcagaaggtaggggaagggcgggaggattgagaagggacaagccaccttgaccgtaggggaaggaggaatgtgggctgggggaagatgccctcaactcaccccctacacacacatgagagagagcccccacccagttccttggcctaggtctcccctccaggctgagggcctctctacttccccagatgcctgggtgcaaagaacggcttggcttggctcctcctctggaggttaaaatttatagtcattctaactgcactttggaaaccaagcaaggggagaagacaaatgaagaaaaactagacagagagaaaaatacaaaaaagagagagcgagcgatagagagagatgatattaagttattaactgaggctgaccagaggggaggaccccccctttaccaccccatgcactttgcgagctgccccttcttcccccacatcagagagaaatgcccccacaccagagccccaagggtagggctgccgatcagagctgtgagttaacacaacagggtcctggccaccccccttgccataccccgccctctgtgcccctttggcaccccccaaccctagtatgtcctctgctttctgccactcgtgcccgctgagttccatctacctctcatgctggatgccagctggcccctcaccagcctgccctgctgcccacacagctcccctttaagtgcccagccctaggggcctctccccatccacctcctccttccacaccttggcacccacccaggaaaaaactgtggctccaactcctaccctccttatatcctgcagtattagctagaaaccggatgctgctgcattggttgggtcgggggtaggagggctgtgcgtgagcgtctcccagaaccctccacccctttagcactctgtttccctgtttcccatctgtcttctgggctctctctaacctctgccctcctccccagctcctactcactgcactaactctgggcgggcaggtaccagaatgggggtgtttagataagtgacacttagttggggccccaggggaggggtggtcggtgctcctttttctttaaagctcttttggccagctgcccctctgccccgggaccccttcccctcttcttttctctaattcagggactttggcttgagcccctctcgccctcctggtgagggtgctctgttggtctgcacttgggtgagctgtcctcctccccctccctgtggctgccgcccactcctcaggggagagagggagagaggaggtggtcctcccatgggagcaggaggtggggtgggacagagcagaccagagggtgctgggctcagggctgcatgtcggcagggatggatgggtggacacagatgcccccggaagccatggggattggggcagggggtggggggaggggtgccagggcttcctgcgctttgcactattggggcaaaaatgtcttaagcagtggggaacctgccaccccaccctgaccctcagcctgccacagccccctacacacacacacacacacacacacacacacacacacacacggacatgcacacacggacatgggaaggcaatgctatgctgcccgtcagggcactgtccttccccaatcgttcaggtgttccaacaggggtggagggcctggaggagcacccgctgtcacctgtgcatgtgcctgtcccaccctgctggggcctcgggctgcccgcgctgtctttgtctctatcctctctctctctcctggagtactgaatcctgtattactccagtcccatgggtaggccctcttgtaccttcctaccacgcctgggggcccagtggaattcctgacctgtctgctgtcttccccatccctccatccccaccccaacccctccatccccattctcagccatggacacggcagagaaaaggccttgaagagccttagcctcttataggcacttgggactcccccaccctccccaatcatatgagctgtgatcccatcctccccggacccctcccttccccctcggtgatgtggggtgtatgtgtgcgttcctctgcgtgaatgtgtgagtgagtacacatggtaggggaggagccagggcgactcaggagtgccacgcacctgctctagagcggcagctgtcccagtccctgctgtggaagtgggggacagggccctctcctgggggccattggtgctaatgagggggatggccttgatgtgggtgctcagcatgcctcccccagtattggcccggggcactagggcaggcagggtggagcagcaggtgcagtatcggtgggaggacgggttgctgggaataggacgagggggccaggccaggacaaggggttgccagagccatgaccactaccccgcccccaccacccgcctctccatctcagtattgcccctcccatcactcataacacacatacctcatccagcctcctccctgctcagacttggggagggtgggggaggagcccctaccccttctcctggtggcgggtctgcagggctgggagagggcagggcgttgtgagagagagaccgtccataaggaggacagtaactcctgccctgggaactcctgggcgggggggagggggacactgcccagaggcgctactgaatgtatgagaagctggtgctgggctggggggaggggggttgtggccagaaacagggaaggaggtaggtctcttccccagggaggggtgggaccggcaggggtgacttgaggggctcctactcctgccccacgttgacaatcagtatgtctgttatgtgcgatttttcaccccgttgtgttttgggtcaggattttaaagaaagatatttttatggtaattgttgctcgtctattttactatatatttatgtaataaatatatgatgaaaataa

SEQ ID NO: 261581 - DNA, 1909 bp, Artificial Sequence
  derived and/or modified sequence
gtgcacgcatccatgtgagagtgtttttgtgcatgtgtgggctggggagggctctgaatatctcctggaacggtacccagagccctgtggctctgcgcatgcgggggatctctggacaggacaagactccgaagctactcccccagcacacagcccgggacccacaaacccagcttgcccccagccctcccacctgccactccctggcccctcccaccgcccgccccccttggggcgcagggcatggtgtgaaaggccaagtgctgaggcgggtatcatgggtgctgtgccctagggcctgggtggcagggggtgggtggcctgtgggtgtgccgggggggccagtgtgcccaccccagtctcttggcgtgctggagggcatcctggatggaattgaagtgaatggaacagaagccaagcaaggtggagtgtgggtcagacccagaggagaacagtgccaggtcaccagatggaaagcgaaaaagaaagaacggccaatgttccctgaaaaccagcatgtcagggtatatccctagttacctggacaaagacgagcagtgtgtcgtgtgtggggacaaggcaactggttatcactaccgctgtatcacttgtgagggctgcaagggcttctttcgccgcacaatccagaagaacctccatcccacctattcctgcaaatatgacagctgctgtgtcattgacaagatcacccgcaatcagtgccagctgtgccgcttcaagaagtgcatcgccgtgggcatggccatggacttggttctagatgactcgaagcgggtggccaagcgtaagctgattgagcagaaccgggagcggcggcggaaggaggagatgatccgatcactgcagcagcgaccagagcccactcctgaagagtgggatctgatccacattgccacagaggcccatcgcagcaccaatgcccagggcagccattggaaacagaggcggaaattcctgcccgatgacattggccagtcacccattgtctccatgccggacggagacaaggtggacctggaagccttcagcgagtttaccaagatcatcaccccggccatcacccgtgtggtggactttgccaaaaaactgcccatgttctccgagctgccttgcgaagaccagatcatcctcctgaaggggtgctgcatggagatcatgtccctgcgggcggctgtccgctacgaccctgagagcgacaccctgacgctgagtggggagatggctgtcaagcgggagcagctcaagaatggcggcctgggcgtagtctccgacgccatctttgaactgggcaagtcactctctgcctttaacctggatgacacggaagtggctctgctgcaggctgtgctgctaatgtcaacagaccgctcgggcctgctgtgtgtggacaagatcgagaagagtcaggaggcgtacctgctggcgttcgagcactacgtcaaccaccgcaaacacaacattccgcacttctggcccaagctgctgatgaaggtgactgacctccgcatgatcggggcctgccacgccagccgcttcctccacatgaaagtcgagtgccccaccgaactcttccccccactcttcctcgaggtctttgaggatcaggaagtctaaagcctcaggcggccagagggtgtgcggagctggtggggaggagcctggagagaaggggcagagctgggggctgagggagacccccccacaccccttctctccttcctctcgtccttggatagattcagctcccacacacacacccgcactgcccaggtccctcctcagacctccagccctgggacagggcaaacaactgaacttgctatggaaaggacagtgtgggaggctgggggagctgtgtcctgcagttcccaggaccccatcctctcag

SEQ ID NO: 261582 - DNA, 2352 bp, Artificial Sequence
  derived and/or modified sequence
atggccaagtacaacaccggcggcaaccccaccgaggacgtgagcgtgaacagcagacccttcagagtgaccggccccaacagcagcagcggcatccaggccagaaagaacctgttcaacaaccagggcaacgccagcccccccgccggccccagcaacgtgcccaagttcggcagccccaagccccccgtggccgtgaagcccagcagcgaggagaagcccgacaaggagcccaagccccccttcctgaagcccaccggcgccggccagagattcggcacccccgccagcctgaccaccagagaccccgaggccaaggtgggcttcctgaagcccgtgggccccaagcccatcaacctgcccaaggaggacagcaagcccaccttcccctggccccccggcaacaagcccagcctgcacagcgtgaaccaggaccacgacctgaagcccctgggccccaagagcggccccaccccccccaccagcgagaacgagcagaagcaggccttccccaagctgaccggcgtgaagggcaagttcatgagcgccagccaggacctggagcccaagcccctgttccccaagcccgccttcggccagaagccccccctgagcaccgagaacagccacgaggacgagagccccatgaagaacgtgagcagcagcaagggcagccccgcccccctgggcgtgagaagcaagagcggccccctgaagcccgccagagaggacagcgagaacaaggaccacgccggcgagatcagcagcctgcccttccccggcgtggtgctgaagcccgccgccagcagaggcggccccggcctgagcaagaacggcgaggagaagaaggaggacagaaagatcgacgccgccaagaacaccttccagagcaagatcaaccaggaggagctggccagcggcaccccccccgccagattccccaaggcccccagcaagctgaccgtgggcggcccctggggccagagccaggagaaggagaagggcgacaagaacagcgccacccccaagcagaagcccctgccccccctgttcaccctgggcccccccccccccaagcccaacagaccccccaacgtggacctgaccaagttccacaagaccagcagcggcaacagcaccagcaagggccagaccagctacagcaccaccagcctgcccccccccccccccagccaccccgccagccagccccccctgcccgccagccaccccagccagccccccgtgcccagcctgccccccagaaacatcaagccccccttcgacctgaagagccccgtgaacgaggacaaccaggacggcgtgacccacagcgacggcgccggcaacctggacgaggagcaggacagcgagggcgagacctacgaggacatcgaggccagcaaggagagagagaagaagagagagaaggaggagaagaagagactggagctggagaagaaggagcagaaggagaaggagaagaaggagcaggagatcaagaagaagttcaagctgaccggccccatccaggtgatccacctggccaaggcctgctgcgacgtgaagggcggcaagaacgagctgagcttcaagcagggcgagcagatcgagatcatcagaatcaccgacaaccccgagggcaagtggctgggcagaaccgccagaggcagctacggctacatcaagaccaccgccgtggagatcgactacgacagcctgaagctgaagaaggacagcctgggcgcccccagcagacccatcgaggacgaccaggaggtgtacgacgacgtggccgagcaggacgacatcagcagccacagccagagcggcagcggcggcatcttcccccccccccccgacgacgacatctacgacggcatcgaggaggaggacgccgacgacggcttccccgccccccccaagcagctggacatgggcgacgaggtgtacgacgacgtggacaccagcgacttccccgtgagcagcgccgagatgagccagggcaccaacgtgggcaaggccaagaccgaggagaaggacctgaagaagctgaagaagcaggagaaggaggagaaggacttcagaaagaagttcaagtacgacggcgagatcagagtgctgtacagcaccaaggtgaccaccagcatcaccagcaagaagtggggcaccagagacctgcaggtgaagcccggcgagagcctggaggtgatccagaccaccgacgacaccaaggtgctgtgcagaaacgaggagggcaagtacggctacgtgctgagaagctacctggccgacaacgacggcgagatctacgacgacatcgccgacggctgcatctacgacaacgactag

SEQ ID NO: 261583 - DNA, 2352 bp, Artificial Sequence
  derived and/or modified sequence
atggctaaatataacactgggggaaaccccaccgaagatgtctcagtaaatagcaggccatttcgtgtaaccgggcccaatagcagttccgggatacaggctaggaaaaacctcttcaataaccaggggaacgcttctccaccagccggccccagcaacgtgcctaagttcggcagcccaaaaccccccgtggctgttaaaccatcttcagaggagaagcccgacaaagagcctaaacctccctttctgaaaccaaccggcgccggacagcggtttgggactccggcttccctgaccaccagagacccagaggcaaaggtaggatttctgaagcctgtggggcctaaaccaattaatctcccaaaggaagattcaaagcctactttcccttggccccccggcaacaaacccagtctgcactccgtaaaccaggatcacgatctaaagcccctgggcccaaaatccggcccaaccccaccaaccagcgagaacgaacagaagcaggccttccccaagcttacaggagtgaagggcaaattcatgagtgcatcccaggacctggaaccaaaaccacttttccccaagccggcatttggccagaagccccccctgagcacagaaaacagccatgaagatgagtctccaatgaagaacgtgtcctcatctaaggggtctcctgccccactgggcgtgaggtccaaatcaggtccattaaagccagcacgcgaggactccgaaaacaaggaccatgcaggcgagatcagtagtctgccgttcccaggcgtagttttaaagccagccgcctctaggggaggacccggactatcaaagaacggggaggagaagaaagaggacagaaaaattgacgctgccaagaatactttccagtccaaaatcaaccaggaggagctagcctccggtaccccccccgctcgctttccaaaagcaccatccaagctcacagttggtgggccgtggggccagagtcaggaaaaggagaaaggggacaagaattctgcaacccctaagcaaaaacccttgcctccgctgtttacgttgggccccccaccccctaagcccaacagacccccgaacgtggacttaaccaagtttcataagacaagtagcggaaactccacaagcaagggtcagacatcctatagtacaacaagcttaccaccaccacctccatcgcacccagccagccagccacctttgccagcgtcgcacccctcccaacctccagtgccctcgctgccgccccgcaacatcaagccccctttcgatctgaaaagccctgtgaatgaggataaccaggacggcgtcacacactcagacggtgccggcaacctggacgaggagcaagacagtgagggcgaaacttacgaagatatagaagcatcaaaagagcgcgaaaagaagagggagaaggaggagaaaaaaagactggaactggaaaaaaaggagcagaaggaaaaggagaaaaaagagcaggaaattaagaagaagttcaagctgactggacctatccaagttattcatttggcgaaggcctgttgtgacgtgaaaggagggaagaatgaactatcattcaagcaaggtgaacagatcgaaatcatccggattaccgacaatcccgaaggaaagtggcttggccgcactgcccgtggttcatatggctatattaagacaacagcagtggaaattgactacgatagcctcaagctgaagaaagactcccttggagctccatcccgtcctatcgaagacgatcaagaggtttacgacgacgttgccgagcaagatgacatctcatctcacagtcagtctggctctgggggaattttcccccctccacctgacgacgacatctatgacgggattgaggaagaggacgctgatgacgggtttccggctccgccaaagcagcttgatatgggagacgaagtgtacgatgacgtggacacctccgattttcccgtgagctcagccgaaatgagtcagggcacgaatgtggggaaagctaaaacagaggagaaagatttgaaaaagttgaagaaacaggaaaaggaggagaaagatttcagaaagaaattcaagtacgatggggaaatccgagtgctttatagtacaaaggttactacatcaattacttctaaaaaatggggtacacgcgatctgcaggtaaaacctggagagtccctagaagtcattcagacaacagatgataccaaggtgctatgcagaaacgaagaagggaagtacgggtacgtgctaagaagttatctagccgacaatgatggagaaatctatgatgacattgctgatggctgtatctacgataatgactag

SEQ ID NO: 261584 - DNA, 2352 bp, Artificial Sequence
  derived and/or modified sequence
atggctaaatataacactggagggaatcccaccgaggatgtctccgtgaattcacggccctttagagtaaccgggccaaattcatcatcaggcatccaggcacgaaagaacctgttcaacaatcagggcaatgcgtccccacccgccggcccctcaaacgtgcccaagtttggctcacctaagcccccagtggccgttaagcccagctccgaagagaaaccagacaaggaaccgaagccccccttccttaaacccactggggccgggcagcgcttcggtacacctgcttctctgactacccgtgatcctgaggctaaggtcgggttcctgaagcccgttggcccaaagcccattaatttgccaaaagaagactcgaagcctacttttccctggcccccggggaataagcccagtctccattctgttaatcaggatcatgatttaaagccattagggcctaaatcagggcctaccccacccacatcagagaacgagcagaaacaagcgtttccaaaacttacgggggtgaaagggaaatttatgagtgctagccaggacctcgagcccaagcccctgttccccaagccggcattcggacagaaaccgcctctcagtaccgagaacagtcacgaggacgaatctccaatgaagaatgtctccagttccaaaggctcccccgctcctctaggagttaggagcaagagcggcccgctaaaacctgcccgcgaggattcagaaaacaaagaccatgccggcgagatcagttctctccctttcccgggggtcgtattgaagcctgccgcaagccgtggtggccccggactgtccaaaaacggtgaggaaaagaaggaagataggaaaatcgacgccgccaagaatacattccaaagcaaaataaaccaggaggagctggccagcgggacaccaccagctcggttcccaaaagcaccaagcaaactcactgtgggaggtccttggggccaatcacaggaaaaggaaaagggcgataagaactctgctacacccaaacaaaaaccactaccacccctgttcaccctgggccctccaccccccaagcccaaccgacctcctaatgtggatcttacgaaattccacaaaacgagcagcggtaacagcacctctaaggggcagacctcctattcaacaacctccctgcctccaccaccacccagtcaccccgcctcccaaccaccactgcctgcaagccatccaagccagccccctgttccatcattgccaccccgaaatatcaagccaccatttgaccttaaatctcccgtgaatgaggataaccaggatggagtaactcactctgatggggccggcaaccttgatgaagagcaggatagcgagggcgaaacatacgaggacattgaagcatccaaggagcgcgaaaagaagcgcgaaaaggaagagaaaaagaggctggagctggaaaagaaagagcaaaaagagaaggagaagaaagagcaggagatcaaaaagaagtttaaacttacagggccaattcaggtgattcacctcgcaaaagcttgctgtgatgtcaaaggaggcaagaacgagttgagctttaaacagggagagcagatcgagatcatccgtatcactgacaatccagaaggaaaatggttaggcagaaccgcccggggttcctacggatatattaagaccacagccgtggaaatcgactatgattctctgaaactgaaaaaggattcactgggcgcccccagtcgccctatcgaagatgatcaggaggtgtacgatgatgtcgctgagcaggacgatatctccagtcattctcagtctggatccggtgggattttcccccccccaccggatgacgacatctatgatggcatcgaggaggaagacgccgacgacgggtttcctgccccccctaaacagctggatatgggtgatgaagtgtatgatgatgtggacacatcagactttcctgtctcttccgcagaaatgagtcagggcaccaatgtgggtaaagcgaaaaccgaggagaaagatctgaaaaagctcaagaaacaggagaaagaggagaaggattttcggaagaaatttaaatatgatggcgaaatccgggtcttatactcaactaaggtgaccacttctatcacaagtaaaaagtgggggacaagagaccttcaggtcaagccaggtgagtccctggaagtgatccaaaccactgatgacaccaaagttctatgtcgaaacgaagagggaaaatatgggtacgtgctgcggtcgtatctcgccgacaacgacggcgaaatctacgacgacattgcagatggttgtatatatgataacgactag

SEQ ID NO: 261585 - DNA, 2352 bp, Artificial Sequence
  derived and/or modified sequence
atggccaagtacaacacaggaggcaaccccacagaagatgtgtctgtgaacagccggcccttccgggtgacaggccccaacagcagcagcggcatccaggccaggaagaacctcttcaacaaccagggcaatgccagccccccagctggccccagcaatgtgcccaagtttggcagccccaagccccctgtggccgtgaagcccagcagcgaggagaagccagacaaggagcccaagccacccttcctgaagcccaccggggccggccagcgcttcggcaccccagccagcctgaccacccgggaccctgaggccaaggtgggcttcctgaagcctgtgggccccaagcccatcaacctgcccaaggaggacagcaagcccaccttcccctggcccccaggcaacaagcccagcctgcacagcgtgaaccaggaccatgacctgaagcccctgggccccaagagcggccccaccccacccaccagtgaaaatgagcagaagcaggccttccccaagctgactggagtgaagggcaagttcatgtctgccagccaggacctggagcccaagcccctcttccccaagccagccttcggccagaagccacccctgagcacagagaacagccatgaagatgagagccccatgaagaatgtgagcagcagcaagggcagccctgcccccctgggcgtgcgcagcaagagcggccccctgaagccagccagagaagattctgagaacaaggaccatgctggggagatcagcagcctgcccttccctggggtggtgctgaagccagctgccagcagaggaggccctggcctgagcaagaatggagaggagaagaaggaggacaggaagattgatgctgccaagaacaccttccagagcaagatcaaccaggaggagctggccagcggcaccccaccagcccgcttccccaaggcccccagcaagctgactgtgggcggcccctggggccagagccaggagaaggagaagggggacaagaacagcgccacccccaagcagaagcccctgcccccactcttcaccctgggccccccaccacccaagcccaacagacctccaaatgtggacctgaccaagttccacaagaccagcagcggcaacagcaccagcaagggccagaccagctacagcaccaccagcctgcccccacctccacccagccacccagccagccagccccccctgcctgccagccaccccagccagccccctgtgcccagcctgccccccaggaacatcaagcccccatttgacctgaagagccctgtgaatgaagacaaccaggatggagtgacccacagtgatggagctggcaacctggatgaggagcaggacagcgagggggagacctatgaagatattgaggccagcaaggagcgggagaagaagcgggagaaggaggagaagaagaggctggagctggagaagaaggagcagaaggagaaggagaagaaggagcaggagatcaagaagaagttcaagctgaccggccccatccaggtgatccacctggccaaggcctgctgtgatgtgaagggcggcaagaatgagctgtccttcaagcagggcgagcagatcgagatcatccgcatcacagacaaccctgagggcaagtggctgggccgcacagcccggggcagctatggctacatcaagaccacagctgtggagattgattatgacagcctgaagctgaagaaggacagcctgggcgcccccagccggcccattgaagatgaccaggaggtgtatgatgatgtggccgagcaggatgacatcagcagccacagccagagcggcagcggcggcatcttccccccacctccagatgatgacatctatgatggcatcgaggaggaggatgctgatgatggcttccctgccccacccaagcagctggacatgggagatgaggtgtatgatgatgtggacaccagtgacttccctgtgtcctctgctgagatgagccagggcaccaacgtgggcaaggccaagacagaggagaaggacctgaagaagctgaagaagcaggagaaggaggagaaggacttcaggaagaagttcaagtatgatggagagatccgggtgctgtacagcaccaaggtgaccaccagcatcaccagcaagaagtggggcacccgggacctgcaggtgaagccaggagagagcctggaggtgatccagaccacagatgacaccaaggtgctgtgcagaaatgaggagggcaagtatggctacgtgctgcggagctacctggccgacaatgatggagagatctatgatgacattgctgatggctgcatctatgacaatgactag

SEQ ID NO: 261586 - DNA, 2352 bp, Artificial Sequence
  derived and/or modified sequence
atggccaagtacaacaccggcggcaaccccaccgaggacgtgagcgtcaatagccgtcctttcagagttactggacccaacagctcttctggaattcaggccaggaagaatttattcaacaaccagggaaatgcttcaccacctgcaggtcctagcaatgtaccaaagtttggtagtcctaagccccccgtcgccgttaagccgtctagtgaggagaaacccgacaaagagcctaagccaccttttttgaagcccacaggagctggccagcgttttgggacacccgcttccctgaccacccgggacccggaagctaaagtaggatttttaaagcctgtgggaccaaagcctattaacctccctaaagaggattctaagccaaccttcccttggccccctggaaacaagccatcattacatagcgtcaatcaagatcacgaccttaagcctctggggcccaaatctggacctacgcctcctacgagtgagaacgagcagaaacaggcattcccgaaactgactggcgtgaaaggcaagttcatgagtgcttcccaagatctggagccgaaacccctcttccccaaacccgccttcgggcagaagcctccactgagcactgagaacagtcacgaggatgagtcccctatgaagaacgtgagcagtagcaaaggctccccagcccctctgggagttcgatcaaaatccggtccactgaaacccgccagagaagatagtgagaataaggatcacgcgggagaaatcagttcccttcctttccccggagtcgtgctgaaaccagcggcctccagagggggcccaggactgtccaagaacggagaagagaaaaaagaagatcggaagattgacgccgctaaaaatacgttccagtctaagatcaaccaagaggaactagcctcagggacaccccccgctcggtttcctaaagctccatctaagctcaccgtaggaggcccatggggacaatcccaggaaaaggagaaaggcgataagaattccgccaccccaaaacagaagcctctccctccgctgtttacccttggaccccccccgccaaagcccaatcgccctccaaatgtcgatctgacaaaatttcataagaccagctctggtaactctactagcaaaggtcaaacatcatactctactacgagtttgcccccacccccaccaagccatccggcatcccaacctcctctccctgccagtcatccgtcccagccaccagtgccttccctgccaccgcggaatattaagccccccttcgatctgaaatcacctgtgaatgaagataaccaagatggtgttacacatagtgatggcgccggaaatctggatgaagagcaggactctgaaggtgaaacctacgaggatatagaggcgagcaaggagcgtgaaaagaagcgcgagaaagaagagaaaaagcgccttgaactggagaagaaggaacagaaggagaaggagaagaaggaacaggagattaagaagaagttcaagttaaccggccccatccaggtgatacacctagccaaggcctgctgtgatgtcaagggaggcaagaacgagctctcctttaagcagggcgagcagatcgagatcattcgcatcactgacaaccccgagggcaagtggctgggaagaacagcgagaggaagctatggttacatcaagaccacagccgtggagatagactatgactcattaaagctgaagaaggatagcttgggggccccttcccggcccattgaggacgatcaagaggtgtatgacgatgtggctgagcaggacgacatctcctcacatagtcagagcggtagcgggggcatcttcccacccccccctgatgatgatatctatgacgggattgaggaggaggatgccgacgatggtttccctgccccacctaagcagctggacatgggggatgaggtatatgacgatgtggatacctccgacttccctgtcagttcggcagagatgtcccagggaacaaacgtgggtaaggccaagactgaggagaaagacttgaaaaagttgaagaaacaggaaaaggaagaaaaagattttaggaagaagtttaagtacgacggagagatcagagtactgtacagcacgaaggtgaccacttccatcacctccaagaaatggggaacccgagatctgcaagtcaagcccggcgagtccctggaggttattcagactactgatgacacaaaggtgctctgccgaaacgaggagggaaagtatgggtacgtgcttagatcctatcttgccgacaatgatggcgaaatttatgacgatatcgcggacggatgtatctatgacaatgattag

SEQ ID NO: 261587 - DNA, 2352 bp, Artificial Sequence
  derived and/or modified sequence
atggccaagtacaacaccggcggcaaccccaccgaggacgtgagcgtgaacagtcgaccgtttcgcgtcacaggacctaacagcagctctggtattcaggcaagaaagaatttgtttaataatcagggaaacgccagtccacccgctgggccctcaaacgttccaaaatttggatctccaaaacctccagtggccgtaaaaccatcatcagaagagaaaccagacaaggagcccaagccacctttcctgaagccaacaggcgctggccagcggtttggaactcctgccagtcttaccacccgtgacccagaagcgaaagtggggttccttaagccggtcggacctaagccaatcaacttacctaaggaggacagtaagcccacttttccgtggcctcctgggaataagccctccttacacagcgtaaaccaagatcacgatctgaagccactgggacccaaatctgggcccaccccccctacctcggaaaacgagcagaagcaggcctttccaaaattaacaggcgtgaagggcaagttcatgtctgcgagtcaggacctggagccaaaaccacttttccctaaacccgcctttgggcaaaaacctcctttgtcaactgagaactcacatgaggacgagagtccgatgaagaatgtttcctcaagtaaaggtagcccagctcccctcggcgtccgatcgaagtcgggccccctgaagcctgccagagaggattccgaaaacaaggatcatgcaggagagattagttcactaccctttccaggggtcgtgctgaagccagccgcaagccggggcggacccgggctctccaaaaatggtgaagaaaagaaagaggaccggaaaatcgacgctgcgaaaaacacctttcagagtaagattaaccaggaggaactcgcttccggcacccctccagcgagattccccaaggctcctagcaaactgactgttggcggaccatggggacagtcccaagagaaagaaaagggcgataagaatagcgccacacctaaacagaaacccctgcctccgcttttcacattaggtcccccccctccaaaacccaaccgccctcccaacgtggatttgacaaagttccataagactagcagtggcaacagcacttctaaagggcaaaccagctattcaaccaccagtctgcctcccccacctcccagccaccccgcttcgcagcctccgctgcctgcctctcacccttctcagcccccggtgccatctctcccccctcggaatattaaaccgccgttcgacctgaaatcaccggttaatgaggataaccaggacggcgtgactcactctgacggagctggtaatctggacgaagagcaagacagtgaaggagagacctatgaagatattgaggcgtcaaaggagcgagagaagaaaagggagaaagaggaaaagaaacgccttgaacttgagaagaaggagcaaaaagagaaagagaagaaagaacaggagatcaaaaagaaattcaaactgactggtcctattcaggtgatccaccttgcaaaggcttgttgcgacgtcaaaggaggaaaaaacgagttgagttttaagcagggcgaacagatcgaaattatcaggatcacagataatccggagggcaaatggctcggcagaaccgcgagagggtcttacggctatattaagacgacagcggtcgagattgattatgattccctcaagctgaaaaaagactccctcggcgctccgtctcgtcctattgaggatgaccaggaggtctatgacgatgtcgccgagcaggacgatattagcagccattctcagagtggatccggcggcatcttccctcctccaccagacgatgacatttacgatggtattgaagaggaagatgccgacgatggcttccctgctccgcccaaacaactagatatgggagacgaggtgtacgacgacgtcgacacctctgactttccggttagttcagccgagatgtcccagggcaccaacgtgggcaaagcgaaaactgaggagaaggatctgaaaaaactcaagaagcaggagaaggaggaaaaggatttccggaagaagttcaagtacgacggggaaatcagggtcctgtactcgaccaaggttaccacctctatcacgtcgaaaaagtggggcacccgcgacctgcaggtgaagcccggggaatccctggaggtgatccaaaccaccgacgatacgaaggtgctctgtaggaatgaagaaggcaaatacggctacgtcctcaggagctacctcgccgataacgatggagagatctacgatgatatcgctgatggctgtatttacgacaacgattag

SEQ ID NO: 261588 - DNA, 2352 bp, Artificial Sequence
  derived and/or modified sequence
atggcaaaatataatacagggggtaatcccacagaagacgtctccgtgaactcacgaccctttcgtgtaactggtccaaacagctcatccgggattcaggccaggaagaacctgttcaataaccaaggcaacgcctcacctcccgcaggaccgtccaacgtccctaagttcggaagtcccaagcctccagtagcagtgaaaccctccagcgaagaaaagcctgataaagagcctaagccgccatttctcaagccaacaggagctggccagaggtttggaacccccgcttcacttaccacgcgcgaccccgaggctaaagtgggcttcctaaagccagtgggacctaaaccaatcaatctccccaaggaggacagcaaacccaccttcccctggccccctggaaataaaccatctctccattctgtgaaccaagaccatgaccttaaacctctcggacccaagtcaggccctacgccacccacctccgagaatgagcaaaaacaggcattccccaaactgacgggtgtgaaaggaaaatttatgagcgccagccaagatctggagccgaagccacttttccctaagcccgcattcgggcagaagccgccattatccacggagaacagccatgaggacgagtcacccatgaagaatgtgtcttcgtcgaagggaagcccagcgccactgggagtccgctcaaaaagcggcccactgaaacccgcaagggaagattctgagaacaaggaccatgcgggagagatatcttccttaccgttcccaggcgtcgtactgaagcctgccgcttccaggggaggtcccggactgtccaagaatggcgaggagaagaaggaagaccggaagatagatgcggctaagaacacctttcaatcgaagatcaaccaggaggagctcgcttcaggaacgccacctgctcgcttccccaaggctccttctaagctgactgttggcggaccttgggggcagtcccaggagaaagaaaaaggcgataaaaactctgcgactccgaaacaaaagccactcccacctttgtttactctggggcctcctccacccaaacctaatcgaccccctaacgtggacctgacaaaattccacaagacttcttctggaaattctacttcaaaaggacaaaccagttacagtactacgtctctgccgcctccgccacccagccacccggcaagtcagccgcctctgcccgcatcccatccctcgcagccgccagtcccatctctgccaccccgaaacataaagcctccatttgacctgaagagtccagtgaatgaagataaccaggacggcgtcacccattcagacggcgcaggtaatctggacgaggagcaggactccgagggcgaaacctatgaggacatcgaggcttcaaaggaacgcgaaaagaaacgagagaaagaggaaaaaaaacgccttgaactggagaagaaggagcaaaaggagaaggaaaagaaagagcaagagatcaaaaagaaatttaagctgaccggcccaattcaggtgatccatctggcgaaggcatgttgcgacgtgaaggggggtaaaaacgaactctcatttaagcagggggaacagatcgagattatccgtattaccgacaacccggaaggcaagtggctgggacgaaccgctagaggctcctatggttatatcaagacaacagccgtggaaattgattacgattcactgaaactcaaaaaagacagtctgggagcgccaagtcggcctatcgaggatgaccaggaagtgtacgatgatgtcgctgagcaggatgatatttcttctcatagccaatccggctctggcggaatcttcccaccacctcctgacgacgatatatacgatgggattgaggaggaggacgctgacgacggattcccagcaccgcctaagcaactcgacatgggtgacgaggtatatgatgacgttgacacatccgattttccggtgtctagtgctgagatgtcgcaagggaccaatgttggcaaagccaaaacggaagagaaggacctgaagaagctgaaaaagcaggaaaaggaggagaaggactttcgcaagaagttcaagtatgatggggagatccgtgttctgtattccaccaaggtcaccacttctataacttcgaagaagtgggggacacgtgatttgcaagtgaaacccggagagagcctagaggtcatccaaaccaccgacgacacgaaggtgctgtgcaggaatgaagagggaaagtacggctacgttctgcgaagttaccttgcagataacgatggcgagatttacgacgatatcgcagacggctgcatttacgataacgactag

SEQ ID NO: 261589 - DNA, 2352 bp, Artificial Sequence
  derived and/or modified sequence
atggccaagtataatactggcggtaaccctacggaagatgtaagcgtcaactcaagacctttcagggttaccgggccaaacagctctagcggcattcaggctcggaagaatctgtttaacaaccagggaaatgcctctccccctgccggtccgagcaatgtgcctaaattcggatcccctaaaccgccagtagctgtaaaacccagtagtgaagagaaacctgacaaagagccaaaaccgccatttctgaagccaacaggcgcagggcaaaggttcggaactcctgcttcccttaccacaagagaccccgaggctaaagtgggatttctgaaacccgtaggcccaaaacccattaacttaccaaaagaagatagcaaacccacctttccctggccacccggaaacaagccaagcttgcactccgtgaaccaagatcacgatctcaagcccttgggacctaaatctggaccaactccacctacatctgagaacgaacagaaacaagcatttcccaagctgaccggagtgaagggcaaatttatgtcagcatcacaggaccttgagccaaagcccttgtttccgaagcctgcattcggccagaagcctccgctgagtacggagaactctcatgaggatgagtctcctatgaagaacgtctctagctctaaagggtcccctgcccctctgggcgtacgctcaaagagcggcccattgaagccagccagagaggactccgagaacaaagaccacgccggagagatcagcagcctccccttcccaggcgtcgtgttgaagccagccgcatcccggggagggcctggtctcagcaagaacggagaagagaaaaaagaagatagaaagatcgatgccgctaagaatacattccagtctaagattaaccaggaggagctggcttccggcactcctccagcccgtttccccaaggcgcctagtaagcttactgttggaggcccttggggccagagccaggagaaagagaaaggagataaaaactctgccacccccaagcagaagcctctgccaccattgttcactctcggaccaccgccacctaagccaaaccgccctcccaatgtcgatctcacgaagttccacaaaacaagtagcggcaacagcacaagtaaaggccagaccagttatagtacgacgtccctgcctcctccacccccatctcaccccgcatcccaaccaccactgcccgcttcacaccctagccaacctcccgtgccaagtctaccccctcgaaacattaaaccgccatttgacctgaagtcgcctgtgaatgaagacaatcaagatggtgttacacatagcgacggagccggtaacctagacgaagaacaagactccgaaggcgagacctatgaggacatagaggcaagcaaggagcgcgagaagaagcgcgagaaggaggaaaaaaagcggctggaactcgaaaaaaaggagcagaaagaaaaggagaaaaaggaacaggagatcaaaaaaaagttcaaactgaccggccctatccaagtgatacatctagccaaggcttgctgtgatgtcaaggggggtaaaaatgaattgagctttaagcaaggggaacagattgagatcattcgtatcaccgataatccagagggcaaatggctgggtagaacagccaggggctcttacggttatatcaaaacgacggccgtagagatcgactacgactctctcaagctgaaaaaggattccttgggcgcaccctcaaggcctatcgaagatgatcaggaggtgtatgacgacgtggctgagcaggacgacatatccagtcatagtcagtccggatcggggggtattttcccaccacctccggatgacgatatatacgacggcattgaggaagaggacgccgatgacgggtttcctgctccgcctaagcaactggatatgggggatgaggtgtacgatgatgtggacacctccgatttccctgtgtccagcgccgagatgtctcagggaaccaacgtcggcaaggcaaaaaccgaggagaaggatctcaaaaaactgaagaagcaggaaaaagaagaaaaagatttcaggaaaaagtttaagtatgatggggaaatccgggtcctgtacagtacgaaagtcacaacctccataactagtaaaaagtgggggacacgggacttgcaggtgaagccgggagagtcccttgaggtcatacagaccacagatgacacaaaggtcctgtgccggaacgaggagggcaagtacggctacgtcctccggtcttaccttgccgataatgacggggaaatctacgatgacatcgcagacggatgcatctacgacaacgactag

SEQ ID NO: 261590 - protein, 627 aa, Artificial Sequence
  derived and/or modified sequence
MERPEPPPGTAAGQEEQELRERAFFSWAEFSRFFDAWCQQRLALFFVKSSMHLARCRWASAPPLYTLIDVLKYSYVRLVCKDVRAPSRPAVGPPQPGCPAFIIVKLSPLRDRLVVTECQLTHSHPACPLEFAYYFRPGHLLANACLPVRTTNKISKQFVAPADVRRLLSYCKGRDHGVLDALHVLEGLFRTDPEAKVKLVFVEDQAVVETVFFLTSRTRALLRRFPRMLLVDRLPGLQGALDLLAVLCVDGSGRARQAACCVARPGTPSLLRFALASLLQSAPDVKGRVRCLTAGPEVAAQLPAVRQLLPCARVQICRAQGLETLFSKAQELGGAGREDPGLWSRLCRLAGASSPAAYDEALAELHAHGPAAFVDYFERNWEPRRDMWVRFRAFEAARDLDACALVRGHRRRLLRRLSPSRGVAQCLRDLVAMQWADAAGEAVPEGPDGGGPWLEDEPGRGAQGENERVRGLETGDWGGAPKEGSIWRGAQMEKEWARALETRDWGGAQFEGEKGRALQIRDWRGGRLENQKPRGLEGGVLRGSKLEKGHLRGPEIRDWRGPQLEGEKDWGLEGYVWRGSQLEDQALRGLEGYTWRVAQLEDRRSTTDLRGTQFDYERGKGESTEDR

SEQ ID NO: 261591 - DNA, 2277 bp, Artificial Sequence
  derived and/or modified sequence
ggacgccgctccggggcgggtaggcccccaggatggagcggccggagcccccacccggcacggctgcggggcaggaggagcaggagctgcgggagcgggccttcttctcgtgggccgagttcagccgcttcttcgacgcgtggtgccagcagcggctggcgctcttcttcgtcaagagctccatgcacctggcgcgctgccgctgggccagtgcgcccccgctctacacgctcatcgacgtgctcaagtacagctacgtgcggcttgtgtgcaaggacgtgcgtgcgcccagccggcccgccgtggggcctccccagcccggctgccccgccttcatcatcgtcaagctgagcccgctgcgggaccgcctcgtggtgacggagtgccagctgacccactcacacccggcctgcccgctggagttcgcctactacttccgcccgggccacctgctggccaacgcctgcctgccggtgcgcaccaccaacaagatctccaagcagttcgtggccccagccgacgtgcgccgcctgctgtcctactgcaagggccgcgaccacggcgtcctggacgccctgcacgtgctcgagggcctcttccgcaccgaccccgaggccaaggtgaagctggtgttcgtggaggaccaggctgtggtggagacggtgttcttcctgacgtcgcgcaccagggcgctgctgcggcgcttccctcgcatgctgctggtggaccggctgccggggctgcagggcgcgctggatctgctggccgtgctgtgcgtggacggctcgggccgtgcgcgccaggctgcctgctgcgtggcgcgcccgggcacaccgagcctgctgcgcttcgcgctcgcgtcgctgctgcagagcgcgccagacgtcaagggccgcgtgcgctgcctcaccgccgggcccgaggtggcggcgcagttgcctgcagtgcgccagctgctgccctgcgcgcgcgtgcagatctgccgcgcgcagggcctggagacgctcttcagcaaggcgcaggagctgggcggcgccggccgcgaggacccgggcctgtggtcgcgcctgtgccgcctggctggcgcgtcgtcgcccgcagcctacgacgaggcgctggccgagctccacgcccacggcccagccgccttcgtggactacttcgagcgcaactgggagccccgccgcgacatgtgggtccgcttccgcgccttcgaggcggccagagacctggacgcgtgtgccctggtgcgaggccaccgccggcgactgctgcgtcgtctcagcccctcgcgtggcgtggcgcagtgccttcgcgacctggtggccatgcagtgggccgacgcggccggggaggcggtgcccgaggggcccgatggcggggggccttggctggaggatgagccagggaggggagcccagggggagaacgagagggtgaggggcctggagacaggcgactggggaggggctccgaaagaaggaagtatttggaggggagcccagatggagaaggagtgggcaagggcactggaaaccagagactggggcggggctcagttcgaaggtgagaaggggagggcactgcagatcagagattggagagggggtcggttggagaatcagaagccgaggggactggaagggggtgtcttgagagggtcgaagttagagaaagggcacctgagagggccagagattagagactggagggggccccagttggagggtgagaaagattggggactggaaggttatgtctggagggggtcccagttggaggaccaggcgctaagaggattggaagggtatacctggagggtggcccagctggaagatcgcaggagtaccaccgacctgagggggacccagtttgactatgagaggggaaagggagaaagtacagaagacagatgaaggagaggaggtaagcgagaaaaaatggaaaggggagccggaaatggaggagagaggacaagcaaagagacagaaatgaagacatgaggaaaagctgggggaagcaggagaggaagggacgggatgtaggagggggaagaaaaatcggagatgagacaaaagaaatgtgtgggagacgggtagagacgaaatgcaaggggcgtggttttggtttttctccaagacctggagacatcgacccccatcgccttctgaagagagagggagggcgggcactgggggtcaggagagtctccagcaggggaggggaattgtttggactattgttcttcaggattggaataaaacaatcttattttgg

SEQ ID NO: 261592 - DNA, 1884 bp, Artificial Sequence
  derived and/or modified sequence
atggagagacccgagcccccccccggcaccgccgccggccaggaggagcaggagctgagagagagagccttcttcagctgggccgagttcagcagattcttcgacgcctggtgccagcagagactggccctgttcttcgtgaagagcagcatgcacctggccagatgcagatgggccagcgccccccccctgtacaccctgatcgacgtgctgaagtacagctacgtgagactggtgtgcaaggacgtgagagcccccagcagacccgccgtgggccccccccagcccggctgccccgccttcatcatcgtgaagctgagccccctgagagacagactggtggtgaccgagtgccagctgacccacagccaccccgcctgccccctggagttcgcctactacttcagacccggccacctgctggccaacgcctgcctgcccgtgagaaccaccaacaagatcagcaagcagttcgtggcccccgccgacgtgagaagactgctgagctactgcaagggcagagaccacggcgtgctggacgccctgcacgtgctggagggcctgttcagaaccgaccccgaggccaaggtgaagctggtgttcgtggaggaccaggccgtggtggagaccgtgttcttcctgaccagcagaaccagagccctgctgagaagattccccagaatgctgctggtggacagactgcccggcctgcagggcgccctggacctgctggccgtgctgtgcgtggacggcagcggcagagccagacaggccgcctgctgcgtggccagacccggcacccccagcctgctgagattcgccctggccagcctgctgcagagcgcccccgacgtgaagggcagagtgagatgcctgaccgccggccccgaggtggccgcccagctgcccgccgtgagacagctgctgccctgcgccagagtgcagatctgcagagcccagggcctggagaccctgttcagcaaggcccaggagctgggcggcgccggcagagaggaccccggcctgtggagcagactgtgcagactggccggcgccagcagccccgccgcctacgacgaggccctggccgagctgcacgcccacggccccgccgccttcgtggactacttcgagagaaactgggagcccagaagagacatgtgggtgagattcagagccttcgaggccgccagagacctggacgcctgcgccctggtgagaggccacagaagaagactgctgagaagactgagccccagcagaggcgtggcccagtgcctgagagacctggtggccatgcagtgggccgacgccgccggcgaggccgtgcccgagggccccgacggcggcggcccctggctggaggacgagcccggcagaggcgcccagggcgagaacgagagagtgagaggcctggagaccggcgactggggcggcgcccccaaggagggcagcatctggagaggcgcccagatggagaaggagtgggccagagccctggagaccagagactggggcggcgcccagttcgagggcgagaagggcagagccctgcagatcagagactggagaggcggcagactggagaaccagaagcccagaggcctggagggcggcgtgctgagaggcagcaagctggagaagggccacctgagaggccccgagatcagagactggagaggcccccagctggagggcgagaaggactggggcctggagggctacgtgtggagaggcagccagctggaggaccaggccctgagaggcctggagggctacacctggagagtggcccagctggaggacagaagaagcaccaccgacctgagaggcacccagttcgactacgagagaggcaagggcgagagcaccgaggacagatag

SEQ ID NO: 261593 - DNA, 1884 bp, Artificial Sequence
  derived and/or modified sequence
atggaaaggcccgaaccacctcctgggaccgctgccggtcaagaggagcaggagttgagagagcgggcttttttttcctgggcggagttttcacggtttttcgacgcttggtgtcaacagcgactggctctgttcttcgtgaaaagtagcatgcatctcgcccgctgtagatgggcctcagctcctccgttgtacaccttaatcgacgtgctaaagtatagctacgtgaggctggtgtgcaaggacgtcagggcgcctagtcgccctgccgtgggaccaccccagcccggttgcccagctttcatcatagtcaagctgtccccactacgcgatcgcctcgtcgtaacagagtgtcaactgactcatagtcaccctgcgtgcccactcgaatttgcatattatttccgtccaggacacctgctggctaacgcttgcctcccagttcggaccacaaacaagatcagcaagcagtttgttgccccggcagatgtgcgaaggttgttatcttattgcaaggggagggaccatggagtcctggacgcactgcatgtgctggagggtttgttcaggacagaccctgaagcaaaggttaagttggtgttcgtcgaagatcaggcagtggtagagaccgtcttttttctcacctcacgcactcgcgcattgctcaggaggtttccgagaatgctgctggtcgatcggctgccaggtctccaaggggctctggatttgttggccgtactttgcgtggacggtagtggaagagcacgccaagccgcctgttgcgtggctcggccaggaactccaagtttgcttagatttgctttagcgtctctacttcagagtgccccggacgtgaagggcagagtcaggtgcttgacagccgggcccgaagttgctgcccaattgccagccgtccgacaacttctgccctgtgcgcgcgttcagatttgtcgggcccaaggcctggagaccctgttctcaaaagcgcaggagttgggaggggctgggcgagaggatcctggactctggagccgcctctgtagacttgccggggcctcctctcctgcagcttacgatgaggctcttgccgaattgcatgcccacgggccggctgcattcgtggactacttcgaacgcaactgggaacccagacgagacatgtgggttcgcttcagagctttcgaagccgccagggatctggacgcctgcgcattagttagaggtcaccggcggaggctgctgcgtaggctgagcccctctcggggcgtggcgcagtgtctgcgggatctggtcgctatgcagtgggcagatgccgctggagaggccgtcccagaaggacccgacggtgggggaccgtggttagaggacgagcccggacggggtgcacagggagaaaacgaaagggtacgcggcctggagaccggagactggggcggcgctcctaaggagggttcgatttggcgcggcgcccagatggaaaaggagtgggccagagccctggagacacgcgactggggaggagcccaatttgaaggcgagaaggggcgagcgctgcaaattcgcgactggcgcgggggcagactggagaaccagaagccgcgcggcctggagggaggcgttctgagagggtccaaactcgagaaaggtcaccttcggggacccgaaattcgcgattggagaggtccgcaactcgagggagaaaaagactggggtctggagggctacgtgtggcggggatctcagctggaagaccaagccctgcgggggcttgaagggtatacttggcgcgtggcccaactcgaggatcgcagaagcacaacagatctgagaggaactcaattcgactatgagagaggcaagggcgagtcaacagaagatcggtag

SEQ ID NO: 261594 - DNA, 1884 bp, Artificial Sequence
  derived and/or modified sequence
atggagaggcctgagcccccacctggaacagctgctggccaggaggagcaggagctgcgggagcgggccttcttctcctgggccgagttcagccgcttctttgatgcctggtgccagcagaggctggccctcttctttgtgaagagctccatgcacctggcccgctgccgctgggccagcgccccacccctgtacaccctgattgatgtgctgaagtacagctatgtgcggctggtgtgcaaggatgtgcgggcccccagcaggcctgctgtgggccccccccagcccggctgcccagccttcatcatcgtgaagctgagccccctgcgggaccggctggtggtgacagagtgccagctgacccacagccacccagcctgccccctggagtttgcctactacttccggcccggccacctgctggccaatgcctgcctgcctgtgaggaccaccaacaagatcagcaagcagtttgtggccccagcagatgtgcggcggctgctgagctactgcaagggccgggaccacggcgtgctggatgccctgcacgtgctggagggcctcttcagaacagatcctgaggccaaggtgaagctggtgtttgtggaggaccaggccgtggtggagaccgtcttcttcctgaccagcaggacccgggccctgctgcggcgcttccccaggatgctgctggtggaccggctgcccggcctgcagggcgccctggacctgctggccgtgctgtgtgtggatggcagcggccgggcccggcaggccgcctgctgcgtggcccggcccggcacccccagcctgctgcgctttgccctggccagcctgctgcagagcgccccagatgtgaagggccgggtgcgctgcctgacagctggccctgaggtggccgcccagctgcctgctgtgcggcagctgctgccctgtgcccgggtgcagatctgccgggcccagggcctggagaccctcttcagcaaggcccaggagctgggcggggccggccgggaggaccccggcctgtggagccggctgtgccgcctggccggggccagcagccctgctgcctatgatgaggccctggccgagctgcacgcccacggccctgctgcctttgtggactactttgaaagaaactgggagccccggcgggacatgtgggtgcgcttccgggcctttgaggccgcccgggacctggatgcctgtgccctggtgcggggccacagaagaaggctgctgcggcggctgagccccagccggggcgtggcccagtgcctgcgggacctggtggccatgcagtgggcagatgctgctggggaggccgtgcctgagggcccagatggcggcggcccctggctggaggatgagcccggccgcggggcccagggagaaaatgaaagagtgcggggcctggagaccggggactggggcggggcccccaaggagggcagcatctggaggggggcccagatggagaaggagtgggcccgggccctggagacccgggactggggcggggcccagtttgaaggagagaagggccgggccctgcagatccgggactggaggggcggccgcctggagaaccagaagccccggggcctggagggcggcgtgctgcggggcagcaagctggagaagggccacctgcggggccctgagatccgggactggaggggcccccagctggagggggagaaggactggggcctggagggctacgtgtggaggggcagccagctggaggaccaggccctgcggggcctggagggctacacctggagggtggcccagctggaggacagaagaagcaccacagacctgcggggcacccagtttgattatgaaagaggcaagggggagagcacagaagatagatag

SEQ ID NO: 261595 - DNA, 1884 bp, Artificial Sequence
  derived and/or modified sequence
atggagcggcccgagcccccccccggcaccgccgccggccaggaggagcaggagctgagggaacgcgcgtttttctcgtgggcggaattttctcggttcttcgatgcttggtgccagcagcgtctcgctttgttcttcgtaaagagttccatgcacctggcccgctgtagatgggcatccgctcctcccctgtatacgctcatcgacgtcctcaaatatagttacgtccgacttgtgtgtaaagacgttcgtgctccatctcggccggccgtggggccacctcagccaggatgccctgcgttcattatcgtgaagctttccccactcagagataggctcgtagtgacagagtgccagctcacacacagccaccccgcttgccccctcgagttcgcatactatttcaggccaggccacctgctggctaacgcctgccttcccgtgagaactacaaacaagatcagcaagcaattcgtggcgccagcagacgtccggcgcctgcttagttattgcaaaggacgagatcacggcgtactagacgctctgcatgtgctagagggactgtttcgcacagacccagaggcgaaggtcaaacttgtatttgtggaggaccaggcggtggtggagaccgtattctttcttacaagccgcactagggctctgctgagacggtttccacgcatgctgttagtggaccggttgccaggtctgcagggcgcacttgaccttcttgcggtcctgtgtgtggacggcagtggcagagcaaggcaggcggcttgctgcgttgctcggcctggcactccctcgctcctacggtttgccttggcctcgttgttgcagtccgctcctgatgttaagggtcgagtgcggtgtctgaccgctggtcctgaggtagccgcccagttaccagctgtccgtcaattgctcccgtgtgcccgggttcagatatgcagggcacagggactggagacactcttctctaaggctcaggaactcggaggagcgggtagagaggatcctggtctgtggagcagattgtgcagactggcaggcgcttcctctcctgcagcgtatgacgaggctttagccgagctgcatgcccacggtcctgccgcattcgtagattattttgaaaggaattgggagccccgtcgtgacatgtgggtacgattccgcgcttttgaagctgccagagatctggatgcatgtgctctggtacgtggacaccggcggaggctgttgcgcaggctgagccctagcagaggggtcgctcagtgcttgagggacctggtagcgatgcaatgggccgacgctgccggcgaggcagttcccgagggcccagatggtgggggcccatggctggaggatgagccaggccggggggctcagggtgagaatgagcgcgttcgcgggcttgaaacgggagactggggcggtgctccaaaagaaggctctatctggaggggggcccagatggagaaggagtgggcaagagcccttgaaacaagagattggggtggtgcccagttcgagggggaaaaggggagagcattgcagattcgggattggcgcggcggccgcctcgagaaccagaaaccacgcggcttagagggaggggtccttagggggtctaagctggaaaagggccatttgagagggcccgagatcagggactggcggggaccccaactggagggagaaaaagactggggcctagagggttatgtgtggcgcggctctcagctggaagatcaggctctccgtgggttggaaggctacacttggcgggtggctcagttggaggatcggcggtctacgacagacctgaggggtacacagttcgactatgagcgggggaaaggtgagagtaccgaagaccgatag

SEQ ID NO: 261596 - DNA, 1884 bp, Artificial Sequence
  derived and/or modified sequence
atggagcggcctgaaccccctcccggtactgccgcaggtcaggaggagcaagagctgagagaaagagcgttcttctcctgggccgaatttagcagatttttcgatgcctggtgtcagcagcgcttggccctgttcttcgttaagtccagtatgcacttggctcgctgtaggtgggcctctgctccaccactgtatacgctgatagatgtgctcaaatatagctacgtcaggctggtgtgtaaggacgtccgcgcaccctcgcgaccagccgtcggccctcctcagcctggctgccctgcatttataatcgtgaagctgtcccccctgcgggataggctcgtggtgacagagtgccagctgacgcattctcatccggcatgccctctggagttcgcatattactttcgtcccggtcacctgctggcgaatgcatgcctgcccgttagaacaacgaataaaatcagcaaacagttcgtggctccagccgacgttcgtaggctgctgagctactgtaaagggcgtgatcatggggtactggacgcccttcacgtgctagagggtctgttcagaaccgatcctgaggccaaggtcaagctggtctttgttgaggatcaggctgtggtcgaaacagttttcttcctgacgtcaagaactcgggctcttttgcggaggttccctaggatgcttctggtcgaccgcctgccaggactgcaaggagcactggatcttctggcagttctttgtgtcgacggaagtgggagggctagacaggcagcctgttgcgttgctcgccctgggacgccatcactcttgcgctttgccctggccagtttactgcagagtgccccagatgtcaaagggagagtgcgctgcctaaccgccggtcccgaggtggccgctcaattaccagccgtcagacagctcctgccctgtgctagggtgcagatttgccgggctcagggcctggagaccctgtttagcaaggcccaggaactcgggggagcagggagagaagacccaggcctgtggagcaggctctgccgcttggccggagcgtcctcccccgcagcttatgacgaggccctcgccgagttgcacgcccacggccctgccgcttttgtcgactactttgagcgaaattgggagcccaggcgagatatgtgggtccgctttcgagcttttgaagcggcaagggatctggatgcctgtgccttggtcagaggtcatcgcagacgccttttaagaagactttcacctagtaggggtgtggcacagtgtctacgagatcttgtcgcgatgcaatgggctgacgccgctggggaggctgttccggaaggtcctgatgggggagggccatggctggaagatgaaccagggagaggggctcagggggagaatgagagggtccggggactggagacaggtgactggggcggagctcctaaagagggctccatttggagaggcgcacagatggagaaagaatgggccagagcactcgagacaagggattgggggggagcccagtttgagggagaaaagggcagagctctgcagatccgcgactggaggggcggacggctggaaaatcagaagccaagggggctggaaggcggtgtgctaaggggctccaagctggaaaagggacatctaaggggtcccgaaatacgagattggcggggaccacaactcgagggggagaaggattggggcctcgaaggttacgtgtggcggggatcacaattggaggatcaagcattgaggggtctcgagggctatacttggagagtcgcgcaactcgaggataggcggagcaccactgacctgcgaggcacccagttcgactacgagcgaggcaagggtgaatcaactgaggatagatag

SEQ ID NO: 261597 - protein, 160 aa, Artificial Sequence
  derived and/or modified sequence
MDKLKKVLSGQDTEDRSGLSEVVEASSLSWSTRIKGFIACFAIGILCSLLGTVLLWVPRKGLHLFAVFYTFGNIASIGSTIFLMGPVKQLKRMFEPTRLIATIMVLLCFALTLCSAFWWHNKGLALIFCILQSLALTWYSLSFIPFARDAVKKCFAVCLA

SEQ ID NO: 261598 - protein, 108 aa, Artificial Sequence
  derived and/or modified sequence
MDKLKKVLSGQDTEDRSGLSEVVEASSLSWSTRIKGFIACFAIGILCSLLGTVLLWVPRKGLHLFAVFYTFGNIASIGSCVLHLPCVLPFGGITRDLHLSSAFCSLWH

SEQ ID NO: 261599 - DNA, 483 bp, Artificial Sequence
  derived and/or modified sequence
atggacaagctgaagaaggtgctgagcggccaggacaccgaggacagaagcggcctgagcgaggtggtggaggccagcagcctgagctggagcaccagaatcaagggcttcatcgcctgcttcgccatcggcatcctgtgcagcctgctgggcaccgtgctgctgtgggtgcccagaaagggcctgcacctgttcgccgtgttctacaccttcggcaacatcgccagcatcggcagcaccatcttcctgatgggccccgtgaagcagctgaagagaatgttcgagcccaccagactgatcgccaccatcatggtgctgctgtgcttcgccctgaccctgtgcagcgccttctggtggcacaacaagggcctggccctgatcttctgcatcctgcagagcctggccctgacctggtacagcctgagcttcatccccttcgccagagacgccgtgaagaagtgcttcgccgtgtgcctggcctag

SEQ ID NO: 261600 - DNA, 327 bp, Artificial Sequence
  derived and/or modified sequence
atggacaagctgaagaaggtgctgagcggccaggacaccgaggacagaagcggcctgagcgaggtggtggaggccagcagcctgagctggagcaccagaatcaagggcttcatcgcctgcttcgccatcggcatcctgtgcagcctgctgggcaccgtgctgctgtgggtgcccagaaagggcctgcacctgttcgccgtgttctacaccttcggcaacatcgccagcatcggcagctgcgtgctgcacctgccctgcgtgctgcccttcggcggcatcaccagagacctgcacctgagcagcgccttctgcagcctgtggcactag

SEQ ID NO: 261601 - DNA, 483 bp, Artificial Sequence
  derived and/or modified sequence
atggacaagctaaagaaggtcctttccggccaagacaccgaagaccgctctggcttgtccgaggtcgtggaggcctcttcactctcatggtcaacacggatcaaggggtttatagcttgttttgccatcggaattctgtgttccctgctgggcactgtgctgctctgggttcctcggaagggtttgcacctctttgcggttttctataccttcgggaacatcgcatccatcggcagtacgatattcctcatggggcctgtcaagcagctgaagcggatgtttgagcccacaagactaatagcaacaatcatggtgctcctgtgctttgcgctaacgttgtgctccgccttctggtggcacaataaagggctggccctgatattctgcattctgcaaagccttgccctgacctggtattcactgtctttcattccattcgccagggatgcagtcaagaagtgcttcgctgtgtgtctcgcctag

SEQ ID NO: 261602 - DNA, 327 bp, Artificial Sequence
  derived and/or modified sequence
atggacaagctgaaaaaagtgttgtccggtcaggatactgaggaccgttctggtctgagtgaagtggtcgaggcctcttctctgagttggtcaacccggatcaaagggtttatagcatgcttcgctattgggatactttgttcgctgctcgggaccgtcctgctgtgggtgccccgaaaggggcttcacctgttcgcagtgttctacacattcggcaatatcgccagtattggatcttgtgtgctgcaccttccatgcgtgctgccgtttggcggaatcacgagagatctccacctgtcctctgctttttgttccctgtggcactag

SEQ ID NO: 261603 - DNA, 327 bp, Artificial Sequence
  derived and/or modified sequence
atggataagttaaaaaaagtcctcagcggacaggacacagaagatagaagtgggctctcggaggtggttgaggcttcaagcctgtcctggagcacccgcatcaaaggcttcattgcttgtttcgctatcgggatcctatgttctctgctgggtacagtcctcctttgggtgcctaggaaaggtttgcacctgttcgccgtcttttatacattcggcaatattgccagtatcggtagctgcgttttgcatctgccctgcgttctgcccttcgggggtatcactcgggatctacatctgtcatcagcgttctgcagtctatggcactag

SEQ ID NO: 261604 - DNA, 483 bp, Artificial Sequence
  derived and/or modified sequence
atggacaagctgaagaaggtgctgagcggccaggacacagaggacagaagtggcctgtctgaggtggtggaggccagcagcctgtcctggagcacccgcatcaagggcttcatcgcctgctttgccatcggcatcctgtgcagcctgctgggcaccgtgctgctgtgggtgcccaggaagggcctgcacctgtttgctgtgttctacacctttggaaacatcgccagcatcggcagcaccatcttcctgatgggccctgtgaagcagctgaagaggatgtttgagcccaccaggctcatcgccaccatcatggtgctgctgtgctttgccctgaccctgtgcagcgccttctggtggcacaacaagggcctggccctgatcttctgcatcctgcagagcctggccctgacctggtacagcctgtccttcatcccctttgccagagatgctgtgaagaagtgctttgctgtgtgcctggcctag

SEQ ID NO: 261605 - DNA, 327 bp, Artificial Sequence
  derived and/or modified sequence
atggacaagctgaagaaggtgctgagcggccaggacacagaggacagaagtggcctgtctgaggtggtggaggccagcagcctgtcctggagcacccgcatcaagggcttcatcgcctgctttgccatcggcatcctgtgcagcctgctgggcaccgtgctgctgtgggtgcccaggaagggcctgcacctgtttgctgtgttctacacctttggaaacatcgccagcatcggcagctgtgtgctgcacctgccctgtgtgctgccctttggaggcatcacccgggacctgcacctgagcagcgccttctgcagcctgtggcactag
